United States Patent Application Publication US 2019/0348154 A1 - sequence listing, part 134

SEQ ID NO: 508737 - DNA, 2163 bp, Stenotrophomonas maltophilia
atgtcgagcatcgctttggccctgatagggctcaataccattgtttccgcagtgaactacgagtatgacgagctgggacggcttgtagccgagcgaaccgatcaagggcggaacatccgttacgcctacgatctggaggatcgtctgatccagacgaccgattcacagaatcgtgtgacgaagttttcctatgatcctcgtggacgccttctggttcagaccgacgccaatggaggaacgacgcgccttgcctatgacaagggagatcgtctcacctccgtcatcgatcctcgtggattgacaacgacctatcaaacggacggattcgggcaactatgggcgcagaacagccccgatacggggcgaaccgaccatgagtacagcgcggccggtcagcggatcgcgacagtgcgcagcgatggtagttcgattggctatggctatgatggtctcggccgtttgatttcccagaatgcggaaggtcagcaacagacctacgcctatgacaactgcctcaatggcaaggggcggctgtgctcgcatgccgcaccgggtaccagtgctcgattcacttactccccgcagggacaactggtgagccgaacggaccagaccgggctggcaggcaaggtcagcgaaagtacggtcagctatacgtacgacggcatcggaaggaacagcaccattacctatcccgatggagccgttgccaagtacgtctacagcagccttggctacccgtactcactttcactgaccaagggcgccgtgacccaagagatcatcggtgcgagcgaatacaccgcactcggcacgcttcaacgcatgccctatggcaacggactggtgcagagttacgcactggatgcgtccggcaggttggaggccaaggccgtgcgcaaccagcagaccaccgcgttgagccgcacttcgtatcgctacaacggtgacaatgagatcgttgggatcagtgacgatgtgaccgctaacctcagccagacactgggctatgacggcctggggcggttgagcacgctggcgcgctctggtgttacctatacgctcagccacgacgcgggtgggaactacactgcgctcaatgccgcgacggaagcaacgcgctatgccattgatgcgaagagcaaccgcatgctggagttcaccaaccaggatggaacccgcacctatcagtatgatgcgctcggaaaccgcatcagcgaaacgtccggtagtcgcgtctccaccttcacctatggtccattcaaccgcatggtgcagagcagtgttggtgggcagcgtacggactatctgctcaatgcgcagggccagcgcgtgggtaagagcggcgcaagctcagccagccgctttttctacgctggacagaaccagctgctgtccgagcagacgggaacaacctggacgaactatctgtggttcgggggcgagctggtcggtatcgaccgcaatggcgcggtcagtttcgtgcacaacgaccaccttggccgacctgagtatgcgaccaacaaggcccagcaggtggtgtggaaggcgtacaactacgcatacggtcgcagcgttctgaaggacgaaatcggcggcctgaacatcggtttcccggggcagtactacgatggtgaaagtgggctctggtacaacggattccgcgactacgacgcgagtgcgggacggtatgtgcagagtgatccgattgggttggcgggggggatgaatacgtactcctacgttgcgggaaatccagttagctacattgatccgctcggattggcccctgcttcgggtgcgatggcggattgcttggagatgatatttggccagtcagttgcaaaggtaaatatccgcaacaaggctgttgttaagaatgacttcgtcacaactcgtaagaactcgattaggcttccatcgtctgtttctacagaggatttcttcgccgaccatagtttggttctacatgagtactatcatgtgcttcagcagtggaacactggtgagttgacgcgagccggctatcttgctgaggtagcgcgctccagatcgtgggagcaaggcaacaggtttgaggatgcagcgatagctttttccaagagccatgcccaggctctgaaggaatgcctgcagcagcagaccgaggaatgtgccgaatga

SEQ ID NO: 508738 - DNA, 6636 bp, Stenotrophomonas maltophilia
atgagcagtctgcgcgatgcgatgagccacgcagcgctgggctgggtcaagcccgagctggacgagaccctgcgccaggtgcgcaacgaggtcgagtactacgcggaagacccgaccgatgccagccgcatgcgcatctgcgccggcttcctgcaccaggtgcagggcaccctgcgcatggtcgagctgtacgccccggcgatggtggccgaggagctggagcagctggccaatgccatcggtgccggtggcgtggccgatcgcgatgaagcctgcgcgaccctgatgcgcggcagcgtgctgctgcccgattacctggagcgcctgcagaacggtcaccgcgacattccgatcgtgctgatgccgctgctcaacgaaatccgtgccgcgcggggcgaagaaggggtgcatgacagcgtgctgctggcgttcgcgccggacagcgtcagcgccaccgaggccgagctggaccatgcccgtggcagcctgagcgggcgcaaccgcgagctgctggataccgtgggcagcgcggtgaaggaagaactgctgcgcatcaaggatgcgctggacctgcacctgcgtactggcggtgcgcccgaacagctgcagacccaggccaacgaacttggcgccgtggccgatacgctgggcatgatgggcctgggcgtggcccgtggcgtggtcgtgcagcagcgcgatgcgctgcgtggcgtggtcgaaggccgccagcagatcgacgagaacctgctgctggatatcgccggcgcattgctctacgtggacgcgtcgctggacgaccaggtcgcccatctgggtgccggtggcagtggcgaagatgatccgagcgcggtcgagaaccggcgcacggtggaggtgctggcacatgaggccatcgccaacttcgccgccgcccgtgagcattttgtcgctttcattgaaaccagctggaaccatgccgagctgcaggacgtgccgcgcctgctgggcgatgtttccggcgcgctgcgcatgctggatctgggcacggctgccgattacctgcgcggtgtgcagcagtacatcgaagccgagctgatcggtcgccagcgcgtgcccagtggccgccagctggacaccctggccgacgccatggccagcctggagtattacctcgaagccctgcgcgaccgtcggccggggcgcgaggacatcctcgacatcacccgcagcagccttgaagcgctgcgctattggccgttgccggagcgcaacgcggcggaacctgttgcagccgcgccgattgcgtttgcgtcgctgctgatcgagcgcgagccggtcacgctgcaggccgagccgctgcagccggagcacatcgagattccggtgcagccggccgcgcctgccgcgggcacggtgccggtaccgctgccggactttaccttcgacccgccaccggccacgcctgcaccggacgtggtggacaacagcctgatgtttggtgcgctggggactggtgcgtccgcaccgctgtcgctgcatgacgacgcggatgcaccgctggtgtttgcggcttcgagcgcgcctgcgcccgaggtgccgcagtgggatctcgcgccgttccatccggaagctgatccgctcgcgcctgccgacgagcgcagcccgacctttgccagcttcgatccggtcagtttcgaacaggccgacgcggggcagggcgctgcaacacactggacgctgtcggaagcaacgcctccggcaccggcggatgaagtcgcgctggacgccgacgaaggcgcagttgcgacgacaagcatcgacgccgatgcgtatgccgcgccggtgtttgatccggtggccgccgagcacgaggctgctccggcgagtggcgacgtggtgttccgcttcgacgccgacgcgctggacaacgctgacgatgtgctgtcgctgcatgcgatggagacgctgacgctggacgacgatgccgtgctgcatccgtcgctggagatcgtcgatgccggcgcgccaacgatggaggacgagaatcctgttgccgtcgaaatgggcaccgctcctgcggatgcaccgattgacacgccggcacccggtgccgatgcgccgacgcctgtggcggatgcacctgcggtgtcggtgatcgacatcgacaccatcgcgccgatcgacttcagcgaagccgacgcgcagttctttgccgagctgagcgcggcggctgcggacttcaatccgcaggcaacggccgcaccgaccgtcgtcgaagcgccagtcgcggtggatgccgaggtgggctttgaagcgggcttcgatgatgacgctgagaacatcgacgaggacatccgtgaggtgttcctggaagagttcgatgacgaactggccaacctcggtaccttgctgccggcatggcgcatgcagccggacaacatggaccggctgcggccgatccgccgcatcttccacaccctcaagggcagtggccgcctggtcggtgcccgcaccctgggtgagttcgcgtggaagatcgagggcatgctcaatcgcgtgctggacggtagccgtccggcctcgccggccgtgctggccatggtcgacaacgcgcacgcggcgttgccgcagctgaacgcagcacttcgccacggccagcgcatcagcgtggacctgcaggcgatgcaggccatcgccgaccgtgtcggcgctggtgaggaaacctactacgtaccgttgccggttgcggtcgcacctgcgacaccggtggtggaggccgggagcgaaggcgaggacgacatcagccgcatcctcgaggccgaagccatcgcgtcggtgcaggccgaagccgagccggtgcccgaggccgtgggcacgccagccaatatcgacagcgtgctgcgcgagatcctcgaagccgaagtggaagtccaccaggccaccctgcaggactggctgcgttcggcgcagcaggcaccgcagccggtcagcgacgcgctgctgcgcgcggtgcacaccatgaacggcgccttcgcgatgaccgaagtgccggaaatcactgccgtcaccggcggtgccgagtcctacatcaagcgtgcactggctgcagacgtggtgcctggtgacgaaggcgtagccgcactgggggcgactgcgcaggcgatcaccgcgaccatggaagcgctgcaggccgagcagccgcgcattgttccgcaggaagcgctggtgcagcgcctgcaggcgctggccggcgaactgccggaagcgcgctggccgatggtcgggctggaggacgaggacgacgagctggcgctggagaccgatccggagttcgatgccgctgtcgacacgccggatgcctccgcgttcgagccgaccgggtctgggatcgagcctgccgagccggtgctggaaccgattgcagccggcgcgcaggtgccggaaaccacggacgtgatcgacaccggtctcgacgtcggtgaactgaccggcagcgatgatctttcgcgctacttcgatgccggatggccgtcggtgccgggcgaggacgaagccgccaccgtggataccggatcgcctgaatcgatccagccggttgaaagtgatccggttgttgcgccggccgaagtggaggctgcaccgacgccggccgccgaagccgaactgactgccgcggacgacctgtcgccgtacctcgacgccagcgcattgccggtggacgaccgcgacacggatgagctgcctgcgcctgcagaaactgacgcgatcgacctgaatacgcagcagcccgcaggcctgggcgatgtcgatggcaacgacttcgacgtcactgctgcactgccactcgacagcgagctgtcgagcctgcaggatgaaatggctgcgccgggttttgcagaaccggtcacgctggcagccgcgctcgaggccggcctgcacgtgatcgacgaagagcagaccctggacgacgacgggcaatggcccgtgctcggcctccaggccagcgaactcgcgccgggcgaggcggaagcctttgccgaggatgcggacgtcggcggggaggcggcgatcggtgaaggagagagcgccgatcagccgtccccggcgacggtgaatgaggaggtcgcagcggacgcactgcaggcctccggcggcccggtgcgcttcttcgaactcgaagacgcaccggggcggggcacggtccatgccgatgccgagcctgtcgagtccgaagccgccgccaacctgccggccgacgatggagccgccgctctggaagacagcgccgatggcgttgatgcgctcgatttcagcgtgtacgaccgcgaactggtcgatatcttcgtcgaggaaggcaaggacctgctggatcattgcgatggcctgatcagcgaactgcgcgatgcgccgcaggaccgcgaggtactggccggcctgcagcgtgatctgcacaccctgaagggtggcgcacgcatggctggcatcaacgccatcggcgaccttggccacagcatcgaatcgctgctggaggccgtggccgcgggccgtaccgagatcgagcgccgcgacgtgcagttgctggagcgtgggttcgatcgcctgcaccagctgctcacccgcaccggcgcgcaccgcgtggtggagccggcgcaggatctggtcgaagcctttgaagtccgcaccaccaccgatatcgcggcggccgtggcggccgcgcacggggccagtgtggtcgaggcggctccggcgcagaccgtcagcccatcgactgccctggtcgatatcccgctgtcggcaccgctgccggccgagggcgtggtcgatgaagatccgctggcgcgtccgcagcaggagcaggtgcgcgtgcgcgccgatctgctcgaccgcctggtcaaccatgccggtgaagtggcgatctaccgctcgcgcctggaacagcagctgggtgccttccgtggcgccatgggcgaactggaacgcaccaatgcgcgactgcgcgaccagctgcgccgcctcgacctggaaaccgaggcgcagatcgtcgcccgctaccagcgcgaacaggaccaggccgaccagaagttcgatccgctggaactggaccgcttctccaccctgcagcagctcagccgtgcgctgaacgagtcggcggccgacctggggggcctgcagggcgtgctggacgatctgtcgcgccagtacgattcgctgctgcagcagcagtcgcgcgtcagctccgagctgcaggatggcctgatgcgtgcgcgcatggtgccgttcgatggtctggtgccgcgcctgcgccgcgtggtccgccagtccggcatggataccggcaagcaggtccacctgaccctggaaggcacccacggcgaactggaccgcaacgtcctcgaccgcatggtcgcgccgctggaacacatgctacgcaactccgtggcccatggcctggaagcgccggaacagcgtcgcgccgccggcaagccggaggaaggcgagatcgccatccgcctgcaccgcgaaggttcggaaatcgtgctggaagtggccgatgacggcgctggcctggatcgcgaagcgatccgccgccgcgccatcgaccggggcctgctggcggccgacgcacaaccgaacgagcaggagctggacaacctgatcttcgcttccggcttcacgaccgccgaccaggtcagccagctggccggccgtggcgtgggcatggacgtagtgcgaaacgaagtgcgccagctcggtggctcggtcgacatccagtcggtgcggggccagggcgtgcgcttcaccctgcgcctgccgcagacgctggcggtcacccaggcggtgttcgtacagatcggcgagaccacctttgcagtgccggtcgcctcggtcagtggtatcggccgcctgtcgcgcgagcgtttcgaagccgccgacagcagctaccgctacagcggcgaggactatccgctgtacgacctcggcagtctggtaggtcaggccccggcgcgtgccgatggccaggaccaggtgccgctgctgctggtccgcgccggtgatctgcgtgccgccgtggcgatcgaccaggtgctgggcaaccgcgaaatcgtggtcaagccggtcggcctgcagatcgcatcggtgccgggcatctacggcgccaccatcaccggcgatggtcgcgtggtggtgatcctggacgtggcgccgctggtgcgccgcttcctcgccaacccgaccttgcccgtgctggccaatgcgcctcgccaggagcgccaggtgccgctggtgatggtggtcgacgactcgctgaccatgcgcaaggtcaccggccgcatcctcgaacgccacaacttcgaggtcagcgtcgcccgcgatggcgtggaagcgctggaacgcctggaagagcgcgtgcccgacctgatgctgctggatatcgagatgccgcgcatggatggctacgagctcgccaccgcgatgcgtgccgacccgcgctacaaggatgtgccgatcgtgatgatcacttcgcgcagcggcgacaaacaccgccagcgcgccttcgagatcggcgtccagcgttacctgggcaagccgtaccaggaactggacctgatgcgtaacgtgtacgacctgctggggatcgcccgtgtccgtgagtga

SEQ ID NO: 508739 - DNA, 231 bp, Stenotrophomonas maltophilia
atgaaagtctggagcccggttgcgctgcgggcgtatgccccggcaatggtcggctggtgcctggcgctggccgccagcctgcgcctggaagaagtgcgcgacgatctgcacgcgcaggcgttgctgccggtcctgcagggcggtgccatcgccctgctggtgttcacgctgtcctgtatcggcggcgccagtctcgtgttgtggcgagcaggcaggaagggcgcaggatga

SEQ ID NO: 508740 - DNA, 1089 bp, Stenotrophomonas maltophilia
atgcttgcacgcttggccagctacctcttcctgggactgtgcagtaccggtgccctggctgccgatgccgcctatcggccgtccttccatcccgaccagctgaagggtccgcctgccggtcgcccaaacgaggtcctggtgctgggcagcccgcacctgtccagcctgccgaagaccttcaagccagcaatgctggagcccctgctgcagcgactgcaggcctggcagccaacggtgatcgcggtggagaacctgtccggcctgcagtgcgacttcatgcgccgcaatccaggccgctacgccggaagtgtcgaggactactgcgtcgatccagcaccggcgcaggccgcgaccggcctggacgttcccagcgccaatgccgagatggaacgcctgcttgcggactggccgagcgaacccagcgccgcccagcggcgccgattggccgcggttttcctcgctgcgggcgagaacggttcggccgtcgtgcagtggctgcggttgcccagtgaagagcgtcgtgtcggtgacagcctgacccctgaactggtgcgctacctcgacacccgcatggccaagccgaacgaagtgggcatggtcgcaggcgtactggccgcacggctgggcctggaacggctgtggtcggtcgacgaccacaccgcggattcgcccacgccggcatcccggaagaaggcctacgctgccgccatcagggccgcctgggacaatcccttcgtcgagacgcgaatggccgctgacgagcaactcgaagccaatctcgacaaacccgaggggctgctcgagatgtatcgcgcgtacaacagcgcggacgccgcgatgatggcctacaacagcgacttcggtgcgaccctggtcgagccgtcgccggagggcttcggccgcaactacgtgggctactgggaaacccgcaacctgcgcatggtcgccaacatgcgcgacgtactcgggcaacagccgggtgcgcgcatgctgaccatcgtcggcgcctcgcacaagggctactacgaggcgtacctcaacctgatgcacgacgtgcagctggtcagttcggatgaagtgctgcgttga

SEQ ID NO: 508741 - DNA, 585 bp, Stenotrophomonas maltophilia
atgagcgaggctggatgcaatgaaatcgtggtgcaggacatgacctcaggcaaccgggtgatcgaaagtgcgaggttgtgcctgcggcctttcacggcggaggatgccgatgaggtgttcgcagcgatcacgccggggctgacacgctacatggccttcgagccgccgccgtcggagcaggccttcactgcggtctggcaggcgtggttgcccaccatcgccgaggggacggacatcacctttgtcatccgccgacgtgacgatggcgccttccttggtctggccggcctgcatcgaaccatggacgccgaaccagaactcggcatctggatcgatgaagcgatgcatggccagggctacggccgggaagccgtggcggcggtgtggtcgtgggcttccgggcgcctgcgatgcgcggcattccgctatccggtggccgagcagaacgcgccgagccggcgtctggccgaatccctggggggcgtgcccgtcgcgcgtgagcaggaagtgaagtacacggcaatcgtctatcgcattcctgcgcgcatgcatggagttgcgacggacgtcgcggaatcccgctaa

SEQ ID NO: 508742 - DNA, 546 bp, Stenotrophomonas maltophilia
atgcctgcctcgcgcctgccgtcacttccagacaccctgcccgcacgcctgcgcgccctgcgggtggatgatgcggttgcatggtcccgctacctctctctaccaggcgtgatcgaacacacgagctggggcgacatctccgaagctgcattgcgccagcaggtcgccagctaccgacctgcgtcccccgacccgcgctgggcgctggtggatgcccacgatcgcttgatcggcaccttcggcctgaacggaatcgatctccagcatggccgcggcgagctggcctatgacctggacccgcactggcagggacaggggctggccacgcaggcggcgcgcgcggtgctcgactggggccatgcggtacggtcgctgacgcgcatccaggcgaccgtcctggacagcaacgcccgctcgatcgccgtgctggaacgcctcggcatgcagcgcgaagggctgctgtgcgcctatcgcaaggtgcagggccatccccggaacttctggatgtacgcccaccttgaaggcaccgtcgcgtcacccctttga

SEQ ID NO: 508743 - DNA, 780 bp, Stenotrophomonas maltophilia
atgccggtagtgttgatcctcgtttgcatgttgctggccatggctgttgcccgtctatggccacgcaggaaaggcgaagcgccgctgccatcggcagcaagcatggtgttggacatgctgttgatcggcctgttgtgtggccgcatcagttttgtcgccctgaacttcgcgctctaccgcgaggcgccctggggcattctgcagatcgccgacggcggctatcacctggcggtggtgctggtggcaggtctggcctgggggttgtggcgcttgcggcggtggcctgcgctgcgtgcgccggtgctggccagcgctctgattggcgtgctgctctgggcgggtggtggcctgctgctgtcggcctggcaggagcggcagatgccgttgccggcgctgcaggtggcggaccttcaaggcgatcgtatcgatctgcagcagttccgcggcaagccgctggtgctgaatctgtgggccacatggtgcgggccctgccgccgtgagatgccggtgctggcggcggcacaacaggcacatgatgacgtgcagttcgtattcctcaaccagggcgaaaccctggaggaggtccagggtttccttgccagcgaacgactgatgctgggcaacgtgttgctggatgatgacgctgccgcttcaaccgtgctcggcgtgcaggcgtatccttccacgctctttttcggtgccgatgggcgcctgcgtgaactgcacctgggcgaactgactgcggccggccttgaacacaaactgcgccggctgcggtag

SEQ ID NO: 508744 - DNA, 642 bp, Stenotrophomonas maltophilia
atggccgatgaactgccgctgctgctggccagcgagccgctgacgctgcttggctcgcgtgcgctgtactggcccgcacggcaggcactgctgatcgccgacctgcacctgggcaaggccgatgtgttccgtcgttccggcatcgcgctgcccggtggcggcacccgcggcgacctgcagcgcctgcagtcactgctggatgcgcacacctctcgcgaactctggatcctgggcgacatcctgcatgggccggtccatcgcgccgcgtggtaccagcagtggctggcatggcgcgaacgcaatgccacgttggatgtgcatgtgctgcacggcaatcacgaccggcagctaccgcatgcgcagctgcaggtacagatccacgatgaggtacgactgccgccgttcctgcttcgccatgagccgatgcccgatgcggcattgcacgtgatcgcaggtcatctgcatccgcagatcgccttgccaccgttgcggcgacgcttccctgcattctggttgcgcgagcgcacgatgatcctgccggcgttctccacgttcaccgctggaatcgtgcctgcacctgcccacggcgagcggatgatcgcgtgtgtggaggggggcctggtggaactgcccgtgcgttga

SEQ ID NO: 508745 - DNA, 3066 bp, Stenotrophomonas maltophilia
atgtctctgtaccgctcacccagccgtcacccactgactgccgccctggtggcagggctgcttgcagccgcctcgatgcccgccatggcacaggaagctggcaccaaccctgtggaccttgacaaggtcaccgtgaccggctcgcgcatcgcgcgtaccggcttcgtgaccccctcgccggtcacggccatcaccgccgaagaaatccgcaccacaggtgcgtcgaacatcggcgacctgatgaacaagatgccgcagctgaccccgagctactcactcggcaactcgacccgcttcatcggcactgctggcctgggcctgatggatctgcgcggcatgggcccgtcgcgcaccctggtgctggtcaatggccgccgccatgtcggtgccagcccgggctccacctccgttgacgtcaacaccattccggtggagtggatcgagcgcgtggaagtgatcaccggcggtgcctcggccgtgtacggcgccgacgcagttgctggtgtggtcaacttcatcatgaagaagtcattcgatggctacgagttccgtggccagaccggcaaggccgacgaaggcagcttcgatcgccgttttgccagtttctcggcaggcaagccgttcgctgacggccgcggtaacgcggcgatcgcaatggagtacagcacccagggccgctttggccgtggtgaccgcgagatcggccgtcgttatgaagtctctgtgccgaatcccaacttcgatccgacgcgtccgccgagcgaaagcaatccgcagaccgtgctgagccgtccgggtggcaaccactccacgtcctacggcggcaccatggacctcggccagatcaccatctcgccgactggcacccgcaccattgccttcaatccagccacccgctacctgttcaacaatgacggctcgttccgtcgcaatcgctacgatggcaccatcgtcagcgcgagcagctgcgtggactgcgacttcaccgacctcaatgcagtggccgacctgcagccgtcgtttgatcgcttcagcttcaatacgatcgtcaatttcgatctgaatgatgatcatcgcttcttcttcgaaggcaagtacaccaagaccgagtcggagttcttcggtcagccggccttcgacaccggcctgcgcctgcgtcgcgacaatgcctacatttccaacgagctgggcgccattctcgatgcgcgcaccgtgcgcgtgcagaaccgcgatggcaccagcaccgtccgtgccgtgtcgcgcgacccgaacgtagctgaaagcaatctggtgatgaatcgcttcaacgtcgacgctggccgtcgtggcgagaagatcgaacgccagaccagccgcgtggtgttcggcctggaaggcaatctgggcgaaagctggacgtatgaaacgtcggccaacttcggccagaccaccatcgaccgcgtcaacctgaacaaccgcatcaccgagcgctggcacgctggcatggacgttgcgcgcgatgccagcggcaagctggtctgccgcgcgtcgctggaccccaatgcgatcaacccgaacaccgggcagcgctacaaccaggctctgatcgcaggctgcgtcccgttcagcgtgttcggcaacggtgccatcccggctgacgctgcagcatggttcaacacatcttcgctcaaccagtcgaagctgaagcagcaggtgttcagcgcctcggtggcgaacagctccctgttctcgctgccggcgggtgacgtcggcttcgcgggtggcgtggagtaccgcaaggaacagagccaggaaaacaccgacgctctttccgcgctgggcctgaccttcctcaacgcgatcccgagccgcggtggcgaatacagtgtgcgtgaagtcttcgccgaaaccaccgtcccgctgttggccgacctgccactgatccgccgcttgaacctggatctcgccggccgctggtcggactacagctccgtcggcgacaccaagacctggaacgtcggtctggattgggaagtgctgagctcgctgcgcgtccgcggctcctatgccagcgcggtgcgtgctccgagcatcggcgagctgtacaacccacagtcgcagaacttcgccaccatcaatgacccgtgcaacacgctgtcaaccaacagcaaccgcccggccaccgcaaaggacccggccctgcgcgccgccaactgcgccgcactcggcattccgaacaactgggtggatacctacaccgccacccgtcccggtgtcagcggcggcaatccgaacctgaaggccgaggaagccaagaccctgtcgttcggcttcgtgtggcagcccgaattcctgccgggcttcggcatgtcgatggactactggcgcatcaccctcactgatgcgatcggcgcagtcaccgcacaaaccctcgcaacccgttgcgtggactcccccggcggcgtgcagaacaactcgttctgcaactcgatcaagcgtgctccggttggcggctacacctcacccaccggtactccgttcccggaatacagcatctacaactggaccgcgatttccgagaacctggccaagtcccgtcgcgtcggcgtcgatctggaaatggactaccgcttcgacctgctgggtggcttcaccaccctgcgagttgttggtacccgcttgatccagtcgcgcgaatgggccttccagtccttcccggacgagttcaccgagtacgtcacctactacaccgacccgcgctggcgcggtcagttcagcgccagctacaagcgtggcgactggcgcgcttcgtgggacatgacctacgttgacggcaacctgcgcgtgaccccggacagctacaactccaacccgggttcgcagagcccgatccgcaacccgtcgtacctgtaccacaacatgcaggttggctataagttccccggttcgggcatcgacgtctatctgggcgtggacaacgtgttcgacaaggatccgccggtgaactacttcggtgcggatgcgggtgcggcgttgtacgacagcatcggtcgctacatgtatatgggtatcacctacaagttctga

SEQ ID NO: 508746 - DNA, 276 bp, Stenotrophomonas maltophilia
gtgacacctaccggtatcgaacaggcatgggtagcggatatcacctatctgccgtcgcaggggaaattcgtgcaactgagcctgatcacggatgcatggtcacgcaagatcgtggtctggaacgtgcatgaaacgctgcagacagagcaggtagctcaggcactggagatgacattgaaaggaagaatgacacagcagaagctgatccatcactctgatcgcggcatccagtactgttcggactactaccagaagatccatgcgcggcaacgctga

SEQ ID NO: 508747 - DNA, 3024 bp, Stenotrophomonas maltophilia
atgagcagcagcaagcacgtcacaaggttgaagcgcaccgcgctggcggtggtcatgacgtctttcattggcgccgccgcggcacagagcacgaccggttcgttgtttggcaatgcgcctgccggtaccaccatcgtcgtgcagagtgacacgggcctgacccggtcggcgaccgtcgacagcagcggccgctacaatctaggttccttgccagtgggtaaatacaccattacccagcagcgtgatggccagaccatcgagcgacgtgagaatgtgctgctgagggtaggcggtggcaccgaggtgtcgtttggcggcggtgcggccggagcaactacgcttggcactgtgaacgttgttgcggccaacgtgccgaagatcgacgtcagcaatactgtctccaagtcggtgatcacctccgagcaactcgacgtgttgcccctgggccgtagcgccgaagccattgcgctgctggcgccgggcgtggtgtctggcagtggatcctttaccaatggttcgcggtcggtgctgtcgttcggtggctccagcgttaccgagaacgcctactacctcaatggcttcaacgcctccaacccgctcagcaacctcggtggtgtcagcctgccctatggctcgatcgaccagcaggaaacctacatgggcggctacggtgccggctatggtcgctccaccggtggcgtgatcaatcagctgggcaagcgcggtaccaacgaatggcattttggtgtccaagctacgtgggcacctgactcgttggccgcctccgcagcgacggtgatgtatccggaccgcgagttgcctgcaggctatgcctataccaaggactcgctacgtggcagcctttatcgctaccgcaaggacgatgccgcgactcgcaccacctacagcggttatgccagtggcccgttgatcgaggatcgcctgttcatccatctggccgccgagaaggaccgtacggaaggcgtgtcgacgaacagtgcggcggcttcgcaacaggttcgcaaccactacacgatcgacacgccaaagttctacggcaagatcgactggaacatcaacgacagcaatacccttgagtacacacgtgtgcagaacaccgatcgcactggtggctactaccggtcgttcgagtacgacgacctgaccgaaggcgatcgcaccggtaccttcccgaacaccacgaaggtcaaggacgatttcgatattttcaagtacaccggctacctgactgatgacctgaccctcagcgcggtctggggacgcagcaagcagatcaacctggaatccaaccctgcctcgtccggcatcccctatctcagtgccccgggtaaccaggacccggccatcacgggtgggcgtcccatccgcaacagccagcctgagctctatgaaaaggctgcagatgcgggcagcaagactcgcggcttgcgactggatctgcagtatcgcatcggtgaccacgagctgaccggtggtatcgacaacatgtattaccaggggcacaacgaaggccagaaggtcacgggccccggctatgcgtggatctatggccgtgtcgaacccggcgaatcgccgagcccgcgcttcgacatcgcgccaccgccaggtgatggctacttcgtgcagaagtacatcctctccacgaccaccagcatgtcagtcaagcagaaggcctactacctggaggatcgctggcaagtcacgccgaactggctgctgaccatcggcgtccgcaacgacaagttcaccaactacaacagtgatgccaggccctatgtggagagtggcgatcagtgggcgccgcgccttggagcaagctgggacgtgttcggcgattcgtcgctgaagttgttcgccaatctcggtcgctactacctggcacttccgaacagcgtggccattcgcggtgcttcggcatcgaccttcacccgcgagtactttgcctacagcggtatcgatgagaacggtgttccgacgggcctcaccgcgcttggcccgggccccgtgtcgtccaacaacgagtacggccagaccccggatccgctgtcggtagctccaacagacctgaagtcgcagtaccaggacgaactcattcttggtttcgagaagacgctgggtgagcgctggaactccggtgctaaattcacctatcgccgcctgcagtcagctatcgacgacacctgtgactcggaccgcatcatcgacaagctggacgcgatgggtgttgattcaagcgatctggtgatcccaggttgcgtgatcttcaatcccggcaagacgaacaccatcatgctcaagcatgccgatggttcgggctatacgccggtacggatgagttcggcagattggggtttcgggaacaagaaggccaagcgcgattacattgctgtggacctgttcatcgagcacccgctgagtgacaagtggtatggccgcctggactacacctggtcgcgcaacttcggcaacaccgaaggccaggtgaagtcggacatcggacaggatgatgtttccaagacgcaggactgggatgctggggcgttgatggaatacgcgggcgggtacctcgccaacgaccggcgccaccagctgaagggctatggtgcatacatgttcaatgacgagtggtcggcgtcggcgaccctgcgtgtcatgtctggaatgccgaagagctgcctgggctactacggcaccgatgaaagcgatcctttgggttacgatgcggcgtatcactattgtggtggcacgccgtcgcgcccgggtgatgccggccgtacgccatggaccacgcgcgtggatctgggtgtgatgtatcgccctgcgtttgccgatcacaagttggctttcggtctggatgtcttcaatgtgctcaatcagcgtcgtgccgtgcagaccgatgcggtatatgaggatgctccctacaccgtgtcgaacacctacggtatgggcacgttcttcagcgcaccgcgttcggtccgtgtcagtgcgtcctacgacttctga

SEQ ID NO: 508748 - DNA, 867 bp, Stenotrophomonas maltophilia
atgcagtcgaatccggacatcagcagcggcctgtatcacgggctggaggcctggcacgtgcgcacccccagcgcgacggcggtcatcagcgtgttcggcggacagctgctgtcgttcattccggaggggcagccggacctgctgtggctgtcgcccacgcgcgccgcactgccgacgccgatccgcggtggtgtgccggtgtgctggccgtggtttggccgccagggccagaacaatgatgtgcccgcgcatggcctggtgcgcaccgcgcgctgggagctgcagcaggtacagcagggcgacgcgggagagctggtgctgcagctggcgccgccactgcctgccgatctcggcttgtgcctgcagatgcagctgcgcatcggccaccagctgcaccagcagttgaccaccgggaacgctggaacaacgtcggtgaccttcacccaggccctgcacagctatttccgggtaggcgatgccgagcgcgtcgaggtcgatggtctcgatggcctgcagtatctggacaagtacgaggactatgcacagtcgcgccagcagcaggggccgtggtcactgcgtgatccgcgtgatcccggccgcagtgatcgcatctataccggtgccaaggggcactacgtactgcgcgatccggtcctgcagcggcggatcgaggtccgcagcgaaggtagccagacgctggtggcctggaatcccggtgcggaggcggcagcgaaaatggccgatgtcggcgagggctggcgtgattacgtctgcctggaggtggccaatgccggccccgaccagatcacgcttgcgccgggcgcgcgccatcaattgatacagaccctggccagtaccccgctgtag

SEQ ID NO: 508749 - DNA, 507 bp, Stenotrophomonas maltophilia
atgttgaccctgcaacgcggcaaccaccgcgggctgcttgtcgccccgcgctggccctccacccatatccagatcgaagcagaggtgctgcaacgcctgctcgatgcgcaggcactcctgcccaccgaactgcgcctgctgctcacgcgcggcttcgaatcacgccacagtcgcctcggtgggttccgccgcgcggtgcggcggctcggcattgcggtgttccgcacctgctacccgcagcgccgcgatgaagtcgatgccatcttcggtgccaacggtcacgacatcgatggccgtcacgtcgatatctccatggtgttgcacggccagcgactgcggctgctgccactgggcgtgttcacgccacccaactggcaggcgcgccgcgtcagccgccatgcctgggcggtcgcgcaggtgaagcacagcctgcagcactgcggcttccaactgcaccccaacccgaccgaagcactgcagatccattgcgactacctgccccggtag

SEQ ID NO: 508750 - DNA, 540 bp, Stenotrophomonas maltophilia
atgttcgacgtacctgcccacctgcatggcgtcgcctgcgatcttcagcaacggctcgatcgcatccaggcgcaggccagcaacaacgactaccggctgctgatcgatggagaagcactgcgcttccccgatcgcatctacgccgacggtacgcgcctggaacgcctggcatcttccctgccgggtgatcaccgcctgctgtgcctgtgcctggccacccggcatcccgatggcttcctgcgacaacgggctgttgcggcattggggcaggcatcggtgccgtggattctggcattccacctggcgctgctcagcgagtatgtcgaagagatcgcgctgacgatcgaccaccatgcccggaagattggcctggccgcttacgcacccctggtccgcgagaacgccgccttcttcgaacggtgtatgcagcgtgccgcaagctattggaatgcctaccaccggcagcggcatccagcgctgcgcacgtttcccgcccaccgcttgctgctggagatacgcagcgccagccgcgcgggctga

SEQ ID NO: 508751 - DNA, 1224 bp, Stenotrophomonas maltophilia
gtgatcgaagcgctgtgcgtcgccacggcggctgaagtcgccggccgcggcggcgctggccagctgcttgatctcggcgttgatgcggccgaggttggccttgaccgtatcgacggtggtggtcatcgcggctttttcgccggggtagcgcgcgatatcgcggctgaggtcgccgaccgcgtactgctggaccacgtccagcacgtcgtgcagggtctgcacgtggccgccgaccagcgcattggtttcctgcaccatcagcccgtactcgccggggaaggcgctggcgtcgatgcggtagctcagttcgccggcatcgtggcggcgggccatctcgcgctggccactgatcaccgcgtgcagctgctgctgcatgccggacatcgcctccagcagtcggccggtttcgtcatgcggctgcgggccgatgtggctgtccagcctgccaccggcgataccctcggccacggccgtggcctgcttcagcggcacggcgatgcggttgccgatgacccagctcagggccagcacgatcagcaccagcacgccaccagagacggccatgatggcggtgaacaccaacgcctgcttctgcacgtcgtccatgtagacgccgctgctgaccacccagttccagggcgcgaacaggccggcgtaggcgaccttctcgacgtcgcccttgctgcccggcttggcccagcgatagttgacgaagccaccgccggccttggccgcttcgacctggtcgtagtagatccgcacgccgtcgtcggtgcggaagtccttcatgtccttgccgaccaggtccttgcggaacgggtgcatcagcaggcggtagccggtgtcgtagatgttgaagtaatacgtatcgttctcggcgcgcatgacttccagtgcctgcagcgcagcgctcttggcggcctcttcgctgagttcgccggtaccggccaggcggtggtagtgctgcaggatgccgtagctcagttcgacctgggtcttcagcgcggtcttgcgggtctcggtcaggtccaggtactgcatgcgggcggcgatcaccgagagcgcgatcacgccgagcgcgatgagcagcgtcagcaggttgagcttgcgccggacggagaggttgctgaagtagtgttgccagcgatgcatgagattcatcgagcaggaccaggtcgaaacgggcgggcggcgccgagccggtcacagcgggacaagcggtga

SEQ ID NO: 508752 - DNA, 606 bp, Stenotrophomonas maltophilia
atggccgaggagcgcatccaaggcaagatcaagggacgctcccggcgcaaaacccctgccgcaggttcggcccagctcgccccaaacctactggatcgacaattcactcccggcacgggtccatcggcgtgggtcggcgatatcacctatgtggccactcgccagggctggctgcatttggccgtggtcatcagcatccagacccggcaggtgctgggctacagcgtctccgagcgcatgaccgaggacgtagtgctgaaagcctttgccaatgcctgggcgcttcatccccaaccacccggcctgatcttccattcggatcgaggcgggcagtactggggcaacgagtatcgccagctcttggagtcctgcggggtggttcaaagcatgagccgcccaggcaactgctgggataacgcggtggccgagagcttttttgccacgctcaaggccgaagcggctgctgatccatacgtgagccgggaacaggcccgccagtccattgcggcctacatccacggtttctacaatcccgctcggctacactcggcgctgggctatcagtcgcccaacacctatgcccggcagctcaaagccgccgcctga

SEQ ID NO: 508753 - DNA, 2169 bp, Stenotrophomonas maltophilia; identical to SEQ ID NO: 494825

SEQ ID NO: 508754 - DNA, 159 bp, Stenotrophomonas maltophilia
gtgatcagcggccccccgagcctgcgccggcgcctgctcgccttcctggcgttgccgatgctgggcctgctcatcttcaacacgatcctggcctattacgttgcgctggactattccaaccgcatccacgaccgcaacctgatcgacgacacgcactag

SEQ ID NO: 508755 - DNA, 633 bp, Stenotrophomonas maltophilia
gtgctggacaagtacggcatcctgatggtggtcgatgagatccagatgggcttctggcgcaccggcaagctgtggtcgatcgagcatttcggcgtgaccccggacgtgctggtgttcggcaaggcgctgaccaacggcctgaacccgctgtcgggcctgtgggcgcgcgaggagctgatcaacccgaccgtgttcccgccgggctccacccactccaccttcaactccaacccgctgggcacccgcctgggcctggaagtgctgaagctgggcaaggaaatggattacgagcgcaccgtgccggaaaagggcgcctacttcctcgacggcctgcgtggcctgcagaagcgccacccggaaatcggcgatgtcgacggcctgggcctggcgctgcgcgccgagatctgccaggccgacggctacaccccgaacaaggagctgctggaccgcatggtcgacatcggcctggccggtgacctgctgcacgacggcaagcgcatgggcctcgtgctcgacgtgggtggctggtacaagaacgtgatcaccttcgcgccgtcgctggacatcagctacgaagagatcgacctggccatcaccctgctcgaccaggcgctgaccaaggccaagggctga

SEQ ID NO: 508756 - DNA, 663 bp, Stenotrophomonas maltophilia
atgagcaagaacagccagtggatcgtcggcgtcaacgccgtcgcctcctccatcgagaacgacgccgagaacgtccgcgaagtgctggtcgaggccggtgcgaagaatccgcgcctgaccgagatcgaggagaacgcccgccgcaagggcatcgacgtgcgcaaggtgaacgcccaggcactggacggtgtcggcggttcggtgcggcatcagggcgtggccgcgcgctatgccgccgcccgcacctacagtgagaacgagctggaaggcctggtcagcgcggccgagggcaaggccctgctgctggtgctggacgaggtgcaggacccgcacaacctcggcgcctgcctgcgctcggccgccggcccgacctgcgtgcggcagaacgcagtgaccaacctgtcgcgctgcctgaaggacctgcagaagcagggcgtgtggatctacggcctggccggtgaggccaccgcctcgctgtaccagctggacctgaagggcaacatcgccctggtgctgggcggcgaagccgacggcctgcgccggctgacccgcgagaactgcgatggcctggtcaagatcccgatgccgggcgaaatcgagagcctgaacgtttcggtcgccgccggcgtcagcctgttcgaggccgtgcgccagcgcggttga

SEQ ID NO: 508757 - DNA, 756 bp, Stenotrophomonas maltophilia
atgacgccgcttatcacccaaacgctcgcgctcgcgaccgaacagttgaccgcagtgaacacgctgatcggttgcatgcgtccgccactggcgccgcctggccgccctcaatgcgccttgttcctgaccgtggcagagcagttcgaagcggcggtccggttggcccatgccggcctcattacccacagcgcggtgcatgtacgctcaatgctggaggccacggctgatctccatctgctcgggcaggacagccagcacgtggaacgcatgaggtataagcaggctcgcggtgagaagcggttctatgaccagatgctcgcttatgaaggtctgccggatggcgtccggacaatgatcgatggccggatggccgattgcctcgctcgctacgaacctctccacgaagagttcgggggaacgctgcccacccaagctgcgagcttcaaggcggcaggcatggactttgtcattggcctgtacaccatgctgtgcggcttctcgcacaatgatctgagcgcgttggcgctacgtcaccaaggcgactccacgatgatgcacagggcagaagtgccagaggcggtcgcctcactgatcctctcgcttgccagtaccgcgctgatgcacgctacctatcccatgaatggcatagcctggacccccgaaggcgaatttgaccggctattcggcacaatgaacgacctgcacgggaagatgatggatctccgcgacgcgtcgcagactgcagacgtgcagtaa

SEQ ID NO: 508758 - DNA, 273 bp, Stenotrophomonas maltophilia
atgacgcagcagcagaaggtcgcgccgcgcccacttccaaagtgttccaacgggcacacagccaggtatatcttcgactgccggcgtatcgaggcacgcggtggccacttcatcgaatgtcgttgcagcgccaccgcgaagcacccgacgttcgatctggcctgggcacactggcacaagcagcacggcctgcatgcgaccgccgcggctgcggaggaaccgttggcaagcaacgtgttgcagatgaaattgttcgccgcagggagagcttga

SEQ ID NO: 508759 - DNA, 291 bp, Stenotrophomonas maltophilia
atgagcaagaatgatattccttccggtttggataaacagggccaagtgattctaagtaacagggatataaatcttatttctgctatttctcagaataggtcgatatctgcgaaggattctgaaaaatatgctttgaagtttgaggcgtcggaggccgccaaggttgttctgaggtatttgttggatcctggtttggttgcaagtaatccatacgacgttgaggcgaagagaattgccgatttctttagggaatggtcatcgagaggaggtggttcggcgaaaaaggattga

SEQ ID NO: 508760 - DNA, 1329 bp, Stenotrophomonas maltophilia
atgcaatctcggatccatggaaaaaagacaccggttaccttgctggcgatgggcgtggcacttgccctgtcggcaaacgcgaccgcccagcagcagaccgctaccgacctggacacggtgaacgtcacaggctatcgcgccagtgtcgaaaaggcgctggacatcaagcgcggcgaggccggcgtggtcgatgccatcgtcgccgaagacatcggcaagtttcccgacctcaatctggccgaatcgctgcagcgcattccgggcgtggtgatcacacgcgaagccggcgaaggccgcaacatctcggtgcgcggcctgggcccggatttcacccgcgtgcgcatcaatgggatggaagcgctgaccaccgtcggcgccggtgaccagagcggcggtaccaaccgcggccgcggtttcgacttcaacgtgtttgcctcggacctgttctcgcagctggtggtgcgcaagaccgcctcggccgacgtcgaggaaggctcgctgggtgccacggtcgacctgcgcaccgcgcgcccgttcgactacgacggcttcaccttcgctgcaagcggccaggccggctacaaccagatggccgaaaaggccgacccgcggctggccgcgctggtctccaacaccttcgccgatggtaccttcggcgccctgctgtcggtggcctactccgagcgccaggcgctggaggaaggctccaacaccggccgctgggccaacggcccgagcaatggcaacttcgctgcgtcatcgccgttcgccgccgcacgcgccgccgatgtattccacccgcgcttcccgcgctacgtgcagatggaacacgagcagaagcgcctgggcgtgaccggctcgctgcagtggaagccgagcgacgccagtgaaatatcgctggacatgctgtactcgaagatcgatgccacccgcgacgagcagtacatcgaagcgatttccttcagccgtggcagcagcagcaccccgcgcctggtcggcaagccgagcaccatcgtcaggaacggcgagatccgcaacggcgcgctgctgtacggtgaattcgacaacgtcgacatccgtaccgagaaccgccacgacgagtggagcaccgagttcaagcagatcagcctgaacggccagcaccgtttcggcgacgacttcaccgtgtccggcaagctgggcatctcgcgctccaggcacgagaacccggtgcagaccacagtcatcatggacaagtacgacgtcaagggctacagctacgactaccgtggcaacagccgcttcccgatcctcaactacggcatcgacccgaccgaccccaacggttag

SEQ ID NO: 508761 - DNA, 1056 bp, Stenotrophomonas maltophilia
atggccgttgatcgcgctcgcttcaggatggccgttgagggcggggcagggggcttttccccgctttcgcccggtgaaaaggggcggcgggcggcggcggagattggcccggggagtaacacgggccaaaagggtcagcaggacgcaatcatcgactacctgaccattgtggtcccgctctccgcccttgaagaagtgaactgcaagaagctggacctgttgctgttccgcatcttcggcttccgtggcgaggttgttgctggtgcgattcgcgagaagaactggaacttctacgagcagtcggcggtgctgatcgaccgggaaaacgaggtggttggccgtgtcggcatcgggggcaagaaaagcaccgtgtgcttgagcctcaccggcatgggctgtaagtggattcgtgactgggcacgcgtctacaagcagtgcgccatgctcgatgccaagatcacccgtgttgactgcgcgcacgacgactacgagggcgaacgcctggacgtgcatgcgctccgcgaggttgccgcgcagggcggctttaccgagggcggatgccctccgcgccaccgcttcatttccgacgaaggccacaacaccggctgcacgctgtatgtcggcggcaaaggccacaaggaactgtgcgtgtacgagaaaggcaaagccgagggcctgccgtcctcgcgctgggtgcgcgcagaagtgcgactgtacggcaagcacatggaaatcccactcgatgtgctgttgaacccgggcgcgtacctgcgcggttcgtacagcgcgttgcaagacctcatcaagggcgtgtgcacccggctgcgcacgattcgtaagcacgtcgaagtctcggcagaggccgctgtcaactggcttagccgtcaaggcggtccattcctcaatgtcctgcacggagcgttcggtgattcgttcaccgacttcctgctggcgcgcgtcgtccgtgatggtcaccccggacgttttcgcggtattgccaagggtgaaccactccatcgctatgtgagagaagaactatgcctatctgccgcgtaa

SEQ ID NO: 508762 - DNA, 516 bp, Stenotrophomonas maltophilia
atgagcgccagctacgacctgttctgccggtggaagcacgtgcagaagatccagagcgacaacgctggtgcgctggcattgggcgtgtccagggccaccgtttccctctggaaacaagggaaaaacgcggaaatccactacatcgagcggatggccgtggacattggtgacagcccggaaatgtggtcggctgtcgtgatggctgagcggagcaattccgaggacgagaaggccgcatggcgccgaattgcgcaaaaactcgccacggtggtcatggcgctatgcctgttcgtgggtgccgccctaccccacgacgtgcaggctatgccgcaggctggtaatgccttgcacgatatacattatgcgaaatcacgtatccgccggatctgggcctttgttgggtccgcgtggcaattgactgccacaacggaaacgccccagatcccacagctgtccgcccgtatttccccacaaggacgcccgcgatttccagatctcccccaaagatgcccttga

SEQ ID NO: 508763 - DNA, 906 bp, Stenotrophomonas maltophilia
atgactccttctgtttttgtctgcaactcgatttcagtgctgatcaagctggctggcgtgggagagtcaattccgctgtctggtacgattccaattgaatcagctggtcccaagatactgaaggccgcagcccctctttgctccggtaattggaggatatatatcgagaggtgtgatgatggtaggaattgtcgctttggtgtgttttgcggattaagcgatccatcatctttaacggtcgatgagattgttttggatgaatatgatgaaaattttcctgtcgttaggattgttcaaagttcaaccaataaggttcaggtcaggacgagcgctggagatgtaattgagtttagattcaataatgaccaggacattgatgagctgaaggctaacgagcatttgaagtcgctatcctcggccattgcagagaagtgtgaatgggctgatggggcgtttgttgggtttgttgagaggatcttgacgtcggcagttagggatagccacggaacacttattgcagttgtggcggccgaagcgaatcctttgccgttgagtctttccgatgttgtggctatcacgccggcgtttcagttgtttgatagattcaagcagcatctggaaggtgggaagagcgcatcgactgtaagtacgcttcaagcagcgtcggagcttgtgtccggatttatttcaagcgatgggatcacggttttcgatgatgcgggagccattcggggctatcgcgctttcgttcggagtgatgcgggaacaacgccggctgcgggtggcgcaaggacccgcgcatatgaagcgatgaaagcggcggtgggtaaggatctgcgtgcagcattcttccgctcgcaggatggcagaacggactttgttaaatcggtggggccagtgcaatga

SEQ ID NO: 508764 - DNA, 1314 bp, Stenotrophomonas maltophilia
atgaacgcaatcgtagtttggaaggaaccccagacaaatctggttcccaaatcggctgatagtgtaaatgctatagctcaggttgcgacgaatttgagttctcgcgatcagaagcaaatcgtcagtgcatttcagtctgaatcgtttgagatgatggccggatttgtattgaacaaggcgctgtcccagctcaagcgctcgcttgcctcattgggaatgacctttgttggtgaaatgctggggcgtgctgatatttctgaagaatcagtaccgactgtttcaatctcggattatgaggccatcacgcttgccagagagctgggtgttgttaactcaacagatgcaatgcggctaacgcagcacctcgaactactggcccattttgatggtctcaatagtgatgatgctgagactgaggaaatgtctcgagatgaggcattgtcatttcttcggacctgcataaatgctgtgctgggccggggggataatgttgctcccgtggaatttgttgcttttaggtctgcgcttgaagagaggacctttaaggactctgatcctgaactacaagcgctcgctgtgtccccatatttcttcaagaagacgacgctcagtattctaatcgctgcggcgaagactaaggcgggagcgcaatttgagcacactcttgggaatattgttgtaattgttccaattctctggaagggttttagggatgcggagaggtactcgctcggccaagcgtacgcagaagcggtgagttctggatcaagcgcggtcgttctagctttgaagaaggctctttcggcggtccaggggttcgacttcgttccggaatccctacgttcgcaaagctttgcagcggctgcggccaacgtgatctctgttcatacggctatgaacaatttctacaatgaaccctctgcaattcaggtgctcgccaggttgggtactacaattccgtggcctgcgttccccatttgtatgtcagctatcttggccgttaagttggggaacagctatggtgtatctcacgccgcaatttcaacggcagaccagttgctggcgcgattgaccaagaatcagtgggagtactatgttaatgaatgtctgcccgcagataatttggtactgcagaagttggcttggtatgatcggcctcgttcaaattggattggtctctttagtgagtacgaactacccactgaggcttcgaaggagaagaatgtttccaaattgctgcaagcttccagaaagggaaacgagagcggggttgctgctgcagcaagagtggcgctgaatgccatcggtgagtaa

SEQ ID NO: 508765 - DNA, 2241 bp, Stenotrophomonas maltophilia
gtgccacaagatgctcgccccgtgctcaaccctgtgctcaacctaaagcgtgatccgaggcgagcgagtgtcactggccgcgaagcgcccgaagaagccgttgttgtggcgcgcttggaaagtcagaggaggatattgtccgaacagctgggagagcttgattcccgatcttcagacgttcatgcagggcgccgccttgtcgccattcgaatgttcgatgactcttttgctccttcttgggagcctgaggcgcttttccacacaaacttcggcgcgccactggttgcacctttccggggcggctacgttgccgagcttggcacctctgcgatatccagcttgcgagataaaatatcgtcaagttcgcgccgcgaggtcagaatctccgtttcaagaataagctcccttcttcctatcaccgatgaagatattttaggaggcagggggattgagcggacctggcagcttgccaccgaggtgagcgaaggcaggttattcgatatctggctagccccctttgctagctcagaggcaagagcaagtgtctcagcaagcatcgaaaaactggcaaatgcggagcatgtcagctctgttattgatctagtctcgattactcgagaagccggttcggatgccgatcagcttcaactccaagatgctcccagctctcgcagtatcgcgcgcggcacccgcgaataccgtcagaacccgttcgtcagaattcatatcgcggtacgggatcagtccggcctttccgccctactctcctccggagcggtttttcgaatagacccagtgaggccaataacttcgacccagacgagggcagctccagatccagagcgccccgtcccagatgaacaatggcatccgatcgttggaatcgtggacggggggctgttcgcacggagctacgaacaaatggttgcgtggagagcgccgtcattggtatctgatgttgccgcaaacagagcccatggaaatacggtgacgtcgctggtagtgcatggaagctcgtggaacacacacctcaaacttccagagcttgtctgcagagtggggatcgcccaagccatcgccaatgtcaatcaaggaagtgcgacttgtgcggagtttgaaagctatctgaaagcaacagtggagcggcatagcggcagcacaaaagtttggaacctctcgtttaaccaacctattgagcccgatgcaccacatgaaatgagctcactggggcatgagctgcacaagatttcacgtaggtttggaattctcccgatcgtttcggttgggaataccgaccattgttccacaatgcgaacatgcccaccagccgattgtgaagcagcattgaccgtggggggaaggatcgcagcaggagacacgccaggggaacactgtccgacatgcctgggcggccccggacccgaaggacttaagaagccggagatttcttggttctccacgcttcgtgcattgggtggtagcacgcagacaggaagcagttttgctgcagcccttgtatccagtgtcgccgcacatacatttcacaatttgcggaatgcaaccccagacttggtacgcgccttgcttttgaatacctccgatctggaagggtatgacgaacgactaggctggggctcaccttgcgtgataaatgaagtgccttggaagtgcccggaaggtagcgtgactcttctctggacagcaaagctccttgcgaggcagtggtattactgggaagacataccaattccaccgcagttgattgtggacggcaagcttaaagggaaggtcgcgctcactgcgattctttcgccgcgaacttcagagcttggctctgcaaactattttgcaaatcggcttcaggtggcgcttcagtacaccaaggcagatggaaaagcgggcaatcttgctggaacgatgcgggaagccactgcaccagagaatgaagccaggagggattacgccaaatggaacccagtacggcaccattcgaaggagataaagcgcggaatcactttctctggaagcaccctacgcgtctgcgctcgcgtttttgaaagagatctctatcaatttgatcacgctggcctcgcagaggagctaccaagcgatgtcgcatttgcaccgacactcacaacctcatccaccggatccgggtcaatttacgactctgtggccaccagtctagggaactatgtggagagcgcagtgacggatattgaaatcgatattgaactttag

SEQ ID NO: 508766 - DNA, 1101 bp, Stenotrophomonas maltophilia
atgaccacgaactttgctgacgatgtggctcaatttgccgaagcagcaatgggcgccgactacaccaagctacggcgaattggtcagcgcttagccgcagcgatggccgatgaacacgctgaagctgctaggcgagttcgtctagccatcggaagaaagggagtaccacttcaagcagcaggcttcactgaagcgctgcctgtcgatgggaagtcacggcttccgttagttgaggaacttccctgcccagcagccccctgcatgcttcccgaagatgcgagggacatatttcagtcgttcatagatgacgcgactcaccacgatttactggagaagaatggcattgcttccaagctttcgctgatgctcagcggcccgccaggcacaggaaaaacccttctcgcaggccatattgcggcccgaatgggaaagaagctctatgttgctcggctggactcactgatatcgtccatgcttggagatacagcaaagaatgttcgcgccatctttgactttgtcgcagggaaagatgccgtcctcttcttggatgaactggacgctattgcaaaagtgcgcgacgacagaaatgagctcggcgaattgaagcgagttgtcaataccgtgatccaaggaattgactctttggaggacaggactgtccttctcgccgccacaaatcacccgcaaatgcttgaccccgccatatggcgccgtttttcatatcacatccaccttgggatgcctgaaagtgacttgcgccaagcactttggatctacttcctgggtgacagctcagaactatcggaagacgccaaaattttggcagcactttcggaaggcgccaccggggcagatattcaacgcctagcattggccgcaagaagaagagccacaatcaggaaggaaagtgtagacttcttagaccttgcaatccaggttactcggcaaggaagttcgaatcgcccaacgaccacaaaagaagtggatctgaggcgaagcattgctcgaattctagtgcaagattttggcgctgcccaatcggaagttgcccgattcttgaaggtttccagacaatctgtatcggcctacctgaagggataa

SEQ ID NO: 508767 - DNA, 1884 bp, Stenotrophomonas maltophilia
atgatcgtctatcaggctgacaaggcgtccttccttcgtcaatgcaacgatgaagagattgaggaggtcatccgcgccagtttcaaggcggcgacaaagggcgacgtaggcgagtccgagatacgttcctggcgcgagtcgcttcggtacgtcgcgcgcgcgctcacccaccactccgttcccgacgacgttggcgtggcagtggagttcattcttccccagtcaaagaagcgcatcgacgtcgtcttgaccggtcgcgccgaggacgggtcgccccatgtcatcatcgtcgagctcaagcagtggtctgccatcaagtcgaccaagcgcgatgccatcgtagagcttcgtgaagggcagcccctcgtccaccccagctatcaggcgtggtcctacgctgcgtttctcgaaggtttcaacgaagcggtccatgatggaaagctccggctccatccctgcgcctacctgcataactatgtgccggacggtgtcatcgactcgccgcactaccgggcttacatcgaacgtgccccactcttcctgaagagcagcggggatctggaaaggctgcgtggcttcatcagtcagtacacctgcaagggcgatggcgcgtctgtgcttgccgagctggagaatggccgaatccgcccgtccaaagcgctcgccgacgatgtacacaggctgctgaggggaaatagtgcctttgcgctgctcgatgagcagaagcaggtatttgaagccgccaaggctgcgtgtgcccaagcgcacgccagcggaaagccccgtgtcgtcatcgttgaaggtggcccaggcacgggcaagtcgattgtcgcggtgaacctgctcgcggcgctccgcgatgggttgaccgtcaagtacatctccaagaatgccgcgccccgcgccgtgtacagcaacacgctcatccagaagcccgagaacgcccatctggtgcatcttttcggcggctccggttcgttcaccgaatcggcgcagaacgcgtacgacgtgttggtcgtggatgaggcacaccggcttaccgagaagagcgggttctacggcaacctcggtacgcaccagattcaggaattgatcaacgccgcactgtgcagcgtgttcttcattgacgaggaccagcgcgtcacgctgaaggatgtcggcaccaaagaagcgattcgagacttcgccatcacccgtggcgcaacggtggaggagtacgtcctatcctcgcagttccggtgtgcaggctccgacggctatctcgcatggctggatgacgtgctgcagatcaggcctaccgcaaacacaacgctggacgagaacagctacgacttccagatcttcgatgatccgtccgcgctgcatgccgccatcgaagccaggaacaccggtaaccgcgcccgcgtagtggctggctattgctggccgtggaacagcaagaagaacagcaaggagatggacattgtcatcggcaactaccggcggcaatggaacctcaacgacgacggaagcctctggatcatctcgccagattcggttgaccaggtaggctgcatccatacctgccaggggctggaagtcgactacatcggggtgatcatcgggccagacctggtcatggaagacggcgcgctcaagaccgtgcctcgcgcgcgggaccggcacgacaagaccatgaagggattcgtgaaactgtcaaaggctcatcccgcacacgccgccgagcttgcggacaccatcatcaagaacacctaccgcaccttgatgacccgagggatgaagggctgctacgtatacgcgaccgacccgcaggttgccgcctacttcaaggcccgactgcagcgcgtggcagcgggtgaacaggctgtagagatggaggcctga

SEQ ID NO: 508768 - DNA, 375 bp, Stenotrophomonas maltophilia
atggaacaccctctcgtcgaggttcgcggcgctgcccaggcgctcagggagttcgccgaagcccgtgattgggcacagttccactcccccaagaatcttgtcatggccctctctggtgaagttggagagctgaacgagattttccagtggatgacggaggccgactccttcaaggcagcgtcctctgaagccaccgccaacgccgtacgcgatgaaatcgccgacgtagcgctgtacctcatccggctgtcggacgtactcgggatcgacctgaatgaagccgtcagcagcaagctggttatgaatgccgccaagtacccggtggacctctcgcgaggtgtcagcaccaagtacaacaagctgtcgcagccatga

SEQ ID NO: 508769 - DNA, 144 bp, Stenotrophomonas maltophilia
gtgccgttcgacgcctcggccaagctgtcctcgcagatcatcagggatgccgagctgaaggtgtatgccggtgccccgcacggcctgaccatcacccacgccgagcagttcaacgctgacctgttggcgttcgcacgcaagtga

SEQ ID NO: 508770 - DNA, 1428 bp, Stenotrophomonas maltophilia
atgcttctttcgttcagcgttgccaactttcgctcgtttcttgacgagcagactctctctctcgttgccagtaagcgcctagctggccatcacgacgctcacaccgtcgagctgcctgactctgaggagcgggcactacgagcggccgtcgtctatggcgcgaacggcgcaggaaagtccaacttattcaaagcgattgagttccttaagaccgcggctactaaaacacggcgtaaagggacaggcacgcgacgcgaggcattcaaattttgcgatgcaggggaaatggcctctcagtttgacattcaatttttgatgagtggtcatacgtatcgttttggacttgttgttgacgatgaaagagtgattgaggaatggctcactagaattgaaggaatcaaagaccgcgtcatctatgagcgaaccactagtgccgcaggcaatgttgaagtcaggatgcctggtgcgaaaagagcgaaggacgacaagatacaggcaattgccacagtgggcggcccgccaaatcagacctttctcgcaacgattatcgagaatctcgatgactcgagcatgccatctccggttcgtgatgccgtaaaatggttcaaagtgaacctaaccttggttcgaccggatggcccgatcgcaccaatcggccattacttgagcgtagcaaagggctttcccgagtttgctagtagcttcttgagggcggcatcaaccggcgtcgaagagatcgcggtcaagcgcaagaagcttacgctggatcaggtcaaggcaatgcttggaccatcttcgtgggagttttttcaagagcgcattgtgagtatgcagcccggcgaggcctcgctgatttctcgtggtgacaatgaaattctgattgagaaatccgaggagcagagcttctacagtttggacgttgaggcatcccatcagtgtgctaatggggcatcagtaaagcttgcactgagggaggagtctgacggcacgcgtcgccttctcgatttattgcccgctctatatgatcgcaaagctaatcgccagagagttttcatcatcgacgagatcgagagaagcctacacccggcgctcatgaagaaactgttgactcactttcttgacccgaagtctggcaacggcaatcagataattgtgacaacacatgagtctcatcttcttgatcttgacttgctgcgaagagacgaaatttggtttgcggaaaaagggcatggcttagaaacacatttgcactctctctctcaattcaaggtcagaacagacctcgacctccgaaagaactatttccaagggcgctttgggggcatccccttcttgggcgacatcgaccgactgattgaaattgcagacggcgccgctgatgggagcgccgatcatgaaaaggaggaaggggagagtggcgccgcatga

SEQ ID NO: 508771 - DNA, 675 bp, Stenotrophomonas maltophilia
atgaggaacactaaccgaaggcctcgcccattgacgcgcgaggaggcgacgtatcgagacgatcgcctcttcatcatcgctacggatgacacagcagggccaaagcagtactttgactttttccgccttaatcgcatccaaatacacgtcattccaacggaggacggcacgtcatcggctgagcacgtattgaggcgactgtgcgaagtggaacatgaagcagacgacgagcgctggttacttctcgatacggatcactatatctatggccgacacgcagcttcgtacactcaagcgctccaaatcgctcagcagaagggaatcaacatagcgctcagccggccctgttttgagctttggttgcttttgcatcatgacagcgaaacgaacgtggttgagcagggcgatgctcgccaagtctcggcacagcttaaagggcgcatcggaactttcaacaaagtaaaattgctgcgcgaacattttcccgatgcactattggcacaagcatgtttgcgcgctagtcgactggataaaagcacctcaggaggattaatcccagccagtgccagtacgcgcgtgtacaagctgtggcgaaacgtgctcgattctgttccgcatcatgcactatcagaggaattgcgtgaactgaaaaatgatgttggatggtcaatttga

SEQ ID NO: 508772 - DNA, 264 bp, Stenotrophomonas maltophilia
gtgacgttccccctgttcgcgctggtgatggcctataacctcgccccgcccggcgctgacccggtcaagtcggtgcgcaggctcggcatgtgggggctgatcgcgcagccggtccatgccttggcgttcgggtactggctaccgttgaacatcctgctcacgttcgcgctgtgtgccgccgccatccacgcagctggtcagcgcaagtggattgtcttggcattcgcctcggcggtgctgcctgcattcgtggactaccaatga

SEQ ID NO: 508773 - DNA, 1251 bp, Stenotrophomonas maltophilia
atgccaatatccatcgacactaggctaaaggtgcgattgatcgagctactcgccgatcagctaagtcaatccctcgtgtgctatgacagtttcgttttcgacgcgggcgtactgcacccagggcaaataggggcaagccttcctgataaagggaaactggctgacgagctccgcctctacatcggagacgacgcgttcaccaccttcgtacagggcgagttgaatcggcactttaggggagggggctttaactctaacgcgggcattagacctctcacctcttatcctggatatgaggacacagtcggcttggcgaccaccttggtcgagagtttctgttctcttccttggaagtatcaagtatgcatgcgtctgccagacggatttggcaacctacttaagatgcatccggatggatacgaactttcggatcgtcatcggattcttctgggatctgcgctcaagaacccttacgccaaccaatccaaccagctagttgacttggcttcggggaagtcctttcccggagattgggatgaggcagcctcctatcttgtagtcgatgttgacggttacttcagagtcctcagaaccgagccagtgatgtccgctcgggatgacatcttttccttcataggtcttgctcttgccttcggcttgtttggaagcgccagatcaggcgagctcggcgcatcgcgtaggtcacatcagttgatcatctaccggttgtcgcacgaagacttggatggggaaggcgtcgtggcccttgatgagcacctgcagtccggcattcgaaacctatccatggtggcagactcagcagagaatggcgtgcacgtggcccacgcgctggatcgcatcggctccgtatttcgatcagcaaatggaaagagtcttcgtctgtctgcgcgatggctgttcgacagtcattgcggcagggacgaactacttagctatgtccaggcaaccgtcgccattgaaattcttctgggcgatgaggatgcagatccggacgtaggcctcacaacgttgatggcaaatcgttgcgcctacttagtggcgactactgccgaagcgcgggcgcacattcttaaggcattcagggatatctacaaggtgcgatccaaaattgttcatcgaggccagagtcgcctcaactcgaaggaagtcatgctgttcaactaccttacggccctcgtccgatccgtgattgacaaggaacagcgcttacttgggcgtggggagcgatga

SEQ ID NO: 508774 - DNA, 1704 bp, Stenotrophomonas maltophilia
atgccgaatgctgcaacgatcacgattagggagaccttagagctactcgatggtccgtacgcaggcgttagcgcgggtgttagccaaggcgcatacggattttggctgggctccggcatctcccgcgaccggattgttggacttgatggcgtcttagcgaaacttcttgaattccttcgtagtcatgaagcaggcgcgccgggctgtccttaccatgacgcactgactacgatcataaatatggcggcgtccaatgcgggcgaacgcgctttgatcaactatgcgacccctgtgaatagctgggggtgcttaccagatctgctcaagcggttatggaagcagtacgccgcagtgttgtcagttccgttcggcaacgagcgaagtgactacctggtctgggaaggccttgatttcacccatacttttgcaggccaagaggcagatgctgagcatctcgccataggcatgcttgcactggaaggggctgtcacagagttggcttccgccaactgggatggactgctcgaagccgccatcgaagaactcggtcatggcagcaatttttatcgaattaccgttacgggcgaggaccttcgccagggagccgccaacgctacgctctacaagtttcacggttgcgcacttcgggctattgagcacgaggatacttatcgtccgcttattgttgcgcgatccgcgcagattagcggctggaacaccaatcagaagttcaagattatccgcgaccagctgtcagcagttgtccaaaggcaacgaacactcatgattggcttgtctgcgcaagacgcgaacatcaagcatctctttgctgccgcaaatcaacagcagggctggcaatggaatgcgcaacccgcaccgattgtgatatccgcacaggatctcgagaacgatcagcgtgagttgcttagccttgtttatcaggaagatgtgtatgaagcgcatcgtcaagacatttgcgagtctgcgagactgcaggcctatgccaagcctctactgttggcgctactactccaggtgatggccctcaagcttgaagtgctcgccagtgacgttaacgcccccaatctcgattcgactgcacgtgaggcctttagcgtgggtatccgccgcctcagagatcgagccgctgaggccggcaacgatgatcgagcgaagtttgcacgcgccattgcagccacatcagctcgggcgcttcatcaactaagggacggtaacagccccgcgggcggacagatctactacccgctagacgtacagcctgcccatctgatgaaaggcaagcttgcgctgaagagcacgggacagcgagaggcggcggcgggactgggattgatcgggcttggtgtagcgtcagaggcttgggccgtttcacttgacgatccgtttgactcgcgatctggcgcattgcgccttgtatcgcaacaatcgagcaccagggtcttctttgcagcggatgacgacaagatcaccagcctcctggaaagcggcgcattcgacgaggaagagggagacgtagtagttatctgctccggccgaatctcgacgcgacagcaacgtagcccaaggggaggttggcgtgacggcaacgtcggcccgcgctacctaccactggggcccatgttgtatgaaatcaacaatatagatgaattgcaggagcgattcagaggagagatcggcctgtga

SEQ ID NO: 508775 - DNA, 2463 bp, Stenotrophomonas maltophilia
atgaacgcccctcggctcaaaagtatcgtaattgagaattttcgcagcctgcatggaaaggttgtagtgccactcgatgctcaagttgtgctgattcacggaacaaatggcatgggcaagacgagcatcttgtctgccattgaattgggcttgactggtcgtgttgcacacctctcgacgcaaggtgaactttacaagtcatatttgacgaatcttggatgcaatgagggatcaatttctatcgccacgacttcgccgctcggtagcggtggcaatgccgccggatcggtgaagttcagcgatcgcaccttcagtgctcaggcactgcttggtacagatgactgccaattcttcagcgagcgctgctatctgccacaggcaacccttggtcgattgttggaaatctacgacgagcagaagactggatcagcctcaccacttacgctgtttgtaaaggagctactgggcctcgatcctcttgatgcgcttgtcgatgggctcgatcctgcatttcacgttgcacgggttcgcagaatcgccccagactatcgacaccttgaagcgctgaagcaatccatctccaatcaggcgggagcgctagagaaggaaattgctgcggtgacgcaggacgcggaacgtcgtcgcgacgatctgaacgcattgcttgttgagattgccgtgttggacggtgaagagactgccgcagaagtaactaccgcgtccgcgctgcctctaatttccgctgcgctcatgacctcacacgaacaggatcgtaggctgggtgaattagggcggcggttgactgaactacaaggcctggaagcacgatggaaggctttgccgccaggagacgccaatagagatcaggccgacagggagcgtgccgctcacgctgccgcgcacgctgtggaggcttggcgtgaccaagatggtaccgccctggaaagtgcgatttctgaagtacgtgctctttttgcagatatcccctcgctggaagatggacccgagaaaagcagagtcgaagccttgcgccgcgccgaggttgaggagacgcggtgctccaaactgttaaagctgcacggtgaagccttggatcgtggcaatcaattgcgtgccgtagagcaacgggcacgaagcagggtggacgaaatcaacgaaagcctctctggagcaatgcgagacgcgaaagctcttgcaagtgcacttgctggcattgttcctcacatcgaagacgaaatctgtccggtttgtgatcgcgatttttctgatcttcattccggtccgctttcggcgcaagtcgccgcacggattgcgacgcttacaagcgaggccgggcgtcttcaggccttggccagcgagcgcgcagaggaggctcgacgcattacggaggctcaacgggagttgcttggcctgaatggcgctgtgctctcggcagaggatctcgcggagcacacgctgcgacgcgcgcgaatggcggattcttgcagacaactgcgcgaactcgctgaggttgcggaacgtggcacctcacttatggccagcgcctcttccgcacgaaatgaggtcagtatggcacgccgccatagcgagcaaacgaactcggtgctgccggacttgcgcgagcttgttgttcagatcactggacgggaagtatctacctattctggccttgatgaagccattgccaattcgttcgtcgaaattagctcggcaattgatagcgcatcgcgcttagcagacctacgcatgaagtgcatctcagagatcagccgccatactcatgaattagagagaattcgtgatctgaaatctagcctgggcgataacctgaaaaggcttgaggacaccaaacaggcgttgaaagaagttgagaatgaccgtattcgagcaaagcaggtatccgaggctgccagtgcggttcgatccgggatcatccatcaggtgttcagcacctcgctcaatcgaacatggcgcgatctgttcgtgcggctcgcgccttcagagcagtttgtgccggctttccgccttccacaggatcggtctggccagctcgaagccgtcctggaaaccatacaccggtcaggcaagccatctggctcgccaggagcgatgctaagccaaggtaacctcaatacggcggcacttacgctgtttcttgctctgcacttgtcagtagaagcacgcatgccttggctgctactagacgaccccgttcagtcgatggatgatgtacatatcgcccagtttgctgctcttctgcgaaccctagcaaaggggttgggccgccaagtcatcatcgcaattcacgaacgcgccttgttcgattacctcactctcgaacttagccctgcgttcccaggcgacagcctcattacagtggaggtctcacgcacattcgaaggagatgctgtcgccagccccactgtccacgggtttgtgagggatggcgccattgcggcgtga

SEQ ID NO: 508776 - DNA, 624 bp, Stenotrophomonas maltophilia
atgctaacgctgattagacacgcagaaagctcggcaaatgccggcctggcaacgcaggatcctgcatcaattcccttgacatctgcgggcgaggcgcaggccaggcagttggcagagtccgcgctcccgtccccagtgacagctgtttggagctccccctacctgcgatcacttcagacagcgtcacccactgcagagcgatttggtctcgttgtccagcagcagcccttacaggagttcacctatctatgccccgtcaggtgtgcgggaacaacccctgctgagcgaaagcaatgggtggatgagtactggtggcgcggagacccacactacgtggatgggccaggtgccgaatcattctccatgctggtcgagcgagcatatagcgcgcttagcttgtttgattcgggaactgacgatgcacatgttattgccttcagtcatgggcagttccttcagatgatctactggttgagccggtacaacggcacgccggcatcaacagccgggatgcaagcctatcgtgctctggatacgcaaagaccaatccgccactgcgaaggtcttcgggtcagtcgccccagcagactgtcggtggcaaacatcgcgcgatggccttcgtaa

SEQ ID NO: 508777 - DNA, 177 bp, Stenotrophomonas maltophilia
gtgaccgaactagaccgctacctcgatgcggcgacgcgcaaaaccttcgcggccagcatgggtccgatgaggattcgggtgagcgagctgggcgtcaaggcctctccttccctccgccgcgtgcccgttaggttaaagctcagcagcagcaagaagctcagagggcctgaggcctag

SEQ ID NO: 508778 - DNA, 399 bp, Stenotrophomonas maltophilia
atgaaattgacctcatttattcccgcaatgacgatgctgctactggtggcctgttcacagccgcctagcgactccggtacacagggcaccgacaacacgccgatgccggctgcggagcacgcgcaaatggccgaccaggcaaaaccggccgctggcgacgtggcggagccggccaaggccacctccgccacgggtacggtcgaaaccgtcgacgcggccgccggcaagatcaccatcgcccacggcccggtggatgctctggggtggccggcaatgaagatgggcttcaaagctacacctgaacagatcgcctcggtgcaagccggtcaaaaggtgcgcttcgagtttcaggcgcaggacatggaggccacgatcaccacgatcgaatcggctgaatga

SEQ ID NO: 508779 - DNA, 165 bp, Stenotrophomonas maltophilia
atgaagcgatttttcgctatcgcaaccttgaccaccgtcatcggactgctgagcgcctgcagcactacgtcggccgcgtatcgtctgggctcggtgaaggccgtgttcgaccacaccctgcagtcgtgcttcgatccacaggccacgccaccggtcgcgcgttag

SEQ ID NO: 508780 - DNA, 1488 bp, Stenotrophomonas maltophilia
atgacatccacgacgaaccgtttgatgttggcggccgccgctgttgggctgctgaccgtgggactcggtgccggctactggttggcgcagcgccatgccggccacgacatgaagcaaacggccacgcccatggcgagccagggcgagcgcaagatcctgtactggtacgacccgatggtgccggaccagcacttcgacaaggccggcaagtcgcccttcatggacatgcagttggtgcccaagtacgccgacgaagtcgccgacggcggcgtgcgcatcgacgccggattgcagcagagcgtcggcattcgcactgcgcaagtcgaaatcggtcgcttggcgtccacgatgcgcgtgccgggaacgctgacctgggatttgcgtcacgaatcggtggtgagcgcacgcgtcgaaggcctcgtgagccgcgtgcaggtgaaagccccgtatacgaaggtagcgcgcggccagccgctggcctcgcttctggcgccgagttggagcagtgcggcagctgaggccgaggcattgcgtcaggcgcagtcgtcttcggcgcgggagctgcagtctgccgcccagcaacgcctgcgcgtgttgggcgtgcctggcggcatggctcgcgacggcagcgcgacgctgagttcgcccagtcacggtgtcgttaccgaagtgctcgcccgcgaaggccagacggtgatgccgggtacgccgctgttccgcgtcaacggcatcgacacactatggctggaagcagcgattccgcaggccagcgccacgtccctgcaccccggcacgccggtggaagccagggtcagtgccctacccggccagaccttcgtcggggaagtcgaagcgctgttgccacagctcgatgctgccagccgaacccagcgggcgcgcatcgtgctgcgcaatcccgacggtctgctcgcgcccggtatgttcgccgaagtgacgctgcaaccgcagaccggggcggcggcggcactggtgccgaccgaggcgctgatcgccaccggcgccgacagccgggtgatcgtgcaaaacgccgacggcagtttccgccccgtgcgcgtgcgcaccgggcgcagcggcggtgggcgcaccgaggttcttgccgggctaaccggcggcgagcgcgtcgtcgtgtccggccaattcctgatcgactcggaggccagcttgtcgggtgcactggagcgactgggagcgccagaagccatatcgccggcaacgcccatggaagcgccggatagcacgacggaaaccgcttcaacaccggcaccgacgaagaccgctgttgcggcacctgcgcgctcgtgccccgtgcagtactggtacgacccgatgaagccgaaccagcacttcgaccagcccggcaagtcgcccttcatggacatgcaactggtgccgaaattcgcgccggatgcggcacccgattgcactgtccgcgacgtgccgtcggcaggcctggagaagcagccatga

SEQ ID NO: 508781 - DNA, 174 bp, Stenotrophomonas maltophilia
atgaaattgagcctggcacgcgtcaagcgcccccgtcgagcctcccctagatgtgggcgctaccagtcaatggttcctatgcccctgcaaaagcctatgcccctgagcgtaaaggccgaaaatgttgccgaactgtcgaagggccagcaagctgttcaactcgaccgttcttga

SEQ ID NO: 508782 - DNA, 2328 bp, Stenotrophomonas maltophilia
atgagcttgcacttcaaggcatttgtccagcttggaaaggaaattgccgcagctcaactcctgacgtgggatattgctctagacgctactgggtcggcggtcaggggcgatgagtggaacatcacagccttggctggcggggtcactcctaaactgtatctccggcacttcgggtcagagcctgcagcacttgctgtccttaacgagattcgtctgtctagcgcactacctatgcgccagcctgtcattctttcgcagagctggcaaaaccttatcaaagcgacggtcctggagcaggtcttcatgcgccggaattcgcccggccatgtggcgaacaacgtggtacgcccccttcgagttctggccacttgtgttggtgaaacagagccatgggacatctcgattgacgacatctctacagcaatggaggttgggggtagactccaggcatcaggaaagctgagggacctgatcgttggacttgttaaggtcgtgttcgatggcaatcacctttcggatcatggcccgctctcccctgccctgtcttttcaacggattaaacctcgccagagccaacgtgccagctatctgaagtcgcagtccgagatcagggagagtcttgaggatcggaagtcctctgagcgcctgccggaacgtcgcgcattctgggagttggtgagaattgtcatgacggagcaacccttgagtttcatggacgaactgcgatttgcagccattcgaacgatgattcttactggtttcagaattggtgaggccacttcattgccggcggattggcgcaccgagcgtcactattacgacgcgggagggaagtccgcggatcgtctaggtggattctcgaaggcgctcatgattcgtcactttgcggagaagcagcggtcaaaggcagcgaaaagcactgctctaatcgagaagacgcactacgtacctgcgatatttgaggagattgtttcggacactctaagccgtgcggaggcaatcactgccccaatgaggcggacactgcgcaagcagaccgaattgggccgcgcgttccccagctttgagccttccgatctcgttcgtgtgactcagatctacccgcacctaacgggaaactctttctggctcgatttgcccgacgatctcaggaggaaatggatagcgcgttgtcgtaaggactactccagtgatcgctttgatgagattcagctcactcagatgcagatgttagctcagagggatgcgaaacctagtgctgccatcgaagtgttctttcgacggcttgcgggcgatcgcaatcaccctctggtgctcagaaactccactggagagtgtatttcattccgcgctggtcgcgatcttcactctgtttatgtgaggattgaggatgtcgagaactatgttcggacggtgacgacctccaagcttcctgatacagagtactttgagctggtggatcgcagcttcgcttcttgggagttcctcttcctccacccgaaacgatctctaagtgaagagaggaatggtggtctatgcgatgtaacgcggtacttctctgtcgggcgacctgaccagtcgcttgtcggcatgtatcttggcgatcaaaagtctaatgaaacgctattcacccgctatggtgagtccgatgaagatcggagcttaacgctcacatctcactcccttcgccacctgcagaacactgaactttttcgcctcgggatcgcagatacaataatttcaaagcgcttcaaccgtcgaagtgttgctcagagttatgagtatgatcatcgcagtctcgctgaggacctggatcagctggagcttcccgtcgacgttgaagcctcacttggcgacaaagcaagcacggtcgcaaggttgatacaagctggtcgggctacaggtccaatcgtggattctttcaagaggatacagagagaagaaggcgatgtggctgcctttgaattcctgaaggtggaggccgacggatttcacgcaacaccctatggtcattgcttgaatagcttcaccgttgacccttgtccgaagcaccttgagtgcttctcgggctgtagacatctctcggcgaccgatttgccagagaatcggtctcatcttcgatccctggaagtgaagctgattgctgcaatcgaactggcagaaggtaggccatcaaatagcgttggacgaaccaatcagatcgaccacgcaaaggtcaggcttgatggagtacgcacgctcttgaacacacgctccggcgagaaaccatttcccgatggtccggacctttcacttccccgccgcaacggagtcattgatgagtactga

SEQ ID NO: 508783 - DNA, 1515 bp, Stenotrophomonas maltophilia
atggatctatccaaagaggcctatcctgcaggtgattcgggtgtgatacgtgaggtcgtcgccgcactccccgccctgccatcacttgtccgataccacgatgattttgatgacaagcaacgttccataagggacattgcaagttgtagaaaggtaggtgtccactacgcgggacgtgtcactcccctctcctttgagtacagctccgagcaccttgctcagctaatgaagcacgttttcgtgcttctgatcggggaggatgtcgcttcagtaactgcattgcagtatgtgtctgctggaaggaacatttctccggagtatgccactaggttgctgtcagctggacctgcgggagttgcggcagtttgggccagttttatggagttagatcttcccaggcacacatacgcatgcgccaaggcgatgctgcatcttctctcgaagcatcgccttaacgggtggtcagaagattacttggagttgctcaccaccctgcccttgccgttctacgacaagtacgcggtggttcggtccggcggtgcatttctttccgccgaggcggaagcgacgattgtgcgtttcctggatgaggctgcctgcagcctggatgggggcgaagtcgatgaagtatcgctgcaagatgctgcaatgctgctttgcgcctatcaatttgcaatgcggcccgtgcaaatcgcgtcgcttacctttcgtgacattcggattcgcgccgatccgaaggggcaaaccccctcggtgcatctgacgttccgcatggtgaagcagagaaacaatgtggtagccaaggcgctgttgcgccgagtgaagtttgagtggggttccatcttcgtttccctcagtatgctggcgcaatccaatggcgcggaagctgcggatagagcttttggcgttgaatcttcgtatgaagctggcctgcgcatcagcgcgctgttgcgaagattgacggggggcgatgagtcgacctacaacctccgccacactgccgctcaacgactggtggacgctggcgccagtcatgaagagctggccgagtttcttggtcactcaaattcatcgacagcgcttgtctactacgagacgtccgtaaatcaggccgaacgggtgaatcgagcgctcgggatatcagagatctaccagcgcgtggcgagcatagctcatcatcgatacatcacgccggaggagcttgctcgactcaagggtgaccaacagattgctggagttccgcacggtgtggcgatcgcgggaataggtggttgtacatcgggccagccggcttgccccttcaatcccataatgtcgtgctacgggtgcagaaggttcatgcccgtccaagatgtagagatgcattctagggttctggatgatcttcgcggaatcgccaggttcttccttgattcgtcgcgtagcgactcggtctcgcccacctatcttcagttgcagagaacaatctccgatgtcaaggctgtcgttgcggaactggaggatcttgtcaaatga

SEQ ID NO: 508784 - DNA, 1218 bp, Stenotrophomonas maltophilia
ttgctccagcagcttagcggtgctcaagtgcccagcgtgctccacggcccactactcgtggatgacgctcacggacttcctcggtactgggcgaccgtctgggccctcatggatggctcatcactcgctcgatccagcttgatcaagaagctccggcacattgagagcctctatgcccatgctgacgctctgttcggccacggctcgttggatgacgctcttggctcaatggacgacgctcgtctgtcagaggtactggagtcctggttcgtatcaatcaagaatcggccgctctcaggggcagcagatgatgcgcgctggaagactggctactccttcgcaacatccgtcattaccaggctatccaagacgtcgcttccagcagatcgtctccgacaaatggagacgaggctgcaccggatgtcgcacctctatgggcagcttcatgttcaaggacgccggcgcacaactcaattgcggtctctgcctgcgagcgtggtatcggcgctgtacgaaacgcttgacccttcatcgtgcgcgaatccctttccacgagagcgcacgcgctggcttgccttccttgcatttctgttgatgcttcatcaggggctacggcgcggagaggttctgctgctatccgcagatgctgtaaagggaggctttgatgaaaggctgggccgagttcgtaattggctcgacatcaaggaaagcaagtactccaacgatgacgatccgcgttactcacggccgagcatcaagtcagccaacgcccttcgtcagcttccggtaagcgacatggtcgcggggatggttcaggtctatgtggagaactaccgaggcaggcccaatcatgcatttctcttgaacacacagcagaacactccgctttcaacagagtcattgacgaagatgtttgcgaaggtgtccatgagccttcccaggcccgtcatcaaggatctcagtgatcgcaacggaagaatcaccgttacacctcacgatctaaggcacacgtgcgccgtgatgcggctgaatcaattgctcggtcagggcgattgcatggacgaggctctgcagaagcttcgttcgttctttggatggtcaagggagtcgcagatgccggtccactatgcccgagcggtgttcgaggatcgcctgtcgaccgtctggaacagcgagtttgatgcaagggttgaagtcctaagggcgcttaacttctag

SEQ ID NO: 508785 - DNA, 492 bp, Stenotrophomonas maltophilia
atgcctttccccatagatgcactggtccccactaccacttcaggcgtcgaccatggagggttcgtctttaccaatgacgggtggggcatcaggacctactttgaagagtcgcaccaggactatgacggccttatttacctgacgggcgaaaagaccggcacctttgaacagttccgttcacatgaacgatgcctcgcaatcgcgacaggttaccgtgctgtgattgagtacgtcggagccccatgccctcccagcaaggccatcccacggggatcgctggcaattcatgaggctggccattacatcgtttcccggctgcgagacgcgatgtacttgacaaagttcgacgggctagaagcaaccggcattaacggcgcgcatctgttccatttcgccaaatgggaagtgtccatcatcgatgagaattctgcgcgtgtcggcgacagtccgctgttcgctgtggaggccatccactccaccgcggatgtttga

SEQ ID NO: 508786 - DNA, 210 bp, Stenotrophomonas maltophilia
atgagcaaagcgagtgagcacgtggaaatggccttggtgcaggcaatcttcacccaggcagcggcacgtgccattggggaaaggaagggacagatttcattcgaaggtattctcgaacagtccgtcgcagcggcccaggtcatgagcagggcgcatcgctcgcgtcagaacgacgggcaggatgaatggctcaagagcatggggcgttga

SEQ ID NO: 508787 - DNA, 495 bp, Stenotrophomonas maltophilia
atgagcttccccgtaaacgcgttcgttcgagcaactgcaaaatcggtacctaagggcagcctgttctatgctggaggcggctggtggttccgaagcgagctcatccttccagctggcgttcgccagaacattcacgcgctcactggtcctcagacgggccagattggagaagctggggatatctcaggaaccacccttggcgatgggtactcctgggaaattcgggttaaggactacaaggacgctgcactttccgacaaccagcttgccggaacaatcgtggttaaagctgacggcagcatcgaaatctggggccacctgatcggtgtgcctgagcataagcatgggttcaacctagccggagatctgaccgagcaggcacaccttgccgaggaacggccctacttcttctaccgggattacgaagtctggctgatcggccaggatggaaaacctgtcggtggacgtccgctctttgaagctggcgcccagtaa

SEQ ID NO: 508788 - DNA, 234 bp, Stenotrophomonas maltophilia
atgacctggttgattgtggtagctactggcggtgcggaaggcccaacggggacgttcttgcaggcccacaatgctaaattgctgcgcgcaggagtgtggagtctcaatgccaacatggacgctcaggatttgctggactcgctagccgcgttcaaggggccggggggagacgtcgcggtatttgaggtaaagagtggttctgggacggctgggttcgtaacacctttgccctaa

SEQ ID NO: 508789 - DNA, 318 bp, Stenotrophomonas maltophilia
atgcagcaggctacaggacaggcactgtctgtcaactttccggcacaccacgggtactgcgactgctgcagtaggccagcatcgtggcaccggcgcgaggccattcgggggcagaggtccacccccgccggctcgttccactatcagatctgcttcgagtgcctggaagagatcgaagcgcttcctgatccgcagcgggaggcgtgctacttgttcgcgctggtccaccatgccaggacttattcgaaagagttcggcgactttctggcagggtggtttggggttgaacttgaccaggcggcgaagcgcgccgcgtag

SEQ ID NO: 508790 - DNA, 720 bp, Stenotrophomonas maltophilia
atgaacggactgaccctgaatggggaggcttcgattaccagccgggagatcgcggatttggttggatctcgccacgacaacgttcgtgttgccattgaacgattggtggggcgcggtctgatcgctttacctgcggtgcaggaaatctccaccggcggccgccccagcctggaattcctattttctggagaggacggcaaaagggattcgattgtagtggttgtccaattgtctccagagttcacggcacggttggtggaccgctggcgagagctagaggaagtagtccaaaagagtcgctttgcaatcccccagtcgctgccggatgcgctgcgatatgccgcggacttggcagagcagaaggcgttggttgaggttgaacgggatcgagccatagccaccaaggccgagatcggcagccggcgtgaggctacagcgatggcgactgcgtccacggcggccagaaaggccgcccagctggaagaggagctgggtcgaggctgcaggcaggctaccgttctggcagtggagaaggccactggagcactggaaggcagcatcaagtggcagccgctgaagcagtggtgcaaggaccacggagtggtggcagaagatgtgccgtgttcccgattcgggaaggccaaggcatggccggccggcgcctgggcggaagtctactgcgtgatctccgcgactatttttcgccaagaaaggttgtga

SEQ ID NO: 508791 - DNA, 150 bp, Stenotrophomonas maltophilia
atggaaaaagcgcacgtcgttgtccggatgcctgtcgatctgcgcgactggctgaagcagaaggccgatgaggatcgtcggtcggtcaatttcatgaccctcgagctgctggagagggctcgtcgggaggaccaggagaaagcggcatga

SEQ ID NO: 508792 - DNA, 465 bp, Stenotrophomonas maltophilia
atgaagggcaaggtgatcggaggcactttcgccggtgtcgtgctgctcgctgccggcgcgctggtcaagccgtgggaggactggtcgccgacgccttacatcgacatggtgggcgtgggtacgcactgctacggcgacaccagccgcccggacaagccggtctacaccgagcacgagtgcgccgaaaagctcaacagccgcctgggcagctacctgaccggcatcagccagtgcatcaaggtgccgctgcgcgagcgcgagtgggccgcggtgctgagctggacctacaacgtgggcgtgggtgctgcctgccgctcgaccctcgtgggccggatcaacgctggccagcccgccgcgagctggtgcccggagctggaccgccgggtctacgccggtggcaagcgcgtgcagggcttggtgaaccgtcgggccgccgagcgtcggatgtgcgagggccggccgtga

SEQ ID NO: 508793 - DNA, 240 bp, Stenotrophomonas maltophilia
atgccgaaccggatcaaccatggaacagacatgcggggagaaatcattggcgcggtgggaaccgcagccctgaaggtcacgccgccggtaacggtggccacggccatcgcatcggggttcaccttggacaaggcggtgctggtgctgactaccatctacctggtgggccagatcggctacctggtgtggaagtggatccgcgaatggcgccaggcgcgccgcggcggggtgatcggatga

SEQ ID NO: 508794 - DNA, 552 bp, Stenotrophomonas maltophilia
atggctgaaacggattacgtgaaagagttccagaaagcgaacctgcatatcaccagcgtgatcaagaacgtggccgagtttctcgtcgcgatcgggctgttctccttcgtcggcaaggcctacgattcgccgcaggcgtccatcgtcagcaacgtactgctgatcgcgttaggttcctacctaacggcaagtattcagcactacacattgatgatcccgcgcatcgggaagaagtactatggcctactcttcgctctttctgtcgccatggcattcggcagcgccgtcgcgctgcagacttatctactggcgccaacggtaaaagcaatcgaacgccagctagccactacgccgcccgcgccccagcctcaagccgccccctcacacgctgaaatcccggctccaccatcaccaggtactgccgcaccgaagccggccgctgcccccctcagcggcagcagctgccacgtctacacgctagttctgaaggccacgacgttcacgccgcaagcctgttggggagtgatctgcgccatcgatgcctctgcttga

SEQ ID NO: 508795 - DNA, 696 bp, Stenotrophomonas maltophilia
gtgaacagtaagaccattacttcagtgggatcggttgctacggcaatctggttggtgctcatcgcggcctatgtctgggctaagtggtcgtgtttcctggccatggagcctaattccttaggggacttcgtcgcgggtgcctttggccctttggcgttgttctggttggtttgcggctacttccagcaaggtctggagctgaggcagaacaccgaagcgctgaagcttcaagtcgaagagctcaagaactcagtgctccaccaaggcgaaatggctgaagcatcgcagcggcaactccagctggagatcgagcgattccaagaagaaaagatgcgcgatcaagcgttgcgtgacagcgccgctccaaaacttcacatctcaaacatcaaacagccccctagctatcggggtagggatctctatgatctttgcatagatatcaagaacgtaggtgatgaccttgaactgcttgagtacgaaggcacaggccttgcgaggcaggtagtaactcaaggcagtctcaaagccctccaaacgctacgggttaatattgcagctatccctctacggcaaacctcaaacacgagcgttgtcctcaaggttcgaagtcgactgggagagatccacgaagctgaaattcgtatctctttccgagacggcgtgtactcagcccagattgtgggggccgtcaactag

SEQ ID NO: 508796 - DNA, 177 bp, Stenotrophomonas maltophilia
atggtggatatcctgaagatgaacttcgagatgggccgcacccagctgcaggggcggctcgttgaggcaagcctgccggacaacctgtaccgcacggccgaggacgagttccgcaaggtgaaggacgcgatcctcgatggcgtcaagaacggcaagtacgtggtgccggcccactga

SEQ ID NO: 508797 - DNA, 237 bp, Stenotrophomonas maltophilia
atggatatttactctgaactttcgagcgcagtgaaagaggcgccagtacgcccgaagggaatcagactcagcttgcaagccttcaagcaattggaggcagagggtcacatcacgcgtgcaagtggcggcccgctgggacttgattggttcccaaacatgccttggttcgataaggacatctatgcatggtgtgatgttgagttcgacggggttttccagttgccccgcgcgccctaa

SEQ ID NO: 508798 - DNA, 426 bp, Stenotrophomonas maltophilia
atgaggaacctgacactggctcacgccgctcgcgatgcggtgtacctgtgcgccgcctgcggggccgacgggattgtccgaatcagcattacccgagatcccgagggcagcatccgccggcgaccgaacgtggttgccgcacagtgggcgtgggtcggtagcgagtcgagggcaaagctgctggcgcgccgactccgtggcaagtgggcggcacgccacatcgtcggcgagggctaccggttcgactatggttccgaaggcggacccttccgggacgagctcgaccgggcctttgaggcggttgtgggcggctcggcggcatgggagaagttggggccgagcgccctggcgaccctccggggggcggtggcagatggctcggcgaagtcaccgggccgggcgtggcgcctgagtcctcaacgttga

SEQ ID NO: 508799 - DNA, 633 bp, Stenotrophomonas maltophilia
atgaagttggtcatatctgggacactgctattggcattggtaatgagcgcaccagcgaaagctcagcagccgccagtgcaaacaggattgggggaatgcgtagatttcgtcatctttggttcgcctacattgatgaatcaggtgaacacggccccctacacctttaagtactccaacgcatcatggattgataaggacaacaagatcgtctacgtaatgaactacacctgttctcctgacaatcttcatggcctcaacggggttgtgggccaggtctcgcatgagatggggcatgcatttttcgatgcgccggcatctttggcaggtcccaaggacgcattcgtcaagcgaatgtgcaccgatgaggggcgcgctgttctgaacaattggacagcacgatcagagatcttgaatacatcagaggggacggtagaaattccgctcatcgcttcaaatgcctcacagctacaggcaatcatactggctggcggcgagaagcttgacgaaagggttggcagcagtttctgcgacaacaacaccaattcgttgacaggcgagaactatcgaaccttctacgggaaatggtacgacgagaacgtcggcgtacaatccctttttggcacggaggtctga

SEQ ID NO: 508800 - DNA, 321 bp, Stenotrophomonas maltophilia
atgacaaggaagaccgtcagcattctgctcatcgtgtttgtcgtactggctgtcgtgatctacacgcagctcacgatcttcgtcatccagcccatcggagctgttcccgagggcaaaacgctggtcatccttcggctcaacaagaccgagttcatcgacagcgccgatgccatgtgtgagcgagagatggggggcgtgtcgctgctgtgccgcctgggaatgatgggcggtgtcgccagcaacagcaccgtcttgctccgcttgccgtatagccaagcgctttacgacatttccacgggtggcaagagttacgaccgctga

SEQ ID NO: 508801 - DNA, 468 bp, Stenotrophomonas maltophilia
ttgcgtctgtgtatcctgtgcctaatggctacgacgaatttcaccgagggtttcgctgaccgactgcggatatcgcgggagagccgtggcctttcgcagcgtgagcttggcgcggaggcgggcgtcaatttcagccaaatcagccgatatgagcaggggatcgctacgccaagacctggcgtgctgaagaagctcgctgaggtcttggggacttccatcgaacacctgcgtgatggacaggcgatggagcgagtctctttgtactatggtgacgacgaagagccgctcatcacgatcaacgtctccgaagctgacatgcaattcgtcagagcggctgcctctgaaagcggtagaactgtcgacgaggagatgacccgcatgttcaagctgggaatctcgttcctcaacagagaatctgggcccgctgcggtagataagaagagtgcagccaagccaaaaaagcgctga

SEQ ID NO: 508802 - DNA, 234 bp, Stenotrophomonas maltophilia
atgcacgccgacatcgattcctacgagaagggggatcgggccccccttgcgtggctggttgcagcggatcggccgcgagacgacaagcaggtcttggatgccgctcgccaggtcctgtcgttaatcgagaaggacgtcgcaacagccaagggtttcgtgcctgcattgatccaggccacaaaggacggtggacccatcccggaagagatccatagcttcttggcgcaggcttaa

SEQ ID NO: 508803 - DNA, 738 bp, Stenotrophomonas maltophilia
gtgacagacctcgtaacccttagcggtgacaccgcagtgacctgcaccctcgcgatctctgagggcacgggaacccagcacaagaacgtcttggatctagtgcgcacctatcacgaagatctggaggagttcggaagggtcgcgtttgaaacgcaccccttcacgacggccggtggaatccagactcgggaagttgcgcagctgaacgaacagcaggccaccctgctcctgacgtacatgcggaacagcccgatcgtgcgctcctttaagaagtccctggtgagggccttctttgacgtggcccagaagatcaagatgcgggcctccgatccgatggccgtcttgaacgatcccaccgcgatgcgtggcctgctcctgacctacacagagaaagtgatcagcctggagcagacggtcgcggaacaggcgccgcaggtggctacgctgaatcggatagctgcagccgatggctcactgtgcatgcgagatgcggccaaagctctgcaggtgcgccccctggatcttcggcggtggctggtggctcacgggtggatctaccaacgcgcgggccacagtggatggctggcctaccaagaccggatccagcaaggggtcatgtgccacaaggtcacagtcgtccagcgcgaagacggaaccgacaaggtcgttgaacaagccaggatcacgccaaagggcatcgctcgcataggcgctgaactggcaaaggcagcggcatga

SEQ ID NO: 508804 - DNA, 261 bp, Stenotrophomonas maltophilia
atgagcaacgcggtcacgccggaaaagaccaaggaaatcgcaatcaccgggtcgccacttatggtggtatccgggcaggatctggacgtggcactgagcaaagccagacttctcaccgatcacgtacaagccctgctgtggcaaggcatgcgagatgccgatggcaaggacgtctcgttcgagtacgacgaggttgtgacgatggacgtccttctcgatattgcgaccggcctgtatcgagccgcaggagccgaagcatga

SEQ ID NO: 508805 - DNA, 261 bp, Stenotrophomonas maltophilia
gtgatcgaatcgcctgctcctgacccgaccatcacggtcctggccgcgatgatcgagggcgaacgctggcttagcgcagactcctgtgccgtcctcttggggctcacgacgccggacgggaagcccaaccggcgcggcttcctcgaaaggcttgcgtgccgtcccagcttccctgccccacttcagatcggaaacgagaagaaatggaagcggtcggaagtcctacgttgggccgatgacgagaggaggagcggcggctag

SEQ ID NO: 508806 - DNA, 147 bp, Stenotrophomonas maltophilia
atgccgaagaagcgcgccagctccgcatcggtctggaaccccagccgcgtacgcacctaccgcttgttccagaattcggtcatggtctgcccttttgttaaccagacttattcttgcggcaaggattcttcgcattccacgcgttaa

SEQ ID NO: 508807 - DNA, 873 bp, Stenotrophomonas maltophilia
atgatagatacctcgttcaagccaaaccgtgactgccaacaacggatcgcctggcgacgcattgcatcgctggcggcggcgctgtcggccttggcgctcatggccgggatctgcagcctgcgcccgaggtggcagcaggagatcggtcggctaccgatcaacctgggaacagcgcagatgcaggcggaggcgatggcgctggcgatccggcagagccccccattcccccctccacccccgccagtgccgcagccaacgccagttctgccatcgtcgctgagcgaggtgcccagcgcaccgcagacaccgtccacgcgcgttgatcaatggcgcccgcaggaacagccgcagttgaccgacccggtgggggaggacatctacgtgatggagcagaccttgccctattgctggccgggcagcagtgcctccatctgccaggaggtggacgacctggtcctgccgctggacgaccggtggccgccggacatccatgcgctgcggttgcagctgcaggcggacctggttcccgtcaatcgccggtccacgccagtgcctgcggccgcattggccggtgcgcagcggatggacggcgcggggcttcgagcgctgcgggagcaagggtgcggggcaacggtgcatgggccgactcggacatacgaccacgtcgcctatctgacccggcctgttttcagcgtcgatgggcagtgggctatgattgcggtcgcctgggattcgtgttccgacgatttcgtctaccgggagcttgtcgtgctgcatcgggaacaagaacgctggatggccgaacccccggaacggggtctgggcggcgtatgggacggccgcatactgcggccctggacgtacaaccactga

SEQ ID NO: 508808 - DNA, 801 bp, Stenotrophomonas maltophilia
gtgtctgatccgtacggaacgccaaatgagagcgaacagcatcaaaatttagatgtaagccgatgcattgaggttgaagatgaggtcgatatctccggaatagacttctttgaagacaatctaaaggagctcataaaattcacggcgactaattataaagatagagaaattattcgccttgcattacttggcctcgtatcactgactgagaactattttaggatcatcctttcagacacacttcgatcctgcccagaatcccactctctatgctcaaaatttgacgtaaattttgccagcgcccgttactactctccgcgatcgatcgcacgatcactagtggacagttcagttttttcaaattcaaccacaatcgcatcggagaccaaaaagctcaccggcatagatgtaaatgactcagaatccgtgaagaatgcattgagcgaattccataaagtatgcatccttcgccacgccgctgtgcattcgttcggccgcctaggcggaaagaatgttatggagcttggccttaggcaagccagcggcgtcatggtttcgccgagttatgatgcgtttgatgagatctgcggaatctgccagaaccttgtcagagcatacaattcttttatgtggagagcgatagtgagccgactcaaatccaagggcctcttaaaattcgacaactcaaatattgaccaagatttctttaccaccctacagaatgtattctggactcgaacaaaaatcgcctcagacgcaggcgtgctttatggggaaatctcagcccaagccacgggttga

SEQ ID NO: 508809 - DNA, 1500 bp, Stenotrophomonas maltophilia
atgaaacttgcgtattatgagacccttgaatccgaacacgcactgcctgtctacatcaattattcccactcgctagctcttgagccccttttccacactcaagcgaatgcactccgcctttttcgacaatgggtgcttctcaagatcttagtcggagttagcgaaacactacgtgagctgaaggtccctgcgaacgaagaagtttcctacaaagccaacgctgcaaaatcggcaatccgggatctggagcgtggggtggtgcctgagtccctggaaattgagacatctccgtccgagatgattgaattccttgaggcaaccatcctgcgaatcggtcgatccaggtgtgtccttcttatggacgacgcggctcacgcgttctcattagagcagcagcgagaattcttcgaaatattccgccagctgcgttcacgcaaggtagccggcaaggccgcaatctaccccggcatcacatctttctcccacagcttcaatgttggtcatgaagcggaaatcatagaagcttggtacgacccttcagaagagtattaccttcctctgatgcaggaaattgtgagaaagcgtctaggggacgccataatagtccggctcggctcaagctttgaggaatatataaatgtaattgccctcgctgcgttcgggcaaccacgcggcttccttaacatgctatccgatgtgatcggtgatgcaagcacagcaaagagcataactcgccgccgagtcctcagcgcaatcgagggatacgcctcatatgtagatggcgtcttccttgcattggcagatcgactccctcgttacaagagatttgtaactgcaggggagcgcgtcaagagcgaacttatctcaatagccaatgattacaatcgaggaaagccagcagagaagcgcactcagattgttggaatcaaggaaccactcaatgcaaatcttgagaagattcttcagttctatgagtacgcgggactcgcacgaagaatcaagagtcactcaagaggaaagattggcgtttatcagcgctaccaactgcactccgccgtaatcttctctggcggcggccttggactgggacagaatttcacaacagccgagctgactcgatcactttcaaattttgacgctcacgagtattgcaagatctccccctctcgcttgttgaaagatgtagtaaacgacttgtcacttgacctgcctccctgtgccacctgcggcacggagcgagcagctgcagagcaaaagttctgcatgaattgcggctccagattgaccgaggcctcactctacgaggagctcctcaagaagccaatagaaatccttccaataccgcgaaagaagatagacggaatcatcaagaccactaagattcgttatattcaagacatcattctggacgaggcacagacccttctaaaggttccacgcatcggaaaaatatggagcgccagaattcgaaatattgcggaggaatatgtaggtgtctga

SEQ ID NO: 508810 - DNA, 189 bp, Stenotrophomonas maltophilia
atgactggtcgcgcaaacgaaccgctggtggaggatctgatgcgcacggtgatcaccgttaccctccgttcgctcaatgaagatggagacatctatcgcgagggggctcgcgcatatgcatccgctaaccgggcaactcaaacgttcccgctcgcgatcccgagcgatgcatttcccttaatcgcgtaa

SEQ ID NO: 508811 - DNA, 849 bp, Stenotrophomonas maltophilia
atggaggtctactttgacaggaaagagctggaaaggaccgactttgtccagtgctgtctcttcaccggcgagattcctgccaagctcacggaagagcacgtgattccaaagtggatgctctccgctaactgtttgaatgacaagcgcattgagatgggatcgcgcaccgcattggctaggatgaaggagtttcgggctgcggcggagttcgtcgaaaaccagttctttggaaatgtggagaatcgggtaaagcagtgcatcgcgagtaccgacgaaattcacctttggcacaaaaagatctctgcgggtcttaccgttgcgcactggcggctggctcgcaacacgaataatcctcgcgctccaagtgagctggatgaggctgcgcttcccatcgtcctgagagatttccagagcgactatgcggcgttcaagcagggaagctaccaccgcacggggtcaaccatcagtcttaagtcgccgctgccagatgggtggctggcacacgttgtcggtggcctgaagcaagacgcaggtgtcgtcttccatcatcgaccttatgcgctggttgctacgtcgatccatggcgttctccatgtttcgatacttcacgattctgcgagggagtttgaggcgaggtacgcatctgaggattgggctattgctctggcaacctgcaacagttcgccgcgcatgcacgctgctcttgcagtaatgctgacagacttagtggacaaatggcttcgcgaaatgaatggtggaagcctgcctgagtctatgtttccgatgattgcgtatcagcttggcattgagattagaggtgatggaacttggggagtacgtcaagcctga

SEQ ID NO: 508812 - DNA, 3144 bp, Stenotrophomonas maltophilia
atgggaatgaagcattcaacacgtacgcatggccaggacgcactgtcgctggccatcgcgctggccctggccgccgccgtcgttccggccggcgccgccgcgcagcaggcaaccaccaccggctcgcaggaagccaccaacctggacagcgtccaggtcaccggctaccgctacgccatcgaaaagagccttgagcagaagcgcgacgccaatgccgtggtcgaagtgatcaccgccgaggatgtcggcaagttccccgacaagaacgtggccgacgcattgcagcgcgtgcccggcgtgatcatcacccgcagcggtggcgagggtaagaatgtcagcgtgcgcggcctggcctcggacctgaccctgacccagttgaacggcaattacgtcgccacctcggaaaccaatgacgaggcctcgcgttcgttcaactacaccctgctgccatcgaacatgctgtcggcagccgagctgtacaagacgccggaagcacgcatcgacgaaggcggcatcggcggcaccgtgatcctgcgcacccgccgtccgctggacatggaagccaactccggtttcgcctcgatcgaaggcacctcgtcggacaccagcagtggtgtcgacccgcaggcatcggcgatgtactcctggcacagcaaggacgagcgctttggcctgctgatcggcgcgaccaagcaggttcgcaccaaccgcagcatggaagtcagtaccgaagactggcagtggtacagcgaccgtgtcgatgccaacggcggcgtcatccatgactacgtctggaacgcggcgggccgcacgcgtaatccggccgtcgacgtgtacggcaacgccttgcctgacgcctcccagttctggggccgctcgggcatctacaaccagaatggtggccactactccggcttcttcatgccgacgtcggtcaacttcgcagtgcgtgacgagcgccgcgagcgcaccggcggccagctgacgttccagttcaagcccctcgacaacgtcacgatgacggcgaactacttccgcttcgaactgcagggcaactacacccagaacatgctgaaggttccggaatggaacctggcgcgcgtggcgggcgacggcaactgggaaggtggccgcatgctcaacggcttcaccatggaccccagtggcaccatcgtgaccggtgcgcagtaccagatgcagccgggtcgcaactacatctgcagcgaagaccaggccgccgccgccggcctgcgcccaggcggctggggcccggatgactgcaccatccctaccccgcagctgaccggcacctacagcaaggaaaaggcgctgtcgcagaccgcggacctgaccatcgactgggacatcagcccgttgtggaaggccagcttcgccggtggccggacgtggtccgaaggtggcccgtcgatgaacttccgcatgtcggccaagccgcgccgccaggtcaacggccagtggcaggccggcaacacctacagcgcgtgggacctgaccggcacgccgtcggtgaacttctcgcccgacctgcagcagcagctgatgaacggcatcgccgaagtggacaccggctcgaccgactcgtcgtggaagcgcaccgaggtcaagcagaaccacttccaggctgacgtcaccaagctgttcgaggccggctggctggattcgatccagttcggcgccaagtacagcgatggcaaggtccaccgcaataccggcaacacctactgggtctgccagggagccgacccgagcgattacagcaagcgttaccaggcgggttgtgattcgaccgccggcatcgcccagcccggcttcttcctgtcaaagccgatggacaacatcgccggtgggttcaacgccaatgtgttcccgggcatcaactacccggcctacatcgactacctgaacaaccgctacggcggcgtgcagaaccgtaccgaggacgacttcgtctacgacgtgcaggaaaaggtgtactcgggctacttccaggccaacttccgcaccgagcgcctgcgcggcaacatcggcgtgcgcgtggcacggaccaagcagcacgccgcctccagcgattcggtcgaacgcttcaatgactatttcgccgacaacgctgccggctcgcccttggcctgcaccgatccgtcagcagcggccctgctcggctccaacagcggctatggctgcgaaagcggcttcgtgcgcctgccggatgcactggcccgcgccaagacctacgaactgtcctcgctggaaaagacctacaccgacatcctgccgagcttcaacatcgcctgggacatcaccgattcgctggtgctgcgcggtgctgcatcgaaggtcattgcccgccccagctacaccaacatcgcctaccccggcggcctcagctactactccgatgagtacagcaacgaccgtcgcgttgccggtggtgccaccaaccccggctggtatggctcgggcagcaacaaggagctggaaccgttcaaggccactcagtacgacctgagcctggagtggtacttcaagccgggtgccgtggcgggtgtgggcgtgttccgcaaggacgtcaagaacttcaccgtgccggtggtgcgcgaccagcagatgaacgtcggcggccagaacgtgaccgtgcagaagtacgagacccaggccaacggccgtgacggcgtgtcgcagggcgtggaaatctacggccagtacaccctggacttcggcctcggcttccaggccaactacacctacaacgacaccaacatggcctcggtggagatcaacggcgaacagatcggttcctcgccactggtgggcagtgccaagaaccaggccaacttcaccatgttctacgagaacgagaagttcctcgcacgcgcctcttacaaccgtcgcggcgtggtggtcggtggcctcaacaacggcttcagctcttactccgagccgtacgaccagctggatctgaacgccgcatacaacatccgtgaagacctggcactgaccgcttcggtgctcaacgtcaccaagtccgagcagcgtgtgcacctgggcaacgacaccaaggcgcgcctgctgtccaacacctactcgggccgccagtattacgtcggcttgacctggaagttctaa

SEQ ID NO: 508813 - DNA, 258 bp, Stenotrophomonas maltophilia
atgagccgccacatcgcccgccgtgcgccgaaggagaccctgggcttcgcctggggccgattccctaccgttgacggcagcgccatcacctggcgcctgtaccgccgcgaccaccgccgtgcgctgcacatgcacgtgctgacgttcttcgcccatgaggaccgcgcggtgatcgccgggcacctgcgccgcgcgcgccgctgcctgcgggagaaggtggacgacatcgacttgatggcgatgggggtggcggcttga

SEQ ID NO: 508814 - DNA, 1803 bp, Stenotrophomonas maltophilia
ttgttgtttgtggtgtccactatccgtccggcgaacggcagctggtgggcagcggagggctggactcgaaattgtctccaactcaaacgtgaggcgccgccgctcaggcggatagttgtgatataccgtcgaagtattgggcgcgttcattggaagggggggggtatggacgaaacggtaatatggagaaacatatcaatcggggctcctgatgcggaggcggacacagacctccttgacgcttgctttgtcgatacgggaacactggagtcgatacagtcgacagagagtcatgcatccattgttctcggtaggacaggtcaaggtaagagcgccgtccttctccgcctgatggctgtcgagaagaattccgttcaaatcagacctctggagcttgcgtttcgctttgttgagaactcgacagtaatccggttttttgaagatgctggtgtgaatctcaacctgttctatcgcctgctctggcgacacgtcctagtaaccgaattgatacgaaagaagtttgtcattcgtgatcagaacgctctggatcgttggcttaccgcaatatcttcgaagttcaagagagatactgcgaagagtgcagccattgagtatctgcgcaggtggggtcaaagcttctggcaagagacggaggtgcgccttgtcgaaatcacagagaagatcgaaagcgaactgacggcttcgctcgagggaagtgctctcgctgcaaagatgcgcggcgccgcaggtgagaagctctccgaaactgagagagctgaggtcgtcagtcgaggcgcctctgtggtcaacaaaatccagatcgctgacttaaatcgagtcatgcagatcctggcagaagaggcgttcaaagatgagcagaacaagcacttcatcgtgattgactcgctagacgaagactgggtttcaagcgccgcgaaactcaggcttattcgcgcgctaatcgaggaggtgagaaccttcaggagtgaacttcgaaacgcaaaagtcgtggttgctctcaggcaagatctgatcgagcgcgtctttgacgagacgagggatggtgggtttcaggaagaaaagtacgaaagctactatgcaaggctgaaatgggatcgagatgacctcgagtctgtcgtcagaatgcgaataaacgaaatattccgtcgtaagtacacttctaagaagctcagtattgaggacatatttcccagagctagaggtggcgactctcccatggattacatgctggaaaggacgctccatcgaccaagggatatcattgcctttacgaacgagtgcttgcgcattgcagaaaaacgtccgaggatctcatgggcggcgatcggggacgctgaggcaacctactctagaaagcgcaggaatgccttagttgacgagtggttgagctcattgccatcaattaatatctcattggagcttctccagggggtcaatgagacctttactcgatcgtcaattactgatgaacggctggagcctgttgtcacgcagcttgccacttctgacaaggaagacgagactatccggctgtgcaggaaggcctttgagccgaagtcatcagtcacaatggcgcagcttctctcatctataattcgatcgctttatcatgtaggcgcaattggaatcaagtactcacctgagagtccttttttgtggtccttcagagacgatcccgacatctcaatgggggatgcaaagcgtgttgtatcaataaaagttcacaagatgttatggaaggccttggacatccgcactggtagcgcattcaagagaaaatga

SEQ ID NO: 508815 - DNA, 261 bp, Stenotrophomonas maltophilia
atgctgtatcatttcgtattccgagagataacgagtgatgatctcgatactcattgtcattttatgcctgaagaacatgagtttgagatgcatatggacgcgctcgctcatgatatcgaatggctagagggtgtcactgtggttcgtcgggatggctcccatggaatttcagtagaggcagacacggcgcgtgacctgctaaagaaacagctggttccgctgctccagaaccactgggcgtacttgcggattgagctatga

SEQ ID NO: 508816 - DNA, 807 bp, Stenotrophomonas maltophilia
atgcccacttcgattacgcagtcctctgattgggtcgatgtagttgcagccctcggtaccgccgctgcagctgttttcgctgcctatggcgcctggacctcccgagagagtgcaagagcagcccgcgatgcggttaatgaggcgaaactggcaaggcagcttgagctggagccgaagcttatccttgagaaggattttcttgacttgcagtttgtctggccacataaggatacgctcaatggagaagctgtctatttagccagaaatcactggaaggataattcgccttctccacccgtgttcaaacttcagaattttggccaaagccccgcgttggaagtgaccatcgaatggactctcgaaactgagaattcattcgatattcctttggggctcaaggccattggagtggaagtaacacccgccatgccacacgatgtagggggtggcccgaagagtcaactaaatttccgaaatacggacgggagcggatgtggagtgccgctttacttgaaatggacgactgacctagccaattgcgccccagggcagccgcgcgaagttgaatttccaacaatgatactcagttcgctttttgctaaggcactcgggcataggtcgaaatcgattgaaatagtgctaaatgcgaaactgcatttctactcaatagatggaagtattcatatttcccagtttcggtggaaagcgatccccttctggcatggtcagattagtcccgtcatggcgcacagtcatttctttgagcttcctatgtatccaaagccagaaggccctcgtgttgcgtaa

SEQ ID NO: 508817 - DNA, 696 bp, Stenotrophomonas maltophilia
atgttgtgggcaatcatccagccggtgatgatgatcggcatttataccgttgtgtttggattgatctttcaaccgcggtggccgtcgatcgccagtccttgggactatgtcctgatcctgttcctggggaagattccttacctgttcatcacggaatctttcgcatcggctgcctcctcgatgcgatcccattccaacctggtgaagaaggccgttttcccgctcgccattcttccaggggtttcgctggggagtgccgcctatcacgcgatgatcgcgctgctggtttgggttgtgttctacatctgcatcaagggcgccttgccatatgcagtgcttctgctgccccttgtctggctgcccttgatgatgatcacgctgggaatctgctggatcctggccaccttgggcgcgtacttccgcgacactgaccaggttgttggaacgttcaacattgcattgatgtttctgtcgccgatcttctatccgatggccagcgttcctccggtcctgaggcaggtaatgcagttcaatcctttgagctacgccatcgagtcttcgcgtgcgctgctgttgtggccagaaaaactggatctgttgcattaccctcttcatcttctcattgcagcggtcgtcatgacgcttggctatctgttcttccgccggatgagatctggcttcgcggacgcaatctga

SEQ ID NO: 508818 - DNA, 1341 bp, Stenotrophomonas maltophilia
atgtcattcgttctttctgctgagggacttggaaaagcctatccgttgaagccttcaccgggagcgcagttccgagcgaaatttttcaatcgaaagccacccgctaccgatcagttctgggcgcttcgcaatctcaatttttccgtggatcgcggagaatccgtcggcatcattggccgcaacggcagtggcaagagcaccctgctgcagctggtctgtggtgtcatcgagccaagcgaaggcacggtaagcacccgcgggcgaatcgccagcttgcttgaactgggggctggcttcgatccggagttcacaggtcgggacaacgtgttcatgaactccgcgttgctcgggctgacgcgagcggaaactgaagcacgctttgatgaaatcgtatctttcgcggagattggccgattcctggaggagccggtcaagacgtactcgagcggaatgttcgtgcggcttgcattcgcagttgcatcgcatgtcgatccggagatcctcatcgtggacgaagctcttgccgtcggtgatgcgagattctctgccaagtgcatcaagcggatcaggtcactgcgagagagaggctgcacgctgctcttcgtaagtcatgacgtaggtatcgtgcgaacgctctgcgatcgtgccctttggcttgattccggcaagatggttgctcttggcgatgtctttggtgtgacatcgcgctacatggagaagatgttcgaagataccgatgagtcggtagcgccggtttccgcagagactcaaagcgacccgcagctcgaaccggtggatcaggggattgcgccgcccgttgaagccgctgcgcaggatctggcaccaggcttgcttccaggcgagacccggttggcgccgatcagccattggggctcgaatgtcgggtcaattccctcatggtcattcgagggtgtcgatggaagaatcgccaaggtggtcgagtatggcgatacgcttcgggtgcggataagaatccgtctgcccgaacaggttgacccggccaatgtggcgctgtcgatgtcggtaaaagatctgcggggtaccgacttgttcgtggtgtcgacccacgatgagaatccgatgctgttctccggccgtgctggcgaggtcgaggtcggctttgaattcgtgaatcgcttgaccgagggcaagtacctcctggtactcgctttggaagatcgaaccatcgaagcgatccagtacttcgagtacgtcgaaggagcacattacttcgcggtcaccagtcgggtccggcgcttcggggtcttcaatatcccggcaaccattacagtcaagcaggagaaattcacaaatgtctga

SEQ ID NO: 508819 - DNA, 3159 bp, Stenotrophomonas maltophilia
atgtctgatgtgaatgacaaggaatattgggacgagcgtttcaaggaaaactgggccgaacggcgtggcagggagcagagccgtttttttgcacgcctgggtgtcggtctcctgcctgactggctgaaatggtcacttgcgtcggaccggctgacccttctcgattggggttgtgcgctcggcgatggaaccgatgtgctggcccagtccattgacggcgcggtcgtgagtggctgtgacttctcgcctgcagccattgaggacgccacactccactacccgaatattgatttccagtgcttcgatgtcgctgacgcagatgtcgaccggcagtgggattttgtcttcagctccaacacgttggagcatttccacacgccgtggaaaatgctcgacgcggtgtcgagcgtcgcgaagatgggtgtcattctgttgatcccatatgaggaatacctgaggatcgaggagcatttctataccttcgaggctggcaacattccgttccgtctcgatggcgatttcttcctcgcatatcatcgaatcgtagatggttcttcaattcctgaaacggaatgggccggaaagcagattctgctggtctatcttcgcaacgatgcgccactcgcggccaggctcaagctggggcacatcgccgcaccggtagctttgcgcccggacgttcagaacgaaggggaggctgcgctcatcaacgcactgatccaggaacgtcagcagtcggtgcagcagcgtctcatgatcgccgagcttgaggggcgcgtcagctacgagaagagcgtcgccatggccaggatcgaagagcgggatcgattgagcctggaagttgaagctctgcaggaagcggtatccaaggcggaggctttggcccaccagccggtggcggcagtccatgagccggcgcctgaaccggagccgccggcatctgaaccggaactgccgattgttgagtcgaagacccctgatttgccggttcctgagaccctgccgaagcagggcgcctcggcggagtcgcgagctcagctggtcgataccggtgcagacgttgcacacacccgtgcatcgatccgccgtgcggccgatcttgccaaggacctttcgtcgtatgcgtctgatatcaccgcacaacgcgatgagttggctcgacagatagagcagatccgtaccagcaagagctggcggcttaccggcccgctgcgaagggtgatggccaggttccgtggccaggctgacgcgcccgagctgccgatatcaaccagcctgcagggatcgcatggtcgttttgatcacctccggtctgaattggtggaggtcaagaagacgctggacgatctgaatcctgcaatgaaggcggatcgtcggatcttcgtctttaccggtgtgccgttcgacgacatcggtggcggacagcgtgcggcccagctgacccgtgttctgcttgagcgcggtgagcgcgtgacatacgtgtatgcctaccgcaaatgggaggggggggctccggtcgaaagtacgttcacgactgacggcttgacccatctcttcctggacaggatttctttcaaggacgtggtgggtgagatttcacccaacgacgtagctgtgtttgagatgccgcacaagggcttcatgccgtacttcgatcatttcggcgaagtggggggacggcgcgttttcgagctgatcgatgcctgggacagctccctgggcggggattggtttgatgaggcggtgatgtcgcgatacatcactgaaagcgaagtggttgttggtaccgccaaagtactgagggacaagcttgtagtcgccgggcgaagcgacgcgctctatctgcccaatgctgcaaatgaacgtattttcgattcctacaaggaatacgcccggccggcagagatcgacccggacaagcgttctttgctttactttggctctctctacggcgaatggttcgattgggatgccatcagcctggcggcgagccgcgtcgggccggctgccaatatctatctgatcggtgatgcgcctgctggtcgaactgtggccccgaatgttcacttcctcgggggcaagaacatcgatgagctgcccgcctatcttcgtcactgcgacgcggcattgctgccattcattccaggtcatatttccgatgcggtgtctccgatcaaggtattcgagtaccttgccatgggggttccggttatcgccaatgcgctcccggaactggacggctacccgaacgtgttcgttgctcgcgacggacagcatttcgcagagctgtgcgcgaccgaactgcgggcagaccccgccaaggtggacagcttcctgatgagaaattcctgggcggcccgtgccgatgcgatcgtgcctccgcgtcagtttggcaaggacaccagtgcgattgtgttgatccacaacaatgcccggatcatcgagcgctgcatttccagcctcaggctccatggccaggactatctccgggagatcattgttgtcgacaatgccagcaccgatggtggcgccgagctggttgaatccctgttccccgacgtgctggtggtcaggaactcgaagaacggatgcagctccggccgcaacctgggcgtgcagcatgcgagcgggtcgatgattgccttcttcgattcggatcagtggttgacgagccgtggcacctttgaggaggcattgtcgattctggcgggcaactcccgtatcggcgcggttggatgggccgctggttggttcagtggcggaactgaaagcgtgggggggcctattgctgattatcttccagcccgcgcaacgcttacgcccgagtatcgtgagctgggttacaggaccgacatcgcctacttgggctccggcgggatgtttctgcgcagggtgaccttcgatgcggtaggtggtttcgatgaggcatacgatccgacctgcttcgaggatacggatatttcctttggtgtactgaatgctgggtactatctggcctatcgcgatctgcaggggcttcggcaccagccccatcagaccaccgcggccagcgccggttccgagagctacgccgcgttgttcctgaaaaattcgcgctacttcaaggaaaagtgggcgcatcgcccgaactacttcttcaatgtcccgcttcatgggtga

SEQ ID NO: 508820 - DNA, 1293 bp, Stenotrophomonas maltophilia
atgcgcattcttgtattcagctatgagtttcttccttcggatgcgccgcaggcacttcgtgtttcccgcttgatgcgggaactggtggcctgtggccatgaggtggatgtcatcactgcgatggggccgacgtccgcgctaccattcgaactgcttgatggtgttgcagtacaccgggtcaatcctggtggcatcgacggtctcgtcgtccggttgaagcaggggcgggcagagcagatcgccagcccgcaggcgagtgctccggttcgtgcacacaaggggctgaactggaaggggaagtgcatccattccatccggagaatgaccgatctgttgctgttcccggattcgcgatcgctttgggtgaagggcgcgttgcggcgcgcgcgcgcgcttgtcgcgcgtgcgggcgtgccggatctgatcatcggatcgcatgagccggcggctggggtaatggcagcgatgcgatttgccggcgaaaccggggtggcattggtctctgagttgggggatccgattcttgctacctacaccacgcggcgttggcacgcgcgcgccttgcgtcttgagcgcgagttgtgccagcaatccgctgcagtggttttgacatcggccgcgactgcaaggcttttcgaggagcggcatggcgctaccgcagaactgcacgtcatcccgcagggtttcgatccgcaacccggtgcggctgatgaggaacgagtcgaagacaatgtgctgcgcctggtctataccgggcgcttctatcccttccgcgatccaatgccgctgctgcgtgcggttgcgcaggtccaggagtgcgcgcttgtgatggcggcaccggagcttcctcgccatgtacaggagttcctggatggcggccgcggcaactgctcatggctgggtgccctgccgcatgcggatgcgctgcggttgcagaggggggcggatctgctggtcagcatcgggaacgccggaatgacccaagtgcctggcaaggtgctcgagtacatgggaagtggacggcccatcctacatatccgttcggatgcgggggatgccgcggcggcgcttatctccgccgagcgttgcggttacgtcgtggatgcgtgtgcttcggatatagccagcttgctcggtgacctcatatccatgaagaagcaagccaagctggaagatggccttgttgttggcgccgactcgttcgagaagtacagctggcgtagtctcgggcagcaactgagtgctgtctgtaccagtgtccaacgggacgtttgcacccacgctggccgctag

SEQ ID NO: 508821 - DNA, 1143 bp, Stenotrophomonas maltophilia
gtgagtactccctacaagaaggtaatggttgttttcggcacccgcccggaagccatcaagatggccccggtagtggaagcgctgaaggcccggcctgagatcgagacaattgtcgcggttaccgcgcagcatcggcagatgctcgatcaggtcatggacctgttcggtatcacgccggacgtcgacctcaacgtgatggaacctggccaggccctggcgggcctgttcgccaagatcctgaccggcatgaccgcggtgatcgccgagcacaagcctgacctggtgctggtgcatggtgataccagcaccacgctggccagtgcgctggccgccttctacaaccgcgtagccgtaggccatgtggaagcgggcctgcgcaccggtgacatctatgcaccgtggcccgaagaggccaatcgccgcctgaccgggccgctgacccgcctgcattttgcaccgaccacccgctcgcgtgacaacctgctggccgaaggcacttcgagcagcgatgtccacgtgaccggcaacaccgtgatcgatgccctgctcactgtcgccgacaagctgaagcacgacaccgcgctgattgaatcgatgcgggcccgcttcccgttcctcgacgcctccaagcgcctggtgctggtgaccggccatcgccgcgagaacttcggcagcggcttcgagagcatctgcgaggcgctgaaggtgctggccgctcgcggcgatacgcagattgtctatccggtccacctcaatccgaacgtgcagggaccggtcaaccggatcctcgccgatgccccgggcgtgttcctgatcgagccgcaggattacctgccgttcgtgtacctgatgacccagtcgacgctgatcatcaccgactccggtggcgtgcaggaagaggcgccgtcgctgggcaagccggtgctggtgatgcgcgacaccaccgaacgcccggaagccgttgatgcgggcacagtgcggctggtgggcaccgatgcccagcgcattgtcgaggaagccaatacgttgctcgacgacagcctggcataccagcagatgtcacgagcgcacaacccatatggcgatggcctggccagcaagcgcatcgcagacatcatctgcggagctgcatcgcagtcctaa

SEQ ID NO: 508822 - DNA, 1704 bp, Stenotrophomonas maltophilia
atgcagaatcagaacactgccacccagaccggggtggtcatgggcatcgacgcgcagagcctctccgcaagcattgtcggattgatcctgacgatcgtgggagccaaggcaatcgccgtctactttgccgctcccatcatgttgtttctgcttccggccgccgtattgatcggcatgtacatgtgcaagccagcacgtggccggacgacatccgtcgccattgcaactgcattgctcattgctgcagcactagtctcgaacgggattcccgatccaacctgggacgggaacatgtaccacaaggtggcaatggtcgccctgcatgacggatggaatccctggagcttccctgaactcagcgactggatgaaaacccaaaccggcttggaatacagcaactcggtgtgggatagcaacatcgctgattcctggatcagccactacccgaatgcgtcatggctgtttggtgccgccatgatggattacggtttcggctgggaatctgcaaaggcgattagcctgctgctggctgtagccgtcactttctacagcgtatccgtattccgccaatggatcacttcaacttggatgagcggcctgctggctgctgctgtcgtgctctgccagcctctgctggcacaggccggcaccaactatgttgatggcatgacgtacgcgctgtgcgcactgattcttcttgccttgcttgatcgcaatcgcggctccgcggtcaggacagtagtctggtgcagcctgatcctgttggccggactcaaattcaccggcgcgctgtatggggccctgctcgcagttccctttgtcctggtcttccgcccgcgcatccgcgagatggcaatctggggggtcatcggcatcggtattctttcccatccctacctgaatcacgtggtttccggcctgcctgttggctacccagtaacttcaggcgaccagatcctggccgggcaggcggaaaaggcgatgcttgcccagtcgcgcccgcactcgttgatgacctcccttctttcgaaagcatcgaacagccttgagatgccaggcctgaaggttcccggcacgatccattcgggcgagatcctcatttcgggttctcccgatacccgctattctggattcggtcccctgttctcgcttgcgttgctgcttggcctggtcgccagcatcgctgcgaccattgaagcgtggcgccaacgggatctgcgcgccatctggcgtttgctggcctgcatcgcatatgtgctcgtgttgacattgatccacgcagcgccttggtgggctcgctacgtgcccttcctccagttcggcctggtgatcgcgctcctggtcggaatgcgtgcacgcgcgggttggatcagggggttcgccgttgccggatgcttcgtcctgctcgtcaacggtctgctcgtcggcgtgggtattggcggctatctgggccgcctttccgtgaagcaggggttggccacggatcggcagatcgtgcatcgccatgcccgtggcgaaagcgtaatcatccgatcccccagcttcatcgccttccctgccatctatcacggtcgcgagaatctcggccttgagcggatcgagtacatccccgttacccttgatcagctcaactgcggtggccacgaggaactgggcacctggattgggctggcgaagttctgccgtggagacaaggccccctga

SEQ ID NO: 508823 - DNA, 375 bp, Stenotrophomonas maltophilia
atgtacctggcctacatccccgccatcctgctttccgttgcactcaatgcaaccgcgcagatcctgcttcgccagggcatggccaagctggcgctggttaccggcgacggactgcttcctctggcgctgagcggaatcaggatcgtgttcaatccttgggtattctcagggctgtcgtgctttgcggcgagcctcgtgctctggatgtacgtgctgtccaaggtacaggtcagcttcgcctatccattcaacagcgtcggctacgtcattgttgtcgcagcggcgtactttttcttccgcgagccaatcagcgccatgaagctcgcgggcgtcggactgatctgtctcggcgttttcctcgtcaccaggagctga

SEQ ID NO: 508824 - DNA, 1428 bp, Stenotrophomonas maltophilia
atgcaacgaactgatcacgcgctttgcgtagacctggatggcactttgttgcgatcggacctgctgtacgagtcgcttctgaccctgctggccggcaatcccctgtacgttttcctgctgccgttctggctgctccggggcaaggccgcactcaagcgcgagatcgcatcccgggtcactttgccagtggaatggctcccgtacgatgagcgggtgctcgatttgctgcggaccactcaacagagaccccgcgtgctttgctcggcatccgatcagcgtctggtagaggccatcgcgctgcacctgggactgttcgacgaggtcatggccagcgatgggcggcgaaatctcgccggtccccacaaggccgaggcgctgaacgctcgctttggcgcgggcggctacgattacataggcaatgccaaggtggatctgcacgtctggaagcacgctgaaggtgcctacgtcacaaacgcgggcaacagcctcgctacggcggcagccggagtcaccacggtccttggccattggcccgaccagggcggcggcctgcgcagctggatcaaagccctgcggatctatcaatgggcgaagaatcttcttgtactcgtcccgctgctgaccgcacatcgcttcttcgatccgacatcactgtttgaggcagcggttgccttcttcgctttcgggctgtgtgcatcaggtgtttacctgctcaacgacctgctcgatctcaccccggatcggcagcacgcgcgcaagcgcaagcgccccttcgcagccggcgatctgcctctgctgcatggcctgctggcggctccgctgctgaccctggccggattcgccctggcgctgtggaacagcccggcattcgcactggtactgctggtttactacgtgatgaccctgatgtattcgtttgttctcaaacgaatcgtaatgatcgacgtggtcatgcttgccgcgctctataccattcgcatcatcggcggtgcggtcgccataggcgccgaactgtcgttctggctgctggctttctccatgttcattttcctcagcctcgcattggtcaagcgctacaccgagttggccgtgatgtccggctcgggaaagcagaaagtcgcggggcgtggctacgatgtatcggatctaccgttgatccagtctcttggagctgcggctggctacatcggcattctggtgtttgccctctacatcaacagtcctgacagcttggagctgtatcgcaatccgcgtgtcctgtggctcctttgtccggtcctgctgtactggatcagccgggtctggatcatcgcccatcgcggcggtatgcatgacgatccaatcgtgttcgctgcgcgggatcgtgtcagcctgatcgttgcgctggtttcgatcctcatcgtcgctggcgccacgatcgcctggtaa

SEQ ID NO: 508825 - DNA, 189 bp, Stenotrophomonas maltophilia
atgctagagctgggctggcgccgcacaagcggcggtatggagggcgggtcgtcaggcaacaggcccgcccgtgttggctgcgacaccagcagctatactttggcgcgagttcaggcactcccgagcctgaagcatacagggaacccggcggatttcgaatgcaacgaactgatcacgcgctttgcgtag

SEQ ID NO: 508826 - DNA, 318 bp, Stenotrophomonas maltophilia
atggccagcctggaggtgctggctttccatccagcgctggtggcctatacggggttgctgggtaccgaaacgcttgccatattcctggcggtcctcgcttttgcgctgacgacactgccgatgcgtgccgcaatgccagcgctgcttggcattgtcctggctctggtcgcattgaatcgcccgcaactgctgccgctgcctgtcgggttggtgatcggtgtcctgctgggcaggggggggctgaagccggatgcggagctgcctggtgatgctggttgcgttcgtggttctcctgctgccctggatcatgcgcaatga

SEQ ID NO: 508827 - DNA, 717 bp, Stenotrophomonas maltophilia
atgctggttgcgttcgtggttctcctgctgccctggatcatgcgcaatgagcggctgttcgatcgtgtcgtcccggtaagtgccaacagcgggtacgtgctgttggtcaacaacaacgcgctgaatcagaccgggaactggatgccgctgagtcaggtgccattgtctgatcatgaccggcaacgcttccagggcgaggctggggttcccatgtcgttcttcagcgagggcgatgaggatgccaagatcctgcagtggacgcctgctgcagacggtgtcgcacgttccgtggcgttgggctggatgcgccagcatcctgggcaggcgctgcacctggccatgctgcgactggaaaccagccttgatccggcgacgctgatgtactggccgctcatcgatttcggaggtgcgccccgctggctcgaatggcttgtcggagggctgaacctcatgttggtacttcttgcggtgtttggggcgttgcagctgctgccacaggtgcagcagctcacgctgacccagttgatggcgctgggcacggtggtgctgggcgcgctgtccatcgccttgttcgaggggcagggccgctacctgattccgcttgttccggcgatgttgatcctggcaggtggacgatccagtggcagcgggactgcgatccgggcaggggccggtcacgcaggagccggcttcgggaaggtatcctctacctcctga

SEQ ID NO: 508828 - DNA, 918 bp, Stenotrophomonas maltophilia
atgaccgtcctgctgttcggcggcaacggccagcttggccaggagctgctgcgcgcgctggcgccgctgggcaacgtggcggtgaccacccgtagcggcgtgctgcccgatggccgtgcctgtgaaaccgctgatttcgccgagcccgacagcctgcctgcattgctcgaccgtctgcagccatcgatcgtggtcaacgcggccgcctatacggcggtcgatcgtgccgaacaggaggtcgacgcggcctttgcggccaatgcgcaggcgccaggtgtgatcgcacgctggtgcgcggcgaagggtgtgccgttcgtgcattactccaccgactacgtgttcgatggccagggcaccacaccttaccgtgaggatgcgccgacagccccgctgggggtctacggcaccagcaagcgcgatggcgaggacgcagtgcgtgccgcgggaggacgccatctgatcttccgtacggcgtgggtgtatgccgcgcatggcacgaacttcctgcgcaccatgctccgcgttggcgccgagcgcgatcaggtgcgggtggtggacgaccagatcgggacgcccacgccggcggcgctgatcgccgacgtcaccgtgcaggcgctgcagcatccgcgccatctgtcgggcacctggcacctgaccgccagcggccagaccagctggcacggctttgccgaggcgatctttgccgaggcactggccaccggcgtattgccgaaggtgcccgtcgtcgaggcgattcccagctcggcgtatccgaccccggcccagcgcccggcctggtcggtgctggacaaccgcaggctgcagcaggatttcggcatcgagttgccggaatggcgggacggcctgaagcgggtgatggtggagctgcaacggtcgcataccgcttgcccctcctga

SEQ ID NO: 508829 - DNA, 987 bp, Stenotrophomonas maltophilia
atgatcaaggctggcacactgcaatcacttcaggcgctccgaggcgtgggtgccgtcgcggtggtgatctaccatgcgctgtcgatacacccgttcctgaatttccgggcgggtgccgcgggcgtcgacctgttcttcgtcatcagcggtatcgtcatgtgcctttcgctgaggccagagaccaccgcactggacttcatgaagcgccgggtgattcgtgttgtgcccatgtattggattgcgacgacgctggcagcagcgtacttctacattcgctatccggacattccaccttccaccatacacatcgtgcgttcctacctgttcgcgccgccgcccgaaggcttcggtatgcccgtcctttacccggggtggacgctgaacttcgaaatgttcttctacgcggtgttgtccgtgatgcttgtaaccaggcgcatggcgattccgctggccgcctgcctcctggtcgttctcagcagtgtcgggagcgtcatcccctcgctcagcaagatctattacttcaatccaatcatcctggagtttgcagcgggcatggtgatcggcctggccatcaaagcaggttatcgacccaggctgatggaaggcagcgtctacctgatcggcgcactggtcctgatcgtggtgcacaatcactaccgctcggagggcgtccttccctggctgctgcccagcattctgctgattgtcggctcgcttgcatttgagacatcgaaggtcgtcacgcatcgcttcacgcagttgatcggcgaagccagctactcgatctatctgttccacgcactggccatctggctcaccacctggatctggcgtgggacgccgcaggctggggcggttctgtttgcaatcgcgctctcggtagtaatgggtgtggccgcgtactacaccctcgaaaagcccctgctaaacctgatgcttcgccgcaggaagtccagcgcgaagaagtcgctggaaggccacgcctga

SEQ ID NO: 508830 - DNA, 405 bp, Stenotrophomonas maltophilia
atgccggccgtcgcagtggctaaggatgcgctgggcggacaggccgtccgctacgtgatcaatggcctggtcgccaccgcggtgcactatggagtgctgcacttcaacatcgaggtgctgcacgtcccgctggccgcgatggccaacgcgattgcagcggtctttggcatcaccgtgtcgttcctcggcagccgctacttcgttttccatggcaggcagggcagcctggcgcggcagggctcgctgttcctgctgatctacgccgcgatcgccgtcctgcatgcgctggtgatgtacgtctgggccgatcgatggggcctggactaccgcgcagggttcgtgctggcgaccggaatgcagatggccgtcagcttcgtcgccaacaagttcctggtgttcaaatga

SEQ ID NO: 508831 - DNA, 1344 bp, Stenotrophomonas maltophilia
atgatggtcgcccgcattcctgcgcgccacctgacgatgatgacgatgaagcactcctggtacagcctcaaatggcggattcgccaggcctcgcgccggctggcctcggtgattcacaacctgcgccaggtgggcccggcggccacgctgcgcaaggtcaaggcggtgcttcgcccacatccaccggccgtagtatcggtgcccgctcaagcagtgtgttcttccggcgaggtgcacagcaccgcccctgcacgtgctggatacgtgctggtgattgatgccagcgcgcccgatccgacccgcgattccggctcggtccggatgtgcaagatcctccagtcgatccgcgagctgggatggcaaccggtgttcatgccggacaatggtgtcatcagtgccgaaagtcgcgctttcctcgacacactgggcgtggacctgatcggcatcgcaggcagcccccgtctcgaccagtggctgcgtgtgcacggccagcagctgcgtgccaccttgctcagccgccaccatgtggcggcagcccacatcgggctgatccgcgattacgccgtcggcaaggtgatcttcgacaccgtggacctgcaccatgtgcgtgagcagcgtgctgcggacctgcgccaagacccggacctgcagcgtcaggccgcacgcacgcggcaaagcgagttcgccctgatcaacgccagcgacacgacgctggtggtcagccagaccgagctggagatgctgcaggcgcaactgcccggcagcgacatccggctgctgtccaacatccatgacgtgcacggcggcaaacgcagtttcggggacaccgctgacctgtacttcgtggggggctatgcccatcagcccaaccaggaagcgctggaatggctggtcggcgagatccatccccgcatccgtgcgcagcgcccggagatcgtcctgcacctgatcggagagattccggaagacgtggcggcgcgctacgccggcaacggcgtcatcgtccacggccacgtggcatcactgcagcccttcctgtcgcgttgcaggatcgcgctcgccccgctgctctccggtgcaggcgtgaaaggcaaggtcaatgaggccatgagccacggtgttccggtggtggccacgcccattgctgccgaaggcatgttcctgatcgacggtcagaatgcactgatcgcggcagataccgaggcgttcagcaacgccgtcctgcgcctgtactcgaatgaggcgttgtggtcccacatctccgaacagggctaccacaacatccgcgagcacttctccagcgatgcagcgcgcaggagtctggaagcactcctgcgcgactga

SEQ ID NO: 508832 - DNA, 594 bp, Stenotrophomonas maltophilia
atgtctatcccaagtgctcaatgcagattggtagctaagtacgaacagaaaatatttggaggcaaacccctggtccgggaatacctggatgaggcaggggctgcgtcaatcgacatgttgacctgtccggaccccgtcgacccggagattgtatcgatcggaacgatcggtgtgtcggaggttgcgttgattacaggttctgacgatgagctcttcacgagagttgagctatgtgccgcagcgctcgcctctgagggctactgggtgaatgccgttgcgtcagtcgcgctccacatcataaagaataagagatctgtatttccggggtgcgttgtggagaacatatttcgtgattacattccaaatccaaggatgcctcacgtttatctggctgtaccattcttctggaatgaagatcattttccgcagcttgatattccgccgctgcaggtcaactggcttcaatgcatctcgatctacgaggaggagcgcttttttatccaggaatttggcagcgacgcctttgaagcccggctcgtcgaccagaatgtgaacacactggacatgtcgaggcagcgggcagtgctggattga

SEQ ID NO: 508833 - DNA, 4269 bp, Stenotrophomonas maltophilia
atgaatcgaatctatcgtcgtatctggaatcacgccaaaggctgctgggaggtggccagcgagctgaccaggccctgtggcaggaaatcgagccgcataaccggcgccggtggactgctgatggtcacgctgatgttggcgggcggagaggtgcacgccaagacccgttactacattgggtgcgatcccttcaatctgggaaatggcgagtttgtctcctgttcccccatcacaggtcgctatgacgacaccatgtttgtcggctatgcactgaccaacggcctgaactcgcttggctatggtgcaggcgtgaacatgaaaggcgacaacaccaccgcatttggcatcggtgcccggatagacgggcagaacagcgccgcgtttggtttcaaggcgaggaccagtggcgtcgatagtgttgcctttgggtacaacgccagtgccaatggcggccacgcactggcaatgggtgcgaacgcatacaccggagcacttggggctacggccgtgggcaacgatgctgcggccacccggcagaatgcggtggcccttggcagcggctccagcgcggagaaggagaatgcagtggcgctgggtgccaacgcgtggtccaacggtgtggatggagtggcgctgggaagcagggcacaggttgagaccggtgctggcacgggtggcgtcgccatcggtggcggtgcccgtgcgggaagcctgggctacaccggtgccatcgccatcggcggtgagagccgtgcccttacggacggcgttgcgctgggctatgcggcgtctgcctccgcacagggcgccgtagccctgggcgtccgctcggtggccacggaagccaatacggtgtcggtaggcagcgcctcggtgcgccgtcgcatcgtgaacgtggcggacgcccgcattacggcctccagcaccgatgcggtcaccggcaagcagctgcatgccatgaacgagcgggttgacggcatgatcaagcaggattccgcaggcggcatcgtacgcatcgccaacagcaacaccggcacggaagtcagcatgcgcaatgcggtgctggcgacgcgcaaggtgagtggcgtgtctgacggcgcgctgacgacgaccagcaccgacgctgtgaatggacgccagctcaacacgaccaatggcaatgtcaccaaggcgcagaccgctgcggatgcggccaaggctgatgccagcaaggcgctggcccaggtcaccacggtgaccggcctgatcggccagacttcgtccaccagcagtgtccgcttgggcgagaagaacagcggtacctcgctggatgtccgcaacagtgccaatgccaaccgcaaggtgaccggtgtggccgatgccacgctgagcacctccagcacggaagcagtgaccggcaggcaattgaacacgaccaatgagaatgttgccaaggcacagaccgctgcgggagaggccaaagctgatgcgagcaaggcgctgactcaggtggtgacgctgggcggcctggtggggcaggtgtcggcaaccggcaatgtccgcctgggtgagaagaacagcggaacggtgctggatgtgcgcaatagcgccaatgcgaaccggaaactgaccggcgtggccgaaggcgtggtcagcgacagcagctttgaggccgtcaacggcaggcagctcaatgccaccaatgacaaggtggcggcggtggagagtgttgccagaactgcgggcacagaggcggcggcggcaaagacggatgcagccaaggcgttggtcgagaccgcagcgcttggcgggctggtggcacaagtgtctacgactggcaatgtgcgtctgggtgagaagaacggcggtacgacgttggacgtgcgcaacagcgccaatgccaaccggaggatcagtggtgtggcggatggattgttgaacgccagcagcgctgaagcagtgtctgggaaacagctctactcaaccaattcacgggtatcagctctagaggacgtaagtcagttcgtgagcatcggtgcggctcctgccagcgaacctgctgaggcaggaccagtgggtgtcgctataggtaattcggctaagacaggcagcgagggtgggactgcagtgggaacacactcgaagtcactgggtagaaattcggtggccgttggacgtgcttcaacggtacatgaaggttccgacaatggctttgcccttggggcgggcgctgaggttggtatttcggagggtggtgcaagggggggagttgcgattggcgctggagcgaaggttgggaaaggggcggatggatcactggcgatcggtgaaggctcgcaagcgaatgaggctggcgttgcatcatttggaagcgcaactgcttatcgccgcttagtaaacgttgctcgaggtgctgccgaccacaatgccactaccgtctcccagctcaaagactccctcgctacccttggcggcggagcaggcatggacgccagcggaaatatcatcgccccaacctactcggtgcaggccggaacgcagaactcggtcgaagacgcattgatggcgcttgatggcgccgtcatcactgcaggtcgtcgagcgggcaaggtggaagatcagctcagctcgatcttccaggattcaccgtcggcccgtgccgatggcatgaaccagatcgcgctcagtggcgcgaacggcatggtgctgaccaacttggctgacggacgagtggctccaggaagccgtgatgcggtgactggtagtcagttgtacgccgcagagcagaagatctcgcagaatcggaatgatctggaggcgatgcgtaaggggcgggagatggggcaggaggcgatccgtggattggacgcgagcgtcatcgactacggcggtgcgcgtttgactggtgtgtccgatggttcagtctctgcggatagtcacgacgtggtcaccggtcgccagttgtttggcatcagtgatcgggtatctaagatcgagcatcagggccgcttcctcaaaattgatacggatcagctgagcgaagatgccttcgcaggattcttgggtgttgcaatcggtgactcggctcgtacgcagggcgagggggggacggctgtcggttcgtttgcctcttcgctgggcgtaaattctgtcgctataggccgtggatcttccgtgtcagcgaactccttgaatggcttcgcggtgggggctggtgcacatgtcgcatcgacgaacggagtttcaattggtgcaagttcaagagtccacgcgggcgcagagggatcattggcgctgggcgtaggctctgaagctactgaggcaggaaccgcatcctttgggagtgcaggaactgagcgccgcctcgtaaacatcgccaacggcaccgccaaccacaacgccgccaccgtcggccagctgcgcggtgcgctgtccgcgctcggcggtgaagtcgatgccaacggcaacatcgtcggccccagcttcaccgtgcagggccagtcccagtccacgctcaatggtgcattggaagcactcgacggcgcagtggtcagcaaccgctcgcgcgtgaaccaggtcgagtcgcagctgcgcagcgtgttccaggacacgccctccgtccgcgccgacggtctcaaccagctcaccctggccggaacccacggcatggtcatttccaacgtggccaatggcttgattgcggctggcagtcgtgatgcagtcaatggcggccagctgcactcgatgcagcagcagctcaacggccgcatggacgggctggagcagcgcatcgatgcgccgcagccgcaggcaatggcggtggcttcagtgcccgaaccggaagcgccggtgccgcaggccgaaggcggccagcaggtggcgtcggtcggcgagggtgagcaacccgcaccgcagccgaagacgaagaaggaggacaccccgaagccgcaggtcgataccgctgaactggagaagatgctggcccgcgccaacgagtataccgatggcgcgatcagcaccttcgaacgccgcctggacaagatggacaggcgcttcaagcgcatggcggcgatgagcagcgcgcagaccacgatggcgatgaacaccgccggcctggccacctacaaccgcctgggtgcgggcgtgggatacagcgagggtgagtcggcgatggcggtgggctaccagcgtgtgctcaacgagaagggctcggccaccttcagcctcaatggggcgttcaccaacagcggcgaacgcagcatgggcgtcggcgtgggcatcggctggtaa

SEQ ID NO: 508834 - DNA, 1260 bp, Stenotrophomonas maltophilia
atgactgccgcgcggcagcgctcgatgtgggtggcgggcctttccactgtagtggagtggtacgacttcactctctacctgtacttcgccacggtgctgtcgcgggtgttcttcggcggcggcgaacaggcgctgctggtcacgctggccggcttcgcggtgtcctacctgatgcgtccgctgggcgcgctgtgctttggtcacctgggcgaccgcctgggccggcgctggatgctgctggcatcgatggccttgatggcggcggcgatgctggccactgcgctgctgccaaccgcggccaccgcaggcaccacggcgggcgtactgctgctggtactgcgctgcgtgatggcgttttcggtgggcggcgagtacaccggcgtggtggcgtacctgctggaaagcgcaccggcgcggcgacgcggcctggtgacctcgctggcttcggccgccagcgaggtgggtgcgctgctggcggtggcgatctccgcggttaccgtggcgctgctcgcgcccgcgcagctggacagctggggctggcgtattccgttcttcgttggcgcggcgctggcactggtgatcctggtcgcacgctcgggcatgcacgagtcgccggagttcgagcggcagcgccgcgagggcagcattcccgcgacgccgctgaagcatgtgctgcgcaaccatccgctggcggtggcgcgcacgttcgcgatctcggcgctgggctcgattacttactacgtcggcatcacctatgtgcccgcattcctgcatgcgcggggccacgatgagggcgatgcgctgtggctgtcgacgattgcggccgtggcggtgatcgcgatcacgcccctgtgcggcgcattgtccgaccgcgtcggacgaaggccggtgctgttgggcctgaccgtgctggcagcgctgctgccgctgtccttgttcgcgtggatggcgcaggcgacgccgctgggcatcgcgctggccgcggtgttgctggcctgcgtggccggtggcgtgagcgcggtggcggccccggccacggccgagcagttccccggcgaaggccgggtcagcgggctggcactgggcgtgaccatggccacggccgtgttcggcggtgcaacgccctggctggcgcaatggtgggtggaacgcagcggctgggcggcggcgccgggcgcgatgatcgcgctggtggcggtgctggtgctgccggtgctgtggaccctgcccgagacggtcccgggcagggccaagcgctag

SEQ ID NO: 508835 - DNA, 1758 bp, Stenotrophomonas maltophilia
atgcggcgtacggttctagcgttgttgctggtgtgtggcgtggccgatgcacaggaattcgtaagcagcgagcgtacctacgacgaacgcctgcggggtgcgcgggtcgcggcgctcggcgatgatctgtttggtgattccctaaacaggaaggatggcacgctgcagttctcgcagaccgatgtcgtggtgccgaccagcagtggaatgcgggtcgcattcacccgcacaacgccgaagcagaaacagggactggatcgcgctgccgccccgctgggggcgtcctgggagatcgatgccccctacatgatgggctcctacgatcaacgccggggctggaatgcggcgggcggcggccgctgcagcggcagcaacctgtccccgaccgagtgggtgggcccgtcaccggacttcaacacccgggtcatcccgaagcacacctattggagcggcatcttcatcaacctccctgcggtcggttatgaatcccttttgctgaaggaagcaggggcaagcctgccccaggatggggcaacctacattggcacctcggccagccagtggcgcgtcagctgcctgccagccatcagaaatggaaccggcgaaggttttgtggtgcggaccaccgatggcacccgttacttcttcgattggatggcggtccgcgaccagcacgacgtgctggccaacgagtactatcgtgatggcaatggcaatggcacatcgcagccctacctgctggttccggtcgtcgatgtcttcctctacgcgacacgtgtcgaggaccgccacggcaactgggtcagttacagctacgacggtgccaacccgacccgcctgctggcgatcatttccaatgacggagcccggatcgatatcgactatgacgcgcagggcaagatcggcgccgtccgggccggggatcgcacctggcgttacaactacgtcgacagctactgggggcgcacgctcaacgaagtcgtacttcccgaccagtcgcgctggaccttctccaccgaccgccatgtgggtgccatgccgtggacgatggtgccccccgtcctgaatccaggcttctacatgaattcctgcgcgcagaatgcaacgggattccgctcggaagatgccggcgacccggccttcaacgatgtgatcaccatgcgccatcccagcggcgcacaaggggtgttctcgcttcgccagttgatccacggatcggacaacacgcctggcagctgcggcatcatcggcactagttcctccaacttcgggtttggctcattcggcattcccaatgcctacatggccaagtcgctggtatccaagaccctgtccgggcccggcatccagcccgcctcctggacgtacacatactcaccacactggtcattcaccggtggctgcacctccaactgcgtttcaacaacctgggaaaaccggcccgacggcgtgcaggccgagtatgtcttcggcaacgactacaccgccaacatcggcgacctgcagatcgagcgccttcgccgtgccggcctggtggtacaggaaacccggtatgtgaaggcagccgcatcggggccctaccccgcacgctatggaacgcaactggcgccacgcgggaatccgctgaccacccagatccggccgatgcaggacacccagctgcgccgggacgggatgcttcatcgtcgttatgtggatgcattcgacggcctagcgcgcccggtgcgcatcgtcgaatcgagcactgctggcccatga

SEQ ID NO: 508836 - DNA, 726 bp, Stenotrophomonas maltophilia
atgctgctggccacctgtgacacctgcgcgctgtcgtcctggtgctgctcgcggtgccagccggagaacttctcggtatccgatatctgtaccgtgccgatcgccttgctgtccgacgtattggcgttgctgaccgtatcctgcccgctgcggacccgcagatcaccggccgcacggatgttcacgtccttctcggcggcgatgttggctgcggtcaggctgatgttgccctcggtggtggccatgcgcacgccgccgccgaccgacagctgcgtgccagtgatggtgtcactgctaccgctgccctggctctgcgagttgttggtaccgaacggcaggccgctggtgttgttggcaaagccccagcccttgccgcggctgctgctgtcgctgcgctcggtgttgtgggccacgtcgaacacgatgtccttggtggccagcagcacagcgttgccctcggccgacatctgcgtgccctggctgaggatcgagccgccgttggcaatcaacgtgagatcgccgcctgcagccaactggctgacgcgggcatcactggtcgaatggctctgttcgctgttggtgcgctggctgccggcagtcaccacggtcgaagtcgtggccgcgcgcaggccggaggctgcgccttcagcggtgcgggtgatccgccccatcgccgagccactgtcggccatgccgtcggtggtcgaatcgcgggcgctgcggtag

SEQ ID NO: 508837 - DNA, 1248 bp, Stenotrophomonas maltophilia
gtgtcggagaaggaactcaactatattgacgttttcgctggctgcggcgggctaagtctgggactgcacagagctggctggaagggattgtttgccgttgaaaaagatgagtttgcgttctctacattgaagcagaacttcctgaccgaggattcgcgctttgaataccagtggcccgaatggctccctaggcagccttgggccgtaaaggacctaatctcggctcattttcaaaagttggctactctaaaaggcaaggttacccttatggctggcgggccgccgtgccaaggattttccactgctggaaggcggaaggcggatgatccaaggaattcacttgtcgaagattatctggatctggtcaagataattgagccgaaaattcttcttattgagaatgtgcgtgggtttactgtcgattttgcggtctctgagaggaattccgagcgccgagagaatgctgcagcttcacttataagaaggctctcagttgaatataatgtagattcggcgatgatctccgctcgggattttggggtgccgcagaatcgtaaccgcttcgtacttgtagctgttcgaaaaggaatcaatgttccgaaatttgagatgaactgtctttccgaaggggcagcgcgaaccatcaaaaaatggggcattccggcgataaatagctcaagtgatgccatttctgattttgaaatgtttcatgccaaaattcagccgagtaaagagagtcctggttttctatccatttccccgggtagggcccggacggcttatcagagggccatgcgcgatggatatcgaggcgctgtagctgattcgcgactcgcaaggcattctgaagcaactgaagcccgtttcgagaagatcatcgatctctgcgtagatggaaatcgatctcacaaatcgttgaactcggagatgcggagtgcgctgggcatcaagaaaatggctactcgcgtactggatccagacctgcccgcgccgactataaccagcatgcctgacgatttgctgcattataaagagcctcgcactcttaccgttcgagaaaatgcgcggttgcagagctttccagattggttcaaattcgccggtaagtacactaccggtgggcataggcgtcggcttgaagtccccaggttcactcaggttgccaatgcggtaccaccactgatggcagaggctattggggattcaattctgaggcactacaaaagcaagatgtcgcccaaaaattag

SEQ ID NO: 508838 - DNA, 969 bp, Stenotrophomonas maltophilia
atgaagctaaacttcaacctgctaattatcgacgacgaagaaaacagcgcccaggccgcaatccaaatcctccagggctatttatctgaaaatggattctctcttacctcccataccataaccgacgtgtctgacggggcggttcgcaaatgggcgcagcgaaaaggaaaggagtatgatctggtaatcatcgactttggacttggcagcgacatcgacgggtccgacgcagctgcaaccatccgaggacaactaccatatactgatattattttcttctcctcatctccttacattaatcttttgcagaaactcgcagagaagaatgtgcctggcgtatttgtgtcatcgcgacgagatctgggagacacacttgtcggcgtcgccgaaacagtaattgggaaagctatcgatcttaaccatatgcgcggaatagcgattgcagaggttgctgagattgaccaatccctggaggagatcttgcttctcctgtattccacttcgccgatgccttttgagaagatggatgaagatattctaacggcaattcgagaggcctctgagcgcattcgcaccaagctcgacccgctcattgagaaccgaaaaattgtcgaaataatctccgacagctcaatattcacttcctttcagaagtatcaggccgtccgggctcttgccaaaaagatcccagactgcttgccacatctaaatagcttgaagccctatcaaactgatgttattgacaatagaaatattctcgcgcacgccattgagatgactgacgacgaaggaaacaccaagctcaggacgcttcgccgcgatagggctgagatagttattgacgacgactggatgagaaattttaggaagaagctggcaagccatcgagtttcactggtagccgtgtgcgacatcatccgcactcacgttggcgtctctgaccagggtgagcgtctgggccaacagtga

SEQ ID NO: 508839 - DNA, 2358 bp, Stenotrophomonas maltophilia
atggaaaatatcgaatcatcccccgaagagatagttccattccgcgtaagtagcggcttgaaagatcttatcggacgcgacctaattacagatgactttgttgcaatatttgagctagtaaagaattctttcgatgcccacgcaaccgatgtaacaattaagtttcttgatgatcttatcgtcattgaagacaatgggaagggaatgtcgaaagacgacattcttgaaaaatggctgttcgtcgcctattcggcaaaaagcgatggttcagaggatgagggttacagggacctaatcgaggagcgccagcggccatttgccggagccaagggagttggacgattctcttgcgacagattgggacggcaccttcacctagtcaccagcaccgacagcagttcgttccagaacttaaaagttgactggacgaagtatgaaagggatcacaaagaagagttcaccgacatatttctaagtctgtatgaaaccttcccctcgaacaacattgaggaccagttcaatagcgatagtgggacaaagctcctcatatcctctctgagatcagagtggaatcgcgataagattctttcgcttaagcgggaacttggtaagctaattgatccattcgccggaaacgatcaatccttttcaatacgcatcatcgctccttctgagctggaagctgacgccaagattgatgagcagaacgcgacgaacgatgccgttgatcaacgaccaacagtaaatggcgcgatcacgaatcctataattgacgtgctatcagagaggaccacccatatatcgaccaagctttccgacgacgggagccacatagtatctgaacttgtggatcgggggaccttaatttatcgaattaaggagatcaacccattctcactgatatcaaactcacaggttcgagcagatatatattacctaaatcggagcgcaaagtttgtgttcgcgcgacgaatggggcttccctctgtgcagtttggctcgatatttctgttcagaaatggctttcgagttttcccagtcggtgcagaggatgatgatttttttggactgaaccggcgcaagcagcagggacagcgacgcttcctggggaatcgcgacctaattggtcgcgttgatgtaaagggggttcccgaatttaatgagtccacaagccgaaatcagggactgataaaaaacaaatcagtggaagagttgattgagttcgttagagacaagtgtgtaaagcgcctcgaacgatatgtagtcgatataacatggaaggacacattcgacaaggacgccgaaaacattgataggatgatgctagatggaaacagtgccctggttggaaatcttgtatccaaactttctgcaaccgacggcatagaccttctagagtacaaccctgacattgtacgaattgtcgacgagaaatctgaggcctttgaaggatccctgaaatcacttgagattctcgcagaagagacaggagaccctcagcttcttcgccgagtagacgaagcccgcgatcggatgcgggttctgaggctggctgaagaggaggcgcgggaagctgagcgtcgcgcggtaagccgggcagtgcaggcggaaagggctgcatcggcagctgaatctagatactcagatgagattgagcgcaatcgattcctcgtcgcggcggcaactctcgacgaagacaccattctcaacctccaccatcagatcatcattcatgcatcggatgttcacaatgaagtccagctcttcatgtcgaaattgaggagaggagaagtagttgagaacgatgaatgggttgacgtgcttggtcgcatttcatatcgcaacagccaaattctcacagcagccaagttcgcgactaaggggggctacaagcagcagtcgtcgacgatcgtcgataacctgccattgtatatttttgactacattgagaaggtctcatctctttggtcaagaaaagtaaaggtctcttgcgagtgggaccaatccgagttcatcaggaagttccgtccgattgatgttggcatcctaattgataatctcgtttcgaactcggaacgagcgggtgccggaagcataaatttctccatacgaattgagaagaatccaacagcaacgcttgttatcgacgtcgcagacgatgggcgtggctggcctcccacaattcgaccggtggagagaatcatggaaaagggtgttacttccacgacgggatccggcctcggccttttccatgtcaaagaagtagtggagggaatgaaggggcgaattgcaatcaaggagacggagtattccgagcagttcgatggtgcacatatggagatccgggtaccaaaatga

SEQ ID NO: 508840 - DNA, 1281 bp, Stenotrophomonas maltophilia
atgccagaggcctgcccgctgttccggggacgaactgtagccgtcgaccctggcgtatacgcgtgtctgaagacgcaaaccgacgccgactacaaaccctacagtcctgcactgtatgtcagctctctgcctgctgagggcggcaacgtcctcggccaaacccaaagacatgggtgctccatagaaagatgcttggtgtccggcgctcaggctgtaaagctctcccctggccagttcaacctgccttgcgtcggatcgctgctgtccgccgtcacctcgtctatcgtcaacgctgcagccttggccattgttggcttcacacatatggcctatttccgtcagtctatgtcgctcctgattctcgcggccccccggtcgcccagttgccacgctggctgtgcgcgcgctgttaggcacccacaccggaatcacgccaattgcgtcacgtatctttggttcggcatacttccggcctatagggccgagagcccgcagcgctggcacggacgcatgaagaagtggagcgaagatcagttgcaggcttcagttgacgcctatctgtctatgagaggccggctagcaaacgggcagaagatcaacaagtcacaggcctatcgggaactggctcaacagcatggcagggatcaggctgcctgggctcgccgcttcagcaacatatcccaagtgatgactgatctcggctatcagccgatcgctggtctaaaaccactgccgaacgtcggcaccaacgttacgaaacaactagcaacaatgatccactcgcggctccaggacactgaagaaggcttggctgacgacatggttagatttgagctatcggagtcagataccaagcatcagggggatggtttcctacctgatttggtggatgatcagcgcttgaggtcaatgagaagcatcgccatgcggcgcggacagcgatcgttcagaagaaagctcatagagatatatcgtggtcgttgtgcgatcacagattgcggggttcctgacgtcctcgaagccgctcacatttttccatacctgagtggcccgacgaatgacgtcggcaatggcctgttactccgttcggacatccacactctattcgatctgtatcttgtctctgcagaccctgagactttaacagtttcaacaagccccaagcttggcggatcggagtaccgcacgttatccggaaagccgcttgctgaaagggcaacgggatatcaggatatcaaccgcaattgcttggagtggcacagatcgagatgcaagtggtag

SEQ ID NO: 508841 - DNA, 363 bp, Stenotrophomonas maltophilia
atgaagcctgtgatctatggcgccgtgctgctggcggcgctgtctgccatgatcgctagccggcacgtacccaaggcaggcttggagctgcggacttttcggaaggtgtccgacgctgaatttgctgtcatgcgcgaggaagccgttcgactggtgcgcgacggcctagtacagcacgcgcgctacgccggagaccgatacttcgaggtcagctgtgacggcgtacccgtgatgctggtcgacaactcgttggagcagcttgtgattgtgcggtatgcggctagggaaattgatgctctctgcgttgtgccggtgctttcgcattggagcaggcgacttgtgccggagcaggcttacccatag

SEQ ID NO: 508842 - DNA, 582 bp, Stenotrophomonas maltophilia
atgagatatttcaaggacgggttcatggcaagacgcttttccaccttttcgacactgctggtgctggcttcagccggtggcctcgcacacgccggcacggtccggggaccggcgggtagtcttgaacttcccgacgggattgaaacatcggtggcgccggccaacccggaccatccaaatctgaaggtgagcgccgttgtcacgttgctcccggcagcgccggagacccgtgggccgattttgctgaccatgacctgcgcgccggtgttcggtgcgctgggctcggcgaaaggtatggaacgtttggcggcggttaccaaccagatggacaaggccctgaagcctgaaaaggctggcgagtggatcaagctggattccctgccggcgtatcgattcgaggctgtgcgcagcgacgctacgcggttgacgcagtggctggtcctgggctcgacgtcgtttgcttgggtcaagtttgatcggccgcaggacacgccgatcgacccgcaggtgcttgatgccgtcgccggcatgaagatcctgtgcggtgctgacgccacgcccacggcaccccgggaaggatga

SEQ ID NO: 508843 - DNA, 612 bp, Stenotrophomonas maltophilia
atgaccacccagccgatgcgcatatccaccgcatcggccgccttggcccggtccacggcggcggcgccggcctgctgcgcgcgcgcaagggattcgctctggcgctgggtcgtcgtccatacgccgtggctgcccgtgctgagcgcaatggcttcgcgcagaacggccagccgttgcgcggggtcgccctgcgccgattgcaggcgtacacgggtggcggcccagtccacccgatcgcgatacagcgcctggcgttcaagcagattaaggatctcggcctgggcctccggcgagggcacctcgaccgcgcctggcgtatcagccatggcgccggtcgccagcaacatgagcatcagcgcgccgatgcgacgcactcccttgcgaacctgcatgcgacgtttccttgtcgttgagtcaggcgcgcagcataaccggggcatgatcactttcgccatgcgcgaactgtcgtatctgcctcctccgcagattgcagcaagacggcttgcgtgcggtcaccacattgcaactttacccatgtcgtcggggcgcacaacgcgccaaggtggccccgtcggcgcctcctgcgctggtcgggattggcgtcctgaatga

SEQ ID NO: 508844 - DNA, 438 bp, Stenotrophomonas maltophilia
atgaagaaccagaagggcttcacccttatcgaactgatgatcgtcgtcgcgatcatcgccatcctggccgccatcgcactgcccgcctaccaggactacacctcgaagtcgaaggtcaccgctgcgctggccgacctggcctcgcacaagacccagttcgaaatggaagtcagcaacggtaagactccgacgctggaatctgccggcttccagagcaaggaaaccggtagctgctcggaaatcaccgtggctaagaccggcatgaagtgcaccatccgtgatccgggtcgtattggcaccagctccagcatctcgctggactatgccgaagcaaccgtcgacgctacctcgggcgcgatcaccaaggctggcggtttcagctgcaccacggtgtcggtcgataagaagttccgtccggctggctgcactggtacctaa

SEQ ID NO: 508845 - DNA, 6444 bp, Stenotrophomonas maltophilia
gtgcgctgcccgttgggttggctacctcatcgggagggggcccagcttggaggcttgggggccgatatgagcgacttcagaggagctcggggatctaatacaggtgatgacttccacgagctgtgggctgcaaggcatgcgatcaggcttctcgacgagcgtgatccgctgcaagccatagcggttgaaggcgtagcaccaagtgacggagttggaacgcctgattccacttgggatggagtggactgcgcactgtatgagggcggtgaagacgcgatcgaagcagatcaagttctgctcgaacagctgaagtactcggcggccaatccgaaaagcaaatggacgattgctcgcatcacacagagtagctcgggtgaagaaagtgtgctgcgccgactggcgaaggcgtggatcgaaatgtcggcacagcggggacggcctggactggaagtgtcgctgataaccaatcaacccatttcagagaagctcgagtccgttacagccaatgttgcgaagggcggggtttcggttccccgcgcacgtccgggaaaaagcgatcctgaagaggcaaaatttgcctttgctgcccgtttagcgaagaacaagttgccagagttcgcagcgtctctccacttcaatggtggtgcaggttcgcgctacgctatcgaggggcgtctgctctcggatgtcgcgggttggaccgatctcgagcttcaaactaccgttgctcagctccgtcagttcatccggaatcgcatgcgtcctgagtttgcgggtgagctgatcaagaaagaggacatcttgctcgggcttggtgtatcgagcgcgggttcgctcttcccctgcccagcgatcctggagcagattaaggaacctgtgccacgcagaagtgtggcagaagtggccggcgacattgtggctggcaagcaacgcgtctgtctgcatgggcctggtggcattggcaagacgactgcactccagcaaattgaggcagcgcttccgccccactcgatcatgatcagcttcgattgttacggaggtggaacctacatggattctgccgctcttcgacatcgaccgatagacgcattccttcaactcaccaatgagctagcaaccaagctccgattgcccatactccttggtcgccaccaacaatctgatccagtgcggttgttctggaaccgtcttcagcacgccgccggcgctatctcggctgaatacccagatgccctgattgtgatagccgtggacgcggccgacaatgcaatcgccgcagctgcagcgcgaaggcccccagagccttgctttgtgcatgacttcgtcgcattaggagatcctccagagaatgtgcggtttgtcatgactgctcgaacgggtaggctccgtgatctagagcttccttcaagctatcagctctcggagataccgccattcacggtcgaggagacggcggttcatgttggaagaatctggactgcgccgcctgactggctgggggcattccatcacctgacgcaaggtgttcccagagtccaggcctacgctctggatcttggcgttgaacctcccgagcatgcgatcgaacgactcctgccaggcggaagatcacttgatcaagtgttccgggaacagttcaagcgtgcgctagccaaaagtggcaatcctgctgatgttgctaaggtttgcgctggcctcatttccctcgcgcgtccggttcctcttgcagacctgagtgtggtacttgacatctccgttccgtcgctcatcgatatctgtagcgatatggctccagcaatcaggttgaatgaagatagagttagtttcgctgacgaagattttgagcacttcgtccgtgaggaggggggcgctaagcttgaggaggtcactggaaaggcggctgactggctcctcgcaagatccaaagaggacgcctacgctgcccagcacgtagctggggcacttgccgcggcaggaagagggggcgatctgctcgatctggtcgagaatgagccgtcaccctccgcaattgcagatccagtcgaacgacgtgaagctgagctctctagacttcgactagccatatcgttctgccgtggggccaacgatgtcgcgagagctatgcgctttgtccttatcggagctgagggcctgaaggcggagagggccctgcgcgttcttttatcagagagtccggatctggccgttcggtttgcgccggatagtgcggcccgcttgatcctgactgatccaagccagattggctttcacggtgcgtttctcctgcaccgacaggtggtgagcgcaattgcaggtgattatgcgtcgattcgccaggatgctcgactgcttcaggcatggatgtcgttacatcaaaagaacggcacgaaccaaaatcgcacgcgctggcgtcttgatgtccacgatgctgctgcaagtgttgaggttgtgctaaggacggaaggagcagctgaggcgctgagaaagctgtctacctggcagcccatgagcagttggcgtcggatcgcttgtactcttatccctcggctcctcgcacaagaagatgaacatctgctttgggccgtgcttgatgcgggtatgctcaaggccgtggatgagctagttctcctagttccaatggcgttggccgggcagaccatcgatccagagagaatcaaagtagcggttgttcagcttctccgccgcgtgaagtttcagaagctggacaatggctcgagtccagtacatgggacgtggtcttggacggaggacatggacactgcgatgacggcctgtgagcttctggcctcacattcagagtcggcagctgtagttgaaggattcctgagcacggtacttgatccggccaatcggcagatgtccagtctgtctacagcagcacctgaacgtttggatctgctgtttcgggcgcacgcccttcgcacggcgcttgccggcagcgcagccagctccgaaggattcttcgtggcacggccaagtgcttcagatgagacaaggggccagcgtcaaatctcttacagcgaacaggacgctgacaggaagttgatggagctggcagatatcttcctccctgtgtacaccgcaactgccgacgccatggctgggagaatctccatggccgcaactgaaggatcattggcaactgccgtagcacgacgggtctccaatagctggcgcatctcgcgcgattacaatgcgcgggtacttgctggcttggcggctcgcaggattctggttctggtgacacgtgggttcaggccagaactgattgctgagactgctcgaaaaatacatggcacgaacgaagcatccagtgctgcgtcaggcatggatcttgctgagaggatggcaatttgtccagcactgcatgcatctctaatgaaggaggtggcggagattgttcctcagattcgtagcatgcgaattggttctgaagagaaggccaaagcactgctcggatattcgcgccttgttctgcccattagccaggacgacgcaaactccatcttccatgatgctgtttcggcggcagcagagcttgatcgtgaggttgttgcccagctgcatctcgtgactgagatgctccagcatggccttgacaaaattgagcaggcaacggaggtgtcgcgaaatctctcggaagtcatctccgatgccgccatccggcttgatggttcagcggtgctgccttggcaacaggtaatgaaagtcctaaccgccattaaccttcccttggcgctggcaaacgctgggaagtgggatagtggtgatcttgttggtcttcacgagacactgcctcacgtacttacggctggtgtcgctcagggcgagctcaaacccggggcggcaatggctctggacatgcttctgaaagatgatcacaacgtcgctgaagcgtctttggaccagatcgatgatattcacgatcgaaatctctatatggaggaggctgcctgggatgctctgatccggcgcgacaaggacgacgtcaaagcgctttgtgatcgcgctgcatcttttggtgcagcgggtacatggtcaaaatcccttgctgagcgccaggctttcttgagcaagcttccttctgctcctacagacgagtacaggagtattggctgtaagacagaggcgaagatcgactggaagttcccgccttggaagcgtgatgctctgatcgactccaataagttcgacgagacgttggcagaagctgttgtcaatgctaagtccggcaacgactatgtgtcgttgtcggtggtgctagctgctgctgctcggggcgtatctttccgcgatagagttgcgttcctcaatgcgctttccaataccaggtcggtacccggtggagaagttgtagagacgctgtctgagcttgtagaacaatggagctcacctgccgtccgaacctgggctacttcggtacttcctgaagttatcgttgcgcgattgccagatttcattcgttacatcgagttcgaagtttccgcactacccaaagctctagagctctctgggctcgctcccgccgcaaccgcagacttgctacttcgcggtctcgagctgcatgggcaatccttggatggggggcaggtatttgcattggctgggcttgttgctcgatttctctcgccggaggccgccgctgaaacgggagcttggtatgctgaacgtttgggaaagcgcattgagcttcagtgccgggaccagacgtggcttcccgccgagcttcctccgtcagcggctgccgcggtcgcgcgcttgatctactctcgcctcggggaccacgacgtccgggttcgttggcaagctgctcactctgtacgacggttggcaagattgggacagacggatgagctcaaggctctcattgaggagtacggccgtcgggaggagcgcctattccggcctgcgaaattggacttctactggatagcctcgcagctatggtttgcgattgcatgggatcgagtcgcgagtgaatcgcctcgtcttggggctttggttggatcgcgactccttgccattgcgctggaccgaacatttcctcatttgcttgttacttcatttgctcgagatgcatgtctgaagctagtcgatgcgggggtgatctcgctcgatcaagctacggttcttcagctgcaaagcgttggacgctcaggcttcgaaccggggccgtcgatcgataggcgctggcgactagggggtggggggtccaaggacattgagcaccgattcaggtttgatcatttagatacggtcccctactggtatgagccagtggcacggtgctttgcagccctatccgtcgatcagctgctcacagccgcagagagctggatcatagatcgttgggggtatcccgccgaggttacagcccacgtagagcagacgcgagggagccgcatttcggagaatgattggtcattggcaagcaaccgccacggatctaagccgacgctcgaacgattgcgtactcatctcgagtggcatggcctttggtgcgctgtaggggaattgctgctaacagagaagcttgtagccagtggagattctcattgggagaatcttcgaaggcgtgtcgcggacgagatgctcaccgagccgccgctatggtgctccgatctcctgcgttcaaagccgttgaagagtgagttctggcgaatttcgcgtgagcctctggctgattgggttgatcaagtcaatgagagtaggatgcggtccgagctcattcccgttgatcgcccaggctacattgctgtgggtggcgaatggcgcattaggaactttgaccgtctggagacggtttcgttgtccagtgccctggtggagcctcggcttgccgcgtctttgcttcgaacgcttcagtccatgagcagctcttgggactactcggttcccacggagggggaggatgattccttgtacggtgacgagagcgagtaccggatgattccatggcttcgcagtcggtcttcggatggcggagttgaccatcatgatccctatcgaggcagtgctggcttgattgactgggtgcctggtcggcgagtggtcgataaatgcggattgatcagagaccccactgttcgaactgcttggtgctcaccgggccaggcgccgatgttccaatatgaggtctggggagatgatcaagaagaggaccgcggagttgtcggcgcggtagtatcggggcgtagattgctggtagagactgaacagctaaagaggttcctgattttccagggactggacctttttattgaagtggaggtaagtcgtgaagggcgaagcagtcgaagaagctttgactcggaaggaacgacgcccggggcagcgtatgaccgtgtctacagccttgacggagaagggcgactccatgcagccgagggatgtgttggaacttgggcaagtgatagcacgtga

SEQ ID NO: 508846 - DNA, 753 bp, Stenotrophomonas maltophilia
atgcagccgagggatgtgttggaacttgggcaagtgatagcacgtgagctcgtaaatgattctcgtggagaaacggtttcgctatggatgtcgcatcatctggcggagctaattcgtgaggtcgacactagcgatggagacagaaagaaggaagcggaggatcgggccgttgatctcatcctcaggctctggacaaataggcgagcattgcccggggctgcagatcctctgagtggttacgccgacgctatcagagccctgcgagcgatacttcctacctcaaatccatggcgtcgatttcggcagggtagtactgcggaagacttgctttcccagatgtttactactcttgcgaattttgtaattgctggccttcttctgacccatccagtcgacaagcggcggattgaatcagttgagtgggaggtgctgtctgatcaagagaaattcttggcagatatgctgagtcgatggagcgatttcgtctcgcgtccatcaactgcagatggcgatctcggcgagttctacgagcaactaatccagcttaaggagacgtctggggatggtgcgttgagtgagtatgatgagcccattggcaatgaggcgcctgaagatcgaggtcgcgctatcattgctcatatcgaggtcatgcaggcaaggctcgtggatctagttgctcagttcaatctggtcaaggatgctattggcgatagcgacgatagcgacgatagcgacgatagcgacgaaggctaa

SEQ ID NO: 508847 - DNA, 279 bp, Stenotrophomonas maltophilia
atgaccgatgtcctgatgcgcttcctagtagataacgcgctgctacgtgagtcgccctacaatcctgacggatcgctaagcgaatcgtttcaggtcacaacggacaacctgactgatgacggcgtccggttgttcaaggagcactttccgcgctggtctaatcgtgtcgatcgcggcggcgatcccgaggaaatcaagcagctggtcgctggcttggcaaagatcaggtcggcacaagcgcagaatgacccgcaccgcttacgtgcggtgacgcgttaa

SEQ ID NO: 508848 - DNA, 213 bp, Stenotrophomonas maltophilia
atggtcggcgggttcttggtcgaacgtgttgccaatgcgccttgggtctacatccgtgcgcattcggttgtccttatggacaacgagctgattgatccgacactgagcactgaggacctggaggcacaagcgttcttcgaacacctcggaccggtgcatgaatttcgcgagagagctcagcgttgggcgcagatgcccgtccaaatcccatag

SEQ ID NO: 508849 - DNA, 1122 bp, Stenotrophomonas maltophilia
atgctcaccctcggcctggtcgcctgcgcgacccagccgaagtccccaccgtcttcaccccaggccagcagtacgccgtgccagcccgccaccaaggcccatgggccggccgaggctgcacccgaagcaactgcggctaccgcgccgccggtggatctcaccccggtgccgttcgaggtcgcgcgggcccgcttcattgccgataccgccaagcgctatggcctgaagccggagcagatcagcagcgtgctcgaccaggcgcaggtgcgccagccgatcatcgccgcgatgtcgcgcccggccgagcgggtcaagccgtggaacgaataccggccgatgttcatcagcaaggcacgcattgatggcggtcgcgcgttcctggccgaacaccgtgccgaactggatcgcgtgcagcagcgcaccggcgtgccggccgaagtgatcgtggcgatcatcggcgtggaaaccagttacggaaagaatgccggcagccatcgcgtgctcgatgcgctgtacacgctggcgttctactacccacgcagcggcgacccggccaagctcgaacgcgaagtgcgccgcgaactgttcttccgcgatgagctggccaagctgttcgagctgggccgcgaagaaaaactggacatcaccacgctcaagggcagttatgccggtgcgatgggcatgggccagttcatgccgtccagttacctcgattacgcggtggacggcaacggtgatggtcgtcgcgacctgttcaacagctacgacgacgtgttctcctccatcgccaactacttcgtgaagaaggggggctgggtgcgtggtggccaggttgcggtaccggcgacgctggccccgggccgcgaggagttcaacccgaccgaatggatgcccacctggtcgctggccgacctcgcacagcgcggctaccagccgagcacgccggtgcagccgggcgccaccgccaccccgatcaccctggaaggcagcaccggcaagcagtactggctgggcttccagaactactacgcgatcacccgctacaacctctcgaagatgtacgcgatggccgtgttccagctgtcccaggccatcgccggacaggagctgcccccggcatga

SEQ ID NO: 508850 - DNA, 1269 bp, Stenotrophomonas maltophilia
atgaacatcagatggttggtcccgagcttgatcgtcttcgcgctggcggcctgcagcagcgcgccgaagaagccggccacggccggccatggtggcaagtccagcggcacgctggtgcagggccgtggttcgcgaccggcgcactgcccggaaggttcgccgtatgcagcggccaaggaagacctcagcacccgcggcaattacaccgctggtggcctgtacaaaccaggcgtgcgtgacagcacgcccgactacattcccaacgtggcctgcatccccgagccggaagtgaccgccgaggaacgttcggccatcggcaacaagtcgccgtacgtggtgctgggcaagtcgtacaaagtgctcgacgacacccatgactacgtcgagcgcggcaccgcgtcgtactacggggccaagttccacggccgcctgacctccaaccgcgaggtctacgacatgtaccagttcactgccgcgcacaagacgctgccgctgcccagcttcgcccgcgtgaccaacctggacaacggcgagtcggtgatcgtgcgtgtcaacgatcgtggtccgttccatgacggccgcgtggtcgatctcagctatgccgccgccgtgcgcctgggcatcacccaacgcggtaccggcaatgtcgaggtgcgcgcgctgcaaccgggcgagagcaacctgatggcgcagaagccgtcgcgtcgcgagcgtcgcgcggctgaagcggctgccgccactgcagtggccagcgcgcgcccgatgccggcgccacgtgcttccaccgacagtgatatcgatcgcctggtcaaccgcttgccgaccgatggcgccccggcgcgcggccagccggccaccacccggggcgtggccagcaccgcgccggatgtggcggtcagcagcctgccgccaagcgcgccggtggtgcgcaactccgcgccggctccggccgttgtcgccagcacggccccgcgcgcggtggcaccggcaccggtgcgtgccgccgcggcggcgccgagcctgtcgcagcagatggtcggcgcggtgatggtgcaggtcgccagcttctccaaccgcgacaacgccaaccgcgcgatgggccagctcagtgccgccggcatcgtcggcgcgaccatcagcgacatcgccgccggtggccgcaccctgttccgcctgcgtgttccggcaagcgaccatgccagtgcggcggaacttgtcggtcgcatcgccggtctgggcctgggttcgccgcagatcgtcaaggactga

SEQ ID NO: 508851 - DNA, 1218 bp, Stenotrophomonas maltophilia
atgaatttccgttccgccgccaccgccctggccgccaccctggtggtgggcctggcttccgcccagacgccgctgccgactccggccacgccggcgcccgccgccgccgccgccccggccaccgtcgccactccgccggccccggcgccaagcgtgtccaaggcctgggtgctgatggattacgccaccggccaggtgctggctggtgaaaacatccacgagcagctggccccggccagcatcaccaaggtgatgacgtcctacgtgatcgccgccgaggtcaagaacggcaaggtccgtgcggatgaccaggtgatgatgagcgagcgcgcctggcgcgaaggtggcgccggcaccgatggcagctacagcggattcccggtcaaccagaccgcgcgcctggaagacatggaaaagggcatggcgatccagtccggcaatgatgccgcgatcgccttggccgaacatgtggctggcagcgaagaggcctttgcctcgctgatgaacagctacgccgccaagatcggcatgaaggactcgcacttcgtcaacgcccatggcctgaccgcgcagggccaccacagcaccgcctacgatctggcgctgctgggccgcgcgatggtccgcgattacccggaaacctacgcgtacaacaagatcaaggaattccaggtcggcaacatcaagcagccgaaccgcaacctgctgctgtggcgcgatggcagcgtggacggcatcaagaccggccacacctccgaggcgggctactgcctgatgagctcggcccagcgtggcgaccagcgcctgatcgcggtggtgctgggcggtgcgtcggagaagcagcgtgccgatgacagcctggccctgctgaactggggcttccgcttcttcgagacccaccgcctctacgagccgggcaaggccgtggccgagcacaaggtctggaagggcaccaccgacaaggtgcagctgggcgtggcccagccgatgctggtcagcgtgccgcgcggccgctacaacgacctgaagccgagcatcgacgtgcccaagaccctggaagcaccgttcaccgccggccagcagatcggtaccgtgaaggtcaccctggatggcaaggtcatcgccgaggcaccgctggtggccgtggccgccgtcgagcaggccggcttcttcaagcgcctgtgggacagcttctggatgtggtgggaatcggaatga

SEQ ID NO: 508852 - DNA, 477 bp, Stenotrophomonas maltophilia
atggccgctgaccggcgccggcagcgcttccccgtcgatcagcttgaccagcaccgccgtggcgtcggtgatgccaccggcgtagtcgccgctgcggaagcgcggcaccaggtattcctggatgacccggttggcgatggcatcgggaatcgctccctccagaccataaccgggttcaatgcgcacgcgccggtcgtccttggccaccaccagcagcaccccgtcgtccacgcccttgcggccgatctgccactggtcgaagacccgcgtggtgtactgcgcgatgtcttccggctgggtcgtggctaccaccagcacctgcagctggctgcccttgcgctgctgaaggtccagcgcctgctgtaccagcgcctgcttctgcgcggcatccagcgtgccggtggcgtcgaccaccggcgaatccagcgccggaatcggcgccagctgctgggcgtgcgatgccagcggcagccatag

SEQ ID NO: 508853 - DNA, 666 bp, Stenotrophomonas maltophilia
atgagcaaactaattgactacatcgtcaacaagcatggacacccaaagctctgtcgggtgctcaccctcgacgagtggaattcacttccagcatccatgcctgatcaactccgcgaactcttcgctggactgggctttttcttcacgctgcaaggccagctccagacatgccaccccagaagcttcgaaggcattctggatgcagtgttcggccgcgacgaacaattcaacagcaagaactgccatgcgttttgccatagcgcgttcggcaacattttcttctatcacgatgcgttcggcatcggagagatagaacttttgcatggctccgtggtgtgcgagacatctgcaccgagtgtagactccgagacgcatctggaaaatgcaatcgagatcccgtttttgctcgacgcagaagatatcgatgtttatgacaaggatgacagacggctcttctccaaggcgcgaaagaagctcggaaccttggccattggcgaatgctatggattccagccactgctttcactgggcggggagaacaccatcgagaacctggagaaggtcaaggctatcgagcatttaagcatcctgtgccaaacacaggacttctccctatacgactattcatcgtatggaactcgcacttttgtcaggtcattcaattga

SEQ ID NO: 508854 - DNA, 471 bp, Stenotrophomonas maltophilia
atggcaccgctgctgcgcacctcggtagtgaacaacgaagatgtggggtcgttcgaaactgcacaggggcctgagcgctggacgttgaccgcgaccgccgtgcagcgtgcaggcaagtcggtgctggacttcggccagtccggctatgtgctgcggcagcccggcgcgccggtggcggtgctgttcgggccgcgcaccggcagttcgggcgaggcctcggtgctggcgtggcgtggtcgtccgcagacgcggagtttcggtcagcccactgcgggtgtctccactggcaatgtcgtgcagacgcttgccgatggcagtcgcctgctgctgaccaccaccgtgatgcgcgaccgcaatgatcgtggtgatggcttgaagatcgagcccgaccagcgtatcgagggtgatgccgccactttggccgccgcccaagcctggctgctggcccagcccgcctgccaggcgcgctga

SEQ ID NO: 508855 - DNA, 1131 bp, Stenotrophomonas maltophilia
atgtcccgattgcagttccagctccagacccgcgacggccgtgcccgccgtggccgcctgaccttcccgcgtggcacggtggaaacgccggccttcatgccggtggggacctatggctcggtcaagggcatcctgccggaccaggtgcgtgcgctgggcgccgagatcatcctcggcaacacgttccacctgtacctgcgcccgggcctggacatcatcgccgaccacggcggcctgcacggcttctgccgctgggatggcccgatcctgaccgactccggcggcttccaggtgttctcgctggcccaccgccgcaagatcaccgagcagggcgtgacctttgcctcgcccaccgacggtgcccgtgtgttcctgggcccggaagagagcatgaagatccagaaagtgctcgattcggacgtggtgatgatcttcgacgagtgcaccccgtacccggctaccgaggatgtggcgcgccgctcgatggagctgagcctgcgctgggcccagcgcagccgcaacgcgcatgacgagctcggcaacgacgcggccctgttcggcatcgtccagggcggcgtgcacaccgacctgcgcagccgctcggccgaggccctgcaggcgatcggcttcgacggttacgccatcggcggcctggccgtgggcgaaccggagcacgagcgcaacgccatgctcgaccacctggacccggaactgccgggcgaccgtccgcgctacctgatgggtgtgggccggccggaggacctggtcgagggtgtcgcacgtggcgtggacatgttcgactgcgtgatgccgacccgcaacgcccgcaatggtcactatttcacctcgttcggcaccgtccgcatccgtaattcccagtacgcacgggacatggatccgatcgagcccggctgcggctgcgtggcctgcaccggcggttacacgcgttcgtacctgcgccacctggaccgctgcaacgagatgctggcgccgatgctgggcaccctgcacaacctgttctattacgaaaagctcatggccgacatccgcgcggcgatcgaggcgggaaccttcctggccttccgtgagtctttctacgcggcacgcggggcggtagcaccgcccctgtaa

SEQ ID NO: 508856 - DNA, 345 bp, Stenotrophomonas maltophilia
atgaacctgcttgccttcctgattcccgccgcccacgcccaggccgccggcggccaaccgcagggcatgggcctgaccacgctgctgttcccggtcatcctgatcgccatcatgtacttcctgatgatccgcccgcagatgaagcggcagaaggagcacaaggccatgctggagaagatcaagcgtggcgacgaagtgctgaccaacggcggcatcgccggcatcgtcaccgacatcggcgacaacttcatcaccattgaagtggcggacaacgtgcgcatccgcgtgcagaagggcgctgtcggcaacgtgctgccggccggtaccctgaagtcggcccagtaa

SEQ ID NO: 508857 - DNA, 1857 bp, Stenotrophomonas maltophilia
atgctcgaatttccacgctggaagtacgtcgtcatcctgatcgtactggcgctcagcgcgctgtacgcgctgcccaacatctaccagaaggacccggccctccagatcaccgccaaccgtggcggccagatcgacgatgcgctgcgtgaccgtgtgctggccgacctgaagaaggccggtgtcgccaccgtcggtgccgagaaggaaggggaaagcctgatcgtccgcctgccggacctgaaggcgcagtccgctgccagcgacgccctgcgtgacacggtcggcgaaaagtacaccgtggccctgaacctggcctcgaccgtgccggactggctggccaacctgggcggtcgcccgatggtgctgggcctggacctgcagggcggcgtgcacttcgtgctgcaggtcgaccagaaggccgccctggacaagcgcctggacgcctacaccgaagacgtgcgcagcacgctgcgcgacgcccgcatcccgtaccagtcggtggaacgccgcgctgacaacagcatcgtggcgaacctgagcccgtccgccggtgacgacgccgcgcagcgtgcccgcactgccctggtgaaggcgcagccgaccctcggctacgacgtcagtggcaatcgcatcacggtgaccgtgccggaaaccgagatcacccagatcgccaacggcgccatcgagcagaacatcaacaccctgcgcaaccgcgtgaaccagctcggcgtggctgagccgatcatccagcgccagggtgccgaccgcgtggtggtgcagctgccgggcgtgcaggacaccgccgaagccaagcgcatgatcggcgccaccgctaccctcgagtaccgcgcggtggttgacggcaatgcacaggacgccatcaactccgggcgcattccgccggaagcgaaggtctaccagcgtcgtgatggcggtggtccggtcctgctgaacaagcgcgtgatcgtcaccggtgaccagatggtcggcgcgcaggcggtgactgattcgaacagcggctctccggcggtcagcgtgacgctgaacaatgtcggcggccagcgcatgttcgacttcaccagcgccaacgtgaacaagccgatggcggtggtctataccgagcgcgtgccgaccgtgaccgtcgtcgacggccaggaagtgcgtggcttcaaggtcaacgaggaagtgatctcggtggccaacatcaacggcgtgttcggcaagaacttccagaccaccggcctgcagaagaaggaagccgaggacctggccaagctgctgaagtccggctcgctggccgcgccgatggacttcgtcgaagagcgcgtggtgggcccgagcctgggtgccgagaacgtcaagaacggtatgcgcgcggtggtgttcgcattcctgttcaccctggtgttcttcagcgtctactaccgcatgttcggcgtgatcacctcgatcgcgatgctgtttaacctgctgatcgtggtggcggtgatgtcgctgttcggcgcgaccatgaccctgccgggcttcgccggtctggcgttgtcggtcggcctgtcggtggacgccaacgtgctgatcaacgagcgtatccgtgaagagctgcgtgccggcgtgccgggcaagaccgcgatcgtgaccggttacgagcgtgcttccggcaccatcctcgacgccaacctgaccggcctgatcgtcggtgtggcgctgttcgcattcggtaccggtccgctgaagggcttcgcgctgaccatgatcatcggtattttcgcctccatgttcaccgcgatcaccgtgtcgcgtgcgctggcgacgctgatctacggccgccgcaagaagctccagaacgtggccatctga

SEQ ID NO: 508858 - DNA, 981 bp, Stenotrophomonas maltophilia
atgaaactgtttccgctgcacatcctcccgaacgacaccaagatcgacttcatgcgctggcgccatgtcgcgatggtcgtcacggtcatcgtgttcctggcctcggttgccatcatcggcttcaagggcttcaactacgccctggacttcaccggcggcaccctgatcgaagcccgcttcgacaaggcggtggacgtcgagcaggtccgtaccaagctcgaggaaagtggcttcgacggtgcccaggtgcagagcgtcggtggcaacaccgatctgctgatccgcctggccccgcacggtgagcacgctgccggtaccggcgacgccgcgcacgaggacaaggccaccgccgccgccgtggtgaaggcactgtccaccgccgacaaccaggccaccgtgctccgcaacgagttcgtgggcccgcagatcggcaaggacctggcgatgaatggcctgtacgccaccatcttcatgctggccggcttcctgatctacatcgcggtgcgcttcgaatggaagttcgcggtcaccgccagcatcgtggcgatgttcgatctgatcgtgacggttgcttacgtgtccctgctgggccgtgagttcgacctgaccgtgctggccggcctgctgtcggtaatgggctttgcgatcaacgatctgatcgtggtcttcgaccgcgtccgcgagaacttccgcagcctgcgcgtggactcgatggaagtgctgaaccgttcgatcaaccagacgctgtcgcgtacggtgatcaccgcggtgatgttcttcctgtcggcgctggccctgtacatgtacggcggcagctcgatggaaggcctggccgagacgcacatgatcggtgcggtgatcgtggtgttgtcctcgatcctggtggcggtgccgatgctgacgatcggtttcctgcgcgtcagcaagcaggacctgctgccgaaggcgaaggacatcgaggccctggcccgtcgcccgtaa

SEQ ID NO: 508859 - DNA, 1260 bp, Stenotrophomonas maltophilia
atggtcatcaaaccgcgcgtccgcggcttcatctgcgtcaccacccacccgaccggctgcgaagccgcggtcaagcagcagatcgactacatccgcgcacgtccgccgatccagaatggtcccaagcgcgtgctggtgatcggcgcctccaccggctacggcctggctgcgcgcatcactgccgccttcggcagtggcgccgccaccctgggcatcttcttcgaacgcccgggtagtgaaaccaagccgggcactgcgggctggtacaactccgccgcgttccacaagtacgccgacgaagccggcctgtacgccaagagcatcaacggcgatgccttctccgatgaagtgaaggccaggaccatcgagatgatcaaggccgatctcggccaggtcgaccaggtcgtctacagcctcgccgcgccgcgccgcaagcacccgaagacaggagagatcatcagctccacgctgaagccgatcggcgagccgatcacgctgcgtggcctggataccgacaaggaagtgctgaccgagacccatctgcagccggctaccccggaagaaatcgctggcaccgtcgcggtgatgggcggcgaggactggcagatgtggatcgatgcgctggccgacgccggcgtgctggccaatggctgcaccaccaccgccttcacctatgtgggcgaagagatcacccaggcgatctactggaatggctcgatcggtgcggccaagaaggacctggacaacaaggtgctgggcctgcgcgagaagctggccaggatcggtggcgacgcgcgcgtgtcggtgctgaaggccgtggtcacccaggccagctcggccattccgaccatgccgctgtacctgtcgctgttgttcaaggtgatgaaggaaaagggcacgcacgaaggctgcatcgaacagctcgacgtgctgtacgacatcctctacggcggcaaggccgatggcgtggcggtcgatcgtctgcgccacgacctggtcgatggcgatggccacaccgtcgcgctggtcgatgacgaaggccgcctgcgtgccgattacaaggaaatggccgcggacgtgcagggcaaggtggtcgcgctgtggccgcaggtgaccaacgagaacctgtacgagatcagcgatctggccggctacaaggccgatttcctgcgcctgttcggttttggcgtggagggtgtcgactacgaggccgacgtcaatccggacgtgaagatcgaaaacctggtcgacatgacctga

SEQ ID NO: 508860 - DNA, 2124 bp, Stenotrophomonas maltophilia
atggacggttcgccgcgcatcgtgtatctagatttgcagattggggagcagtgcatgcagaacgcgaacgacatcaccatccgcctgctgatcgtcgatgacagcggcgagaatgccgaagccatcgtcagcacgctgcgcaacagcggcatcgcggtacgcccgtggcgtccgcaggatgcagccgagctggcccaggtgctggccagccaggccatcgacctggtgctggcttcgccctcccagggcatcccgctgccactggtggcccagcatattgctgccagcggcaaggatattccgctggtgctgctggccgagcgcatcgacgaagacgaactggtgcaggccagcagccacggcatccgcgccctcgccctgcgccaacgtccggagcatctgctcgccgtggtccgcgaccagtgggtggacctgcaggcgcgtcgcggcctgcgccgcatcgaagcacagatgcgcgaaaccgagcgccgctgcgatgcgttgatcgcctcctcgcgcgaccccatcgcctacgtgcatgaaggcatgcacatccgcgccaacgatgcctatctggagatgttcggttacgagcatttcgacgacatcgaaggcatctcgctgctggacatggtcgccgcccagcacgtggagggcttcaagcagctgctgaaggggctgagccgtggcgaggcgccgccgccgcagtaccagctcgacgcgcgccacgaggatggcagcgcgttcccggcgacgatggagtttgccgctgccacctacgaaggcgaatcctgcctgcaggtggtgctccgccgccgcatggaattcgaccccgagctggcacgtgaggtcgaggacctgcgccagcgcgaccaggtcaccggcctgctcaatcgcccgaccttcatgctgcagctggaaagcgcggtggcccaggccgggcgcagcgaaggccagttcggcctgctgctgatcgagccggaccactacgcgcgcctgctgccggacattggcctggcctcggccgacaccctgatcggcgcccttgccggcctgctggccgaggtggtcggcgaggacgcacagctggcccgcttcggcgaacacaatttcgccgtgctgcaggccgggccctatgcgcagaccgtggcgctggccgagcgcatccgcgaagcctacgccgcacacgtcttcagcatcggcgcgcgttcggccacggtaacggtcagcatcggtggcgtgcaggtgggcgagaagatcgccagcatcggccaggtgctggcacgcgccagcgaatgcacgcaggccgccgccgagctgggcaatacctgccgtatcttcgacccagccgccgccgaccgcgtggaggaagaacgcgtgctgcgctgggtcgcccgaatccgtgaagcgctggccggtgacggcttccagctgcactaccagccggtgctgaacctgcagggcgagtcgctggagctgtatgaggcctacctgcgcctggagcacaatggcgaactgctgagcccgaccgcgttcctcggtatcgcggaggagcacggcctgctggccgacatcaaccgctgggtggtgtcacgggccatcgcggtgctgggccagcgtgcacgcgaaggccatgccacgcagatgctggtgaaagtgacgccggaatccttcgacgacccgcagatgatcgctaccctgcgccgcgagctgcaggctcagggtgtacccggcgaacggctgtggctgcatgcgccggaagcgaaggtgttcactcacctgcgcagtgcacagcagttccttgccgaagtagcaccgctgggctgccgcatcggcctggagcagttcggttcggggctggattcgttccagctgctggcccacttccagccgcagttcctcaagctggaccgtggcttcaccagcgacctggcagccacccgcgagaacatcgaccgcatcagccagatcaccgcgcgcgcgcaggaagccggcatccgcaccatcgccgaattcgtcagcgatgccaattcgatgacgttgctgttcagtgccggcgtggactacgtgcagggcgacttcgttggcccggcgttgccggagatgggtttcgagttcggatga

SEQ ID NO: 508861 - DNA, 1185 bp, Stenotrophomonas maltophilia
atgagcacgatccgttgcgacgtggttgtcatcggcgccggtgcggccgggctgatgaccgcgatcacggctggccagcgcggccgccaggtgcaggtgatcgaccatgccaacaaggtcggcaagaagatcctgatgtccggcggtggccgctgcaacttcaccaacaccggcaccaccccggccaacttcctgtcggccaacccgcacttctgcaagtcggcactggcgcgctacacgccttggcacttcatcgagctggtcagcaagcacggcatcgcgtatcacgaaaaagagctgggccagttgttctgcgatgtctcgtccaagcagatcgtgaagatgctggtggacgaatgccaggcggcaggcgtgcaggtgcgtaccgactgcagcgtgcagcgcatcgagcatggcagcgatggattccgcgtgcacaccacgcagggcctgttccattgcgcctcgctggtggtggccaccggcggcctctccattcccagcatgggcgccaccggcttcggctatgaagtggcccgacagttcggccaccaggtgctgccgacccgcgccgggctggtgccgctgacgctcagcggcaagcaccaggaacggctggccgatctcagcggcgtcgctctgcccatcgaggcgcgctgcaacggaaagagcttccagaatttcatgctgctgacccatcgcggcgtgagtggcccggcgatcctgcagatctcctcgttctggcaacccggcgacgcgctggagctggacctgctgcccggccaggatgccggcgagtggttgcgccagatgaagcgcgaacgtcctgccgccgagctgcgcacggtactgggcgaggtactgccgaagcggctggcacagcggttgtgcgaacactggctgcccgaccggcccgtgcgccagctggacgagccggtgctgcgccaggccgcacagctgctgggcgcgttcccgctggtggccagtggcaccgagggctaccgcaccgccgaggtcaccctgggcggcgtggataccgccgaggtctcgtcctcgacgatggaatccaagcgcgtgcccggcctgcatttcgtcggcgaggtgctggatgtgaccggctggctgggcggctacaacttccagtgggcctgggccagcggccacgcagccggtggcgtggtgtga

SEQ ID NO: 508862 - DNA, 549 bp, Stenotrophomonas maltophilia
atggccctcaccgccaccatccgcaaggccgaactgcagatcagcgacatggatcgcggctactacgcgacccacaacctgaccctggcccagcacccgtccgagaccgacgatcgcctgatggtgcgcctgctcgccttcgcgctgaacgccggcgaccgtctggaattcggccgcggtctgagcaccgatgacgagcccgatctgtgggaacacgactacaccggcgacatcctgcagtggatcgacctgggccatccggacgaatcgcgcatccgcaaggccagcaatcgcagccgccaggtgcaggtgatcaactacggcggcaacgcctcggagatctggtggggcaagcagagcaagggcctggcacgcttcgacaatctctcggtggttgatctggacggtgaattcgtcgagcgctggggccagcagatccagcgcgccatgcgctggagcgtgctgatccaggacggtgaagtgcagctgctcaacgaccagatccagctcgacgtgatcccgaactggcgcaagcgcgccaaggcatga

SEQ ID NO: 508863 - DNA, 879 bp, Stenotrophomonas maltophilia
atgaccttgcccagccgcctgcagctgccacccggccactggcccagcctgctcgatggcctgtgcgcgcgtttcccgcgcatcgaccgtgcgcaatggcaggaccgcttcgcccgaggccgcgtgcaggatgcgcagggcagggcactggcgccggacatgccctggcaggtggggctggaaatccagtacttccgcgaggtggccgacgagccggtgattcccttcgccgagaccatcctgcatctggatgcgcacctgctggtggccgacaaaccgcacttcctgccggtgacgccggccggtgggtatgtacgggaaaccctgctgtcgcgcctggtcgcacgcaccggcaacaccgagctggtgccgctgcaccgcttggaccggctgaccgccggcctggtgctgttttccacccaggcagccacgcgtgatgcctatcagcggctgttccgcgagcggcgcatcgggaagacctatgaggcgctggcaccggcgctgcccgggctggcgtttccgttgcagcgggacagtcgtctggtgccgggggagccgttcttccgcatggccgaagtgccgggcgagcccaatgcccgcagccggatcgagctgatcgaggccgaggggccggtctggcgctaccggttgcggccggaaaccggccgcaagcaccagctgcgcgtgcatatggcgatgctgggcgcccccatcgagggcgatgacctgtatccgcagttgatgctgcgcccggatgaaacggtcgaggcgcccctgcagctgctggcgcaggggttggccttcgacgatccattgagcggggagcccaggcggttcagcagccagcgccgcctgtgcctgcccggcctgggcgggtag

SEQ ID NO: 508864 - DNA, 489 bp, Stenotrophomonas maltophilia
atgactgaagctgaaacccaagctgaacccgctctccctcgcatctgggtagacgcggacgcctgccccaccgtcattcgcgacatcctgttccgggccgctgaacgcgttgggatcgagctgaccctggtcgccaaccagtggatccggaccccgtcctcgcgctggctgcgctcgatccaggtcccccagggcctggacgtggccgacagcgccatcgtcgagcgggtcgccgccggtgacctggtggtcacccaggacatccctctggccgcgctggtgctggagaagaaggcggtggcgctgaacccgcgtggccagctgtacaccccgaacaacatggccgagcggctgtcgatgcgcaatttcatggaagagctgcgcggcgccggggtgcagaccgggggcccaccgccgctgggaccccgtgaccggcagctgttcgccgccgaactggaccgctggcttgcgcggcgcccagttcgctga

SEQ ID NO: 508865 - DNA, 210 bp, Stenotrophomonas maltophilia
atgtctgatcgtcagaccggcaccgtcaagtggttcaacgacgccaagggcttcggcttcatcaccccggaaagcggcccggacctgtttgtgcacttccgtgccatccagggcaccggcttcaagaccctgcaggaaggccagaaggttaccttcatcgccgtccagggtcagaagggtatgcaggctgaccaggtgcaggcggtctaa

SEQ ID NO: 508866 - DNA, 690 bp, Stenotrophomonas maltophilia
atgcgcatcgtccaccacttggaaaactcccgttccctgcgcgtgctgtggatgctggaggagctggggttggactacgagctgcgtcgctatccgcgtgatccgaagacgctgctggcgccgccggaactgcgacaggtgcatccgctgggcaagtcgccggtgctgcaggatggcgaactggtactggccgagtccggggcgatcctcgactacctcgctgaccgttacgacacccagcgccagctgtcgccgtcaccgatgccggccgacggagctgaacgcatcgcctaccgctactggctgcactatgccgaaggttcggcgatgccgccgctgctgctgaccctggtgatcggtcgcatccgcagcgcaccgatgccgttcttcgcgcgcccgatcgcacgcagcatcgccgacaaggccgagcgcggcttcatcggtccgcagcggcgcctgcacctggactggatggagcgccgcctggccgaaagcccgtggtttgctggcgagcgcttcagtgcggccgacatccagatgagcttcccgatccaggccgctgccgcgcgcggtggtggcctcgacgacaagccggcactgcgtggcttcctcaagcgtatcggtgagcgcccggcctaccagcgtgccgaggcccacggcggccacctgcaggcgctcagcggcaattga

SEQ ID NO: 508867 - DNA, 1566 bp, Stenotrophomonas maltophilia
atggataccgacagcccccgtttcgacaaccgcctgctgcataccctgccgggcgaccccgaatccggcccgcgcaggcgtgaagtgctgggcgcagcctggtcgccagtgatgccgaccccggtgacggcgcccacgctgctggcctgggcgccggacgtggccgaaatgcttggcttctataccggtgaggtcgagagcgaaggcttcgcccgtgtattcggtggcaacgcactgtatgcaggcatgcagccttgggcggctaactacggtggccatcagttcggccattgggccggccagctcggcgacggccgtgcgatctcgctgggtgaactggtcgcgccggatggccgccactgggagctgcagctgaagggggccggccccacgccttactcgcgcggcgccgatgggcgcgcagtgctgcgctcgtccatccgcgaattcctgtgcagcgaagcgatgcaccatctgggggtgccgaccacgcgcgcgttgtcgctggtcggtaccggcgacgacgtggtgcgtgacatgttctacgacggtcatccgcgcgccgagcctggtgccatcgtgtgccgggtatcgccgtcgttcctgcgctttggttccttcgagcttccggcatcgcgcggggaaaccgccttgctgcagcagctggttgatgcctgcatcgctcgcgatttccccgaactggaagggcagggcgaggcgctgtatggcgactggttcgcgcagatcgcggtgcgcaccgccgagatgatcgcgcactggatgcgcgtgggtttcgtgcatggcgtgatgaacaccgacaacctgtccgtgctcggcctcacacttgattacggcccttacggctgggtcgaggatttcgatccggactggacgccgaacaccaccgacgcgcagggccgccgttatcgcttcggtacccagccgcaggtggcgtactggaatctgagccgattggcccaggcgttgtcgccgttgttcgccgatgtggcgccgctgcaggccggtctggcggcctaccagtccaccttcgtggcctgcacccgtcgcgatgccgcagccaagctgggcctggccgctgccgacgatgacgacctgcagctctacctgcgctggcagcagttgatgcaggacggtgccatggacatgaccctggcctggcgcgcgctgatgcgcctcgatccggcgacaccggatgcggcgctgctggacgcggtgtactacgacgaggcgcgccagcaggcggtgcaggcgccgttgcagcagtggctgcaggactacgcggcacggttgcaggccgatccgctgtcggccactgagcgcacggcgaagatggccgcggccaatccgctgtacgtgctgcgcaactggttggcgcaggaagccatcgatcgtgcagagcagggcgacctcggtggcgttcatgcgttgcaggacgtactgcgtgatccgtacaccgagcgtgccgggctggagcatttcgccggcaagcgcccggcgtgggcagacaaccgcgcgggctgctcgatgctgtcctgcagctcctga

SEQ ID NO: 508868 - DNA, 2796 bp, Stenotrophomonas maltophilia
gtgctgagcacggcgctggtgcgcgcgttgcatgcgcttctgccggaaacggccgtggtccgcgtcggctgggatgacccgcagcttggccgtggccagggggcctggccgagggcggctgccggaggtgatgcggcagcgccaggcgtgggcgatggccagcacggctgggaacatgatggggcgcgcctgctgttgtcggttgaaggcgcggtgccttcgccggcatggtggggggttgcccggcaggcgatggagctggcgctgcagcgcggccgccaggccggccagatcaaggcgctggaagaggccgagcggttgcagcaggccttgttccagattgcagatctggccggtgccgacctggaaatgcccgagatgctgcgccacgtgcatggtgtgctgggcacgctgatgtatgccgagaactgctacatcgtggaatacgacgatgtgcgcgaccagatccgtttcctgtacttcgccgatcaggtcgatgatttcgtcgccgatcccacgcagagccatgacgccagcgagatgccgcgcagcctgaccgtggcgttgctgcgtcatggcaagccgctcagtggtccctcgcgcgaactgctggcgcaggtgatggagcaggagcacgacccgcaacgcgggcccgaaagcctggattggctgggcgtgccgatgctgcgcgatggccgcgtatgcggtgccatcgtggtccagagctatgagcaggcggcccgctatggcgaggccgagcgcgcattgctgggcttcgttgcgcagcacgtgcagactgcgatggaccggcgccaggcgcaggtgcggctggagcagcaggtggcgcggcgcacccaggaactgcagcgcgccaaccacagcctgcaggacgaggtggccgagcgtcgacgcgccgaacagctgcagaccgccctgtacaacatcgccgagatggcgatgtcggccgacagcctggcgcagttctacggacaggtgcatggggtggtcgggcgcctgctcgacgctcgcaatttctacatcgccctggtcaacccggccggcaatggcctggacttcgtctattcggtggacgagcacaacgccagccgcgcgccgcgaccgttcagccggggcctgaccgagtacgtcgtgcgcaaccggcggccactgttggcatcacgcgcgcagatcgatgcgctgctggccagtggcgaagtgcgtgaatccggtgcgcgttcgcactgctggctgggcgtaccgctgctgcgcgacgacgaagtggtcggcgcgatcgtggtgcagagctacagcgagaacagcattttcagcgtgcatgaccagcgcctgctgaccttcgtcgcgcagaacatcggtaccggcctggcccgtcagcgcgaccagcaacggctgcgctcggcgcatgccgagctggagaagcgcgtggaggagcgcacgcgcgaactggccgaggtcaacgaaaagctgctcggccagattggcgagcgcctgcgtgccgaacagcgcctgacccaccaggccatgcacgatgcgctgaccgggctgcccaaccgcctgcatctgctggaccgcctgcaggatgcgctggccctggccaagcgtgagggcggcccggtgttcgccgtgctgttcctcgatctggaccgcttcaagctggtcaacgacagcatcggccatgccgccggcgatcgcatgctggtggaagtggccaagcgcatcgtatcgatggccggcaccgaggacgtggtggcccggctgggcggtgacgaattcgcggtgctgctgcaatgcccgcagggcctggcccaggccttggactttggccagcgcctgctgctggcgctgcaggaatcgatgtggatcgccgggcgcgaactgttcccgtccggcagtctgggcatcgcgctgtggaacccccgctaccgcaccggcgaagagctgctgcgtgatgccgacgcggcaatgtaccgggccaaggcgcagggccatgaccgctgtgcgatcttcgacgaagacatgcgcgagcaggccatgcgcagcctcgatctggaagccgacctgcgtcgtgcgatcaacaaccgcgatttcgtgccgttctaccagccgattgtgcgcctgtccgatggcgaggtggtgggccacgaggcgctgctgcgctggcagcatgagcgccgtggcctgctgctgccgggggcgttcctggagctgggcgaggaaagcggcctgatcgagcaggtcgactggctgatctacgaacaggtgattgctggcctggccgagggcgggcagagctacgtctcggtgaacgtatcaccgcgccatttccgctccgccgggttcagcggccgcctgttcggcctgctggatgcatgtggtgccgatccgcgccggctgcgcctggagatcaccgaggtggcgctgctggacgatggtccgcacacgctgcgcatcctgcagggcctgcgcgagcgcggcatccaggtgcagctggacgatttcggtaccggcttctcggcgctgtcctacctgcaccgtttcccgatcagtacgctgaagatcgaccagagcttcatcgccggcctgcatgggccggaagtgcagagcacgcgggcgctggtcgagggcgtgctgtcgttggcgcgtacgctgggcatcgagaccatcggtgagggcatcgaaaccgaggcgcagcggcagaccctgcgcgaactgggttgcgactacggccagggctatctgctggggcggcccgcaccgtggagctgcgcggcggtctga

SEQ ID NO: 508869 - DNA, 1323 bp, Stenotrophomonas maltophilia
atgggtacgctgcgggtctggatgaatggtgtcgaggtcgcgctctgggatgatgtccggagcggctcttcccggctttcgtacgtcgactcgtggatcagctccgcccagtcccggccgttgtcactctcactgcccctgctcccggagggtgagagccatcggggcgatgtcgtcaacaactacttcgacaaccttcttcccgacaacgccgtcatccgcaaccggatccgcgacaggttctccacgcgcagcagcgacacattcgatcttctcgaagccattggccgggattgcgtcggcgcagtgcaactgctgccgctttcgcatacaccgggggacatccagcagattacgtgcgaagcgttggacgaatcaggcgtcgctgcgatcctgcgtcaggtgacggcagggaatctacctggcgcacccaccagtgatgatgcgttccgcatatccatcgccggtgcgcaggagaagacgggacttctgctgcatgctggccagtggtgcattcctaccggcagtaccccatccacccatatcttcaagctgccgcttggcattgtgggcaacatgcgggcggacatgcaccaatccgtcgagaacgaatggctgtgcatgcaactgctttccgcctttggaatccccgttgcgaatacgcagatgggacgcttcaaggacgaacgcgcgcttattgtggagcgattcgaccgccgcctttctgcggatcgccgatggtggctgcggctgccgcaggaagacatgtgccaggtcttcggtctgcccgctgccaggaagtatgaatccgatggcggcccaggcatcgtgaccatcatggatctgcttcgacaatccgagcatttcgaggatcgggcgaccttcttcaagacgcagattcttttctggatgttggctgcaaccgatggacatgccaagaacttcagtgtttacctcgaagccggtggacgcttccgcctgacacccgtctacgacgtattgtcggtgcatcccatcctgggtagggggccaaaccagctcgacccgcggaatgcacagctcgccatgtccgtccagggcaagaatcgccaccggaagctgcaccttgtgcgacgacgccattggaacgaaaccgcacgcgcctgtggtgtcgctgatggtgcggagccgtggatcgaagcgctgatcgcagccgtcgaacccgccatcgagcaggtcacgcgtcagctcccaagtgatttccccgtaaacgtgtccgaacccattttcaacgggctgcgcgctgcggcggcacgcctttccagcatgtcgccggacgcctga

SEQ ID NO: 508870 - DNA, 1050 bp, Stenotrophomonas maltophilia
atgtgcgttaggccacatcctggcggcggtgcgccaccgacgatgaaagatctctgggatcgagtctccgcccgaatagacggaggcgcgattgcaggagtggccaattttcagcaagtcttaacactagtcggatacgccggtaggcccaatgatattgaggccctcctatctcgctgccgactggccgagagcttcctcattgatcctcagcgcgcacttgtcagctcatttattaagttgtcggaacaagaaatagcgcaagcaacaaacttcatttggccgaaccatgctttgccagtgcataccgaattccttcgtcgcgcggccaggcgcacgaatcgcaagtcccgcgcgaaggtatttacaacgaactacgatcgatgctttgaagaagcgggcagacaaggtcgatacgttgttatagatggtttctcgcacacgtcaccgccgacattcgacgcggttcatttcacctacgatattgttcgtcgatcgaaagaaagtgacacgcaggactttataccgaatgtattccatctctataaattgcacggatctatcgactggacgcgcgacgagacgacgggcgaaatctacaaatggcacgggaccgacaggccgctgctgatctatccgaggaattcgaagtacgagcttgcatttgagcagccgtacttagagatgattgcggcgtttcaagcggcgctacgtgagccgaataccggactggtggtggttggctttggattcaatgacaaccacctcgcagaaccgatcatgtcggccctgcggtcaaatctgagcctaaaggccgtggctgtggggccttggcttgcgccctgggaacaaggcgcgcagaacggtcctggcgaagccgagacgaacaggtatctgaagcggataaaggatttggcaaatgccggcgacgcgcgtctcgcgctaataaactgcggtttcgaggacttcatctcatatgttccagacttggctgcggagtccgatatggagcaacacattgaacgtctgcgccgtacggaacgtccatga

SEQ ID NO: 508871 - DNA, 1716 bp, Stenotrophomonas maltophilia
atgagcaagctgacaattgcgccattcgatcagagccgctatgtcggcaccgtatgtcatgtacggcccaccaatgcagaggtgaacctaccgctggcctctactcctactagctcacatttcgccggatttccggtgcctggcggccaagttggtgagttcgtcgtaatagaaggcgagcaacacgccgtgctggggagagtcattgaagttcggctgcctgaacgcgatcgccttagtgtcgagccaactgcggaacagatcatttcgccgcatccactcggagtcgttcagttgctcacggcggtcgacctggagacaggcaggtcattgaagggagtgccgatacatccgcgtatcgggcaacatgtattttcggcgcacccattgcttgtgaagcaagcggtggagggaaccggtcttgccgaagcaagcaaggtgcacctcgcggtgttcccccatgcgcagaatacaagtgtgtcgatcccacctgcccatatctttggccgtcattgcgcagttctagggacgacaggcggcgggaaaagctggaccttggctcatcttgtcgaagaaatcgctcgacttggaggaaaggccatactcttcgatgcgacgggtgaatacgagggacaagcggccggaatagatcatgtccatcttggcggacttcgggaagacgcaagagatccgcgcagattcgttagcttcccatatagtcagttctctgaaaccgacttatttgcgatgtttcgcccgagcgcgagcgctcaagtgccaaagctaagggaagcaatgcgcagcctgaagttggcacacctttcccctgccattgcggttgatgggctgatcaggaaggtggatcagtcgaaagtgccctttgaaaacgctttacttcaacatggtgcggaactggcaagtatcggcgcagacttcaacatccaactgcttgctcgccaaatagaggaagaatgtgtatggcccacgagcaatagggggcagcgcatgtggggtggcgccaatgcaaatgagctaggcttctgcaccaccttgatctcacgaatttcttcagatgtggactcccagcacctcgcgtgcgtttttcagccgcatcgcttagacgaaccgctcaccacttcaattgatagattcctccaggatgcgaccaagcgcgtcctgaggatcagcatggaattcttaccattcgagcacaatacgagagaactggttgccaacgcagtcggtcgttatcttctccgcttggcgcgacaaggccgctttagtcgaaatcctctcgttgttttgctcgatgaggcgcatcagttcttagataaaaatataggtgatgaattctcaaagacgccacttgatgcattcggtctaatcgccaaagaggggcgaaaatatagtttgacctgcgttctcgcaacgcaacgtcctcgtgatattcccgacgatgtgcttagtcagatgggcatgttcatcgtgcatagattgataaatgatcgcgacagaaatgtggtcgagaaggcgtgcggcaacttagacgcttcggcagccgccttcctgccgacactggggcaaggagaagctattgttgtcggggtcgattcaccgatgcccttgcccgtgctcattcgacgaccggcaatgccgcctcagtctagaggtgcggactacgagcggctttggggcgcgcagccaagggaggtatga

SEQ ID NO: 508872 - DNA, 219 bp, Stenotrophomonas maltophilia
atgagcacgactaagaagctgcggctggggccgctgcccaagaccgaaagcatcaagctgaccttcgcgtgcccggtcagcctcaaggccgacctcgaccgctacgcggcgctacacgcgcagacctatggcgaagcggtcgatgccacgaccctgatcccgcacatgctggaagcgttcatagcacgagaccgcgtgttcaagcgcggaaagccctag

SEQ ID NO: 508873 - DNA, 1278 bp, Stenotrophomonas maltophilia
atgagccaggacgacaccccggacgtgcccatcaccgacgctgcgccaaaggtcgcgcctgagaacgtggcgctgcgtgcgcagccgcgcccggtgacgcgcctcaatcgacgcacgctggcgctgctgaccggcggcctcggcgtcgccgtgctgagcgcaaccatgtggtcgctgcagccggcgcatcggcgcggcggcaacgagccggccgagctttacaacgtcgatcgcgtctcgcgctccgaaggactggaccagcttccctccgattactccaagctaccgcccaaggtgccagagctggggccgccgttgcccggcgacttggggccggcaatcgtgaagtcacaaccggcggtggccagctacacgccgcccggccaagaccccggcgcggccgagcgtgacgcacggcgcaaggaggcggaagcggctgcgggatcgacagtgttcttccgctccagcaaccagcacgccgcaaccgcgccggcgcaggtggctgctgccggcccgacatctggcttggcgggcttcgatccgcaggccgtggggccggcctcgacagcggcgcagcctgctgacccaaccgccgtgcagaaccggcaagaccagaaagaggcgttccagaaagccggaaccacgcaaacccgtaattccggcaacctgcaaatgccgacctcgccgtatcaggtgatggcggggacggtgatcgcggcggcgctggtgacaggcatcaagtcggacttgccgggcgacgtgattggcacagtgacggagccggtgtacgacaccgcgaccggccgctatctgctgatcccgcaggggtcgcgcatctttggcaaatacaacagccaggtcgcctacgggcaaagccgcgtgcaggtggtgtggaatcgcatcatcctgccggacacgtcttccctgacgctggacaaccttgctggcaccgacccggccggctacgccggcctggaggatggcgttgattggcattgggatcgcatcgttgccggcgcggcgctgacgacgctgctgggcgtcggcgccgagctggccgcgccggagaaccgcaacggtgatcgcgtcatcatcgccggacgcgacagcttgcaggacagcgtgaaccaggccgggcaggagatgacccggcgcaacctcaacatccagccgacgctgaccgagcgtccgggcctgccggtgcgcatcatcgtcaaccgcgacctggtgctgcggccgtaccagccgctgtttttcaaccgagggacttcacgatga

SEQ ID NO: 508874 - DNA, 1365 bp, Stenotrophomonas maltophilia
atgaacgacgtctcaatcatcgaccatttcctcaacgtcttttccaactacatcgactccggcttcggcctgctgcgtggcgaggttgcgttcctgaccgcaacgttggtggcgatcgacatgacgcttgccgggctgtattgggcgctcggtcacgccaccggccagggcgaagacgtgatggcgaagctcatccgcaaggtgctctacgtcggcgccttcgcctacatcatcggcaacttcaacatgctggccggcatcgtgttccgctcgttcgccggcctgggcctgacggccactggctcggccgtgagcatggagacgttcctgcaaccggggcatctcgccaagaccggcatcgacgcggcggcgccgatcctcgaccagatcagcgaaatggccggcttccccgaggtgttcatcaacatcacgcccatcgtcgtgatgttcctcgcgtggttcaccgtcatcgtctgcttcttcgtgctggcggtgcagcttttcatcacgctgatcgagttcaagttgaccacgctcgccggcttcgtgctggtgccgttcgcgctctggaacaagactgcgttcctcgcggagaaggtcttgggcaacgtcgtgtcgtcgggcatcaaggtattggtgctggcggtcattgtcggcattggcacgggcttgttcgccgagttccaggttacgcccgacgaaccttctatcgaccacgcgctggtcgtgatgctggcctcgctcgccatgctggcgctcggcatcttcgggccgggcatcgccacagggttgatttctggcggcccacaactcggcgctggtgcgatggctggtgcggccttgggcgcggcgggaaccgccgttgccatcggtgcagcggccaccggcgtcggtggtgcggtcgcggccggggcgcgcatggcacccgccgccgctggcgcgattggtagcggcgcgcgtgccgccgcctcaactgccagcagcgcgcggtcggcgttccaggccggttccgctgctgcgggcggtggcttaaagggcgctgccgccggtgtaggcaacgtcgcaaggactggcgcacaggctgccgggcagaaagtcgccgccggcgcacgcgcattcggcgagcgagttgccggtgcattccgtggcgagggcggcacggctgctggcgggtctgccaaagcgagcgcatccgaaaccggcccgtcctcggctgctgccgatcaaaagcaacctgcttgggccaagcgcctgcatcgtcgccagcagatcgcccatgccgcgaccaccgccgcgcacacgctgcgcggcggagacggcggtggctcggcgcaaggcccaagcctgggcgattccgattcttga

SEQ ID NO: 508875 - DNA, 294 bp, Stenotrophomonas maltophilia
atgaaacgcgcgtccgtcctgttcgccatcacgtgcctgctagctggctgcgaccggccatacgcgctgtcggtcgatgcgctggccaccgacccaacacggctgcacacgctgcttgcgcagtgccggcgtggcgagcatgacggcgcgttctgcgcgcaggtcgcacaagccgacctgcgccgcttcctctccgggcgcgccgggcccgatgaataccaaacgctggccgacctgccgccgatcccggccagcttcgacgggccagacgcgccgttggaggtagagccatga

SEQ ID NO: 508876 - DNA, 729 bp, Stenotrophomonas maltophilia
atgaagattcgccttctcgccctcgctgtcgctgcgttcgtcggcgtcatgcctgctgcgcacgcgcaatgggccgtcatcgacgcgaccaacctcgtgcagaacacgatgaccgccgcgcgcacgctggagcagatcaacaaccaggtcaggcaactccagaatcaagcgcagtcgctgataaatcaagcgcgcaacctggagagtctgccgttcaacgtggtcagccagttgcgcacgaacctggcgaccacccagcagctcatcgcgcaggcgcaagggttggcgttccaggtgcagagcatggatcaacagttcgcgcgcctgtacccggagcagtacgccgccaccgtcagcggcaaccagatgtaccaggacgcgcatcagcgttggcagaacacgctcgaaggcttgcagacctcgatgcggatgcaggcgcaggtgtcgcagaacgtgatcgcagacgagagcacgttgaccgatctggtcggtcagagccagtcggccacgggcgccttgcaggccatgcaagcgacgaatcagcttctcgccttgcaggccaagcagtccatccagacgcagcagcttcagcttacgcaggggcgcgccacgtcgctggaactggcacgtcaggccgccgccgtcgagcgcggccgcgaggtgacgcggcgcttcctcggcaccggcacggcgtacacgccgcagcccgtgaccttctacggcaactga

SEQ ID NO: 508877 - DNA, 2451 bp, Stenotrophomonas maltophilia
atgctcaacctcgccgaataccgccagcgtccggctttgctcgccgattggctgccgtgggccgggctggtcgcgcccggcgtcgtgctgaacaaggatggcagctttcagcgcactgcacgttttcgcgggcctgacctcgatagcgcgacacaaggcgagctggtcgccacgaccgcgcgcttgaacaatgcgctgcgccgtctcggtgtcggatgggcgctcttcgtcgaagccgagcgccggccggcagcggactatccgcattcggatttccccgagccgctgtcatggctggtggacgaggaacggcgcgcaaccttcgaggaatccggccaccacttcgagagcggctaccacctcacgctgcaatacctgccgccagaggaatctcgggctcgtgctgccaagctgctgtacgagaacacgccaagcgcgggtgtggattggcgcgaacgcctgactgcattcgtcgcggaaaccgggcgcatcttcgacctggtcgatggcgtgatgcccgaaatcgactggctcgacgacgccgaaacactcacttacctgcacgcgactgtctcgacgcggcgctaccgcatcggcgtgccggacgtgccgttccacctcgacgcattgctggcggacgcgccgctgatcggcggcctcgcgccgatgcttggagatgcgcacctgcgtgtcgtgacggtgcgcggctttccgacctcgacctggccggggattctggacgacctcaaccggctcggtttcgcgtatcgcgggagcacgcgctttctctgcatggataaggcagaggccgagaaggaactggcccgcctgcggcgccagtggttcgccaagcgcaagaacgtcctggcgctgctgcgcgagacgatcttccagcaagagagcccgctggtcgataccgatgcgagcaacaaggcggccgacgccgatgcggccctgcaggagctgggcagcgatcaagtcgccttcggctacgtcacggcgaccgtgacggtgctcgatgccgatgccgacacggccgacgagaaactgcgcatggtggagcgcgtgattcagggtcggggcttcgtaaccattcccgaaaccctcaattccgtggaggcgtggctgtcgtcggtgccgggcaatacctacgccaacgtgcgccagcccattgtctcgacgctgaacctcgcgcacctgatgccggtatcggcggtgtgggccggaccggagaagaacgaccacctcgacggcccgccgctgatcgtcacgcgcaccgaaggcgccacgccgtttcggctggtgacgcacatcggcgacgtgggacacacgctgatcgccggcccgaccggcatgggcaagtccgtcctgctcgccacgctggcgatgcagttccggcgctaccccggctcgcgcatcttcgccttcgacatgggacgctcgatgcgggcgaccgcgctgggcctgggcggcgaacactatgacctgggtgccgatggcgcgatcgcgttccagccactcgcgcgtatcgaccaagagagctaccgtacctgggccgccgaatgggttgaaggtcgcctgcaacatgaaggcgtcgccgtcggccccgacgagaaggcggccatttggtcggcgctcggcagccttgccggcgcgccggtcgaacagcgcacgctcacgggcctgtcggtactgttgcagtcgaacgcgcttcgccaggcgcttgcgccgtatgtgctcggcggtgcgcacggcaagctgctcgacgccgatcacgaccggctgggtgcggccgacgtgcagtgcttcgagatggaagaactgatgcacagcaaggccgcagtgctggccgtgctgggctatctgttcgcgcgcttcgaggagcgtttcgacggcgcaccgacgctgctgatcctcgacgagtcctggctgttcctggatgacccggtgtttgcagcgcgcatccgccagtggctcaagacgctgcgcaagaagaacgtcagcgtcatcttcgccacgcagtcgctcgccgacatcaaggattcgagcatcgcgcccgcgatcatcgagagttgcgccagccgcatcttcctccctaacccgcaggccaccgagccgcagattcgcacgatctacgaaggcttcggcctcaacagccgacagatcgagatcgtcgccaccgcgcagcccaagcgcgactactactaccaatcccgcgcaggcaatcgcctgttcgacctcgacctggggccggttgcgctcgcgttcgcgggcgcttcgacaccccaagaccaacgcgccatcgaccgcgtgctgaacgacgccggagcaccgggcttcgccggcgcctggctgcgccaccgcggcctcgattgggcggccaacctgctgccgtccgcgccatccgccgcgaccttccttgcttcacaaccacaggagatttcgccatga

SEQ ID NO: 508878 - DNA, 270 bp, Stenotrophomonas maltophilia
atgagcacggccagcgacttgccgggcttcgaggtgccgctgcaccgctcgctgacagaaccgatcctgctgggcggcgcaccgcgcaccgtggcaatcgccaacggcacgctggccgccgccgtgggcctgggcctgcaactctggattcccggcgtcgtgctctggatcgtcggtcattcgctggcggtgtggggcgcgcgcgccgatccgcagttcatgcaggtgttcgccaagcacctcaagcacaagccactgctggacgtgtga

SEQ ID NO: 508879 - DNA, 384 bp, Stenotrophomonas maltophilia
atgacgcagatgcacgtccctgctttccgcttttccgtaaatccgacttcgtacctcgcgcgcctgcgtcgcctcgccggcccggcgcatcacgggctgctgctggccgccgtctcgctgatgacggcgggcacggcgaaggccgccggttcctcgatgccctgggaggcaccgttgcaatccatcctcgaatccatccaggggccggttgcgcgcatcgtcgcggtcatcatcatcatcgccacgggcctggccctcgcattcggcgacaccagcggcggcttccgcaagctgatccagatcgtcttcggcctgtcgatcgccttcgccgcatcctcgttcttcctgtcgttcttcagcttctccggcggggccgtcgtatga

SEQ ID NO: 508880 - DNA, 1026 bp, Stenotrophomonas maltophilia
atgagcgcgcaaccgcagtccttcgccaccacgtcgctcgaacggcgcattcgcatgttgcgcacggcgatggggccgctgatcgccgccgcgctcgaagacccggacgtggtggaaatcatgctcaatccagaccacacgctctggatcgatcgcctgtcgtcgggccgtgcaccaatgggcgcggagctgtccgaggaagacggcgagcgcatcatccgtctggtcgcggcgcatgttggcgcagaggtgcatcgcggccagccgctgctcaccgccgaactgccggaaacgggcgaacgcttcgagggcatcctgccgcctgcggcgccggggccggccttcgcactgcgcaagcgcgcggttggcgtgatcccgctggatcgctacgtcaccgacgggatgatgaccgccgagcaggccgagttcctgcgccgcgcagtgcgcgagcggcagaacatcctgatcgccggcggcaccagcaccggcaagacaacgctcgccaatgccttgctcgcggaaatcgccgcaacgggcgaccgcgtgttggtgctcgaagacaccatcgaactgcaatgcacggcgcgcgatcacgtgccgctgcgcacccgcgccggcgtcgtgtcgatgaccgagctggtgcgcgccacgatgcgcctgcgccccgaccgcgtgatcgtcggcgaggtgcgcggtggcgaggccctggatctcatcaaggtgtggggcacaggccatccgggcggcatcgccaccatccacgccggttccgcgctcggcgcactgctgcgcctggagcaattgattctcgaagtcgccgtgaatccgccgcgggcgctggtcgccgaggcggtcaatgtcgtcatccacatcgccggccgcggccggcgccgtcgtatcgaaagcatcgcccgcgtcgtcggattcgacggcgtgggctaccgcttggcagatgcgctggaggcgccgcttccagaactgccgctgtcttcctcatccctcaacccctctggagaactgccatga

SEQ ID NO: 508881 - DNA, 465 bp, Stenotrophomonas maltophilia
atgagccagtaccgcctcaacctgttcattccgcacgagcacgcaaagcgcctcgacgagctggccgccaagaaaggcgtgtccaagtcatccatcgtcgcggcagcgctggcgtcctggctgtcgcccgacgcgggcgaccagcgcgaggccgccatcgccaagcggctcgatcggctgacgcgccagttcgagcggctggagcgcgaccagaacatcgagatcgagacgctggcgctgttcgtgcgctacttcctgaccgtcagtacgccgattcccgaagcccatcaggaggccgcacgcgcgcaaggcaaagcgcggttcgagcagttcgtcgaacagctcggccgccacctgatgcgcggacgcagccttgtgcgtgaagtggtggaggaactgaaccccgatgccgcacggctggatggcgcggcggcgctgggtgaggaccaggagcgcgactcatga

SEQ ID NO: 508882 - DNA, 2004 bp, Stenotrophomonas maltophilia
atgcaaggtcaaggcgtgctgttcgggcaagtcggtgtcgtgttcggcatcgtgattgccggcgtgtggacggccacgcagtggacagccgccgccctgggctgtcagctacgcctgggctcgccctggttcgatttcttcggcatgccggtctatcacccttggcggttgttcgagtggtggttctcctacgatgcctatgcgccgcgcatcttcgacactggtggcgcgatcgcgggcggcagcggcctggtcgccgtcgtggtcgccatcgctatgtcggtgtggcgctcgcgacagtcgaagctggtcacgacttacggctcggcacgttgggccgaagttgccgacattcgcaaagccggcctcgacaagccggccggtgtcttcctcggcctgcatcgcggccaatacctacggcatgaaggcccggaacacgtcctgactttcgcgccgacacgctccggcaagggtgtcggcctggtggtgccgacgctgttgagctggccggcgtcagccgtcattcacgacatcaagggcgagaactggcacatcacggccggctggcgctcgcgcttctcgcactgcctgttgttcaacccgaccgatccgaaatcggccgcgtacaacccgctgctggaagtccggcgcggcgcgcatgaggtgcgcgatgtgcagaacatcgcggacatcctggtcgatcccgaaggcgcactcgaacgccgcaaccattgggagaagacttcgcacgcgctgctggtcggcgccatcctgcatgtgctctacgccggcgaggacaagacgctgcgcggcgtcgccaacttcctctccgacccggcttgcccgttcgagctgacgctgcatcgaatgatgacgacgtgccacctgggcaacgtgccgcatcccgttgtcgcatccgccgcgcgcgaggtactgaacaagtcggacaacgagcggtcgggcgtgctgtccaccgccatgtcgttcctcggcctgtaccgcgatcctacggtggccgaagtcacctctcgctgcgactggcgcatcgccgatctgatcgccgccgaccatcccgtttcgctttacctggtcgtgccgccttcggacatcagccgcaccaagccgctggtgcgcctgatcctcaaccagatcggccgacgcctgaccgagtcgctcgacggcagcgacggcatcgcacgtcgccacaagttgctgctgatgctcgacgagttcccggcgctgggtcggctcgactttttcgagacggcgctggcgttcatggccggctacggcatccgcagcttcctcatcgcgcagtcgctaaaccagatcgacaaagcctacggccagaaccattcgatcctcgacaactgccatgtgcgcgtgacgttcgccaccaacgacgaacgcaccgccaagcgcatctccgaaacgctcggcacggcgaccgagctgcgcgcacagcgcaactatgccggccatcggctcgcgccgtggttggggcacctgatggtgtcgcgccaagagacggcgcgcccgctgctgacgcccggcgaggtgatgcagcttccaccggacgatgccgtggtgatggtgtccagcgtcgcgccgatcagggccaagaagctccgctactacgccgacgccaacttcaagcgccgcgtgctatcgccgccggcacttgcgaacggccgctacgtcgatgcgccgccggttcgtcctgacgactggagcgggctggctatccctgttgttccggttgctccctcagccgtcggcttggccggcggcgacgccggcaccacggacgacggcggcccgcgccgtcagccggagctgtccgaggtcgccgaataccgccccgaacaggagctggtggccaacgacttggcgctgctcgatgacgacgacgcgccgttgccgcttcctcgccagctcgagccggccatgcagcgcacggcccggctggcttccctcgaccaacacgacgggatcgagctatga

SEQ ID NO: 508883 - DNA, 249 bp, Stenotrophomonas maltophilia
atgaacaagagcatgctgttgatactcgccgtggtgctggcctcctgcggcaagcccgagccaaccgaaacagtggattcgctggtagccaatcccgaaagactcaaggagctgcgcgcgcagtgcaaaacggatcgtgccaagctaggcgacgaactatgcaatcgcgtggctgaagcgacgagccgccgcttcctgggggatggcaagacgccctacaacccgccgaaggaagccccccagttctga

SEQ ID NO: 508884 - DNA, 945 bp, Stenotrophomonas maltophilia
atggagattcgacacctacgttgcttcctcgcggtagccgaagaactccatttcgctcgcgccgcggaacgactgcatatcgaacaatcgcctctttcgagggcgattaaggagttggaagaagacctgggcatcaagttgtttgttcgcacgacgcgcagcacacggctcactcgtgcaggaaagctgtttcaagaacatgtgccgcgagtgttcaccgctttacagcaggcccgcgagagtgtgaaagccgccgccaacggctttcatggccagttgcgtgtcgcgctgtcggacggcatcacgccgtcgcggttttctacattcctggcgttgtgcaggcaggaagagcccgaaatcgagattcgcttgtccgaggttccgcttacgcagcaaatcaagggccttcacgacgatctgtacgacgtagggttcgcacaatcggacgaggttggcgatggagtcatcgcggaacccgtttgggaagatcctctgatggtggcggtgcctgctcgacatccactcttgaagtacaaacgtattccgttggaagaggtgctgcactatccgctggtactcggcgatcctctggcctgcgagggtcatgcacgccaggtagatcgcgtgctgcgacgagtggagcaggagccactgattgccgagcgagtcacaactatcgacctaatgatggcgttggtatcggcgggctttgccttgggattagctggcgcctcgcagatcgcggccagccgcgagccgggcgtagtggcacgtccgctggccggccgcacacctatgctcaccacatatctgctgcgtctggacggcgagccttcgcagccgctggctcgtttcatcgagagagtcagcactgtcgaatcgtccggtggacagaagccttccacaccaccccaatctgatccttcggaggaaccagagatatga

SEQ ID NO: 508885 - DNA, 630 bp, Stenotrophomonas maltophilia
atgaccaccatcatcctgacacgccacggccacgtggattggatagcccccgaacgttttcgcggacgagccgaaattccattgtccgagctgggacagcgacaggccaaggctctcggccagcgcgtagcccaaacatggaagcctgatgtgatctacaccagtccgctgggccgttgcgtgcggactggcgcggagataggcgaagcaacgggcaccaagactgaagttctcgatgacctggccgacacgcactatggcgaatggcagggtctcacgcacgacgaagtgcgcacccgctggccggaggaacatcggatctggttcgaggcgccggacctcgccgccatccccggcggcgaaacgctcgctcaggttctggcgcgcggcatcagcgtgctgcaacgggtgttgaagaagcacaagggccagaccgtggttctggtcggtcacgacagcatcaaccgggtgatcctgacgcacgtccttggcttgcccttgtcccgctattggcggatcaagcaggagccatgctgcatcaatgaaatttccattgatggagagactttcaccatccaacgcatcaacgaaagccaccacttgatcgatgtagccgatgaagtgatctag

SEQ ID NO: 508886 - DNA, 1284 bp, Stenotrophomonas maltophilia
atggcatctaccgttcagacgatacacgcccgcgaaatcttggattctcgtggcaatcccaccatcgaggtcgatgtacggctcgctggcggggcgaccggccgggcggccgtaccctcgggcgcttcgaccggcatccacgaagctaccgaactgcgcgacggcgatccgcaccgctttgctggcaaaggcgtatgtagggccgtcgcccatgtcaataaggctatcgcggctgtcttgcacggcttggatgcgcaagatcaagccggcatcgaccacaccctgatcgagttcgatggcacgccgaacaaggcccggctcggggccaacgccatcctaggcgtcagcctggccgtcgcgcgggccgcggcacaggcggccggactgccgctgttccagtacctgggtggcgcgcaagcctgccgtatgccggtgcccatgttcaatatcctcaacggcggcgtgcatgccaactggcagggcacggacttccaggaattcatgatcgctccggttggcgcggcaaccttcgccgaaggcgtgcgctggggtgcggagatttaccatcgcctgcgcgccacgttgaaagaacgtggctactccacggcggtcggcgacgaaggcggctttgctcccgccttgaagcacaacagcgacgcggtggaactgatcctcacggccatcgagagtgccggctacacgcccggcgatgatgtggtgatcgcgctcgatcctgcatccagtggcttctacgagaacggcctttaccacctgcgcagcgaagaccgccgtgtcacggcggagcagatggtggagctgtatgccgactggatcgctaggtatcccatcgctgtacttgaagacggattggcggaagacgactggactggctggaagctgctgaatcaggcactgggaaacaggatcgaactggttggtgatgatcttttcgtcaccaacgtagaacgcatcgagcgcggcatccgcgaggacgtagccaatgcggtgctcatcaagcccaaccagatcggcacgctcaccgaaacccgttccgctgtggatacggcctatctggctggctggggtgcaatggtgtcgcaccgcagcggcgaaaccgtggacagtttcattgccgacctcaccgtagcgatgggcacaggccatctcaaaacgggcgcgccatgtcgtggcgagcgggtcgaaaagtacaaccagctcatgcgtatcgaagaagtgctaggccaagccgccgtatatgccggacatgccgcgttcgtgcgctga

SEQ ID NO: 508887 - DNA, 285 bp, Stenotrophomonas maltophilia
atgttgaccgttcgcaaccttccacctgaacccaccttgcatgactggctccacgacaacgcgcgtttgctcgccgcgttgaccgtatgggcagcggcgttgctatggcttgccggtacaggcccacgtttgatcgagtccgcttggtacaccgtcagcttcgtggaaggcggcttgatctacgaccgcatgccagacgaagcgacgtgccaggtccgtgtggtggacgacaccgcagcctgtctctcgggtgcagagctgggcggtagccagcccagcaattga

SEQ ID NO: 508888 - DNA, 324 bp, Stenotrophomonas maltophilia
atgaaaggctatcaactcacgttcttcacggagcaagaccgccggcatcggcatacccccatcggcgaatggctgctgaagttcgccaaagataacggtgccgctggcggaacgctggttggtggtgcggaaggattcgatcacgccggccgtttccattcggtgcacttcttcgagctggccgaccagccgcttgcaataaccgtatcggtcgatgaagcggcatgccagcgcctgatggatgcgctcgcacaggaagagatcaacctgacctacgtgaaggtgcctgtcgaatacgggcgcgtgggcaaggctgagaggtaa

SEQ ID NO: 508889 - DNA, 393 bp, Stenotrophomonas maltophilia
atgatggccggcgcctacgcaatcatcgccatcagcatcggctcggtcatcggtgccctcatgcgctatggcttgagcgtaagcatgaatgcgtttgtgccgcatatcccgatgggcactttggcgtccaacctgattgcggcctacatcgtcggcgttgccatcgcctatttcggctcgacgccgaacgtgtcaccggcatggcgactgttcgttatcaccggcctggccggtggactgtccactttctccacgttctcggccgaactgctgacgctgctgcgcgatgggcgcctgggatggtcagccggcatgctggccttgcatgtgggcggttcactcgcgatgaccgcgcttggcatcgccacgatttccctaacccgccaaccatga

SEQ ID NO: 508890 - DNA, 402 bp, Stenotrophomonas maltophilia
atgacctcgaaaaccagccagcagcacattgccgccttgcggctgtatttcccgatcgccaccaaagccaaggtcacgcgcttttggcatcacttgagcgcgccagcgctggcgcaccatctgctaacggtggccaaaaaggccaacatcgtgcaagccatgctgcaccaggttagctccggctacctgcccggcgaacggctgtcgcatcaccaccccgaattgaccggcatgcggcatccgcaatgcctggagctattggacaccgagcagcgcttgcgcgatttcatgcttgaacatgccgaagaactgcgaaaggtacacgcggttctgtttctgtgcgaattgccgctgggtcacaaccgagccgtgcatgcgacccatgccagcaaggcgagctaa

SEQ ID NO: 508891 - DNA, 1371 bp, Stenotrophomonas maltophilia
atgcgcagatttcgccgacccgaacaacttgagctattgccctacatcggcaagtggctcgtcatcgccagcgttgttgccttcctagccggcaccgcctcggccttctttctagtctccctcgatcacgccacagcttggcgcgaagcacaccactgggtcatctggctgctgccggtcgctggtttcggcgtcgggtggatttaccacctactgggcaagaccgtcgatggcggcaacaacctcatcattgacgagatccacgaccctaagaaagtcgtgcccttgcgcatggtgccgctggtgctgggtggcacggtcgtttctcacctgttcggcgcatcggtcggccgcgaaggaaccgccgtgcagatgggcggtgcactggccgaccagcttactcacgtgtttcgcatgaagcatgacgatcgccgcatcctgttgatggccggcatcagcgccggctttgcatccgtgttcggtacgccgttggcaggcgctgtgttcggcctcgaagtcctcgccatcggacgaatgcgttatgacgcgctgttcccgtgcgtcgttgccggcatcgtcgccgaccaagtatgtctggcctggggcgttcaccacacgcattacacgatgggcgaaatcgtgcccatcggcttctggagcgtgatggctgtggttgccgccggtattgtgttcggcctcgttggcatggtgttcgccaccgccacccacaagctcagcgcgttggtcaagcgcttcataaactacgcgccgctgcgccccgctgcaggtggcatcgtcgtcgccacggcggtgtgggcgcttgatgcctaccactacattggtttgggcatccctgacattgtgcgctccttccaggagccgatggcgccctgggacttcctgggcaaactcgtgttcacagtcgtttcgctggggacaggcttcaagggcggggaagtcacgccactgttttacatcggcgcaacgctgggcaacgccttggcgccactgctgcacctcccgttccccatgctagccggcatcggcttcgtcgctgtgttttccggggccgccaacacacccatcgctacgaccctcatggcgatggagctgttcggtgcggagatcggccctctcgccgcgatcggctgcatcacggcttatttgttctcaggccacaccggcatctaccacgcccagcgcgtgggccacagcaagcacagcaaacaccggagcaccgttcccgaagaactgcgcatcgccgatctggcgcacttccgcaagcaaaagaacgggcaggcgaaagaagagccactgatcccggagggcaaggccgaaacaccagtcatgagcaaggaaaacctccaatga

SEQ ID NO: 508892 - DNA, 624 bp, Stenotrophomonas maltophilia
atgagactgtctaacctgaacagcagtcttttcccgaaaacacatttgatttgttacggtggtttcattatgattgttcgcatgaaaattcaaaactggctgctgctcacctacaaggtgcctgccgaacctgccaagaagcgcattgccctgtggcgcaagctcaagggcatgggcgccatctacttgcagaacggcgtctgcctgctgcccaagaccgatgaccacacccgtcggctcaagatcatcgagaacgagattcatgagatagcgggggagtcggtgcttcttgagaccgtcgcactggacaaatcccaagaggaaaaagtggtggcgcgcttcaaggcagaccgcgatgaggagtacacggagttcatcgacaagtgcaacgacttcgatgccgagattgccaaggagacggcggccagccacttcacctacgcggaactcgaagaaaacgatgtagacctcaagaagctccagacgtggctggagaagattcgcaagctcgatttctacggcgcgacccgtgcggctgaggcgcagcagcgcctgcagggttgtgaggcgctgctcgacgcctacgcccagcgcgtcttcgaatcgcacgacgagaaccgctga

SEQ ID NO: 508893 - DNA, 810 bp, Stenotrophomonas maltophilia
atgcaactcactgttctgacctacaacactctgttcgccggccgcgatggcgcgaaagacgaacgtgcccaggcgcaaatcgatctaatcaaacaggtgcgccccgacgtgtttctgatgcaagaagctaaggggttcgatgccaatggaagcgcttggctctatgccacggaagagcgcatcggcatgcgcggcttcctcgccgtcgcgccgcgcactggccagaacgtcgccatcttcatccgcgagccgctgcgcccactgacgttcgaggcggatggcgcgcacttccaccatgcactagcgacgctcaaggtgactgtgccaggcagcaacgaaccgatcaccttcatcagtgcgcacctgtgccccaacggccccgaggtgcgccgccgtgaagcggcctacctggccgtacaagccgcgccggaccggctcgcgctggtcgcgggagacttcaattcggcctcgccgcacgaccccgagccggaaggtttcgaggcactgccggcgcaccatcgcgcccgctacctggccgacgacctgcaaggcgccgaccgcagcgttctggcccgcctagaggcggctggatgggtcgatctcggccaccggctggacccggtcaaggtggcgactgtgcccacggcgggcttcacgggcaccgagtttgcgacgatgcgctgcgactacctgctggcctccgctgccctcgcccaggcggcgcggcattacgaggtgatccgcacgccgggcacggatggcgcctcggaccactaccccgtcctcgcacgcttcgagttaccgcaatga

SEQ ID NO: 508894 - DNA, 1335 bp, Stenotrophomonas maltophilia
atgctgccctcgacactggtcacgcgcctgcggccgcttaacgaccaacatcacgaattgccctccatgcagaatgaactacaagaagcggccgccgaagcccccgccacgacgaagggctggttcaatcgcaccgtcgccggcgcgggactgaccagcgccttgggcgacttctgctacgaaacgacgactgtgatcctgcctggtttcctggctgtgttgggtgttccggcggcggcgctgggcatcatcgagggcatcgccgatgccgtcgccagcttcaccaagatggtatcgggctacatcgcggacaagctcggccaccgcaagggcctcgtgctggtcggctacgcgctcacgccgattggccaggttctgatcgccctggcggccggatggccgctgctgctgctcgggcgattggtgtcctggttcggcaagggcctgcgcggtcctttgcgcgatgccatcgtggttcaagccgtcagcgtgcagacgcgaggccgcgccttcggtttccaccgggcggtggacaccatcggcgcggtcatcggcccattgttgggcgtggccgttttgggatgggcgcaggctttgcattgggacgatgcgacggggccgtttcgcttcgtcctttggctatcggtgatccctggtgcgcttgccgtgctggccttcctcacgctggtcaaagacccggagcattcgcccaatcctggtctgcgactcctgagcacgctgcgtggattgccaacccgattcaaacgctacctgggtgcagtcggcatattcggcttgggcgatttctcgcatagtttgctgatcctcggagcgacgcaattgctcacgtcgtcgctcggcgtcgtccatgccgcacaggtcgccgggctgctctatgtcggccgcaacgtggttcaggtgttggcgtcttatcccgtaggcgcatgggccgaccgtatcggctcgctgccgctactcgtggtgggatacgccttaggcgcgctgacggccgtgttgatggtcctggccttctggttcggcacggcaagcgtcccgccgctcgccggcatcttcgccgttgccggcctctatgtcgcggtgcaggaggccctggagtccacggtaacggccgatatggttagtcccgaaacgctggcgacaagctatggcgcattgggcacggtcaatggcggcgcgaagtttctctccagtgcgacggtcggtatgctctggacggccgtttcgccagcgtttgggttcggactggccgctgcattgatggctgtcggcacgttggccttgttgcgtgtccagcgaagaaaaccaaccatctaa

SEQ ID NO: 508895 - DNA, 1962 bp, Stenotrophomonas maltophilia
atgagcagccgtgacgacgaccgattccgcgttcggcctggtgccccgaagcagcgtggcgacgccttcatcaacaaggtactgcgccagaccaacaaggccggcgccaagctcggcaaggcggctggcaaggtcggccagcgacccggttcccggttagggcgcggccacgttgccgctcgctttgctggtcgtggacttggggcaaacgcccggcgcgtgacgatcaaggcgaggctggtcaatctggcacaggcggggccgcgctccgctgctgcgcacctgcgctacatcgagcgcgaaggcgtcgatcgtcaaggcggcccaggccatgcctacgggccgacgaccgatgccgccgacctcgaagtgttcaaggaacgtggtgccgacgaccgccaccagttccggttcattgtttcgccggaggacgccgaacagctcgacgacctgcgaacctacacgcggcacctgatggcgcgcatggaggccgacctgggcacgcggctggaatgggcggccgtcgatcactggaacaccgacaacccacacacgcacgtcgttctgcgcggcaaggacgacaccggcaaagacctcatcatttcgtgtgactacatcgccgaagggatgcgtcggcgtgcgtcggagctggcgaccgaatggctggggccgcgcaccgagttggagatgcagcaggccatgttgcgcgaagtcgaacaggagcgatggacaggtctggatcgcaccttgcagcgcgaggccggcgacgacggcttggtgcatatcgaacgcttcgcagaaccccggctgcaacgccagcgacaaatgctgatcggccgtttgcaacgcttgcaacgcatgggcctggcgagcgagcaacagcccggcgtgtgggccgtccacgccgaggccgagccggccttgcgggcaatgggcgagcgcggcgacatcatccgcacgatgcagcgggctatgagtggcaagcagcgcgagctggtcgtgttccaacccggcgaggctggccgcgccatcgtcggtcgcgtcgctggcaaggggctggcggacgagttgtacgacaagggctatctgatcgtcgatggcacggacggcaaagcgcactacgtcgctttgccgccgcgctcggagttggagcagtacccgaccggggccgtgatagaggtgaaaagggcggccaacgtgcgcgttgccgaccgcaacatcgccgcactgtccgttggtggcgtgtaccgaaccgaccaccatcttgcgcttgcccaaggacaggctacgcccgaccgcgatccgcgtgaggtggtggccacgcacgtgcgccggctcgaagccctgcgccgcgccggcatcgtggagcgcgaggccgaaggcgtctggcgagtgcccgacgacctcaccgagcagggccgccagtacgacgcgcagcgccttggcggcggcgtggcggtggaactgaaatcgcacctacccatcgagcgccaagcgcgcgtcgtcggcgccacctggctcgaccagcagttgatcggaggtggcaagggcttgggcgacctgggctttggggccgaggtgaaggacgcgctacgccagcgcgccgactttttgactgaacagggcttggccgagcagcgcgggcagcgcgtcgtcctcgcgcgcaacctgctggcgacgctgcgcgggcgcgagctggcgaaggccgcgaaggacattgccgcagaaaccgggcaggagcatcggcccgtggccgaggggcagcgcgtggccggcatttaccggcgcagcgtcatgcttgccagcggacgttatgcgatgctcgacgacggcaggggattcagtctcgtgccgtggcgcccggtgatcgagcagcggctggggcagcagcttgcggcgacggtgcgtggtggcggtgtgtcctgggagctgggaaggcaacgaggccccaccgtaggctga

SEQ ID NO: 508896 - DNA, 597 bp, Stenotrophomonas maltophilia
atgacgacgcttcccacgtccgcaaacactacggaaacagcgccgcatcctcgctcgcgcctgcgcgctcgcctcgtgctggcgaatctgtcggtctgcggcttcgctgcgctggcttgggcatccttcgtgtcgccgctgccgcgcctgacctacaacccgtccgacagcgtggcgatcggttggtatcgcatcgaaccgttcgacccgcataccgccttgctgtcacgtccgttgtccgtggacagcatcgtgctggtgcccttgccggccgaagccgctgcgctggctgcgcagcgcggctacctgccgacgcgcattccgttgctcaagcgcgttggtgccgtcgcgccgcaggaggtgtgtattgtcggtcgcagcgtgcgcatcgacggcgtgccagtggccgccgcattgcctgccgaccgcatgggccggccgctgccatcctggcagcagtgccgccgcctcgaaccgggcgagctgttcctactgagcgtgaccaatcccgcgtcgttcgacagccgttacttcgggccggtgtgcgcatcggccgtgctcggcctcgcgcatccggtctggttggagacacgctga

SEQ ID NO: 508897 - DNA, 534 bp, Stenotrophomonas maltophilia
atgaacgcatctgctctggcggccacggctgccccgccgccatcgcccgcagtgctcgccggccaggccggcgccgcgccgctaacccgcgtatcgctcgcctacgttgagcaacgcatcgacctctatctgcgcttcggcgagccagcgcgtatcgtccggctcgaccgctggcgtcgcgtcgcggtgttcctgcctggcgcgatgttctgccgcatccgctggcacgccaacgagtacggaaccgtgcgctggcaactcatggtgatgcaggcttgcacaccactggacgcggcacagcgcattcccggcgtgctgcccggtgcgcgcctgctgctgcacgccgaaggtgaacccgccgtgcgcgccgtgttggcacagctcgacgccatcgaggcgctgggcattgcgccgaacgccgcttcgccggcgtattggcgcacgctcggcaaccggctcgcggcacgcttgccgctgccggcgtacaccgccgagcggcacgccgcctggctcgccgggagggcgctgccatga

SEQ ID NO: 508898 - DNA, 252 bp, Stenotrophomonas maltophilia
atgagcgagcgtggcggcaagcgcatcgctatcggcgcgcgtccgccggcgaatccacacgccgaggcgtggattcgccagggcgacgctgacggcatccagaaaggcgacctctacaccgcgcgcctgaccctcgacatcacgcctgcgatgcgcgcccgcatcaaggtatcggcgttcacgcagggcgtgactgtcgccgaactgctgcgcgcgctgctcgaacgcgagttcccggagaagacctcatga

SEQ ID NO: 508899 - DNA, 834 bp, Stenotrophomonas maltophilia
atgcccagcccatcgcgggagcgggaacagctcgacctgttccgcgccttgccgggcgacatggcgccgcgcgacagccaggacttgatggcctttccgttcttctcgctagcgaagtcgcggcgcacggcgccgatcgacttccgcgccggtggcgtcaccgtgcgcgtggagggcacgcaggagcatggcatcgccacgatttgggatgcggacgtgctgatttgggcggcatcgcagatcgtggaagcgcgagacgcaggcattcgcccgtcgcgcctgatgcacgcgacgccctacgagatcctgcgcttcatcgggcgcggcacgtcgctgcgcgactaccagcgcctcaaggccgcgctcgatcggctgcaatcgaccagcgtggccacatccatccgcgagacgaccggacggcgcctgcatcgcttctcgtggatcaacgaatggaaggagctggccgacgcccgcggcacgccgctgggcatcgagctaatcctgccggactggttctatgccggcgtgctcgacgccgcgctggtgctgaccatcgacccggcttacttcaagctcaccggtggcatcgagcggtggctgtaccgcctagtgcgcaagcacggcggcaaacagccgggcggctggcagttcgacttccggcacctgcaccgcaaatcgggcagcacggcgaagccctacgacttcgcttgcgacctgcgcgcgctggtcgcgcggcagtcgctgcccggctatgtgctcggcatcgaacggacgctggataccggcgaggaactgttgacctttcgaccggtgccgtccacggcacggggataa

SEQ ID NO: 508900 - DNA, 759 bp, Stenotrophomonas maltophilia
atggctgatcgaagccccgaagggtggtatcccactgctgcgtatctgtacgtcctgcatctggatggcccagcgctggcctgggagtatttgcgccgccatcctgactaccggcgtgactggcaacgccgtcgccgccgatcggaggcggcgcacgcatggggcctgcgcttgttggaagacccgcgccaggatgcacgcgacgcgcatcctgtttggttccccgatcatgacggcgtgctccagctctacccggacgccgacccgccaccggaagcccacaccttcgagttctggcgcgtcccaggcaacaagcaattgatccacgatggcaagcgcctggtgctgacggcacgctggcccggctgctgcgtgcggcttgcacttgcgccgggcctggccgacggcatggcctatctctatgccgttcgcgcttgcgcagcgccttgcgcgagctaccgcacgagcacggccgagctggacaagctggcgacggtggacgcggcggccgtgcctacggcagcggcccgctcgaggcccacgccggccgcgctgctggaactgcacaccttgcaggcgctcgacgcgaccctcgcgggcgcgtccttgcgggagacagccgaagggctgttcggcgctgaagccgtggccgccggctggtacaccgatggcggcctgcgctcgcgcgtgcgccgcctggtgcggcgcggccaatcgctgatgcgcggcggctaccgccgcctggcacggctcgaatga

SEQ ID NO: 508901 - DNA, 318 bp, Stenotrophomonas maltophilia
atggctaacatcggcaccttcaccgcagagaaagacggcttcaccggcacgcttcgcaccctgacgctcaacatcaaggtcaagctggttcccaacgacaagggcgacaacgagaaagccccggacttccgcctgcaggcggctggccacgacatcggcgcggcgtggaagaagaccagcgaggccggccgggattacctgtccgtgaccctcgacgatccttcgttcccggcaacggtctacgcccgcctgatcgaaggcgagaacggcacgcacgacctgatctggtcgcgcagcaagccgcagcaggcggactga

SEQ ID NO: 508902 - DNA, 2049 bp, Stenotrophomonas maltophilia
atgaacgccgttctcaaaaccgaagtcttcgccgttgaagccgccacgccgctggaagtggccgacccgaccaagaacctgattctggttccgctgtcgcaactgttgccgcgccgctccaagcgcaatgtccgcacgactccgcgccagtccatccccgaactggccgcgagcatcgcccgcgtcggcctgctgcaaaacctcatcgtgattgccgccgcagatgtcgagcattacgaagtcgtggcgggcgaccgccgcctgaccgcgttgaggctgctggcgaagaagaagcgcatcgccgccgactacgaagtgccgtgcctgctggtggccgatgcgtccgcccgtaccgtgagcctcgcggaaaacgtgcagcgcgagaacatgcaccccgccgatcagttcgcggcttttgccgcactggtcaaggaaggccgacccatcgaggacattgccgctgacttcggcgtgacgccgctggtggtgcagcgccgcttgaagctggcaaacgtctcgcagcgcctgctggtcgattaccgcgccggcaccgcaacgctggaacagttgatggccttgaccgtcaccgacgaccacgccgcgcaggaagccgcgtactacggtgcgccggaatggcagcgtggcgcgtccgcgttgcgcgaacgcctgaccgagcgcgaaatcaatgccgcgcatccgctggtgcgtttcgccgggctggacacctacgcggcggcaggcggcggcacccgccgcgacctgttcgccgaaggcgataccggaacctacctgaccgacgccgcactgctggaaacgctggtgcgcggcaagctggacgcgctggccgagggtgtgcgtgccgaaggctgggcgtgggtggatgctacgccgcacatcagttccgccgaccggcaggcgttccagaacgcgccgcgccagcgccgcgaaccgaccgcccgcgaagcccgccgtttcgcctcgctgcaaacccgcctcgaaaaaatcgacgccgaactggaagacgcttatgacgccgaggacgaggacaaggcggcaacgctggaagaacgccgcgaacacgtggccggggaactgcaaaccatcgaagaagccctgcaaagctacgccccggacgtgcgcgccgtggccggtgccatcgtcacgctcgaccgcgagggcgaagccgtgattcatcgcggcctgctgcgcgaggccgaggccaaggcactgcgcacgctggaaaagctgcggcagggtttcgtcggggaaagcgcgaacgacgacgaaggcgacgaacccgaagcgcccaagaccgccagcgtgtccgatcggctggcgcagcggttgagcgcccaccgcacggcggcgttgcaagtcgaagtcgcccggcatccgctggtggcactggctgcgctggtgcatggcatggtgcaaaccgtgctgcaagaccgctaccaccgccatgacttaccgcttggcgtcagcctgaaagtgcaagaccggctggaaagccttgccccggacgtgtcggaatcgcccgccgccgtggcattgcgcaccttgcaggaagtcgcgggcgaagccttgccggaggacagcgtcgaactgttcgccgtgttgctggcgaagtcgcaagatgaactggtgcgcctgcttgccgtgtgcgtggcttccacggtggacgtggtgacgcctcgcgccgcgcagcaccagcccggcgcggaattggcgcaggccgtggagctggacatggccgcatggtggaagccgaccgccgagggctatttccagcacgtccccaaggccgtgattctggaagccgtgaaccagtacgccccggcgcatgtcacccgcctgtcaaagttgaagaaaggcgacattgccagcgaagcggaacggctggcggatggtacggcttggatgcccgccgtattccagacccgccatcacaccgagccggaaggcgtgccagaggcggcggacgaggctgacgccgacgcgccggaagatgccaccagcgaggaggaagcgcacgcgctggccgcgtga

SEQ ID NO: 508903 - DNA, 825 bp, Stenotrophomonas maltophilia
atgcaactcgcatcccgcttcgcttcccgttccccggtgctgcgttcggaacgtcccttgttggatgaccaaatccgagccgtagcgccttccatcttcgcggacgccccgcacgaaagccgctcgcaacgatacagctacattcccaccgccacggtgctgcaagaacttcgcggtgaaggcttcgagcccttcatggtgtgccagacccgcgtgcgcgccgacgaccgccgcgactacaccaagcacatgatccggctgcgccacgccagccagatcaacggccgcgaggccaacgaaatcattctgctgaactcccacgacggcacgagcagctatcagatgctcgccggcatgttccgctttgtgtgccagaacggcctcgtttgcggcgacaccgtggcggacgtgcgcgtaccccacaagggcgatgtggccgcgcaggtcatcgaaggcgcttacgaagtcctgcacggcttcgaccgagcgcaggaatcccgcgatgccatgcaggccatcacgctggacgccggggaatcggaagtcttcgcccgcgctgcgctggcgttgaagtacgacgaggacaagcccgtgcccatcacggaatcgcaaatcctgatgccgcgccgtcacgacgacagccgccgcgacttgtggagcgtgttcaaccgcacgcaagaaaacctcatcaaaggcggcctgtccgcccgcgccgcgaatggtcgccgccagaccacgcggccagtgcaaggcatcgacaacggcatccgcctcaatcgcgccttgtggctgctggccgatggcctgcgccagttgaaagcctga

SEQ ID NO: 508904 - DNA, 1020 bp, Stenotrophomonas maltophilia
atgcagtttatgcccgtagggatcgacattgcaaagagcgtctttcaggtccactacgtggacgccgggacaggagaaatcgtgagcaaggcgatcaaacgcgccgtgcttctcgagttcttcgccaatcgcagtcattgcctgattggcatggaagcatgtggtggcgcgcagcactgggcacgtgcgctgactcgcatgggccatcaggtcaggctgatgccggccaggttcgtcaaggcattcaacatcggcaacaagaacgacgccgcggatgctcgtgcgatctggctggcggtacagcagcccggcaaggccgtcgccgtgaagaccgaagcgcaacaggcagtgctggcgctgcaccggatgcgccagcagttggtgaagttccggacgatgcagatcaacagtttgcgcggactgctgaccgagtacggcgaggtgatggggagaagtcgggccgcgctgaacaaggccatgccggacgtgctggaacgagttgcagatcggctgcccgcggtgctggtggatacgctgcgcgaacagtggaatggatcggcagcattggacaaacagattgccgagatcgagcgacggctgcgacagtggatgcaggaagaccagtccgtcaaagcgatctcggagatccccggagttgggcttctgagcgcgacggcagcggtggcgacgatgggcgatgccaaagcgttcaaatcgggacgggagtttgcgtcctggctcggcctggtgccaaaacaaactggctccggaggcaaggtccagcttctgggcatcagcaagcgtggcgacacgtatctacgcacactgctgatccacggcgcacgcagtgtcctcaggcatgccaaagagcctggtccgtggctcgaccagatcagcaagcgaaaaccattcaacgtggtgatcgtggcactggccaataagatggcacgcacgatctgggcgctcctcgcgcatggcagtcggtatcagaaggagtatgtgagcgtgcggcccgcgtag

SEQ ID NO: 508905 - DNA, 2649 bp, Stenotrophomonas maltophilia
atgtccatattgcaggagcttcttgtttggtcgcaggggttgccaacctggcaaagtgacgccgtttctcgcctgctcgctaaacaaaccttggcgctcgaagatcatgaagatttatacgcgctgctcaaacttgcacatgggattcccgatccgaagaatcgccagccgcagcccctgactgccgaccagattcctgcacccgtcaaggtgacaacgcatgtggaattgcaggcgatcaagaatctgcgaaacgtcaatgcaattgcggagaaccagcttctcgcagtgacaagtcctgggatgactgtcatttacggagataacggttcgggcaaatctggctattcgcgcgtcctgaagcgcgcgtgtcgggcacgtgaccagtcagaggcgatccatccgaatgcgaatctaccgggtgccaaggctggcggcgcagaggcgtccttcgatattagtgttgacggcgtatccaaggcggtcgtctggcaagaaggaaaagcggcgccgcccgagctttcttcattttccatctttgattcgcgctgcgctcgtgcctatttggacaatgaggatgatttctcatatgtgccttatggcttggatgtgtttgaggcgctggcgaaagtatgccaacaactcaaggcatctatcgataacgaatatgcgcagtcagccgtggatctcactgcctttgcccatcttcagggtgatacggccgtcggcaaattgattggcgccctatcatccaagaccgatagcgcgcggatcgaggctcttgccacgctgaccccggaggaactggagcagcgggaaacgctggagaagagcctcaaggagaacaatccaaaggagaaggccacccaattgagactgcttgcgcgtcgcgtagaagtgatcgccaagaatgccggtgaaagggtggtcgcggttagcgaagaagtggttgccaagtttaaggtgttggccgacggataccgtaccgcgcaggccagcgcggctttagctgcgaagcaattcaaggaaggtgaaaacctcctgccgggaaccggtggagaggcgtggcgcgagctattcgacgcggcgagaaagtttgcgctggaagcccatcctgacaaacagttccccgatctcggggcagacgcctcgtgccctctgtgccagcagccgctagcagaaggcaccgagcggctgctgcgttttgaggcatttatacaagccgaggcggaaaaaactgcgcaggcgcgccgccaagctttatacgtcgagtacaagccgtttgccgcgtcggcgatgacgctgaatcttgatgatgtgacgcatgccgagatcgtagcaattgaccctcagcttgcggcagacaccaaagagttcgaggcggcgttggtggtgcggcaggaggctatcaaggcagccgttatatctcatgattggagcggtgtaggtcagccgcaggctaatccggtagctcgccttcaagcgctcgctggcaaattgaacgccgaggctgaagcccttgagaaggcatcaaacgagaaagcccgcgctcttttacagacgcagcttgccgagttggacgctcggaaaaagctcggccaggtgaaggacgcggtaattgcggcggttttcaaactggaccatcaggcgaagctcaagaactgtctgtcggcagttaaaacgaatggcatatcgctcaaggcgtcggagctggccgagaaagtcgtctccaaggaattggcggaagctctgaaccgtgagttcaaggcgctcggcgtaggaacattgagtgtttcactgcaaagccgcgccgatcgagggaaggcattacacaagctgaagctgcaactgcctcaagctcgcagccccggcgatattctgagcgagggcgagcagcgcgccgtggccatagggtcattcttggcagaagtcggattgagtggcggtaaaggcggaattgtttttgacgatccggtgtcgtccctagatcaccgccggcgcgagcgcgtagccaagcgccttgccgttgaggcttctgagcgacaggtgatcatcctgacgcatgacatttatttcctctgcctgcttgtcgaagaagcaaagcagacgggcgttgccatcagcacgcaaagcttgactcggcgcgctgaaggcttcggcgttgcggaccctgaacttccttttgaggggaagaatgcgagcaagcgcatcggcgcgctcaaggctcagcagcaagccatcgcgaagctgcataaggacggggaggaacaagagcatcgcaagcaaaccgtagatgcgtatttccgtttgcgtatggcgtgggaacgagcggtggaggaagttctcttgcgcgaagtcattttgcgtttccgcaagggcgtggagacgcaaagactcgtcggcgtgagtgttgaggacgatgacttcgcccgagtcaatgaagggatgagcaggtgctcgaactacgctcacgacaaagcattgatgggcggagtcgcggtgcctgacccggacgaactgctcaccgacattcttgccctagagaattggcgtctactggttcacaaacgctccgaggaaacagccaagaagcgtaaagctgggccgacgcccgcggcaggggccgcagtaccagcgggagcggcgtag

SEQ ID NO: 508906 - DNA, 1065 bp, Stenotrophomonas maltophilia
atgaccaagcgcaaagtattcgttccttcggcagcggcgccgtcggcgctgctgggcgacattcgggcactgatcgaggcggcgcgccagcgcgtcgcttcggcggtcaatgccgagctgaccctgctgttctggcggatcggccagcgcatccatacggaggtgctggccggccagcgtgccgggtacggcgaggaaatcctgccgaccctggccgagcagcttgtccaagactacgggcgcagcttcgcggataagaacctgcgcaggatggtgcagttcgccgctacctacccggagaagccaattgtcgtgacgctgtcacgacaattgagttggtcgcatttcgtggcgctgttgccgctgaaagacccgttccagcgggattattacgcgcagatggccagcgccgaacgctggagcgtgcgcacgttgcgcgagcgtatcgactcgatgctttacgagcgtactgcgctgtccaagaagccggacgagacgatcgcgcaagagctggctgccctgcgcgatgcgcagcgcatgtcgccagccctggtcatgcgcgacccatacatcctcgacttcctgggcctgcgggacacctggcaggaaggcgacctcgaagccgcaatcattcgtgaaatggaatccttcctgctggagttgggagcgggcttctcattcgtcgcccggcagaagcgcattcagatcgacgatgaggatttccatctcgacctgctgttctacaaccgtaagctgcgccggctggtggcggtggagttgaagattggcgagttcaaggcggcgtacaaggggcagatggagctttacctgcgctggctcgacaagcacgagcgagaaccggaagaagcctcgccgttggggattattctctgcacgggcaagaagcacgaacaaatcgaactgctggagctggacaagtcgggcatccacgtagccgagtacctgacgaccttgccgccgcgtgcggtgttgggcgaacggttgcaacaggcgacccaacgggcacggttgcaacttgagcagcaacgaggcgacaacagttag

SEQ ID NO: 508907 - DNA, 1203 bp, Stenotrophomonas maltophilia
atggcgaagatcaaacttaccaagaccgtggttgacgcggcacagccgcaaacctacgacgttgaactccgggatacgacggttccgggcttcttgtgcaaggttacaccaaccggccgcaaggtattcatgcttcagtaccgcacgaactccggtgtgcggcgcaaaccagccctcggccagttcggcgagctgaccgttgaacaggcccgctctctggcccaggactggctggccgaagtccggcgcggcggcgaccccggacacaacaaggccgaggcgcgcaaggcccccacggtcaaggaactgtgcggccggttcatggaagaccactccaagccgcacaacaagccgagtacgcaggacggctatcagtaccagatcgacagcttcatcatcccggccttcggcagcaagaaggttcacgaggttacgcgccacgacatcaccgcgctgatgaagcgcatggagaagtcccccacgcaggccaaccgcgtgctctcgctcgctcgcaagatgctcaacctgtccgagctgtggggctaccggcccgacggctcgaacccgtgccgccatgtgccaaagtacccggaaaaaggctcgacccgcctcatcaccgatgagcagatggtcaacctgttcgcgtatctcgacaaagccgaagccgaggagctagaacatccgatctacctgctggctgtccgactgcaattcgagttcgccgcacgcatgtcggagatcctgctcttgcagtgggattggctcgacttgcctaacggccgggtggtttggcccgacagcaagacgggcgatatgtccaaaccactgagcgaggaagcccgtcggctgctgacgagagccccgcgatacggcaagtcgccttacgtctgccccgccgtcctcgatcacgacaaatcgctcagtccacattcgtactaccaagcgtggcggcgcatcctcgatcgcgccggcgtgccaaaggtcggcacccacggcatccgccatcgctcggcgaccgacatcgccaattcgggcgtcccggtcaaggttggcatggccctgacagcacacaagaccgtggcgatgttcatgcgctacgtccacacggaggatgacccggtgcgcaacgcggccgaactggtggcgaaccggcgcaaggcgatcaccggcgccaagcagcaacctgcggaggcgacggcatga

SEQ ID NO: 508908 - DNA, 549 bp, Stenotrophomonas maltophilia
atgaagaccagcattctcactgcgttggcggcgttgtccatactccatgtggcgccgttgcacgtgcgggcggcgggcacggatctatccattccgaaagcctcagaaccggcgtctcgcgaagaccagacggctttgtggaagaaggtggaacaactcgcattcgcgaccgtcgcgggggcagatagcgtcaagcgtgctgctgcgatagaacatgggcctctgcctagcggcgggacatccgacttggctatcggtaaccgactcactggcacaaatgttgcgctacagctcgatcctgcaggaaagttggaagagctttcgttcgaccttcgcggaggctgtgtctcgacgcgaactctgctttcgcagtatcccaatttgctcgttctccaggtcccacatgacccgcgggccaattcgcttgtcggcaccactatcggaggcgccctggtcaccttcagaatggccccggggccggggccctgcgcgctgggcgtgaccgttcagaccgttgagatggccaaggcgcagctcctgctgcgttga

SEQ ID NO: 508909 - DNA, 2424 bp, Stenotrophomonas maltophilia; identical to SEQ ID NO: 501205

SEQ ID NO: 508910 - DNA, 3867 bp, Stenotrophomonas maltophilia
atgaagggaaggacccgcaccgagaacttcgagagattgatggacttcctggaactaactgccgccgatatcaccgctctggatgacggtcagctgcgagagctagtcgctcgattagcggaagctgagcttcgcgagcaggggatttcccggtcaagcgtgcaagccggtggggcgcaggaggcggccgacggcggactggacgtgagcgtcgccaccgtaggtccactccagcgtccggccttcgtcccacgtgcgaccaccgggttccaagtgaaaaagcacagcatgagccgcggcggctgcacacgggagatgctcgaggcgggtgagctcagggactccattaaggcgctcaccgatgaaaagggggcctacgtcatcgtcagcggcaaggatagctgctcggcgaccatgtacaaggagcgccttgccggcatggaggtggcactgaagacgtatggtgagggtggggatctgcacttggacttctatggagctgaccggttggcgttgtggctgaagagccatcccggcgtcgcgctctgggcgcgggaaaagcttggcaagtcgctggctggatggcggccctacggccgctgggcttcgacaccgaagaccgataaagacgagtttttggccgacgcgcacccctgtgtcatcgatggcagctccagcgacaagaaaaagatgacggtcatggaaggcatcgaactagcacgccgccgactgaggtcaggctctcgtgccgtccgcattactgggctgtcaggcgtgggcaagacgcgctttgcgcaggcgttgtttgaagagcacgtaggggaagacgcgttgcctgccactgacgtcctctacgccgatctgggtgaagacctggtgccttcggcatcagccgtggtcacctacttgatcgccaacaagctggcgagctacgtcgtcctcgacaactgcccaccccagacgcaccgatcgctgcagaagcagctcagcgccagcaccgctgcgctgcatttgctgaccattgagtacgacatatccgacgatagaccggaggagaccgatgtcatccatatagaacggggtagcgaggagacagtcgccacactgcttcttcggcgttatcccaaactcaaccggttcaattcagcgcgtatcgccgagttcgccggcggcaacgcccgactcgcgctggcgctcgctgaccgggttgaggcggacgaaacgcttacgagcttcaatgacgaggagctcttcctacgcctgtttcagcagagaaagggcgagtcagcggacctacttcgggcagcaacggtcttgtcgctggtctactcgttcaacgtctcccgcgacgagcgcggggatgagcttggagttctgtcggcgatatccgaggtcgcgcgcgccgacctgcaacgtgcccaggctgagctggtgcgccggcagctcgcccaaaaacgaggcagttggcgcgcggtgttgccgcatgcgctcgcaaaccggctcgcacgccgcgcattggacgactacgaacccgaggacatcaaccgcgagcttctgaagcccgagaatattcggctgcttcaatcttgtgcccaccgcctcggctactttcatgacaacgaacgtgcccgcgagttggccctcacgtgggtccagtcgggcgcgccattggcaaacctcgcggcactcagcgagagccacctcgtggttctcaactatgtagctccgattttcccagacgtccttcttggcgcgatcgagcaatcggcccgcattccggggttcgctgaccgcgccaatcccaacgtccagcgctttgtcgggctcctcgtcaatctggcttatgacgacgaatccttcgaccgttcggcgagtatcctgctcagcatcgctcggaccgagcgtcatggagagaacaacaacagcgtcgtgggtcgattgcgccgactccatcagctgcatctatccggaaccctggctggcccggcccgacgccaggcgtttgtgcagaggctgcttgcgaccgatgaacatcgtgaccgccagatcgctggcgagctcctccgcgcagcctttgaggcgcgatcctggacgtctttcggagggtttcagttcggcgcgcgcaaccgtggatccggctggaggcctaggtccaggcaggagcaacgcgactggtatgacggctttctcgcactgctcgatccagtactcgagtcagactatgactcgcgcgagtggggcaagtcgctgatcgcagagaactttcgacagctctggacctctgccggctgcttcgacgctctggaatccctagtatcaacctatggcgcgggtgggtggtggcctgcgatttggttggccatcggcgagactatcgagtacgacggcgcgggtcttgatcgggcggtgttgcggcgcctggaggtgttgcagtctctggcggcgccttccgacctcgagtcggagatcggcgcctacgctttcgtgaacgaatggtcgcatccctactgtcgcggcgccgaccgcccagcagcaaggacggaactgctggaccacgtcttcgcattggggcggtcactcgcgtccaacccggacctgttcgagcatctggcgccacagatctgggcaactcgcgtgagaccggtagcttggctgggttatggctatgccgaagcccacgaagatctagaagccctggtcgatatgttgatccggtcgttcaaggcacatgccgctaaccgcgccagtgtcgagttcatcgagggctgcttgctggcgaccgcggagcgcaacccggtcctcctgccaccagtgcacgagaagttgctggcggagactaagctcaagccatacagcgtctggctacttctggctacccctatcacgccatgggtgagcgcgcgattgctcgacgtcgcccgccagggcagcgtgcccgcggctcattttgagggagttggtcacggcagacgtcatgagtctatgtctgacttggagttttcagcgcttacgaatgcagtctgccgcctgccagagggataccactcgtcgttcgacatgctgatcatgcggctacacgcgagggctgactggaattatatcccagggccggagatcttctcagccatccgcatcgcattgggtagcctgttgcgtgatcaggccaccgacgtgaaccggcgtgcccatcacggcataggcaagctgatcgtagaagctcttggtcctgcggcacccgaagacgacgtggccagactcgtcggcgagctctgtgacgcggtcaaggagtatcggctctcgcgggagaattactccgaggtgctgtcgtcattcatcgaggcacgtccggagatgctgctggatgcactactcgaaatcgaacgtgatgatcccgaatccggcgcggtggactggctgttccggcagcgatccggtgagtcctcgccgtcgctgaatctcgcatccattgaccagctcctgacgtggtgcggggaggacgctcaacgtaaggagttcgttgcgcggaacgtccgcgtctacgaggcaaaagacctgtcggaaaaggacgacgattcgacaactccgcttcgactcagcatgcacttcaagaggctcctggacgtcgtgtgcgacaagtcgagcctgatcgagttcgctttcggccaagctgtgccgaacagttggatgaattcacgcgttccgatcatcgaagcccgacagcaggctcttcgcgagctggttaagcatgaactgccagaggtcagggcgctggtagcgaagaaggtcacggacctcgacctactaatcgagcgggagcgaaggcaggaggagtccgagcatcacgcgagagagcagcggttcgaatag

SEQ ID NO: 508911 - DNA, 942 bp, Stenotrophomonas maltophilia
atgctgaaaggcgtggggcccgcttcgttacgcctagcgctgaacgtggcgaacttcgccaatgcccccatcgatgctatcgccaagcaggtgccgcgcatggcctcggcgacccacgcgtcgttgtggacggacgcccttgaaagggcggaacggcaagtggagtacgcggagatttcgagcgcccgcattatatccgtgctcgatcctgattatccgccgttgttgaaggccacgaaggacgatcctgtcattctgtatgtaaggggtgctctggccgacaggcctgagcagtcggctgctgtcgttggcacacgtgagcccacgaagcacggcgtgaagatcgccgaacgtgtcacccagttcctggtggagaacggctggtcggtggtgagcggattagccctgggcttagacgctgtggctcacgaggccacgctgaaggccggtggccacacggtggcggtgatggcccatggtctacacaccgtggcgccgtccaagcacaagggcttggcccaggagatccttgacaaggggggagcgctcgtatcggagtacggtttcggtgttgacccgcgcccggagtttttcgtcaagcgcgaccgcattcaagcgggccttgcccagggtgtggtgatggtccagtcggacttgaagggcgggagcctgcacgctagccgtgctgccctggactatggccggtggttggccgtgcccgagcccaccaagttggacgcggacaacggcgagcccaaggtgcgggccaacgcgctcattgtctcggaccggcgcgacgcgattgccgagttgctggcgtgctcggagacctcattgcgcaaggtcgtggtgctgcgggggaaggaggattatcccagcctgctgacgacatcggtttccccagttgatagcggtgtgatgccgcaggttgggttgctgtag

SEQ ID NO: 508912 - DNA, 1275 bp, Stenotrophomonas maltophilia
atgttcgacctgtgcttgttcgacttggatgatacgctacttcgcaccagtgatttgtcggacatacgcccgcagggtgtgggcaagcaagacgatgaggcatatgcgacggagttgttgcggcgcttcggcgaccctgttcagcggtacatctacacgcctgaacgtctggcttcattgaaaacccgatggccagagatgaggttcggtatctttacgcgcgctccctgggcttacgccaaagccatcgttgaccgcgcgtacccggactttgactgggacacgggcgtggtatacgagaccgtgcccaagggccaccataagccagacggctggggcatacgggagtgcatgtcccgattggaaatagaagatcctcagcgcgtggttatggtcggggatgagaccgtggacgttaaggctgcttacaacgcgggttgctatgtggtcctcgacaagacttcttgggcgcatgggcaatgggacgggcggcgccatttcgcagccttggaactcatccctgacgctgtcatcagtgggccggcagagctggctgaagtgatttccgacatcggggcgtatgcgccgaagttggaatgggagttcaatggaagccaggaccaccggcaccagccacgtttctctgccgtcaaccacttctacccagcgaacttgggcgaaccagataaggctagggaagagatccattcagccggacggcacttttccgattacgagtcgttggataatcgcagagcgtggcacacgctcacgcacagcatccatcagaataaggaccgccaggtcttccccgtggaatggtgcgccgccgtctacgccttcgtgcagaggagcaatccgttcatggcgttgaccaatcaaacagttacggtcgcggccattcccgcgcgtccagatcgccttcccaggatgcagcatttcatcgcacagcttcacggcgatttccggcgtcgtccgccaattggccagacacacgactctgtgcagttcagcaacgactttctcgcttacacagcaggggtgcgctcgcagagcggggaacacctcaatcggattgagcgtttcgagaacgtgcgtgatcacttgatcgtcagcaatcccggcgctgtccgcggcaaggactttgttatcattgatgacgtatgcactactggcgcaacattgatgtacgcgaagaagcgattgatcgaagctggcgcacgtcaggtgaagttgctggcattgaccaagaatgtgagtaacgtgctgtcgtga

SEQ ID NO: 508913 - DNA, 204 bp, Stenotrophomonas maltophilia
atgaagatcgatgacatcacgcgggaaatgctgcccaaactgccggtcgacctccagatgaaggtcttcccgccccccgcactgatgaagataggcatcaagacgttcagcggcttcgccaccagagcctacccccacactggccaaacggccgaacaaggccgacggcggacgccggtccaccggcccgactcgctaagctaa

SEQ ID NO: 508914 - DNA, 789 bp, Stenotrophomonas maltophilia
atggccgcccagaataatgcaatgcaaaagatcctcaacaaagctcatgctgatcagcgcatctccgatctgctggcccacatcagacggcagatcccaatcaattacgaatggagcgatggcgcttactggggcgcgcacatcgagaatgagtgtgctgtcatcactgtggcggaaacggaacaccccagcgcggcactcgttcacgagctactgcacattgatttgcagctcaagggttaccgacgccccagcggcttcatttccgacattgtcgactcagccacattcaaacgtttgatgacatgcctcgataacgagctgcaacatcagcgcatgttcgccccctttcgttccatgaattttcgcagtaagcagttttatgcggatagcgacgtaggtacggaacttttcctcttgaacgagctcgcgaaggcacaaggtcgcatcgagcgtgctattcatttcttcaccctcattgcaccaggcggcgctatcagtgaaagcagccgcaaccatttgcgccagaaattccggactgtcgatggcggcctacacgaatcagtgtgggtcgcgatcgaggccatagtggagcgctggaagaatgatgccagcttcgatgtcaccccctatttgaaagaaattttgctgaccctcgcaccgaccacaatcgccaaacctcatagatcctggatcaccttccagccggcgacgaaggatggattcgcgtttcctagcgatggagagtttgtggaaggaggcttcctgcttgacgatctgaaagggtga

SEQ ID NO: 508915 - DNA, 1332 bp, Stenotrophomonas maltophilia
atgaactcaagcgccgcagccacacacccagacgcccgtaaatgggacgaaaactggaccgctgtttcaagcggcgaaggcggtggtcagggtgacgtcaagattgtggttcggaaggacggaagtgagcccggagaaaggttcctaaagattcttcgacaccagaatgatctgagtcgtcgacagcggatgtatcgggaggtggcgtcgtacctgacgctgcagcacccagcaattcccaagctcatcgaaacgaacgcggaaaacttcggcgaccagagttacaagctttatctggttactgaggcagtgaaaggtttaacgctcgacaagtacgttgaaagtcacgggcccttacctctcttagacgcgatcggattcgccatcgcattgctaggtatcgtagaacactgccatcaatctgaagtcgttcatcgcgatatcaaacctgccaacatcatcctgcgcgaactcaatcccggagatcctgtgcttgtggacttcggcctctcgttcaacgacgatgaggtggcacgagatgcaaccgatctctatgaggaggtcggaaatcggtttctccggctgcccgagctcgctccgagttcgccaattaagcgtgatctgcgcagcgacgtgacgttttgttcaggcgtactgctttacgcgctcacgggcgaggttcctgctgtacttgcagatggtcatggccggctgccacatcaagtcgagagtgtcagcgagaggctgttgtcgataggcgatatctggcgagtgagccaattaaagcgggtattcgatactgcctttcagaatgcgttgactagcagatggcagtcggctggggaactcatatcggaacttcaacgaattgagacgggtgccattgagaccccgatgactcgtaaggcgttgctcgaggatgttcgcgtgcttcaaggctccgcgtcgtccaaggcgaagcaacaactgctgagcagcctcgagagagctcttcaggagatatctgccgtgatgtcttcgcttgaggcccagaggatcgcccccatgctgcggcctacgcaaacagcgtatgaagtgagaattgaggaacggcgggctaagacagcactctgctttttaacgtctgcgtcttcgtcgatcgatccttccattcagtttcgcgtggacgccatcggtactgagctggtaatttcctcgacgtacgcaggagctctatctgagctgcatcgcacgccgcttgactcgcccacattcggccctgccttccaggaagccatagagcaagtgttcatccaacagattcgtgacgaactcctcagtgaacagcgataa

SEQ ID NO: 508916 - DNA, 1956 bp, Stenotrophomonas maltophilia
atgcatgccgccgggctggcgctacaccagaagcttggagcgatccgcggggtcctgaagctttcttcgtctcacgagatctccgcgacgaccaaactgcgggcctttctcgcgatcgcgaactacgactttttcgtaacacgcgacaagaccaagcttgcgattcagaaattccaggccgagagagagggcgtctcggaggaggtctacgacatggaggaaatggcggcggtgaaactcagcttgccaggggggagcgactggatgcccaacgaggttgtagaaagccttgtggatggcatagaactgccgattaaggttgttctgcaaaccaaacccaacctagccggcaatcctcgaatgaatcagatccagtggaccgaagctagccgcgaactgaatttgggcatcctgtatcgcttcgccgaggacctgtgggatgactgcctttggaacagctacaagatggtcgacaagggacaggtcaaggttttcctgccgcaggatttcgatgtactccgtgcctatcggacaggcttggcgcgccgggcttctctctcgatgggctttaacatagtggcgacgcagttccagcgcgatgcgctcactttaggggcgcggttgagagttcgtgatgtctgcggtatcgaacgtagtggcaaacgccaagtgatcaaggtcgccaaacaaggcgtctcgaccggcatcctagaggagctcagcgtcctgcgcacgcatgccgccgagccgtactacggagagttgttggaggagggtcttgaatctctccagggattgaccctatccgcgctcatcgacgcctggacgttcatttcgcgtgtcgcgcacgtgttgattgagtccatcggcgagaagcatgctcagaatgctggggatgatcgtgtgcatgcctggatgcccgagtatgctcccacgctgcaggttggggcccttgtggatgcgttggtggtggctgccgggatcaacaagccggaaggcaggcgaatcgtggaattcttcacgtttcggggcatggccgaacaagagatctgggcgcagccactcgtaccagttgggccagataccgtggtacccgtattcgcagcagtcgcatctcctaatctgcgtcggctggtcgatgtatggatgcgacaggccggcgtggacttgagcaggcgggggcctgcgttcgaaatccacatccaaatgcttgtcatagatgccatccggagctcaaggcttttgtcacccgtggccgcttgcatcactgggaactatacgttcaggcccccgggcagccgcgatgagcaaatcgatctgatcttctccatcggaaacacggtgttcgttgccgaagctaagtgcatccttgagccaaccgacgctaaaggcatcgctatgcatcgcaagaccgtgctgggcgctgccgagcaggtactacgcaaggccaaagcgcttgagaacaaccgcatcgagttcatcggggatgcgcgtcgattcggaatggccttgagcgaagacttcaaagttgaacccttggtagtagtgagtactagcacccatgtgggcattgccgcgttgacagttcctgtcatcgacgagcacattcttggccgcttcttggatggcgagttggaggacatcggctatcagccgggcgatccaacctcctcaaagcggttcaagacccggttctactcgaacgccgctgaggctgaagagcgagctcctggctactttgcgtctccgccgcagatgaagcgattcattgatggcgtgcgcggacgtgtcgtgcctatctacgccgcgaacgaaagtgattgggcaggccacatcgtgacaatggagtgcgtcgcgggaggtgtcccactctcgcttcaagagcaggcgagctcgccgatcaaaggcgatccagccgcgtccttcgctcacgagagccaagtcgacgtcccatag

SEQ ID NO: 508917 - DNA, 1002 bp, Stenotrophomonas maltophilia
gtggaggacaacgacaagactgataccgagatcgtccaggcggcgctcgagaagctgctcgacaagtcgccgttggggaaatacgtcaaacttgcgatccagtcctcgggtccgaccgcccccgcgacaacgctaatgcatgtcggattcaaagaaaatcttggcaatacatttgcactagccgactttctatggaaccaggctctcaactacgcgctaacgaggcggcgacgcgagcaaattcgggccaggcttgagagcgccccgccaggtgacatcagtgcaatcgctgctcccgtcaatgcagcaagagacgccttcatcgagttccataaggattaccccagtcgcgctagtgaaataggcgaagttctggcctattgcatcgccgtcaacgagctgggtgccgcacaagtggcggcgaagatgtccctgaagacttcagggaacatgcccgtgcatggacttgacggaattcacgcgaaggtggagcacggtgcactctatgtttttttcttggaatccaaactgagccagaccgcaaacgcaggagtcaaggactacgccaaatcgatcgcaggattcggcagcaatctcaagcagtatctgcttgagtattcgattgtgagggatctcggcaacctagattcgcttacaggcgccgagcgcgacttagcgcttgcgagctttgacgtgatggatagtccggacgccgtcgaacgacgggagcggtctgtcggagttgttttgtacaaggagagcgcgttcggcaaactttcacccgtacaggcggggcagcccgtaggatttcacgagacggagttcgcgacggcatacgccgcgcaactagcgcatcatcagaatgcggcgctaaagcacctcatgacggaaaacgtggacactaataagtgccacgtgtacttcgtcgccgtgcccgacgtcgacgagcttcgcgagcagttctatatgcgcatgggctacaagcccgaggctaagaaatga

SEQ ID NO: 508918 - DNA, 2619 bp, Stenotrophomonas maltophilia
atgagtacctttgcccacgacctgtcccggcgtatgacaggccattcctccttctggaactaccttgggtgtcttcaaggggccggggcagcgcacactctggccgtgcctttgtccgactctccaaccttggatctaaacaacgtcctcaagctgctctactgcgcatcggtatttgtgcagacagatgaggatgaactcaagcggctcgcgcaggcaatcagccttaatacgctcctgctgtacgaggatggcaacctacgcgaaaggagcctccaggttctgacggagctcgggaatttccctggattgtcttatgccgaacgcacctacggcgcgggggacgagtctctgctcggaaggatgaaccgaaaggtttcccaggccctgaacacggtttccatcaataggttgcccgtcgcactcactgactatcagcgccaggtatgggacagcttgccgactatgcggacgcttgcaatctcggcacctacctcagcaggaaagtcgtacgttgtcatcgagcacctttgccgtcaggccgaaacgcataaagaattcgccgccgtgtacatcgcgcctacccgtgcacttctgtcggaggtgcagcaaaagatccagctccgcctcaaggacagggatgacattcgtatctcgactgtcccctccctcgatccgctgcaacgagcctgccagatctttgtgcttacgcaggagcggcttcaggtcctcctgtcaatttggaacgcggcgttcaacatcgtagtcgttgacgaggctcagaatctttcggatcaggcacgaggcatgatcctgcaagactgcctccatacggtgatgtcgcggcacagagcgacacaactaatcatgctcgcaccaggcgccgtcggccttccagagatagctagggctatcggcgtagacacattgcgtcccgaatttactggtgtatctcccgtgctccagaaccgcatcgtcgtcagcaaggtcaggggccgtccaagggaactacgtctgcagttgctttctggaccggaggatcgcgttgagattggcaggctggtttcgaccctcggcttggacaacaaggcaacgaggcttgctgcaattgctctcgaactcggcggcagcgagggctccttggtatatgagactgggccacgcgaggctgagaagactgccctacaactgatgaacgagattcgtcgcaagcacccggagccccagcgccagtctctgctggacctgtcaactttcatcaaagagcacattcatcctgagtaccagctggcgactatggtcgcccacggcgtcgcatatcactacggccgcatgccgagcctcttgcgtgaagcaatcgagtcgtcattcaagggaactcagagcggcctgcagtacctcgtttgcacaaccacccttgctcaaggaataaacctgcctgcacgcaatgtgttcatcgacacacccaaacgcggacgtggagtaagcctcgaccctgcgttgctgtggaacttcgcgggacgtgcgggtcgcctgaatcaggacatcgtcggaaacgtgttcttggttgactacgacgaatgggacactaggcccatggacaaatttgtccctttcgaggtgacatcggccatcaccacgacgctctctgggcagttcgagggcgtgatggacgcagtgcgaggcaacatgcctgtcgcacaaccatggaatactgagatcacgcaaatcagagcttgcgccggcctacttatctcgaaggccgcagcaggagtgtcggaccagttcctcgaatccgtccttccacccaacctactgacctccgcacccgaagtcgccaacaccgctaccgccgcggcccgacggatcggattgcccgcggagctcctccatgccaattggaccatcgatccttacggcctaaggcgactttacgacagactgattgaaaagatcgacgatggcgatctcgatagcatcattccattgaatccccgggaggcacctgacgggctgtatcaagccatcttcaagcgcatcttgcggaccgttgaccagcagcagggaaacttcggcgcactggttgccggcatcgcgattcaatggatgaaggggactccctacccagtgatcctgaaatactgggtgaagcgcgctcgactggcggaggaacgcgacgcacagaaggcggccgaaacgggctctcgtccgaagaggcctaagacggtagacgcattgattcgtgaggtgttcgacctcatcgaggacgtcgtccgcttccgctttgttcagctaggaaaggcctaccgtgacctactcgtgctcgcattacaggagaagggtctacagaatcgtgttccaggagtctacgatttcgcgcttgcactcgaactcggcgtttcgacagacacaggcaccgcattcgttgaacttgggctttcacgcatcgctgcatcggcgctggaagatctgtttccgagttctagcatgacggtcgtcgaggcgcgccaagcgcttcgcacgctagatgtcattgcaaacaaactgagccccatcattgtggctgaactcgaaaggcttggtcttcgtgaagatattcctgcggatgcgcgagcttga

SEQ ID NO: 508919 - DNA, 2394 bp, Stenotrophomonas maltophilia
atgaatcaagaagaactggcccagcgtctgcgggagcaggagggcctaactgtcgaacagcgacagcacatccttgagatggctagctcgagtccagcgcggaagccaggaaagggcgcgctgaacaacgttgtgacccacttcaattcagtgaaatgtggccagctgatcacgctggagagtcataccgttgaacatctgttcgcgctgactctggagctggatccggatgtgcttggctatttcccgcaggtcgcctgtaagggagtgagacttggcaatcatgtgaggagcggtaccttggattttctggtcgtccgcacccgtcgcattgagctggtcgaatgcaaggccggctccgctcgtgacagcttgcttacggcaaagtccggtgaatgggtcgatgtcgatggaaatcttcagaaccttgcctatggtccttgggcaaggcagcgcggcatggagcacgtcctgtggctcagtccctcccgcgtcgacacgccactccggaacctgcaggtcatctataacgaggtgcgcatggtacctgccaacgaggctcaagtcttgggcaggcgcatccatgcgcatctcgccgacggtcccaagagcctcgattggatgatcgagactatcgagggattcaacgtgagccaagcggcgcttctgcttggaacccgctgggccttcggtccagttgagcatgtgccgctcacggacacgagcaacttctttttgaccttgagtcagactcagtcaatcgagataggaggcaacttctttgaggttgccaggcaatctcgcaatcaactgaagtcggcgttcgcaacggcgacgctagtcgacgccaccaacgccgaaaagcggctcgcattgattcaatccgcgcatgcgaagggtacagccgtccccaaacacctgcgtgagatagcgcggaatgtggccgaggcgcgaagcagaggtgacaacgaactcgagcagtgccttaccaggtttcatgcaagcggtaaccgaatgagccggcttacccccattcaggagaagaggacggctgaggcaattcgcgcatacgccgcaggcaagtattcacagaagaaggacgcatacgctgcgctcaaggaggcctgtgaatctgacggcgagtcgccacagagccgccaggccttcgaacgcaagctcgctgatccgcgcctggagctgcgtaaggtccttgcaacgcagggactgcgtggctaccaaaagcaacggccgcgctcggacgcgcgcgaccggtcgggtacagccttagccaaacatgcagtcctgcacgtcgacagtaccaaagttgacgtcagggtggtgcacgacgatggaatgggtgcaagcgcagagtcccctctgatttatctaggaacagatgaggcgactgatttgccgatggctcattccgttgtcttcgggccagcacggcgcgatggtttggccatcctgatacggaactacgtccgcagacatggacgactgttcaacagcatctttgtcgatcgcggaacggagaatcagtcgcactttctcatagctctggctttgcgatatcaattctcaatccatatctgcccaacggcaggttcgaggttcaactcgaacgtagagcgatactttgaaaggttcaattcccaagtcagccatgagcttgtcggcagcaccgatccagacaaggcgggccgaggcgtggatgggaagttcaagagctacaaaactgccagccactgctttgaaaccgttcatacggtggccaaggaaacgctttacgagcacttcccgagcgttcctgtacaaggcttcgcaagtccggccgatcgtgcagcccacgcagatcttctctttcctagtgccggcctgcacgccatggttgacgaagagttcctcttcagaaccgcgatcccgcacagcaataacaagtatgtacccggacgggggttcgaggtgaatggtcggtactttcactccaatgaactgagggagttcgacgcgtcattcgatgttgagcagcttcgaacagacccggaggacccgagcttcatttgggttagaacgaaccttggactgttcaaggcgttctgtaacttgatcgggcctctagctcataccaccctgcttgagcggtcgttctggggtatgcatgaccaactccacgtgccatcgctccgcgaagcaaagaaggccgcgaggcacgctcaggcgattcgtaccgcggtcgcaaattcgaagctcgccaccaccgcccttcccgaactcagcgaggcggactccggtagccccccttcacaaacagacgacgctcttgacgaactcgctctgcgcggaatcaagaagcgagccacggatgactttgactccattgaagcgccgtag

SEQ ID NO: 508920 - DNA, 807 bp, Stenotrophomonas maltophilia
atggccaatgatcggggaaagttcaactccaaggatctcacgcttcgcctgcatcacgccgtggtggcaccggatttcggctggctcgagtccaaggatcgatcaatcagcactgatgcgcaccatctccaagccgaggtggaggtgagcaatgaattgtggaggaaggtcagggcaaagcattcgcaaccgagactgcagcacagcttcgaatcggtggcgaagcagcgtcaactgaagtacatcttcttggaagaggcggccaccttgaccatggtgcatcttcatcaaaccagctatgggtacatgtcgaatctggtgagactgatcgaagagatcgggtgcgtcatggtgatgctggctaaccatactgcagagagcttgtgggccggacatcccgacgtctggaatcgatcccggttcgtttacatccggccgtacaacctgagcaacccccaggatgagcgcgacttcgttgcagttctcaagggtatgggtcagagcttccgtctggaggatccgaaagttctcgttaagaacgtcgatctgatgtatgccaatggtgccggcgtatttggacccactatcgatgtagtacatcgcgctgagcttcgccgaaagaatgagggcgcaagcaccattactgaagcgcatctgcacgccagctcctccagtgaaagggagctgggaacggtgtggagcagtgtgcacgcattcaacaagcttgctgatcagaagcctttgaacggcgagaagagaatcgctgacttcctcaaacgagtcggtgctggcggtccagagtcatga

SEQ ID NO: 508921 - DNA, 1299 bp, Stenotrophomonas maltophilia
atgacgagcatgacaagcacggggtaccggtggaccactcttccgccacttgcgcccatcgatggaggcactgcccagactgaatcccttgggggatacttccagaggatgtgcgagattactgggttcaccaggacacatctcgcaggagtgcttgacaagattgcaggtcagccagtcaatggtctgctacagcggaacagtttcgtgggaccaggacaggtgagcctaaaccgcgcgcgcgcgctagagcagttgaccaaccaacgactggtgggctgcaccctctcgcctttcatcaaggttctgcagatgagggatggtggccttacccgcataaatcgccgctggtgtcctgaatgcctactcgaggcaggcgagagtagtggtctaagcgagcggctggtctggaatttccttcactactcacattgctcgttgcactcagccagaatcgttgatcgttgcccggattgcgggaacgtccaacagttgcgaagggtcaaagcggccttatgcgcatgctgcggtggcagactagcgcgcgcagccacccacgagaggcccagcgcgcttcaatcgtgggctaacgcctcaatcgaggacgttgtgggctggacggcgaacaaccccgacgtggttattcctccagagaactatcagcgcttttttgaagggcttcgccaagatgggacattgggcaggctgaagctagttcacaacagattctggagggacgcaatccgcttcaggcgatctactaccacgttcagaacactcctcaacttatctgcgataaaatctgtagacatcatcggaattctgaccgatccagttccggcctcgtcaacttcgctgtttccaaaccatgaagtggacggtgagatcgcctttgatcttgaggactggggagcgcacgcaagaaagttcgaagtcgtgctccaagcgctttgcaagtctaatacgcgcgtgtttccgagtcaggagttcctcggcgtactgttggtttcgagggcacatagctctatccaccgcgcaccctcgttccgggtatacagggatctccagatgcggcctaggcaggacctcttggcgggtcggggagtgacaaaagcgatcatggacctctccattacccgcgtcgctgccggcgcacgagagcggggcgtcgccagcgaactcgtggaaagtttcgctatcacggcagaggcagctcgagaatgcgtcaggacagcgatggttattacaaaggccatgcgctctcgagccttctcggttgcggatgatcctgtggcgtaa

SEQ ID NO: 508922 - DNA, 645 bp, Stenotrophomonas maltophilia
atgtctactgattccgtttcatccacggttgacttggtccgccgaaccgtcgccccaaaagaggggatgagcaaagcacgcgatgccatcgcactgatgctgtacggatgtactttctccacggcgatggttgccagtacccagggcaagctccccgcagctcgcgttgatcgagatgcgcttgaacgcctgtctttgaaatatggaacctgggtcttcgctgcttcagacctcgccgaggaactgcttgccccttcgcaactgccgtgcaaggcattgtcctattgggatattgtggatatctgccgcattgccgaagaacgcgatcgggtcctgatggatcacgtcgagacagaaggcgagtttgctggcaccatgagcttcacgggattccgggcagggatgccattgcgtaacgctctccaaaaccgcctcgccaagctggccccggaggcactgatcgaactcaaggcaatagtgtggattggccgcggtgacgcaagtcgatatgacgccgcgctttctcacgctggccaacacacggcaggggatgtgcagtacctggctgccaaggcacctctgcacaagtacctgcgcaagggcgttgagaagctcaatcgtcgggcagcgagcatcaatcgctag

SEQ ID NO: 508923 - DNA, 735 bp, Stenotrophomonas maltophilia
atgcccctttcattgctggtgattggctgcgtgctgctgctcgccctcgccctgtccgccaccgaattccatcagcgacagctcgatcatcgcgccctgcgaaggcttcgaggctcgcaagcggcgcgccagctggacagcgccgaatacgacgctctcgagcccttcagattgaccggccagctcggcccgtccaacagcgtgtaccgcatcgaaggcgagcacagcctgcgcgaggtcgacgcacacacgaagatcgagcgactgggcagcgtgccggtgctgctgccgtatggcatgcggcgccatctgtccgcgcggaaccgtgcggatgtcgtgctgggtcgctcattcgccctggtcgtctggctgaacggccatacgatcaccggcgagcgtgaacgtgaaacgcaggcgcagactgaccgatgtgtctggctcgagaggggtacccggcagcccacgcccgggccctgcacggtggacactgcgcagggaagcccacgcacccggcgcgaggagacggaggcagaacgttccctccgccaaccccgctggctgggcatatcaagcgcagtgtgcatcgtgcttgcatccaccctgttctgggtgggtggtcagatgcgttggggatcgcctgggggctgctggccggtggcgcggccatggccggggtcgcagtggcgctgcggcggcagggaacgcgcccgctgccgccgccggcgcaggtggtaa

SEQ ID NO: 508924 - DNA, 1398 bp, Stenotrophomonas maltophilia
atggtgagctcttcctggagccgttggctgccgatctgcgacgctattcagagcggtccgggatggaatccctggatgtggaattcctctttcagggtaagtcgatggacgagcacttcccagaggatcacccccccgtccgcgatgacggaatcccgatcagcgcacagcaaagccttggtgtcttcgagtcatggatacattgccttgcatccgggcggggaatgggagttccagcggccgtctccgctcgggctgcaggaagatgtgctgagcccgatatatggtgacgcgcttgaggatctgttagagcaaaggagtggtctggtcgtgtatcgcgcccgaagccgctcggtggaacctcatccggaggccatacatccgtgggagcatatgtcggcgcgctaccacctcaaggcgctttttcctgaccgcgctgacatttggaatgagtttccaaatagtcccgacagtgatcgagaggtgaaggaggatatccgtgctcgtcccaactacgccaatcatctcggcgtcgacgtgatgctgagcctgcacaccaacggcagtattgacccaggtgttcgcggcgcggaagtctattaccaccaatccaaaccgcaggacaaggcactgggggacagcatcctgtgtggaatgcgtgagatcatccagagtcaaccggggtacgaaaattttcctgtccgtgagatggcgacctcgggtcggcacggtgagaaccgcatcggaacgatgccatcgatcatcgtcgagaccgcatatcactccaatcccgacgatgtggctgccttgcaggatcctgttttccgcgcggcgtcgatgaaaggtgtggagaagggctatcgcctgtgggcggagggcaaagcctgtgcgccgctaaccgggcatcccgtcgcggatatcgacgtgccagccggaagctcgcgcgaggtagatgtgacgttcgacggccatccgcagtttccaattcgcctggtcacgaagaacacggtatgtccaccaggctggacctgtaccggcacgacagtaatcgtcgatactcccgatcagcccagccgggtaaagctgagctgcggtcgcaacagcatagggacgcttggttgggaaacgcatgtgcttgataccgacggagtacagtccaagccgatgccttatacagttcgctgcgtacccggaagtgggcggcgagcgcaatggcctgccggagaacgtcgccatggcgtcttcatgacagcaaaaggccgacgcgaaagcgtcggcctttacctgagccgagcctggctcgacgctacagaagccagcctcagctggccttgccctgtgcatccaggtagcgctcggcgtccagtgcggccatgcagccgaagccggccgaggtaa

SEQ ID NO: 508925 - DNA, 270 bp, Stenotrophomonas maltophilia; identical to SEQ ID NO: 505957

SEQ ID NO: 508926 - DNA, 984 bp, Stenotrophomonas maltophilia; identical to SEQ ID NO: 505958

SEQ ID NO: 508927 - DNA, 399 bp, Stenotrophomonas maltophilia; identical to SEQ ID NO: 505947

SEQ ID NO: 508928 - DNA, 1293 bp, Stenotrophomonas maltophilia
atgatcttcggccatgaagggttgccgcgcagcggcaagagctacgaggcagtgctccaccacatcctgcccgcgctgcgcgctaagcggcacgtgtacgtgcgcctcaacggcgtaggtgagagcctgggcaagattgcggctcacctcgggatgcctgaggaagaagtgcgtgatcttgtccacgtgatgggcgacaaggaggtggttgactggtgtgtatgcgacacggacaacgacggcgctatctcgttcccgcacatcgagaagcatgctctagtcgtgatcgatgaggcgcatgagtactggcccacgaaccgggccaatttgccggagcgcacggccaacttcttcgcgaagcacggccacattagcctcgacatggtgatcatttcgcaggactgcaaagacctgcaccggctgatcattcgccgcatggcgaagaagaacacgtataccaagctcgatgcgctgggctccgatcagcgctattcggtgaggttctacgccgccaccggcaccggcaagtacgagacggtaggcaccgaggttcgcaagtacgatccggccatctgggagctttaccacggcgtgcagccgggcattgagtcaaacgaggtctacaagggcaacacccgcaccttgtggaagacactgcgggggccctcaatcgtgatggggcttgcactcgttatcggcgttgtcatgttcctgcgattcttcttcgctggtggctcaaccggcgaggaaagcaagctgaaagaggttgtgaagtcgcagaaagccgcgattccggcaatcgcgcaagcgcccggcgcacagccggccaccgtggtcacgaaggtggtggacaccccgaagtccaaggagaaaatgcccgcaggcgtgcagtacgtcctcgacatggcggccaatgccagggcgcggcacgctggttggtacggtcaccgggatatcgtggagttccgagcatcggggggagggcaggtgctcgacagattcactacggagcagctgtgggcgctgggctggtccgtaaaacggacagagtttggtgtgctgctgtcagcgaaaggccatgagatcatcgcgaccacttggcccgtggatccgttcggcgaacagtccgattcaactaccgagcgcataagggctgcggcggggtcgcctgtgacgagcgcgagcgagacacagccgaccaccgccgcggcgaacgggagcaccctgattgcagttggcaagcgcccgctgggcacgttccccgaaacgccgccgtatcaggccagcttctga

SEQ ID NO: 508929 - DNA, 459 bp, Stenotrophomonas maltophilia
atggaacgcgaacgaccggaatacctgccgcctatcgagcggcgccgctggtacttcccgtggctggtcacagggtttctgacggtgataagccttgccaccatcggtgtactgacgcttggacgcactaacagtgcatggaacgagcgttttgaggggctgcgacgcaccgctgatgctgtcgaaacagcggcccctacacaagccatgcagcagcgtgaggtcgtagcagcaccggttgtgacgccttcccgcgcacgtcccgagcagctgggccgtgatatgcgatgcatcaacggcatgctgttccgtcgcatcgaaggcggctgggagaatctaccgggctcgcgctgcggcgaccagccgacgatgaacgtccagtgcttcgcaggaaagccgtacaggcaaatggccgctgatggtggctgggtgctttctccgaacgatcgctgcccgtga

SEQ ID NO: 508930 - DNA, 366 bp, Stenotrophomonas maltophilia; identical to SEQ ID NO: 96026

SEQ ID NO: 508931 - DNA, 1680 bp, Stenotrophomonas maltophilia
atggcgtcagacacattaccaattgccgagcagggcgtggccaccctgcccgatgcggcatgggcacaggcccggcaccggaccgaaatcatcgggccgctggcagcgcttgaagtggttgggcatgaagccgccgatgccgctgctcaagcgctgggcctatccaggcggcaggtgtatgtcctgatccggcgtgcccggcaaggtgctgggtttgtgacggacctggttcccggccagtccggcggcggaaaaggcaagggacgcttgccggaatcagttgagcgcatcatccgcgagttgctgcaaaagcgcttcctgaccaagcagaagcgtagcctggcggcgttccaccgcgaggtcgcgcaggcttgcaaagcgcaaaagctacgggtgccggcgcgcaacactttggccctgcggatcgccggcctcgacccgctcaaggccactcgccgccgggaaggtcaggatgcgtcccgcagcctgcaaggtgtcggtggtgagcctcccgccgtgaccgcgccactggaacaagtgcagattgatcacacggtcatcgacctgatcgtggtggacgagcgcgaccggcaaccgattggccgtccgtatctgaccatcgccatcgacgtgtttacccgctgcgtgctcggcatggtcgtcacgctggaagcgccgtcatctgtttcggtcggcctgtgccttgtgcatgtcgcctgcgacaagcgtccctggctggagggtctgaatatagaaatggattggccgatgagcggcaagcccaggctgctctacttggacaacgcggccgagttcaagagcgaggcgctgcgccgtggctgcgagcagcacggcatccggttggactatcgtccgccagggcagccgcactacggcggcatcgtggaacggatcatcggtacggcgatgcagatgatccacgatgaattgccagggacgaccttctccaaccctgaccagcgcggggactacgattccgaaaacaaggccgccctgacatcgcgtgagctggagcgctggctcacgttggcggtgggcacctatcacggctctgtgcacaacggcctgcttcagccgccggcggcgcgctggtcagaagccgtggcgcgtgtcggtgtaccggctgtcgtcacccgcgccttggcttttttggtcgatttcctgcccatcattcgccgtactctgactcgcaccggctttgtcatcgaccacattcactactacgccgatgcgctcaaaccgtggatcgcacgacgcgaccgcttgcccgctttcctgatccggcgcgacccgcgtgacatcagccgtatctgggtgctggaaccggaggggcagcattacctggaaatcccctaccgtaccttgtcgcacccggctgtcaccctctgggaacaacggcaggcgctgacgaaattgcggcagcagggacgcgaacaggtggatgagtcggcgctgttccgcatgatcgggcagatgcgcgagatcgtgaccaccgcacagaaggccacgcgcaaggcgcggcgcgacgcggatcgacgccagcacctcaaggcatcgcctccgccggacaagccgattccgccgaaaacggacgttgctgatccgcaggcagacaacctgcctccggccaaaccgttcgaccagatcgaggagtggtag

SEQ ID NO: 508932 - DNA, 909 bp, Stenotrophomonas maltophilia
gtggacgaatatcccatcatcgacttgtcacacctgctgccagcggcacaggggctggctcggctgccggcggacgagcgcatccagcgccttcgcgccgaccgctggatcggctacccgcgcgcggtcgaggcgctgaaccggctggaaaccctgtatgcgtggccaaacaagcaacgcatgcccaacctgctgctggttggcccgaccaacaacggcaagtcgatgatcatcgagaaattccggcgcacgcatccggccagctccgacgcggaccaggaacacatgccggtgctggtcgtgcagatgccgtccgaaccgtcggtgatccgcttctacgtcgcgctacttgccgcgatgggggcaccattgcgcccgcgcccacggctgccggaaatggagcaactggcgctggcactgctgcgcaaggtcggcgtgcgcatgctggtgatcgacgagctgcacaacgtcttggccggcaacagcgtcaaccggcgggaatttctcaacctgctgcgcttcctcggcaatgagctgcgcatcccattggtcggggtcggcacgcgcgacgcctacctggccatccgctcggatgaccaattggaaaaccgcttcgagcccatgatgctgccggtgtgggaggccaacgacgattgctgctcactgctggccagcttcgccgcttcgcttccattgcggcgaccctcgtcgattgccacgctggacatggcccgctacctgctcacacgcagcgagggcaccatcggcgaactggcgcacttgctgatggcggcggccctcgtcgccgtggagagcggcgaggaagcgatcaaccaccgcacgctcagcatggccgattacaccggcccaagcgagcggcgtcggcaattcgagcgggaactgatgtga

SEQ ID NO: 508933 - DNA, 1164 bp, Stenotrophomonas maltophilia
ttgtcttcatggctcaaccgcgtggccctttgctatcacatggaggtgtccgacctgctggagcacgatcttggtcacggccaggttgatgacctggataccgcgccaccactgtcgctgctgatgatgctcttccagcggagcggtatcgagctggatcggctgcgctgcatgagtttcgccggctgggtgccttggctactggacagccttgatgatcagattccagccgcattggaaacctatgcgttccagctctcggtactgctgccgagactccgccgtaagacgcgatccatcacgagctggcgtgcctggctgcccacccaaccgatacaccgcgcctgtccgctctgcctgaacgatccggagaaccaagccgtactgctcgcgtggaagctgcccctgatgctgagctgcccactgcatggctgctggctggaatcctattggggcgtgccagggcggtttctcggctgggagaacgccgacgccgaaccgcgcactgccagcgacgcgattgcggcgatggaccagcgtacctggcaggcactgacgaccggccacgtggagttgccgcgccgacgcatccacgccggattgtggtttaggctgctacgcacgctgctcgatgagctgaacaccccgctttcgacgtgcggcacctacgcggggtatctccgccaaatctgggaatgctgcgggcatccgctgcgtgctgggcaaagtctgtggcgaccgtatgaaaccctgaacccggcagtacggttgcagatgctggaggcggcggcaacggcaatcagcttgattgaggtgagggatataagcccgccaggcgagcacgcaaagctattctggtccgagccccaaaccgggttcaccagtggcctgccggcgaaagcgccgaagcccgaacccgtcgatcactggcagcgtgcaatccaggccattgatgaggccatcattgaagcacgacacaaccccgagacggcacgctcgctgttcgcgttggcttcctatggtcggcgcgaccccgcttccttggaacagttgcgcgccaccttcgcgaaggaaggcatccccccggaatttctgtcacattatgagcctagcctaccctttgcatgccttagacagaatgacgggttaagtgacaaattttga

SEQ ID NO: 508934 - DNA, 615 bp, Stenotrophomonas maltophilia
atgctgattggctacatgcgagtatcgaaggcggatggctcccaggcgacggacttgcagcgcgatgcgctggtcgcggccggtgttgatccggcgcatctctatgaagaccaagcgtccggaaaacgcgaggatcgtcccggtctggcgagctgtctgaaggcactacggccaggcgacacgttggtcgtttggaaactggatcggctcgggcgcgacctgcgccatctgatcaataccgtccatgacctgaccggacgcggcatcggcctcaaggtgctgaccgggcacggcgcggccattgacaccacgaccgccgccggcaagctggtcttcggtatcttcgccgcgctggccgagttcgagcgcgagttgatcgccgagcgcaccgtggcgggcctggcctcagcacgggcacgcggccggaaaggcggccggccgttcaagatgaccgccgccaagctgcggctggcgatggcggcaatggggcagtcagagaccaaggtcggcgacctgtgccaggaacttggcatcacgcggcagaccctgtatcggcatatttcacccaagggcgagctacgtccagatggcgagaagctactcagccgaatttga

SEQ ID NO: 508935 - DNA, 204 bp, Stenotrophomonas maltophilia; identical to SEQ ID NO: 149134

SEQ ID NO: 508936 - DNA, 237 bp, Stenotrophomonas maltophilia; identical to SEQ ID NO: 149133

SEQ ID NO: 508937 - DNA, 366 bp, Stenotrophomonas maltophilia; identical to SEQ ID NO: 25155

SEQ ID NO: 508938 - DNA, 639 bp, Stenotrophomonas maltophilia
atgaagctcgccccatatattttagaacgtctcacttcggtcaatcgtaccaatggtactgcggatctcttggtcccgctactgcgggaactcgccaaggggcgtccggtttcacgaacgacacttgccgggattctcgactggcccgctgagcgagtggccgccgtactcgaacaggccaccagtaccgaatatgacaaagatgggaacatcatcggctacggcctcaccttgcgcgagacttcgtatgtctttgaaattgacgatcgccgtctgtatgcctggtgcgcgctggacaccttgatatttccggcgctgatcggccgtacagctcgcgtctcatcgcattgcgctgcaaccggagcacccgtttcactcacggtttcacccagcgagatacaggctgtcgaacctgccggcatggcggtgtccttggtattgccgcaggaagcagccgacgttcgtcagtccttctgttgccatgtacatttctttgcatctgtcccgacggcggaagactgggcctccaagcatcaaggattggaaggattggcgatcgtcagtgtccacgaggctttcggcttgggccaggagtttaatcgacatctgttgcagaccatgtcatctaggacaccgtga

SEQ ID NO: 508939 - DNA, 1686 bp, Stenotrophomonas maltophilia
atgaccacccttaagatcaccggcatgacctgcgattcgtgcgctacgcacgtcaaggaagccttggagaaagtgcccggcgtacagtcggccgtcgtgtcctacgccaagggcgcggcccaactcgaccttgaccccggcaccgcatcggacgcactgactgccgccgtggccggactcggctacaaggcaacgttcgctgataccttatcgacggacaaccgcgccgggctactcgacaaggtacgcggctggatggggaccgccgacaagggcagcgacggtgaacgccagttgcaggtcgccgtgatcggtagcggcggcgctgcaatggcggcggcgctgaaggccgtcgagcaaggcgcgaaagtcacgctgatcgagcgcggtactatcggcggcacctgcgtcaacatcggctgcgtaccgtccaagatcatgatccgtgccgcccacattgcgcatctgcgccgtgaaagtccgttcgacgatggcatcgcggctactgtgccggcgattaaccgcagcaaactactggcccagcagcaggcgcgcgtcgatgagctgcgccacgccaagtatgaaggcatcctggatggcaacccggccatcaccgttctgcatggtgaagcgcgtttcaaggatgaccaaagccttaccgtccgtttgaacgatggcggcgagcgcgtcgtggtgttcgatcgctgcctggtcgccactggtgccagtccggccattccgcccatcactggtttgaaaggcacgccgtactggacatctaccgaggccctagtgagtgacaccattcccgaacgcctagccgtgatcggatcgtcggtggtggcgctggaactggcgcaagccttcgcccggctgggcagccaggtcacgatcctggcgcgcagcacactgttcttccgcgaagacccggccatcggtgaggccgtcacagccgcctttcgtgccgaaggaatcaaggttctggaacacacgcaagccagccaggtcgcctatgcggacggcgaattcgtgctgaccacagggcacggcgaagtgcgcgccgacaagttgctggtcgctaccggccgcacgccgaacacgcgcagcttggcgctggaagcggcgggtgtcgccgtcaatgcgcagggagccatcgtcattgacaagggcatgcgcaccagtacgccacacatttatgccgcaggagactgcactgaccagccgcaattcgtctatgtggcagcggccgccggcacccgtgcggccatcaacatgaccggcggagacgctacgctcaatctgaccgcgatgccggcggtggtgttcaccgatccgcaggtcgccactgtgggctacagcgaggcggaagcgcaccacgacgggatcgagaccgacagccgcctgctaacactggataacgtgccgcgtgcgctcgccaacttcgacacacgcggctttatcaagctggtaatcgaggaaggtagcggacgactcattggggtacaggcagtggccccggaagcgggcgagctgatccagacggcggtgctcgcgatccgtaaccgcatgaccgtacaggaactggctgaccagttgttcccctacctgacgatggtcgaggggctgaagctcgcggcgcagaccttcaccaaggatgtcaaacaattgtcctgctgcgcaggatga

SEQ ID NO: 508940 - DNA, 423 bp, Stenotrophomonas maltophilia
atgggcttgattacacgcatcgccgataaaaccggagcgctcggcagcgtcgtttccgcgatgggctgcgcggcttgtttcccagccatcgccagtttcggcgcggccatagggctgggcttcctgagtgaatacgagggcctgtttatctccaggctattgccgctgtttgccgccatcgccctgttagcaaacgcgctgggctggctgagtcatcgtcaatggcaccgcagcctgctcggcatgatcaggccggccatcgtattcgcggccacggtttggcttctcggcaactggtggacggcgaacctgatgtacgtcggtctggccttgatggtcggggtgtcgatctgggatttcgtctcgccggcacatcgccgctgcggcccggacggctgcgaactgccaccacaacatggctga

SEQ ID NO: 508941 - DNA, 639 bp, Stenotrophomonas maltophilia
atgatgagtaacttgtttagatacggacgttcgtccgtcgtaagcggccttctgatgctcatgagcgtcggtgcgttggcctatgacttcaaaaggatggaggcggccatcgagtcgctctcgcctaccacgcaaagcgaatgggagcgcaaggccacagcgggtgaacccattgcgcagaacgtcaccggcatggcgtacaagtacggcatcggcgtcgcgcaggatcaggcagtctcgtggaagtggttccgctcagcggcagagcagggcgaggcggacgcccagttcaacctcgcgcgcatctacgaagggcatgccaacgacaccttctatcgtcgccacgcacggcctgtgcccgctgacgacagcgaggccgtgaattggtaccgccgctccgctgagcagaaccacacacaggcgcaagttaagctggcacagctgtacgcgaagggcgtcgctccggccgcgtccgatctggtccaggcgtacaagtggttcggcatcgccgccgcccgcggcgacgagaccgcggtcaagctgcgcgccgagcttgcggccagattgacacgtgagcagatcgcggacggcgatgctcaggctatggaatggacaagaagttccagtgttaagcagtga

SEQ ID NO: 508942 - DNA, 276 bp, Stenotrophomonas maltophilia
atgaaaaaactgtttgccgccctcgccctcgctgccgttgttgcccccgtgtgggccgccacccagaccgtcacgctgtccgtaccgggcatgacctgctccacctgcccgatcatcgtcaagaaggcgatttccaaggtcgaaggcgtcagcaaaattgacgtgaccttcgagacacgcgaagcggttgtcacgttcgatgatgccaagaccagcgtgcagaagctgatcaaggcaaccggagacgcgggctttccgtccagcgtcaagcagtaa

SEQ ID NO: 508943 - DNA, 351 bp, Stenotrophomonas maltophilia
atgtctgaaccacaaaacgggcgcggcgcgctcttcgccggtgggctggccgccattcttgcgtcggcctgctgcctggggccgctggttttgatcgccttggggttcagcggggcatggatcggcaacctgacggtgctggaaccctatcgcccgatcttcatcggcgcagcgctggtcgcgctgtttttcgcctggcggcgcatctaccgcctggcgcaagcctgcaaaccgggtgaggtctgcgcgattccccaagtgcgagctacttacaagctcattttctggatcgtggccgcgctggtcctggtctcgctcggatttccctacgtcatgccatttttctattaa

SEQ ID NO: 508944 - DNA, 435 bp, Stenotrophomonas maltophilia
atgcaaattaattttgagaatctgaccattggcgtttttgccaaggcggccggggtcaatgtggagaccatccggttctatcagcgcaagggcttgttgcccgagccggacaagccctatggcagcattcgccgctatggcgcggcggacgtgacacgggtgcgattcgtgaaatcggcccagcggttgggcttcagcctggatgaaatcgccgagttgctgcggctcgacgatggcacccactgcgaggaggccagcagcctggccgagcacaagctccaagacgtgcgcgagaagatggccgatttggcgcgcatggaggctgtgctgtctgacctggtgtgcgcctgccattcgcggcaggggaatgtttcgtgtccgctgattgcgtcgttgcaaggtggaacgagcttggcaggggcttccacagcttag

SEQ ID NO: 508945 - DNA, 1185 bp, Stenotrophomonas maltophilia
atgaacaagtacaagaccctggccgcgctggttgccaccgcgctgctcgccaccgccggtgccgcttcggcccagcagtccctcgtcaacggcggcggcgcttcgctgccggccgatctgtacaagggccaggccgacagcatcctgccgtcgaccttcagctacgccgtgaccggttcgggcaccggcaagaaggcgttcctggaaaacaagatcgcgctgttcatcccgaccggcaccggcaacgtccacttcgccggcagcgactcggtgctgagccaggccgaaatcgacacctacaacaccacctacaactccgcgacctcgaccaccaagttcggcccgctgctgcagatgccgtcggtcgccacctcggtcaccattccgttcaacaaggctggctcggccgttgacctgaccgtggcccaggcttgcggcatcttctcgggcaagatcaccgattggtccggcaccggcaccggccgcactggcccgatccaggttgtctaccgtggcgagagcagcggcaccagcgagctgctgacccgcttcctggccagcgcctgccagccgggcgacgttgccggcaccaacctgaagctgaccaacggtgcgccggccttctcggtgcagtcgaccttcgccaacctgttcaccaccgtgccgtcgaacttcgtcgctgcgccggccaccggtggcaccgcgctgtacaacgccgtgtacgccgctgacggtcgcatcggctatgtgggcccggacgtgatcccgaacctgcaggacgcgaccaaggttgccaagctgaagggctattcgccggatgaagtgagcgttgctgccaccctgaacaccatcgctccgccgtcctcggctgccgacatcgccaacccggccaagtgggtgccggtgttcaccaacccgtcggcgggctatccgatcgctggctacaccaacctggtgttcggccagtgctaccgcgtcgccctggctcgcaatgcgatccgcgacttcctgcagaaccactacaacgtgggcgcgaccggcaacaacgatgccgcggtgcgtgcgcacggtttcatcccgctgacccaggactggcgtgaagcggttgctgccaacctggtttcctcctcggctgctaccggcctgagcaaccccagcacctgcaccaccggcgtcggccgctga

SEQ ID NO: 508946 - DNA, 1131 bp, Stenotrophomonas maltophilia
atgaaacgtacattggttgtggcagcgctgtgcatcggtgcctcgctgtgtggaaccgcagctgcgcaggtcaaggtcctgcccatcaagggcgcgggatcgggtgtgcccgccaagctctatgcggaatcggcggacaggatcctgccggccaacgtgacctatcgcgctgtgggtgatgaacctgcgcggcgggcgttccttgagaatgtgcccgagtctgccggtgagacccggccgccccatttcatcgcaaccgaatcggtgctgaccagcgccgagatcaacgcatacaacaccgttcatgcaaagcagtttggtgcgctcgtccaggtgcccgtagccggcctggcgattgcgttgccgttcaacgcgcccggcggcaccctggatctgagcgtgccgcagctgtgccgcctgttttcgggcaaggtcgagtactggaatgacctcgatcctggccgtgccggcgtggtcacggtggtctaccgcgccgagaaaggcggaaccactgaactgctgacccgcttcctgtccacggcgtgctcacggatggataccgagggttccaggctggtgggaggcacgttcaggaccacccgcgattttgcttcgctgttctctgcattgcccaccaacttcgtggctgcagccagcgagcaggcacagtacgaccggatactggccaccgccggtgccattggatacagcggtccggacatcgccgcaccgctgtccgatccaacccgcgttgccaaggtgcgcggctactcgcccgatgacgccagcgtgcgcgcgaccttgaactcgatcgcgcctccgaccggctctgcggcagagcgaccggaaaactgggtgccgacgtacagctacccgcccgtgggctatcccatcgtcggcaccaccaacctgatcttcagccagtgctatgccgaggtctgggaagcgatgtcgctgcgggtgtttctgattccgcattacgccaggcggaatgatgcggccgtcaccgcgcatcggttcattccgctgccctccgcctgggccgaagccatccgcagccggttcgccgtggcgggcgtgccgacgggcttgaacaacccgagcacctgcgcgggcatcggtcgtccgtga

SEQ ID NO: 508947 - DNA, 12366 bp, Stenotrophomonas maltophilia
atgtcgcatccgctcacgaccgtttcccgtccgtccatgctgcgccgcagtcaccccatggcgtgggccgtcgcagtcgcgctgggtacggtggtcgctcccgccagccaggcccagcaggcgttcagtcctggctggttcgctgatcgcggtgcggcccagggcgcggcagcgcagagcggacggatgcccaacggggtaccgatccagttccagctgccggcgcagcagcaggacgccgcacgccagaagctgcagcaatccatcgacaacctcggcaccgccgcacaggccattgcattgcagcagcggctgcaggagcaggcccggcaggcgcgtcgggaggctggcttcatcgtggccgacgggctgggcaaggacggcctgaaggtcgatgaaaacccgctcacccgtggctggttgaatgcgcgcgaggcgatccagtcacagggcagcgatggccgggtccaggtgagcgtggagcagacggcggacaaggcaatcctgaactgggaaaccttcaacatcggcggcaacaccacgctgaccttccagcagaatgcggactgggcggtgttgaaccgggtcaacgaccccactgcccggcccagccagatcctcggccagctgaaggccaatggcacggtgttcgtggccaaccgcaatggcgtggtgttcggcaacaacagccaggtcaacgtccgcaacctggttgccgctgccgcacggatcagtgatgggcagttccgcgacaacggcctgttcagtgccgacggcaccactgccgcgctgaccgaggccttcggcaaggtgatggtggagcagggcgcgcgcatcgccacccacgatccttcaagcgccacccgtggcggcggctacgtgctgctggccggaagcagcgtggagaacgccggccagatcgagacgcgcaagggccaggcgcagctggcggcgggtgacagtttcgtgatccgtcgcggcgtcggcaccgcgcagaacaccgcgtcgaccacggccggcaacgagatcgcgccgcgcttcgtgcagggcagcagtgccggcgacgtgcgcaacagtggcctgatccaggcgcgcgagggcgacatcaccctggccgggcgcagggtcgagcaggccggcgttgccgtcgccacgaccacgctgggccagcgcggcaccatccatctgctcaacgcgatcagcgaccgccagggccaggtgaccctgcaatccggtgcaaccaccgcagtgctgatcgaagacgacggcaagagcgcggtgctggacagccagcgcgatgcgttgatcaaggcctcggcggagcaggatgtgctgcgtgcggcaagcagcgctggcacgttcgacaacctctcgcggctgcaggaccgtcgtgaccagtcgcgcgtggagatcgtctccggtggcgacatcaatttcaaggatggctcgttgaccgttgcgaccggcggccaggtggtcggcgatgcggcacgccgcagctacgtgggcaacgcggcgcaggtcgatgtctccggcgcagtcggtgtgcgcgtggcgatggagagcaacaacgtgcaggtgaaggtgcagggcaacgaactgcgcgattcgccggacaaccgcgacaatggcacgttgatcagcagcgaagtctggatcgatcgtcgtgaactgcagcgcgtcgcagccggtaccggcggttatgccgccgagcgctggtatgccggtggcgggctgctggaagtgggcggctatctggacaaccagcgccactcgatcggcgaatgggcggcccagggcggcaccgtgcagttgaacggcagcgaggtggtgacccatggcgggtcgaagatcaacctggccggtggcagcctggatgtgcagtccggcgtgatcaagcagagctggttgcgcggcaccgatgggcggttgtaccgcttggacgatgcgccggcggagatgcagtacgccggcctgtacaaggggttcgaggttgatcaccagcgctggggcgtcaatgaggccttccgcaatccgttggtggcgccgggcgagcgggtcgacaacggccataccgtggggcgcgatgccggccggttggtgatctccgcgccgaccgcggtgctgcagggtgacatcaacacccaggtgttccagggcgctcagcaggccaaagcaccggaccagggcaaggacggctacgcgcaggcacagaccgcggtggcccgcaacgcccagctgtggctggggcgctatgacaacgcagggcgcaatgcggtcttcgacacccaggtgcggatcgctgatggcgcggtgcccgtggctgactggacgctgcaggcgccgatcccggtaccgcagcgcaacaccctgtggctggatgcgggccgcctgagcgagcagcaatggggacgcctggacctggccactgccggcagcatcggcatcgaggggaaactgcgcctgcaggatggcgggcagctggtactgaccgccagtgacatccgcctcggcggtgatatcggtattgcaggcggtcagctgcaggccggcaatctgctggcggtaaccggcagcccggtggttccgctgctgcaggccgggcgtggacgggtggagatcgccgatggcgcgcgcatcgaccttgccggccgctggagcaatctgctgctggaccccggcgcggcgcagggccaggcgtggagcgatggcggtcgcctgcagctggagaacagccaggatgtggtggtcgggcgtggcagcgagcttagcgtagacgccggcggccgtgtcgacagcgccggcaaggcgcgcatcggcaagggcggcagcgtcggcctgcaggccaacacgctggacaccggcagaggggttgtcggcctgctgtcgttggccgacgatgcgcgcatcagcgcgctgggccagggcagtggcagcctgtcgctgaccgatggcgggcatgtccgcatcggtggcgaaggccaggccgccggcgtgctgacgctgcgcagcgcactgttcggcactggcttcagccagtacgacatcaacgcgcaccagggtcttgaagtggccgatggtgcgcaggtggaagtggtcatgccgggcctgcgcctggccagcgatgcgcttaaggcggtcacccgcgaggacgccgtgcaggcgtggctggccccgctttacagcgccgatccgttgagcggccgcatcagccagcgggccggtgcgggcctgttgctgcgctcgcagttcggtaaccgcggcggtgatctgcgcatcagcaagggtgccagcgtgcaggttgatccggcacagtccattgaactgcggggcgcgggcaacatcgccgtggaagggcgcctgcacgcggccggtggccggatccggctggatgacgtgcgcacggccattgatctgtttgacgggcaacccaacagccgcacctaccgcatcgcggacggggcggaactggatgtcagtggcgatgccttcagcgtgaaggattcagcccagcggctgcgcgggggggggcgcaagggcggcagcatcgagattggcggtgccctggattgggaaggcgccggcgacgtcactgatcgcccggtggatgcgttcatcgtggtcgagcggggtgcgcggctgcgtgccgatggcagttcaacggcgttgcatatcgacggccagggcacccagcaggtggacagcgatggcggcgagatcgtgctgcgctcggccaatgcactctacctgcagggcgatctgcacgccgcggccggaggtgccggtgcgcgcggcggtaccctgggcatcgccttcgccgggggtgtctacgcacccagcgcaagtgagggcgtgcgtgccccccgattcctcgccctcagccagaagcgggaggaagcgtcgacgccggcggcacccacatatggccacgcgacgctgtcggtggaacagatccgcgacggcgggttcgacaacctgtcgttgttcaccgcggtccgcagccaaggcgacatcgatctgcggatggggcagagcctgcgcctggcaggttccgtcggcgtgttgccgggcgctgcggcggcccgatccatcacgctgcaggcgccctatctgaagctgtccggcccgagctgggccgtgattcccggcgagaccaccgtggtcagcgcggacgtgccgctggcatccgggcagcagcaccggctgcaggccgatgcgcaactgatcgatgtgcgcgacacggtgcggctggatggttttgacgatgtcgccctgcgcagcagcggtgacgtgcggctgctgaagggcaatccgcgcgcaggtgcgctcgataccgagctgcttgcagcgcgacgcctggagattaccgccgctcaggtgtatccggtggccggcgcgtccggtcggcttggcaccgggctggatcctgtcgccgtttcagcggatccgcgatggaaggatgcggccggcctgctgcgcatcaatgggctggggggcgtcgcaccggcaacgccattgtcggcactgggcagccttatgctcaccgcggcgaccgtcgagcaggcgggcgtggtgcgcgcacccatgggcagcatcgtgctgggcgggaccgacagcaacagtgtgctggcctcacgtgtctcattgctgccggggagcctgacctcgaccagcggcgcagggctcagcctgccctatggtggcacgctggatggcatccaatggcgcctggatggtgcagtcgttgagccgaggaatgtgggcggtggcgcgctgccgatcggcgtccgtctggtcagcagcgagaccgacgtggcaccgggcgcggtgctggacatgtcgggtggcggtgagctgaccggcgcggcctttgtcagtggccgtggcggttcggtggacatcctgcgccatgcattggctgatgcgaatccacgctatggcttcagccagccgggcaatgaggtctacgccatcgtgccgggctatgcaggcagcgccgccccgctgggcctgtccgatggctcggccgatccggccgtgggccagcaggtcgtggtgccggcaggcgtgccgggcctggcagcgggcacctacacgttgctgccggccagctttgcgctgcaaccaggggcgtaccgggtcgagctcggcgccagtggcgcgaccggcgccacgaccgcgttggccaccgggaccggctcatggcgggtggccggccatcgggccgacgcactgggcggtgcggtatcaccgttgctgacggacctgctgctgaccccggcggcgaccgtgcgacggcactccggatacaacgagaccagttacaacgccttcgtgactgccagcgcgcagcgactgggcctgccacgtgggtggcagacggtcgatgcgggcacgctgcggcttgagctgggcgcaggtgccggccgccagggggcctctgcattgcgcttccagggtgaggcacgcttccagcccaccgctggcagtggcgggatcggcggcagcgtggaggttgcacgggtcagctcggtgggctcgctggagatcatcgcggcgggtggcaacactggcacagacccgcagggggcgaccatcgaagccgatgcgctcaatgcgctgcagccttcgcggttggtcatcaatgcacgcctgcgctcggtcgcaccatccgtcatcgatgtcatgggcattggccaggacgtggtggtgcgcagtggcgccgtgctgcgcgcgccggaagtcctgattggtgcggttgaaggtgggcgcggcatcgtggtcgaggccggggcaggaatcgacacgattgggctgggcgccgccgggctgccgtcaagcctgggctatgtctaccaggtgggtggtgggctgctggccgtttccaatgaccaccccgaagtgctggctgcggccacaggaacggccggaacacgcgtcgacatcgacattggcgcctgtgatccgggcgctacctgcgccggccaggcccgcctggtatcggagggcagcatcaatgttgcatccagtgggcagctgcagctgcgcgagggcgccgtgtacggcacgcgcgagctggcgctgggcatgggcaatatcaacctgggcacggccgaagccatcgcgcgggcggcgggtgcctcggcgctgccaccgggcctgatgctgaaccagcaggtcctgcgcgatctcctgcgtggtaatacggctgtcggcgcgcctgcactggagaccctgcgcctgaacgctgccgaggcgatcaacgtgttcggcagcgtggatctggacacgcgggatgccgcaacgggcaagccgagcctgcgcagcctggtgctgggcgcgccggcgatccatggctacggcgacagcaacgaccgcgcacgcatcttcgctgcggaactgacctggtcgggccagcagggcgccacgtcggtactgggggatgcgaagacgcagccggtggggccagcaatcgccagccggttgggaagcgggcagctggacatcatcacccacacgctgcggttggcaccgtcgacgcgctcgcgcccctcatcggaagccaatgccgggcgccaggtgctgggctttgccggagtgaacctgcaggccgcgcgccagctggtgtttgccggcagcggtgacctgacggtctaccagcgccaaggcgattacgtggcgggcaagggctgggtgttcagtgggggcaacctggatatcgaggcgccgctgatcaccggcgaggccggggccaagctggcggtgaagacaggtggcacattgtctgcgcgcagtaccacgaccggtggcagcgcagacgccctcggcgccgagctcgatcttcgcgccggcgacatcgtgctcgatacacggttcgcgctcgcctctggcaggttgtcggccaacgccgaccattcactgcgcctgggcagccgggccgatctggatctctccgggcgcaaggtcagcctgttcgacgtcgacaattacagttggggcggcgacgcggaactcaccgcgggcgacggcagcgtgcagaccgacgcggcctcgcgcatcgatctgtctgcccgcaacaatcgtgccggccgcctgaccgtgaccgcactcggtgccagtgatgggcgtgtcgaccttgctggccggatccttggccaggcgtcgggccgtcaggacgtgggcggcagcgtggtgccctacgacagtggcgaactgctggtccgtgcgcagcagttgcacgatttcagcggtctgaaccagcgcctgaccggcgatggcgtgaccggagcacgcagcttccagctcaagcagggcgacctgctgatcggcgacgaggtgaaggcgcgcaaggtcgatatcagtgttgatggtggcgcgctgcaggttcgcggtcggatcgacgccagtggcgagcaggtgggcagcatccgcctggccgcgcgggacggcctgcaggtggatggcactctggatgcacatggcaccgcgctgcgcgtggacagctacggcggcatcatcgacagccccaaccgcgccatcgtcgagctggagagccgatcgggcacgctggtactcggccctgctgccagggtcgacctgcgcagcggcaccggggtcgcggtgggcacggcgcctggccagaacgatggccgggcgcgcggtacgctcgcgttgaacgtgccgcgcagtggtggctcggatgcagcgatccgtagtgacgcagggctgcaggtgatgggcgcacgcgatgtgttcgtcaccgcggtacgtcgctatgaggatgcgccgctggcgaccacgccggatgtgaacggccatcgctcgcagatggtcacccaggcctggctggacaccgtggtggatccggccagcacggcctggatgaacgcggcgctgggcaacgccgatctgtcggcgcgcctggcggcgctgggcagcgtgcgcctgcggccgggcgtggacatcattggtgttgcgtcggccgccaatcccgagggcgacctgaccgtcagtggtgaccttgacctgtccggctatcgctatggcccgcaatccgaccgccaggatccagcacgccgcggtttcggtgaatccggtgcgatgcgcctgcgtgccgccggcgacctgaatgtctacggcagcatcaacgatggttttgcgccgcccccggccagtccggacgacgcgggctggcaactggtcgagggcgccgtgttcggcctcggtgtcaccccgttcggtgcagacctggtggttcccggcgatggcgtcgtgctggacatcggcacgcggttcccggccagcgcggtgctgaactacgccatccaggtgcaggccgtgaaacttccggcgggcacgacgctgccggtcgacatgaccctgaccgggcctttggtattgcccgcaggcacggtgctggcggcggcggtcaagctcgctgacggccaggtgcatccggcgggcagcgtactggcgcagccattgtcggtgccggccggagcgaagctctctgcaggcttccagcttcgtggcgaggccaacgtggccggccacacctggccggccggcgtaccgctgccgatcgaactgcgcctggcggcgcgcacgccgttggcgcgcggtgcactcatcccctcgatggccacggtcaaactaccgggtggcacgccgatcaagctgcggccgaccggcagtgatggacgccagggacgcaactgggcgttggcgcagatgctgcctgaaggctccacttcctgggacgtgtcactcgttgccggcgccgacatcgacgctgcggacccgcgtacgcgccgcttcggtgcaagcggtgacctgaccttgtccgatacgcactacggtgcgatccgcgatgccagcaagcagatgaagttcatccgcgaccggttgttgaccgcagacggcgcgcaacggctgggggttgacggctcctgggtgggccggacgatcaaggacctggccgtgcacctgggccgggaggaagatgcactgtgcagcgtggccgcgagctgcatcacctcgccgtatatcttcaccgagctgggcgcggaggaactcgcgggcgatccgtcccttgcgggaaccagcgtcagggaattcggcgagatgatcggcatgaccgaggaggccatctgtgggcagctcagcgatggcttctgcctgatgccgggcgagacgcgcgaggtcaccacgatggacccgccgcggcacggcacaccgatgtggagtgtgctgcgtacgggcaccggcgatctgcagctgctggcggcgcgcgatgtgcagatgcgttcggtgttcggcgtgtatacggcgggcacccctgcatcgctgggcaacggccacgacgaacgcttccagtccgagcgcagtcccttgaacgggcgcagcacgttgttgggcctgcagcaggccaccggtgactatgatgcggccctggctgcctatcgcgcgtggtatcccgaccacggtggcaatctgagcgtgattgccggccgggacgtaaccggggccacctgggcgaccttgtcgtccgcaggtaccgatcgtgacaaggccgacagcgccagcagttcggtcggcggctggttgtggcggcaaggcacgggcagtacgcccggtgtggaaccggtgccgaccagctggtgggtcaacttcggtacctatgcgatcaccggagtgacggccacgtcgacgccacgcatggtcgggttcactggaatcggcacgctgggtggcggcaatgtggatatcgaggcgggccgcaacgcgggcgtcacggcggccaagggcgatgcccagggcgtgctcggcggtggacgctattccacggcgatcaacgcggcggtggcgtcgaccggtcgtgtcgacgatggccgcctggtgcagaccggtggcggcgatctgcggttgcgcagtgccggtgcgttgaatccgctgctggcggctacctcctactcgcaggccgaaaaccagcagaatctggagctcaacggtacgctggtgaacctgcgtggccatctcagcgtcgaggctgcacggatcggtggcagtgccgtggggccgaacaactatcaggccatcgccagcggcctgcgcatgatggacccttatcgatcgaccaccagtgcggccatgggtgggccggttctggtgctgggagattcggttgcggatctgacggcccggggcgacgtggtcctttcctctgcggccgatgccggccgggtgaggttgttcaacgcgaaccgggtgaccgcagatgacggcacgcgactgctgggcgctggcggattctcgctctggacaccgtcgacggcgatcaacctgttctccgccggtggcgacgtggtgccggtcgcgcagcggaccattgaacgcatcgaggacggccgtgcggaagtgactgccggcggggcggcctactggatctatccttcgcgcctgcaggccgtggctgccagcggtgacatcaagctgtcgcgcgccgatccttcgaccgtgctgctgactgcacctggtgccaacggcagcctgcaactgcttgcaggcggctcgatcctggccgccagcgatgcacccgcgatcagcagttccggggccgacacccgcttgccatcgccgtttgatccggccttcagtgccttctctgccagcggtacactgcggctgaccaatctgtccccggatggcactgtggtgccttccctggcgggtagtgcggaccccaccccgttgttcgccttcggtccgaatcgaccgatgctggcgacgccgcgcgctgctggggggcagccaaaccgcttctatgccggtagtggcgacatcatcgggctgcgtaccggcggtgagtggacgccggcctccccagacacgccgcgcacggtcggcacctggtacgacgtggccgcaccggtccagctgcgcgcgggcacggacatcctcggcagcacggtgatggcgctgaacaacagtggcaccgatctgaccgtggtagaggctggccgtgacatcgtgcacgccaacgtgaccgtattcggtccaggcaatgtcgacgtcagtgcaggccgccagctgcgccaggaggatagcggcagcatcgtcagccgtggcggtctgatccagggcgacactcgtccaggcgccagcattgcagtgaccgccggcaaccagaacatcgcgttcgatgccgtgcgcgcgcgctacctggatccgtccaacctcgccgacccggcgcaatcactggcgtcgcaacccggcaaggcggcgaagatctacgacaaggagctgaagcagtggctgcagcagcgcttcggcctggcggtcgatggcgcggaggccctggcggcgttcgatcgcttgccgaaggagcagcagcgcatcttcctgcgccaggtctactacgccgagctgcgcgagggcggccgcgagttcaacgatcgggatgggccgcgcttcggctcctacctgcgcggtcgcgaagccatcgccacgctgatgccggacaaggatgcaacgggagcgacgatcccgcgcaccggcgatatcgtgatgtacggtggctcgggcgtgcgcaccgaggcgggcggcaacatcgagctgatggcgccgggtgggcagatcgtgctgggcgttgcgggtgaggtgccgccggccagctccggcctgatcacgcagggccagggcgacatccgcctgttcagccaggacagcgtgctgttgggcctgtcgcgtgtcatgacggccttcggtggcgacatcctggcctggaccgagcagggcgacatcaacgccggccgcggctcgcgtaccacgctgctttacacgccgccgcgccggatctacgacaactggggcaatgtgctgctgtcgccgcaggcgccggccaccggtgccggcttcgccacgctggcgccgattcccgaagtgccgccgggcgacgtcgacctgatcgcgccgctgggcaccatcgacgcgggcgaagcgggtatccgtgtctcgggcaacatcaacctggccgcgctgcaggtactcaacgcggccaacatccaggtgcagggcgagagcaagggcctgccggtgctggccacggtgaacgtcaatgcgctggcttcggccagtgcggcagcgaacagcgccagccaggcggcacaggatgtgatgcgcaagagccaggacgatgcacgacgcaaccagccgtcggtgatcagcgtgcagatcctcggatttggcagtggcaccagcgccatcaatccgccggcgcgtggcaacactgccaacagcggttatgacgccaacagtgccttccagttcccgcaggcgagccgcgacgagggcacgcagcgacgctag

SEQ ID NO: 508948 - DNA, 336 bp, Stenotrophomonas maltophilia
atgatcgaggtgctgatcgcgttggccatcgtggccatcgcattggcggcggtgatgcgctcggtggcggtggcgaccgatgaccagtcgcgcctgcgtgaccgtcggctggccctgctgtgcgcacaggaccgctggcaggagctgcgcttggccgcgctgccacccagcgatgctcgcctgctgtgtctgcagggacgcacccgtttcctggtgcagcagcacctgggcagcggcgccgacgggcaaccgcagctggagctgagcgtagtagctgaagatgcaccgaggcaatcgctggcgcgtctgcagctaccatggacggcgtcgccatga

SEQ ID NO: 508949 - DNA, 447 bp, Stenotrophomonas maltophilia
atgcaacgcaggccacgcggtttcaccctgctggaactgatggtggtgctggtgatcatcggcatctgcacggcgggcatcggcctgggcctgggcagcctgctcgaccctgcgcggcagctgcgccaggaatcggagcggttggcgcagcgcctgcaggttgcgcgcgatgaagcacgcatcgatggtcggccaatccgctggcaggccaacgcagaaggctatcgcttcagccgtcgcgacagcgaaggttgggtcgagctgcagcgcgatgacctgttgcgcccccagcagtggcagacccgcgggattgaagtgcaaccgacgaacgccattgagttgagccccgaatggatcggcgtgccgtgggagctggcgttgtcgttggatggccgtcgactgcgtcttcgtgatgatggcagtggacaattgcaggtcatgcagtga

SEQ ID NO: 508950 - DNA, 2454 bp, Stenotrophomonas maltophilia
atgctgaacctcgccgaataccgccagcggcccgcgctgctcgccgactggctgccctgggccggactggtcgcgccgggtgtcgtcttgaacaaggacggcagtttccagcgcacggcccggtttcgcgggcctgacctcgacagtgcaacgcaaggcgagctgatcgccacgtcggcgcgcttgaacaacgcgctgcgccggctgggttcgggctgggcgctgttcatcgaggccgagcgccgcgccgccgccgactacccgcactcggacttttccgagccgctttcgtggctggtggacgaagaacgccgctcggccttcgaggataccggccaccacttcgagagcggctatcacctgacgctggtgtacctgccgcccgaggaatcgcgcgcccgagccgccaagatgctctacgagaacacgccgacgagtggcgtggactggcgcgagcggctgcaagccttcgtcgcggaaacggatcgcgtcttcgacctgctcgatggcgtgatgccggaaatcgcctggctggacgacgcgcagactctgacctatttgcattcgactatctcgacgcggcgctttcgcgtcggcgtgcccgaggtgcctttccacatcgacgcgctgctgaccgactcgccgctggtcggtggcttggcgcccatgctgggcgaccggcacctgcgtgtggtgtcggtgcggggcttcccgacctcgacctggccggggattctggacgacctcaaccgcctgggatttgggtatcgctggagtacgcgctttctgtgcctggataaatccgaggcggaaaaagaactcgcccgcctgcgccgtcagtggtttgccaagcgcaagaacgtcattgcgctgctgcgcgaaacgatcttccagcaggaaagcccgctggtcgataccgacgcgaacaacaaggccgccgacgctgatgccgccttgcaggagctgggcagcgatcaagtcgccttcggctacctgacggcgaccgtcaccgtcacggacgaggacgccggcgcagccgacgagaagctgcgcatggtggagcgcgtcatccagggccggggctttgtcaccatccccgaaacgctcaatgccgtggatgcgtggctgtcctcgctccccggcaacgcctacgccaacgtgcgccagcccatcgtctcgacgctgaacctggcgcacatgatgccggtgtcggcggtatgggccgggccggagaagaacgaccacctgggcggcccgccgctgatcgtcacacgcaccgatggcgcgacgccgttccggctggtgacgcacatcggcgacgtgggccacacgctggtcgccggcccgaccggcatgggcaagtcggtcttgctcgccacgctggcgatgcagttccgccgctatcgcggctcgcgcatcttcgccttcgacatggggcgctcgatgcgcgccaccatcctcgggctgggcggcgagcactacgacctgagcatggatggcgaaatcgccttccagccgctcgcccgcatcgaccgcgagggctaccgcacctgggccgccgaatggatcgaggggcgcttgctgcacgaaggcgtggcggtcggcccggacgagaaggcggccatctggtcggcactcggcagccttgccggtgcgccggtggagcagcgcacgatgaccgggctgtccgtgctgttgcagagcaatgcgctgcgccaggcgctcgcgccgtatgtgctcggcggcgcgcacggcaagctgctggatgccgatcacgaccggctgggcatggccgacgtgcagggtttcgagatggaggagctgatgcacagcaaggccgccgtcatggccgtgctgcattacctctttgcgcgtttcgatgaacgctttgacggtgcgcccacgctgctgatcctcgatgaagcgtggctgttcctcgatgaccccgtgtttgccgcgcgcatccggcagtggctcaagacgcttcgcaagaagaacgtcagcgtcatcttcgccacacagtcgcttgcggacatcaaggattcgagcatcgcgcccgcgatcatcgaaagctgtgcaagccgcatcttcctgccgaacccgcaggcgaccgagccgcagattcgcacgatctacgaaggcttcggcctaaattcgcggcagatcgagatcgtcgccaccgcgcagcccaagcgcgactactactaccaatcccgcctcggcaaccgcctattcgacctcgacctggggccggcagcgttggcgtttgcgggcgcttccacgccgcaagaccagcgcgacatagaccgcgtgctgctggacgccggcacgcctggcttcgcgggcgcctggctgcgccatcgcggcctcgattgggcggctgacctgctgccctcgttccccggcctcgcgccgggttccttcgctgaccacccacaggagatcctgccatga

SEQ ID NO: 508951 - DNA, 273 bp, Stenotrophomonas maltophilia
atgagcgccccggatagcttcgcagccgggttcgaggtgccgctgcatcgctcgctcaccgagccgatcttgctgggcggcgcaccgcgcaccgtggcgattgccaacgggacgctggccgccgccgtcgggctgggcctgcaactgtggattccgggcgtcgtgctttggatcgtcggccattcgctggcggtatggggtgcgcgcgtcgatccgcagttcatggccgtgttcgcccggcacatcaaacaccgcccgctgctggacgtgtga

SEQ ID NO: 508952 - DNA, 387 bp, Stenotrophomonas maltophilia
atgacgcacgcccatgccttccgtgtttccgtaaatccgccttcgcacctgtccatcctcgcgcggctgcgctgcctgggccgccctgcggggcaagggctgctgctggccgcgctgctgctgttcctggccggaaccgcgcaggccgccggttcctcgatgccgtgggaaggcccgctgcaatccatcctcgaatccatccaggggccggtggcacgcatcgtggccgtcatcatcatcatcgccacgggcctcgcgctggccttcggcgacacgtcgggcggtttccgcaagctgatccagatcgtgttcggcctgtccatcgcgttcgcggcttcgagcttcttcctatcgttcttttcgttctcgggcggggctgtcgtatga

SEQ ID NO: 508953 - DNA, 1059 bp, Stenotrophomonas maltophilia
atgagtgccgttccccaatccatgagtgccacgtcgctcgaccggcgcatccagatgctgcgcacggcaatggggccgctaatcgccaccgcgctcgaagaccccgacgtggtggaaatcatgctcaaccccgaccgcaccctttgggtggatcgcctgtcgtcgggccgcgcgcctatgggcgtggagctgcccgaagccgatggcgagcgaatcatccgcctggtcgcgacccacgtcggcgcggaggtgcatcgcggccagccgctgctgtccgccgaactgcccgaaaccggcgaacgcttcgagggcatcttgccgcccgccgcgccggggccggccttcgcgctgcgcaagcgcgccatcggcgtgatcccgctggagcggtacgtcgtggacggaatgatgaccgccgcccaggcaggctttctggtgcgcgccgtgcgcgagcgccagaacgtcttgatcgccggggccaccagcagcggcaagacgaccttggcgaacgcgctgttggccgagatagccgccaccggcgaccgcgtactggtgctcgaagacaccgtggaactgcaatgcgtcgcccgcgaccacgtgccgctacgcacgcgctccggcgtggtgtccatgaccgagctggtgcgctcatccatgcgcctgcggcctgatcgcgtcgtcgtcggcgaggtgcgcggagccgaggcactagatctcatcaaggtgtggggcacaggccatcccggcggcatcgccacgatccacgccggttccgcgctgggcgcgctgctgcgcatggagcaactgattctcgaagtggcggtgaacccgccgcgtgcgctgatcgccgaggcggtcaacgtggtgatccacatcgccgggcgcggacggaagcgccgcatcgagagcatcgcccgcgtcgtcggcttcgacggcgttggctaccaactggcggatgcgatggacacgccgtttcccgagctgtcgccagttcccgatgccgcatccgctgcggcgacttcctcatccccgtccctcaatccctctggagaactgccatga

SEQ ID NO: 508954 - DNA, 462 bp, Stenotrophomonas maltophilia
atgagctaccgcctgaacctctttattcagcccgagcacgcccagcggctcgatgaactggccgccaagaaaggcgtgtccaagtcatccatcgtcgcggcggcgctcgcatcgtggctgtcgcccgatgccgccgaccagcgcgaggccgctatcgccaagcgccttgatcggctgtcgcgccaggccgagcgcatggagcgcgaccagaacatcgccatcgagacgctggcgcttttcatccgctactacctgaccgtcagcacgccggttcccgaagcgcaccaagacgcggcccgtgctcagggcaaggcgcgcttcgagcagttcaccgagcagcttggccgccacctgatgcgcggacgcagcctggtgcgcgacgtggtggaggaactgcaccccgacccgatgcggatggaggacgccgccgcagcggctcaggcgcgggagcgtgcgtcatga

SEQ ID NO: 508955 - DNA, 2004 bp, Stenotrophomonas maltophilia
atgcaagggacgaacgtgctattcggtcagatcgccgtggtattcggcatcgtgatcgccggagtgtggggcgccacacaatggacagcagcagcccttggctatcaagtacgccttggctcgccttggttcgatcttcttggcacgccgatctatcacccgtggaagctgtttgagtggtggttttcttacggcgcctataccccggaaaccttcgacaccggcggagccatcgcgggcagcagtggcatggtcgccgtggccgtcgccattgccatgtcggtctggcgctcgcggcaggcacgcctggtcacgacctacgggtcggcccgctgggcgaacgcgcaggacattcgcaaggcgggcctcacgcagccagcgggcgtgttcctcggccagcacgaccgccagtacctgcgccatgaagggccagagcacgtcctgaccttcgcgcccacgcgcagcggcaagggtgtcggcctggtggtgcccaccttgttgagctggccggcttcagcggtcatccacgacatcaagggcgagaactggcagatcaccgccggctggcgcagccgtttcagccattgcctgctgttcaacccgaccgatgcgaagtcggcggcctacaacccgctgctggaggtacggcgcggcgcgcatgaagtgcgcgacgtgcagaacatcgcggacattctggtcgatcccgaaggcgcgctggagaagcgcaaccattgggaaaagacctctcacgcgctgctggtcggggccatcctgcatgtgctctacgcgagcgaagacaagacgctgcgcggcgtcgccaacttcctcagtgacccggccagccccttcgagctgaccttgcaccggatgatgaccacgccgcatctcggcgatggcccgcatcccgtcgtcgcttcggcggcgcgcgaagtgctcaacaagtcggacaacgagcgttccggcgtgttgagcaccgccatgtcgttcttgggcctctatcgtgatcccacggtggccgaagtcacgtcgcgctgcgactggcgcatcgccgatctcatctccgccgagcacccggtgtcgctgtacctggtggtgccgccttcggacatcagccgcacaaagccgctcatccgcctgatcctcaaccagatcggccggcgcctgaccgaatcgctggacggctcggacggcatagcgcgcaggcacaagctgctgctgatgctcgacgagttcccggccttgggccggctcgacttcttcgagacggccttggccttcatggcgggctacggcatccgcagcttcctcatcgcgcagtcgctcaaccagatcgacaaggcgtatgggcagaaccactccatcctcgacaactgccatgtgcgcgtgacgttcgccacgaacgacgaacgcacagcgaagcgcatctccgagacgctgggcaccgcgaccgagctgcgcgcccagcgcaactacgcaggccaccggctcgcgccgtggctgggccacctcatggtgtcgcgtcaagagacggcccgcccgctgctgacgccgggtgaagtcatgcagcttccgcccgatgaggccgtggtgatggtgtccagcgtggcccccatcaaggccacgaagctgcgctactacgccgacaccaatttcaagcagcgtgtcatgccgccgcctgcgctggcggacgggcagtacgcggacgcgccgcctgcgcgcgctgacgactggagcggcttggcgatccccgccgtgctgactccgcctgccgccggagaagccgagggcttcccggccagcactgacgacggcggcccgcgccgtcagccagagctttccgaaaccgtcgcctacgaccccgagctggccgcgcccgcggccgacctggcgctgctcgatgacgacgacgacctgccgcttccccttcctcgccagcttgatccgcccatgcagcgcgtggcccggctggcgtccctcgaccccaacgacggaatcgagctatga

SEQ ID NO: 508956 - DNA, 279 bp, Stenotrophomonas maltophilia
gtgaagaagaccattcctttcttgctggcggccgcattgaccgcctgcggccaatccgaggcgccgcagaaagccgccgattcggaggcaaatatcccgacggtggaagaactggcagccaaccccgaacggctcaaggagctgcgccagcaatgcaaaaccgaccgtgccaagctgggcgacgtgctgtgtaatcgggtcgccgaagccacgcgcaagcggttctatggcgacggagaaaccccgtacacgccaccgaaggaatcgcccaagttctga

SEQ ID NO: 508957 - DNA, 945 bp, Stenotrophomonas maltophilia
atggagttgcgccatctacgctatttctgggccgtagccgaagaactccacttcggccgcgccgcggagaagctgcacatcgagcaatcaccgttgtcgcgtgctatcaaagagttggaagaagaactgggcgttgtgctgtttgctcgaaccactcgcagcactcaactcacccgcgccgggaaactgtttctggagcacgtgcgccgcgtcttcgccgccttggaacaagcacgggacagtgtgagggcagcggccaatggatttcatggacagttgcgcgtggcgctgtccgacggcatcaccccgtcacgcctatctgctttgctcgccgtctgccgacaagaagaaccagaggtcgaaatccgattcttcgaggtgccactgtcacaacagatcaagcgactacatgacgatctgtacgacgtaggattcgcgcagtccagggaggcaggcgatggcatcgtcgctttaccggcttggagcgatccgcttatggtggcggtgccggcgaggcatccgctattggcccacaaacgcatccctctggatgagttgctgcgctacccgcttgtcttgtgcgacccgcaagtgtgcgaaggccatgccaaacacgttgatcgagtgctgcgtcgggcggacatggagccgctaattgcggagcgggtcgcttcctgcgacctgatgatggcgctcgtatcggcaggcttcgcacttggcctggcgggtgcagcgcacattgtcgcaagccgtgaaccgggcgtggtagcgcgaccactggcgtcccgtgtaccgccgctgacgacgtacctgctccgcccagagaatttcccctccgatgtgctgacacgcttcattaaacgtgtgcaggctatcgaatcaccggaatctccccggcccatcacgggccatactcttgacctaccggaggtacctacgccgtga

SEQ ID NO: 508958 - DNA, 864 bp, Stenotrophomonas maltophilia; identical to SEQ ID NO: 343992

SEQ ID NO: 508959 - DNA, 1479 bp, Stenotrophomonas maltophilia
atgatgaaatccctgcgccaggactggttctccaacgtccggcacgacctattggctggcgtcgtcgtagcgctcgccctcatccccgaagccatcgccttctcgatcatcgcaggcgtcgatcccaaggtcggcctgtatgcctcattctgcatcgccgcagtgactgctttcacaggcggccgaccgggcatgatttcgggggccaccggcgcgatggcgctgctgatggtcacgctggtcaaagaacacggactgcaatacctgctggccgccacggtgctgacgggtgtacttcagatcatcgctggctggctaaagctcggcgcgttgatgcgcttcgtctcgcgctcggtcatcaccggcttcgtcaacgcgctggcgatcctgatcttcatggcccagttgcccgagctgacgaacgtgacctggcacgtctatgccatgacggcggcgggcctggccatcatctatctcttcccccgtatcaccaaggccgtgccgtcccccctggtggccatcgtggtgctgaccgccgtggcgatcgtccttggcctcgacatccgcaccgtgggtgacatgggccagttgcccgacagcctgccggtgttcctactgcccgatgtgccgttgaatctggagacgctcaagatcatcttcccggtgtcggccaccttggccgtggtgggcctgttggaatccatgatgacggcttccatcgtcgatgacctgaccgacacgaacagcaacaaaaaccgtgaatgcgtaggccaaggcgtggcgaacattgccagcggttttctcggcggcatggcgggttgcgccatgatcggccagtcggtcatcaacgtgaagtcgggtggccggggccggctgtccacgcttgcagccggtgtattcctgctgctgatggtggtgttcatcggagattgggtggcgcgcattccaatggctgcactggttgcagtgatgatcatggtggccatcggtacctttagctggacatcgtttcgcaacctgcgcgcgcaccccaagagttccagcgtggtgatgctcgcgactgtcgccatgacggtaggtacccatgacctagccaagggcgtgctggttggtgtgctgctctcgggctttttcttcgcccacaaggtcggccggatcttccatgcgtcctccctcacggaggacgaaggccgcatacgcacctacaccatcaccggccaggtgttcttcgcatcggccgaacgcttcgtcaatgccttcgactacaaggaagtcatcgacaaagtacgcatcgacgtcagccgcacccacttctgggacatcaccgcggtgagcgccttggacaaggtggtcatcaagttccggcgcgaaggcacggaagtggaagtgatcggcctgaacgaggccagcaccacgatggtggacaagttcggcgtccacgacaaggacggcgctgccgacatgctcgcgggccactaa

SEQ ID NO: 508960 - DNA, 633 bp, Stenotrophomonas maltophilia; identical to SEQ ID NO: 343991

SEQ ID NO: 508961 - DNA, 1983 bp, Stenotrophomonas maltophilia
atgagcgaccgccgcgatgacgatttccgcgtgcgccccagcgccccgaagaaccggggcaagggacaggggcagagcttcgtttccaaggtgctcaagcagaccggcaaggccagcggcgggaagtcctcggtgcgccgtcctggcgcgacgggtggcaccggccagcggcccggctcgcgcctggggcgcggccatacggcggcgcgcttcgcggacgcgaagctgacgcccatgtcccggcgcgtgaccatcaagacgctgctggtgaatcaccagcgggccagcccgcagtcgctcgccaagcacctgcgctacatcgagcgcgacggtgtgggacgcgacggtgaaccgggtcaagcctacggagcgcagacagacgtggccgacctcgacgccttcaaggaacgctgcgccgacgaccggcaccatttccgcttcatcctctcgcccgaggatggcgcggagctggaagacctgcgcacctacacgaggcacctcatgggccgcatggaggccgacctgggcacgggcctcgattgggtggccgtgaaccactggaacaccgacaacccgcacacgcacatcgtcgtgcgcgggcgcgacgacaccggcaaagacctcatcatcgcgggcgactacatcgccgacggcttccgccaccgcgccgccgaactggcgaccgagtggctggggccgcgcactgagctggagatccagcagaccttgcagcgcgaggtggagcaagagcggtggacgagtctggatcgcaccttgaagcgcgaggccggcgacgatggcctggtgcatgtcgaacggctcaacgaacctcgcttgcagcgccaacgcctgttgctgatcggccgcctgcaacgcttgcagcgcctgggcctggccgacgagacgcagcccggctcctgggccatccatgccgatgccgagaagaccttgcgcgccttgggcgagcgcggcgacattatccgcaccatgcagcgggccatgagcggccagccgcgcgagctggcggtgttcgagccgggcgaggatggccgcaccatcgtcggccgcgtggccgcgaaggggctggccgacgaactgcacgaccggggctatctggtcatcgacggcgtggacggcaaggcccactacgtcgcgctcaacgcccgcgacgagttggcgaactatccgaccggggccatggtggaggtgaagggatcggccgacgtgcgcgcggccgacaggaacattgccgcgctggcgagcgatggcctgtaccgcaccgaccaccacctggccgtgacacagggccaggccgtccccggacgcgatccgcaggaagttgtggcggcccatgtccgcaggctggaagccctacgccgggcgggcatcgtggagcgcgtagccgaggggctatggaaggtgccgggcgacctgcccgagcagggccgccgctacgacgcgcagcgcctgggcggcgtggccgtggagctgaaatcgcacctgcccatcgagcggcaggcgcgcgtgatcggggccacctggcttgaccaacagttgatcggcggcggcactggcctgggcgacctggggtttggcggcgaggccaagcaggcgatgcagcagcgcgccgacttcctcgccgaacaagggctggccgagcggcgcgggcagcgcgtgatcctggcgcgcaacctgctgggcacgctgcgcaaccgggaactggcacaggccgcgaaggccattgctgctgataccggcctggagcatcgcccggtcgccgacgggcagcgcgtggccggaatctaccggcgctccgtcatgctcgccagcgggcgctacgcgatgctcgatgacggcatgggattcagtctggtgccgtggaagccggtgatcgaacaacgcttggggcagcagcttgccgccacggtgcgcggcggtagggtgtcgtgggagattgggcggcagcgaggattcgggcgataa

SEQ ID NO: 508962 - DNA, 600 bp, Stenotrophomonas maltophilia; identical to SEQ ID NO: 343990

SEQ ID NO: 508963 - DNA, 558 bp, Stenotrophomonas maltophilia
atgaccgcatccactgcacctgctgccgcgcctgccgctggcgcggccacggctgcgccacagccatcattcagcgcgccttccggccagcccgccagcgcgccgctgacgcgcgtggcgctggcctacatcgaggcccgtttcaagctctacctgcgcttcggcgaacccgcgcgcacgcaccagctcgaccgctggcggcgtagcgcggtgttcctgccgggtgcggtgttctgccgcgtgcgctggcagtccaacgatttcggcaccgtgcgctggcagctcatggtgatgcaggcttgcacgccgctggacggcgcgcagcgcatccccggcgtgcagccgggcgcgcgcctgctgctgcacgccgagggcgacgggcaagtgcgcgccgtgctggagcgcatcgacgccatcgaggcgctgggcatcgcagccatcgccgtctcgcccgcgtactggcgcacgctcgccaaccggcttgctgcgcgcctgccgctgcccgaatacaccaccgagcggcacgccgcctggctgaccgggagggcgctgccatga

SEQ ID NO: 508964 - DNA, 285 bp, Stenotrophomonas maltophilia
atgacagcgaagccaccaccgaacggcaagcgcgcagcaaagcgcgtcggcataggcgcgcgtccgcccgcgaatccgcacgctgaagcgtggattcggcaaggcgacgccgatgcgctgggcaagggcgacctctacaccgcccgcctcacgctcgacatcacgcccgccatgcgggcgcgcatcaaggtatcggccttcacgcaaggcgtgaccgtggccgacctgctgcgcggcctgctggagcgggagttttccgagaaccgcagggagaacacaccatga

SEQ ID NO: 508965 - DNA, 639 bp, Stenotrophomonas maltophilia
atgatcgtcgcgctactcaaccagaaaggcggcgtgggcaagaccacgctcgccacccacatcgctggcgaactggcaatgcgcggccagcacgtcgtgctgctggacgccgacccgcagggttcatcactggactggacgcaacgcagaagccagcaaggcttgccacggctgttcagcgccgtgggcctcgcacgcgagacgctgcatcaggaagcgccagagctggcacgccgcgccgatcacgtcgtcatcgacggcccgccgcgcatcgccgccttggcgcgctccgcgctgctggcggccgagcgcgtgctgatcccggtgcaacccagcccctacgacttgtgggccagcgccgagatggtggcgctgatccgcgaggcgcaagtctttcggcctgcgctgcgcgcggccttcgtcatcaaccggcgtgtcagtaccaccgtgatcgggcgcgaagcacgccaggcgctcgccgaccagccgcttcctgcgctgcgcgcggaagtgcatcagcgcatcgtgttcgccgacagcgtggccgctggccggcttgcacgcgagacggcaccggacagcgccgccgcccgtgaaatcaccgtcctggtggacgaactgctgcggtggacgacatga

SEQ ID NO: 508966 - DNA, 705 bp, Stenotrophomonas maltophilia
ttgcgccaatcgacttccgggccggcaacgtcacgatccgcgtggagggcacaggagcacggcatcgccacgatttgggatgccgacattctgatctgggccgccagccagatcgtggaagcgcgcgacgcgggcctgcgcccgtcgcggctgatgcaggccacgccctacgagatcctgcgcttcatcgggcgcggcacgtcgctgcgcgactaccagcgcctcaaagcggccttggatcgcctgcaatcgaccaccgtggccacgtccatccgcgagacgacaggccggcgcctgcatcggttctcatggatcaacgaatggaaggaactggccgatgccagcggcacgccgctgggcatcgagctgatcctgccggactggttctatgcgggcgtgatcgacgccgccctggtgctgaccatcgacccggcgtatttccgattgaccggcggcatcgagcggtggctgtaccgcctggtgcgcaagcacggcggcaggcaggaacacggctggcagttcgactttcagcacctgtaccgcaaatcgggcagcgtggcgcgctactacgacttcgccgccgacctgcgggcattggtcgcgcggcagtccttgcccggctaccacttgggcatcgagcacgtatccgggctttcgtcgccgctgctcacgttccggcccgtgccgtccacggcacggggataa

SEQ ID NO: 508967 - DNA, 282 bp, Stenotrophomonas maltophilia
atgcgtcccgctcccttgcggcctgccgccactgtctcgaccgctgccgcgcagccgcagcgttacctcaccaacgacgaagccgccgagtacctgcgcctgtcgccgcgcacgctggaaaagcagcgcgtgatcggcggcggcccacgctttcgcaagttcggccggcgcgtcatgtacgccgtggccgacctcgatgcttgggccgccgaccgcagcttcgagacgacttccgatcccgagtacgccgagcaccactcggcggacagccgtgcgcgctga

SEQ ID NO: 508968 - DNA, 774 bp, Stenotrophomonas maltophilia
atggtcgatcgcagcgccgagccttggtatccgactgccgcgtacctgtacgcgctgcatttggacgacctcgcgctcgcctgggaatacctgcgcaggcatcccgactaccggctcgactggctgcgccgtcatcgccggccgcaggcggcacaggacgcggcgcatcgctggggcttgcgccttctggaagacccggtgctggatgtgcgcgacgcgcatccagcctggctgcccggccacgctgccgtggtgcagctctatcccgacgccgacccgccgctcgatgcggcggtctttgcgttctggcacatccctgggcacaagcaactgctgcatgacggcaaagggctggcgctgatcgcgcgcagccctggccgatgcgtgcgcttcgtgctggcgcccggcctggaggacggcatggctgtcgcctatgcccaccgcggcggcgctgccgcgccggtgcatgggcatctgcccagctccgacatggccgatacgaagccccggccgacactcgccgcgctgctggaactgcacaccttgcaggcgctcgacgcagccctggcgggcgcgtccttgcgcgaaatcgccgaagggctgttcggcgccgatgccgtggcggccgactggcacgccgacggtgatctgcgcgcccgcgtgcgccgtctggtacggcgcggcgatgcgctgatgcgcggcggctatcgccgcctagcacagcttgcgccgcttgagaagggacgttttgcagccgacgcaaaacgtccctga

SEQ ID NO: 508969 - DNA, 2085 bp, Stenotrophomonas maltophilia
atgaacgcaaccacctacaccgaagcccgcgccgtcaatgccgccgccgctatcccgctggaagccgccgacccgaccaagaacctgattctggttccgctgtcgcggctggtgctgcgccccacgggccgcaacgtgcgcaagaccccgcgcatgtccatccccgaactggccgcgagcatccagcgcgtgggcctgctgcaaaacttgatcgtgattgccgccgccgatggcgaacattacgaagtcgtggccggtggccgcaggctggccgcgttgaagctgctggcgaagaagcaccgcatcagcaaggaatgggaggtgccttgcctgctggtggccgatggcacggcgcgcaccgccagcctgaccgagaacgtgcagcgcgaagccatgcaccccgcagaccagttcgaggcattcgccgcgctggtggccgaaggccgacccatcgaggacatagccgccgatttcagcgtgtccccgctggtggtgcagcgccgcttgaagctggcgaacgtctcgccccggctgctggccgactaccgcgccgaagccgtaagccttgaccagttgatggcccttgccatcaccgacgaccacgccgcgcaggaagccgccttctacgatgcgccgacgtggcagcgccagccgtccgcgctgcgcgaccgcctcaccgagcgggaaatcgacgcctaccggcatccgctggtgcacttcgtcgggctggacacctatgaagccgcaggcggtggcgtgcgccgtgatctgttcgccgaaggtgacgcgggcgtgtatctgaccgatgccgcgctgctggacaggctggcgcaagaccggctggcgggcatggccgcccaggtgaaggccgaaggctgggcatgggtggatgccacgccgggcgtgacccatgctgacctgcacgctttccaacgtgcgccgagggagcggcgcgagccgaccaagcgcgaagcgcagcgcatcgagaagctgcaatccaagatgcaggaactggccgcagccgtggatgacgcgctggacgccgaggacgaggacaaggccgatgcactgcaagaggaaggcgaagccgtgggcgagcagttgcaggcgctggaagatggcttgcaggactacagcccgaccgcgaaggccgcagccggtgccatcgtcaccatcgaccgcaacgggcaggccgtgattcatcgcgggctgatgcgcgaggccgaggccaaggcgctgcgcacgctggaacgcctgcgccaaggtttcagcggcgaggatgccgggaacgacgacgaaggcgaggacggagacggcgacggcgacgggcagccaaagaccgccgccatgtccgaccggctggcgcaacggttgagcgcccaccgcaccgccgcgctgcaaatcgaagtcgcccggcatccgcaagtggcgctggccgcgctggtgcatggcatggtgcagaccgtcttgcaggaaagccgctacggccacgacttgccgctgggcgtgagcctgaaaatgcaagaccggctggaaggcatggccccggactggccggaatcgcccgccgccgtggcgctgcgcgaactgcaacaagtggccggtgaaggcttgccgcaggacagcgccgaactgttcgccgcgctgctggcaaagccgcaagacgaactggtgcggctgctggccgtgtgcgtggcttccacggtggacgtggtgacgcctcgcgccatgctgcgccagcccggcgaggaactggcgcaggccgtgggcctcgacatggcagcatggtggcagccgagcgcggaaggctacttccagcacgttcccaaggccgccatcctgcaagccgtgggcgagtacgcgccagagcaggtttcccggctggcgaagttgaagaaggccgacattgccagcgaagccgagcggctggcgaacggcacaggctggatgcctgccatcttcaaggccgaaggcacgcaggcagccacgcaggcagaaccgcaggcagaaccgcaggagcaggacgacgccccggaggattccgaggcaatggcggatgaacccgccgtggcgctggccgcttga

SEQ ID NO: 508970 - DNA, 831 bp, Stenotrophomonas maltophilia
atgcaactcgcatcccgcttcgcttcccgctccccctcgctgcgcagcgactacccgctgtccgatgaccagattcaccgcgtagcgccgtccatcttcgcggacgcgccgcatgaaagccgttcgcagcggtacgcctatatccccaccgccgccgtgctggccgagcttcgcaaagaagggttccagcccttcttggtgacgcaaacccgcgtgcgcgatgaaggcaagcgcgagcatacgaaacacatgctgcgcctgcgccacgccagccagatcaacggcgcggaggccaatgaaatcgtgttgttgaactcgcacgatggcacgagcagctatcagatgctcgcgggcatgttccggttcgtgtgcagcaatgggctggtgtgtggcgacaccgtggccgatgtgcgcgtaccccacaagggcgacgtttccgggcatgtcatcgaaggcgcttacgaagtcttgcgcggcttcgaccgggtgaaggattcccgcgatgccatgcgtgcgatcacgctggacgaaggcgaggccgaagtattcgcccgcgccgcgctggccctcaagtacgaccccaccgacaacaagcccgcgcccatcaccgaatcgcaaatcctgatgccgcgccggttcgacgaccgccgcccggacttgtggagcgtgttcaaccgcacgcaagaaaacctgaccaaaggcggattgcatggccgcagcgccaacggacgccgccagcagacccgccccgtgcagggcattgattccggtgtgcgcctcaatcgcgccctctggatgctggccgatggcctgcgccagttgaaagcctga

SEQ ID NO: 508971 - DNA, 510 bp, Stenotrophomonas maltophilia
atgtcgcaactgtccttttcctcgttcgattcctcgctgatggtgcgtgacgcacagggccgctacctgctggcgactgccgagcagattctggaggccgcgcgccaggccatcgagcgcaagatgcaacgcggtacgtcgttcacgtcgccggcggcggtcaaggagtacctgcgcgccaagctggccggcttcgagcatgaggtgttcgcggtgctgttcatggacacgcaacatcggctgatcgaatacgccgaaatgttccgcggcaccatcgacggcgcatcggtgtatccgcgcgagctggtcaaggaggcgctgcggctcaatgcggcggcggtcatcatttcgcacaaccatccgagcggcaatcccgagccgagcggtgccgaccgggcgctgacccagcggctcaaggaggcgctggggctggtggacgtgcgcgtgctggatcacgtcatcgtggcgggcaccgacaccacatcgtttgccgaatgcggcttgatctga

SEQ ID NO: 508972 - DNA, 423 bp, Stenotrophomonas maltophilia; identical to SEQ ID NO: 343987

SEQ ID NO: 508973 - DNA, 738 bp, Stenotrophomonas maltophilia
atgcaaaggggcagcgtgtctgatacccgtatcggcctgccgaacctcgatgccacgctgttccagcagccggacaaggaacggctcctgacacccgaacgcgccacgcacgcgccgcgcttcctgctgctctacggctcgctgcgcgaccgctcgtacagccgccttgccgccgaagaagcggcgcgcatcctgcgtgcgctcggcggcgaaacacggttcttcaacccgtcgggcctgccgttggtggacgatgccggcgacgatcattcgaaggtaaaggaactgcgcgaactggcgcaatggatggaaggcatggtgtggtgctcgccggagcgccacggcgcgatgaccggcctgatgaagacgcagatcgactggattccgctgtcctccggagcggtgcgcccgacccagggcaagacgctggcggtgatgcaggtatcaggcggctcgcagtcattcaatgcggtcaaccagatgcgcgtgctgggtcgctggatgcggatgctgaccatcccgaaccagtcttcggtcgccaaggcatatcaggagttcgatgaaaccgggcgcatgaagccctcggcctattacgaccgcattgtggacgtgatggaagaactgatgaagttcacgctgctcacgcgcgacgcggcaccgtatctggtggatcggtacagcgagcgcaaggaaagcgccgaagcgttgtccaagcgcatgaaacaggagtcgatttga

SEQ ID NO: 508974 - DNA, 1203 bp, Stenotrophomonas maltophilia; identical to SEQ ID NO: 343986

SEQ ID NO: 508975 - DNA, 465 bp, Stenotrophomonas maltophilia
atggcgtggctctactacccaggtagatccacgccatgcgtggataattccttccgcaagtcggttccgccgggctgctcagcccaaatccacctcgcattcgctgagcggaacagactggccgtcggagatgatcaggtggtcatcttcaatacgggccaggcgaagacccagggtccttgccccggcttcaaccgccttccgccatccatccagatcgccgtggaaggaaagggctcggaagcactggccgttgggcagggttatccggcagctgtccgatacgatgccaccgctgcttgcggtgagctcgccagcagagtcctgcagcgcatcgaattgtcttgccgcgcgggtcgttttgtcagcttcaaagtagacaacttccactccggccacgggattgatacccggggcgattcgatcggctcgttgctcgatctttcccccaagaattgtctctag

SEQ ID NO: 508976 - DNA, 507 bp, Stenotrophomonas maltophilia
atgcgagcgagcattctcaagctcatgcccagcccccaactgcttgccggccggcgatccatcgtcggcaacgtctacgccatcaccatggtgtgccggaaccgccatcgcgtcttcgattgccctgccaatgccgatcttgccatgcagctcctcggatcgatggaccgggaaggcctgactgcgtcgcttgcctgggtcatcatgccggatcatatccactggctggctcaactacgtggccattcgctgggctactgcgtgcagcgcttcaaggcgcgcagcagttttctgatcaaccggcggcgagggaaccagggtgcaatctggcaggcgggttatcacgatcatgcgatccgcagtgacgcgtcgatgcacagacacgcttgctacattctgtcaaatcccgttcgagccggtcttgccgcgcagatcggtgaccatccgtacgggtggtgtcgctggccgctgagcgagctggagtcggtccaagaggatgaattctga

SEQ ID NO: 508977 - DNA, 258 bp, Stenotrophomonas maltophilia
atgatcgacatcgttctgcagttccagcttggggaggccatcatgggcgcggctgaaagactggaagagctgctatcgcttgatcacgtgagccagatgaccggtatggacaccacctttatctgcggagagatcaaggccggccgcttcccgcgctctatccgcatcggacgccgcgcactctggatacaatccgaggcgcaaggccgggttcggcagcagatcgtgcagaatcgatctttgcaggtgaatgggtaa

SEQ ID NO: 508978 - DNA, 771 bp, Stenotrophomonas maltophilia
atggaaggcctacgcccgactgaaatacattggatcatcagccactacattggcgtgtcaggcggttacctgggcgatttcacctattcatcccaccgtgagttctatgccgcctattgcgacctaacgatcgatccggaagactatccgggcaccacgcggcaacgcttcttggcggtgctctcttccgccgatccgcagactcaggcggcgatagtgcgaggcgttgcccgccgatttccggtggggtcagaggtccagcggaccctagatgcacgttcgaagctgcttgccatggcaaagcgatgcaaccaagtagccgccgtagagccgacgtcacccaggttagctagcgagctggtgcgtcaagccttggccgatgctgcatcgctgctggaggtgcagggtccagtgagtgccttggatcgcgttcacacggccctccatggttatttgaaaacggtatgccaatcggcagggctgaacctggcttcgctgccagcagatcctggagtcactcaagtttttaaactgatgcgagaaagccatcctgcgctgcgcgatatgggcgtccaagacgacgcaatgcgcaagattgtcttttccatcggaaatatcctagattcgcttaatacgctccgtaacagagggagcctagctcacgccaacgatcagcttgtcgaacgcgatgaggcgctgcttgccatcaatctaacccgcagcatcattcaatacctagatagcaaaatcgtgactgatcgcaatacgtag

SEQ ID NO: 508979 - DNA, 399 bp, Stenotrophomonas maltophilia
atgactccgttggtcgccctccttgggcatgcgcgggtgctccccctcctctctgccggcgtgaaccgcaagacgggagagaccaacgctcgctacggccagcaattcgtggtggacttcggccgctacctgaaaggcttaggctttgccaagggaatcggcttccataccttccgccataccctcgctaccgaattggatgtcaacgatgctccggagagggagattgcgctggtcaccggccacagcactgctccccgggatcgggtccaggtgctgcgcaagcactacctccacaagaaaccgtacgtgacccggagcaagcagatcagcgccatggagctgtatcggcccaaggtggaattgccgcgataccaggaggggcagttcgccaaatga

SEQ ID NO: 508980 - DNA, 672 bp, Stenotrophomonas maltophilia
atgcaggaacacgctttgagcacggcaacgccatcgcgcagcgcacgatgctggctgccggcgaccctgctgctggcactggcggcgtgctcgccttactcagacgcggagcgcgatgtcgccgcgggcggacgcggtctggccaagctcaatcccgcaccgaagcaggcttatgagctggtgctgacactgaaggacgcgccgggcccgttcgcgatcgttgagggcgtggcccagtacgacgtcagcaactacgcagattgtggtcggatcctgcctgcgacaggtactgcagggcgcatcaccagccaggaacccgtcgagctacgcaaggtcggtgagaacgaataccgcggcactttctacctggaccgtatgcaggacgaggagtactacgggcgcggcacgtgccactgggcactgacgggcgttggcgcgatgttgcgcgctacgaccggcgaggcggatacgcgattcctgacgtatttcaagaaggaacgcatgaacgctggatcgccgttgactctctactacccaaaggtcgcctatcctcgcgccgaacttgccgccaactatcctgcaagtggcaaggaagatccttcagcatacaaagaagagctgcgcggcgcgctgttctcaaccaccaccactgtgcagaaactcgcgccatga

SEQ ID NO: 508981 - DNA, 618 bp, Stenotrophomonas maltophilia
atgcccacgtcccgactgccccccttcagctgcttcgacggccatcgcctggtcgtttccggtaccccggaagtggccgcgctggccctcaagcagctgcgcgccggcaacgcggccggaccattgctggtgttcgacaacgccaccggccgcacccgtgatttcgatacgcgcggtagtgacgcagagctgctggcgcgagtggccgatgcgctcccgtcggccgtggaagcggatgccgaaaccgctctcgcaggcgaacctgccgccccacgtggtcgtggacgcccgaagctgggcgtggtcgcacgcgaagtgacgctgctaccgcgccattgggcgtggttggccgaacaaccaggtggcgcctccgtggtcctgcgcaggctggtggaagcggccagccgtgcgggtgccgacaaggaccggcagcgccgcgatgccgagcgtgcctatcacttcctgcaggccattgccggtgatcttcccggcttcgaggaggccatccgcctcctgttcgcgcatgaccgcgtgggcctggaagcgacgttgcaccgctggcccggggacgtgcgcgatcacgccctgcagctggccttcgataccccacctgtttaa

SEQ ID NO: 508982 - DNA, 609 bp, Stenotrophomonas maltophilia
gtgattgatgctagtgacttggaagtcgtcctgcttgatccccagaatgacctcgttcgcctctttcgacacgacggcgcacatctcgagccgcctgaggagaagtatcggaatgctcgggtggatcctcccgacgggcataagggcgactatgctgtgctgtacctggggaaaaacattccaaccgttgcagtggagtgccacattctctctgagaatccatccgggaactaccagtggctgcgtcgtcgtgccgagagttacaaggtcgcgcgctatcgttcagagcggccatcccttttccttcgaatcgatggtcggaaccgaaagtatctgggtctggatggaagagacgttgcgttcaagcgatatgccccctatcaagcgatgggcttggaactgtttcaacgtttcgggcagaccgttcatgggcttacctggtcctcgttccatcgaaaccaaccaggcgaagtttttgccttgtggcaccatcataaagatacgatcggcctgacggtgacgtccaaggaacctttcggttcgttggcgtccgacgccgactggagctccttcttggctgcaaatccaaccatagaagagcttgcgtaa

SEQ ID NO: 508983 - DNA, 918 bp, Stenotrophomonas maltophilia
atgtctcaagccaaacaacgcagggccaaagcggcggttccgcgcatgcaggcgcatagttttgaatgggcgattccctatcatgagttgaatgaggggctggaagagcttgatgtgatggaagacatagcggcgcatgcctttgaggcatggaggcccgggaaggtgggtatctatgaagagctaggtgagcttttcaaagcccatgacgctacgtctttcaatcattttctccctgctgggttcgctcatcccgtgaagggcttggtgtctccgcaccttttccgcctcgggcaggcgcgtgagagcgccctcgcgatggcgatcaagcacagcgaagagagtcatgcggatgcattggcgagggctggaatgagcgccgaggccgtgagaatcatgcgctcatggctggagacggtgagagttggaaatctgctgcaatcggaacttcaggtcactaggatggccgtgttgtcgaagtccgagcaatcgcaggcagaatctgttccagtgtttaatcacgatccgaacgagacgcttggtgttgccgagttctcgaagctgctcggtgtgagcgcggaaacggtccggcgtcgcgaaggtgaggggaaggtcattgcgttcctcggctctcaccgaaagaggggcagggcttatcctgtgtttcagacgtgggcgggcatttccggcgagccgttggttgaagtgctttcgcatctatcaggcagtggcgcggaggcctttgcattcttcactgggatcaatgaatcactggcaggactgacaccgattgaagtgctcttgggcaagctgaccagtgcgcgggatgtcgctgcagggcagtggttgttgacgcaagacggcagcaagcgccgtgctgcggttgtcgcggctgcggatgtccactcccaatactaa

SEQ ID NO: 508984 - DNA, 1524 bp, Stenotrophomonas maltophilia
atggcgatctaccacacccgcgtcaaaaccttctcccgggccaaaggccattcggccgttgccgccgcggcctaccgcgcgggcttgtcgctcgtagatgagcgcacgggagcgcggcacgattactctcgcagaggcggtgtggtcgagagtcgctgggtggtgcctttgaaggcgcccgattggtcgctcgatgcggccaggctctggcaagcagccgaggcggcagagaagcgaaaagacgcgaccgtggcccgagagtttgagatcgcacttccgcatgagctcaacgggccgcagcgctcggccctgacggcggacatcgcccgggccctggttgatcgctacggctttgcagcccaagcgagcatccattcgccgggcagcaacgatggactgaattggcacgtgcacatcctcgccaccacgcgccgcttggatgccgaagggcttgcggacaagacgcgcgagctggacggtggcccctcggggcgcagcgaagtggagtggctccgggcgatggtggcccagctgacaaaccagcacttggccgctgccgagatcccagtgtccgtcgatcatcgaagtttggaagcgcaagcggaggacgcgctcgagcgcggcgacatcgtcgaagctgcggttctcgggcggcgcccaacgatccacttgggccagcaggcctcagcgctcgaacggcggggagtggagaccgatgtcgggaaggttctggccaacatcgttgcggacaaccagggtgctgtgcatcaggcatcgatacggtttgagagggcagcgacggatacagaccgtgcccacggacatgcatcgatgccgccgaaccgtgtcgagctgggggcgaaatcaggtgaaagctacatcgaggacgtaaagggattcggtcggcgaggagttctggccattcgcactcttcccgatgcaccggaaccatcgctgcaatccctgatggagagcgcgtggggactttggcgtgacgtggtggcggccggtctcgaaggcgcgcttcggtccacgcgcctgcttctaggtcgcctggacttggccgttagcaacgggagcgtggcgacaagggtgcgcaaggatatccaccgagcgctaaggggcttgaccgccgtgaggcgacgagcgacggagtggctgcgacgggtggaggcagaacgacgggctgcatcgcttctgacgcgcgcggagcggtcgttggaggacttcatcgaacagcagccccggccgacaggcgctgcactggtggcttgggcccggcgtcgcggacgtcgcttggccgcaatcgagcagcgtttggatgccctgagaaaagctcgtacaaagatcgaggacggtcaggaagaggcctgtgcgaatcagctgtcagccgccgtggcagagttggaagccggcagcagggtagccctggatcagttggaggatccgcttcacgaaacgggagaccccgcaaagctgactgtatccacgccgcaggccacgcctcggccaaggcttcactga

SEQ ID NO: 508985 - DNA, 741 bp, Stenotrophomonas maltophilia
atgaccagggaaaatcaagctgtgcagaagtctgccatcccacctgaaatggatctggacggccatcaatggcccaatgaagtccgtttcatcccgtattggggtgacctctactggggcgggacggaggggcggcgggtgctcttgcttggcgagtcgcactatcggacggagggggcgagcgattcgctggaagtgacccgtcctttcactcaagaccatttccgagagatggccttgcccgtccggagcggccgcgacggacccttcttcaaggcgctcgatctgatcctcaccgggcggcaggacttccaactccaagacgccgccgaggcttggaggcgcgtggcattcctgaacctatcccaggcgttcgcaggttcccaggcaaatgaccggccgcgaaatgaggcgctacgctacggcgggcacgtgttggttcgagacattctgccgacgctccggccagatgtggtgctggtcctgggtcgcaccgcctggcggctatttagtcacggcagggtgtcgccggacttacagcccttcattgcccgacaggtcaaccgtggggagggcaggtgtaagcggcgttacatcgaatcccgggaagtctggtcgctggactacaagggtgggtttgccttgatgacctgggtctaccatccatcgtggaacgtagatacgtggcaggatcgggcgggagcgctgcgccacctcatctcacttgcgaaacagaactga

SEQ ID NO: 508986 - DNA, 1644 bp, Stenotrophomonas maltophilia
atgaacaattacacggtctacttgctgcgtgaggacataaagacggactacgacgcgatcgccgtccaagttcctggcattcccgtagtagatggtgcgtcccactacgggactctgttcgtgaagccgaccgcaccacgggagccgaagtggtctcccttgttcacgccctttgtggacaagaaaaagcttggacatgtccagtcctccgcagccgtcctcatcgttcctgtggacaagcgtcttttcgccgttacgtttggccaaggaaggcatctactaaagcccgaggcttttgaagagcggtttgggctgctcgtaacactgaactccgtgcggcaggatgctctacgtagtgtggataagcgtgccttcgtggatgaccaaaacagccgtgtgcaaaccagtcaggcatctgctgcgttggaattcggcatcgatatcgagcgcgaccttattcggggcatcgtgggctatcccgatgcgcctgagatggggcgccggttgtcgggatcggatgccctcaacttcaccagcaaagcggatatcccggagctgaggaggcagctgcgccgctatcttcgggcctactcttccaccgactacaaggagaagtttccttgggttgatcaggttcgccagctgaggcccaagggtcaacgtgcagtagagctagatgccctgctggtggagaagctaaagatcgcttggcagcaaggtgggcgggtagagggttgttggcttgctattccggatgtggtggactgggcccgcatcgcaggcttcaagttcacccgcaagaagaacgaaggcatgtcctcggatctccacctgcctggcctggtacaagcatatccggatgcagagccggacattgagttcttgcgatcccggcaggcattcgcagtggatgaggagcaatggaccgtagaggactggcaagtctaccgctgcatccactgtgagctggaggatggtgggaaatcttacgtgctttccgcagggaactggtttgaggtccatgatgattttgccgcaagcatcgaagaattctatgcgaacatcgccaagttccctttagagctgccgatctacaaccacgacgatgaggcggcttacaaccaggcccttgtggacgagggcaatggggcctggtgtttgatggaccggaagcttctcaacgtgggcggggtgcacgacaaggttgagttctgcgatgtctatggggctaagactctcttgcacataaagcactacggtagctccagcgtgctcgggcacctgttcaatcaggggttggtgtcagccgagttgcttaagtcagacaagagcttcgtgcaactcgccaacgagaagatcgatccggctcatgcgcttgaccttccgtttgacgtcccgcgtgacgtcacagattacaaggtggtgttcggtgtaataagccagtctgaagcgccgggactgcatctgccatttttcgccaaggttgtgctcaagtctgtatgcacgcgcatcctcgagcgtggctttggagaggtcatgcttgccaagatctccgtcgatcaaaacaaagttaaggtgaagaaactgcccccaggtaagaagccagcgaagcgcgggcaaaggatggcacggcgcggccactga

SEQ ID NO: 508987 - DNA, 2973 bp, Stenotrophomonas maltophilia
atggaccttgagagccccaaacaactccggtgggccaacgtggtgtcgcagggcttgctggcgggcaactacttggcgggggatggacgcatgggggctttcgtgggtggtgcgaagaggctgctttggacggcgctagcagtgggcgctttcaccgtgccagtagcggcgcgcaacccggaagcggcgtcgcacgctccggctgcagctccgcatgcgatggacatccccttcgagcgcttcacgctccccaatgggctgcgtgtcatcgtgcacaccgaccggaaggcccccatcgtggcagttcacctgtggtatcaggtcggatccggtgatgagcctgccggtcgcacgggttttgcgcacctcttcgagcatttgatgttccgcggcaccgagcattaccgcgacgcctactacggcccgctgcaacgcgtgggcgccaccgacgtcaatgccacggttacgccggagcgcaccaactacatgcaggtggttccatccacggcgctggacctggcgctctggatggagtccgatcgcatgggtcatctgctgggtgccatcgatcagaaggcgctggataccgaacggggcattgtcgagaacgagaagctgcagcggcgtggcgtgccttacggactcgtatgggagcagctctcccggtcaagctacccgccggggcacccgtaccatcattcgaccttcggatccgcacgcgatctgcaggcggccacgcttgccgacgtccaggattggttccggacctggtacggcccaaacaacgcggtgctggtgctgtcaggtgatgttggcgttgaagaggccaggaagaaagtcgagtcctattttgggcatatcccatcggcgcccgacgtaacaagggatcccgtggacgtcgccaagcgggcgtctaccacccgggaaaccttgtccgatcaggtccctcaagcgcgggttcaccggacatggaacatcgcagctcgtgggacgccggactttgatcagctgcgggtgttggcttacatcctgggaggaggcaatgcctcccggctgggcaagcgcctggtgcactccgatcaacttgccactgacgtcacggccgaggcaggggggcagctcggatcgcggctcatgatcgtcgccaacttgcgcgacggtgtcgccccgtcggccgtggaaaccgccatggaggtggagcttcagcgtctgctgacggacggtcccacccttgatgaggtgcaacgcgcgcggaccgcgatgcgggccgagttcgtgaagagcatcgagcgtaacggtgggatggacggaaaggcagaagtgctcgccgcctgtgaggtatttgaaggcgatgcaggctgttatcggcggtccgctgacgtggtggcagcagtcgcgcccgaccagctggttcgcgtcgctcgccgttggctggggcagggggatcacatcctgacggtcattccaggtgcccgcgctgcgttcgctgaggaggacgagccggctgacgcggtgtcccacgcgcaaagctcaggcaaaagccatcgcgctgcagcaccgggcgtggatcgcagcgcagggccgccgtttcctgaaagctatccggagttgagattccctgcgatcgagcgggcggcgctgtcgaacggcacccacgtgatcctggctcgacgggaggacgtcccgcttgttcgcatgtcctatcagttcccggtggatcccgcggcaaccgcgggtctggcagacatggcgttcagcatgctggcagaaggggccggggatcacgacgctctggcgttcgcggcgcgcgctgaatcgctgggggcggagctgggttccagtgtcgacgtgggcagcggcgcggtgaccctggtcggtctcagagacacgcttgacgattcggttgcgctgtacgcggacatgctgcgccgaccgcgctttcagccggcagcgatggatcgcatgcgtgccgccaaggtgggtgcgcttcgggaggaggcggccaacccgcagcgcttggccacgatcctattgcctgcgttgctgtacgggctggatcatccgtacgcccaatccttcaatgcactgggcaccgaggcctccgttgaggctttgcgccgcgatgacctcgtggagttccaccgcgcctggatccggccggagcggggcacgcttgtcgtggtcggggatacgacgctccaggagctggtcccggtccttgagaggcatctgggtgactggcgcgggtcgggtgggatccctgaggtgcgcatcgacgaccgcctgcccgcgcaggcgaggccacgggtgtatctggtcgacagccctggtgctctgcaggccaccctggtggccgggcaactggtcgcgccgagttcagacccccagacgttggccttcgaggtcgccaattccgttctgggaggatcgccaagtgcacgcctcaacatgaatctacgagaggccaagggctggtcctacggggtgatctccagtgcggccaacgccccgatagcgcgaccctggcgcgtggtggcgccggtgcagtccgaccgcgtggcggaggccatggcggagattcaccgcgagattgcggagtacgcgtccggaccggcgcctgccaggcaggacgaggttgcacgcttccgggacagccaggtgcggcgtctggcgggcagtttcgagacgcgggaggccgtcgcctcggagatcgcagacatcgtgcggttcgaccggccagacgattggaccacgcagcgcagcagcgcccttcgacaactcgatctcaacgaggtccgggccgctgccgccgcgctggatgccggcaggttgacgtgggtcgtggtgggtgacttgtcccgtatcgaggcacccgtgcgtgccatggggctgggtgaggtgatcgtgatcgattcgcaaggtgcgcctctgcaaaatgagaagccccggtcgggcgggagtgggatgaactag

SEQ ID NO: 508988 - DNA, 576 bp, Stenotrophomonas maltophilia
gtggcgcaacgactcggtccattgttagggattgcgatcctcttcgcgcccctggctgccagcggtgggacgcccactgaccccgagctgcgcggtgagctcctgcggatgaaggatgccgatcaggcggtgcgggacctcccgctgaccaccgagggtgaggagagagtgctcagtgctgtcgatgcggtgcacaccgctcggctgaaggcgatcgttgcggcccatggctggccgaccgtggcgcaggtgggccaggacggggcggacgcggcttggttgcttgcccagcatgccgacaaggacccggcgttccagcgctctgttgcggaagccatgcagcccttggtagccacggggcaggtcaaagcgtccaattacgcctacctttgggaccgcacccacgacccccagcgctacggaacgcaggggcgttgtgtggacaaggggcgttgggagccccgcgcggtcgaggcgcctgagaagcttgagcagcgtcgtgctcaaatgggcctgacgcccatggcggagtatcaagcgatggtctccaagcactgcgagcagtttgggcgttaa

SEQ ID NO: 508989 - DNA, 1398 bp, Stenotrophomonas maltophilia
atgcccctgaagaaacttctacaccccctgcaatcctacgtggacgatcccagggactccttgcagatgaccgacatccgcatcggaagggttcgtatcggaaagctcgtggtcaccggccgggaggccgcggtccacgctcaggacatcttcaacaccgtctgtgagcgaacaaggcgtccgcgctcaacgaagaacggcactcgctaccccgagccactgcctgtagcgacaccaggtcgttcgctttccgtggaaatcggtgactacctccgcaatcgcggtgactacagctgcctcgccaaggagacggtcgaagccaccgcacgcaccctgcgcttgctgttgctgacctgcggtgacatccccgtctcgcgcatcgaccacgcccatatctacagggtttgggacttgattcgctggctaccggaccggttcctatccgacccggcataccggggcttcacttacaaccaagcagtggagtgcggcaagcaactcagcgtcgcaccaccagccccggccacccttgagaaacaccgtcggttcctgtcgacgttcttcaagaaactcgaaaaatccaaggccatcgttgcgtcccctatggtcgccttcgacgagatcaagaaggacttggtagtggatcccgacaagccagagcgtctgttcgacgatgcagaactcaagcgcatcttcgacctggggacatatgtcccatgggctagcaagtacccccaccgctggtggctccccattctcggtctctgcacaggcgcgcgcatcaacgagatcgcccagctcaaactggcggacgtggtgcaagaggccggcgtctggtgcatccggatccagaagaccatcgatcccgaccttgcgcataagacccgcgatcggagccggcagcgcctgaaagggaagtcagccattcgaaccctccccatcccttcccaagtgcttgatgcgggcttcctggacttcgtggaggatatccgcgcttgtggccatcctcgattgttcccccacctgaccgccggcgtgaaccgcaagacgggtgagtcgaaccagcgctacagccaggccgcgctcaaccagttcagcacctacctgaagaacctaggcttcgggaagggtattgggctgcacgcgtttcggcacaccatcgccacagagctccaccacaagggcgtgcccgatgaagacattgcgttgctcacgggccacagcatcagtaaaaaggtgccggtgctgcatgaggcctacttccacaagaagcccgagctcgcgcgaaggaaacagatcgaccttttggctcgctacgcgccaccggtggagctaccgcgctaccagaggggtcagttcgcgaagcaactgagcgacccaagaaagttctacccgtaa

SEQ ID NO: 508990 - DNA, 483 bp, Stenotrophomonas maltophilia
atgccgcatcatgaactcattgcgatatctggcgttgtcgagcacgtttttgcccatcgcttcaccgtactgtctgatggaaagcactacctcgcggacctggggccgaagggcgcggagtcgtttgccgtgtcaccggggctggaggtagacctagagggagaatgtcgcccttccgagatcaaggtcctgcgcattgcacgcaaaggagaagaaagcactgaggtcgaacacaaaaagccccaccatggcggcgggccaatctctcggcgtcgcgatggcgcgcagacagacgcagaagtagccgtccttgccgcaactgaggctggatttgaaagcacaggaaagccgaggcgccacccgaagcacttcgaggtgcttgcccgccaaggtggtggcgagtggatggaactgcacgtggacctgagtggaaacatctacaagcagaagcccgccgcgccgcacaagtggccgcttggatga

SEQ ID NO: 508991 - DNA, 2184 bp, Stenotrophomonas maltophilia
atgtacacaatgcgccgcctgaaagtgggacctcgcctgaccctcggcttcgtcatcctgctggccctgattgccaccattcttggcatcgctctgcacagcacctacaagcagcgccaacagtttgaatcggcggtcaatgtccgtgtcacccgcatgggtgaactctatggcctgctcgcgctgaacaaagaaatgatgctgcttcgccgggacatgcttctgaagagaggcgtcgacgtagcgactgacaccgacaaattggagaagctgacgtcagagtatgaccaacgctgggctgccttcacgtcaaggccagccaccaacgcctctacgcaagccatgaggcagcgggtgagcagcgccgccctcgcagccagtactcttaacaatgaactggatcagctcatcagtgccggcgactacgattcagccaacctgctcctcgtcaccaaagtcaggcctgcctccgacagttggaattcggctctcactgacttcaccacgctccagcatcgcttggtgaaggaaggcgcggaagaagcggccgcgctgtcggccaggaccaccgggcttctcaccacctttggaacgttgagtctgatcattggaatcctcgcatcttggctgatctcgcggagcctgactgggcccctttcgaaggtctcagcctcgatcgaagcggtaacgcgtggtgacctgaatgtgcgtcacagcgacgatagtcctgacgaggtcggacaaatgcttcgctccactgacggcatgattgagatgctccagcgcttctctgaccagactagcaccatgattcacaagcatgccggcgaggacatcagcttccgcatgcagacggacttccctggcgtttacggcgacctggcggcgggcatgaacaccatggtctttgaacacttggatgccattgtcgacgctattgaagtgctgaacgagtatgcacaaggcaacctaagccgtgacgcgaagcgtctgcctggctctcgggcgatcctgcacgaatcgatggacgcagcgaaggccagcttggaagcgatcaatggagacatcaagcgactggctcaagcagcctccgtcggcgacttcagcgttcgaggcaatgcgcaggcctatcagcatgacttccgggtcatgatcgaagacctgaataggttgatgagcacagcggacgagagcttgagcgcgctttcgaaggtgcttggcgcaatggccgaaggcgatctgacccaacgcattgacggaaactaccagggcgttttcgcaacgatgcagcgcgatgcgaaccgaactgcgggcaacctcactgagatcgtccagcgaattcagcttgcttcagcctccatagccacagcggccgatgaaattgcagccgggaacagtgacctctcacgcaggaccgaatcgcaggctgcgaacttggaggaaaccgccgcatctatggaggagctgacctcgacggtgcgacagaacgctgagcatgcgcagcaagccaacgccgcttcggaaggggctggcgaggcagtcgccgcaaccacccgtgtcgtgagcgaagtggttgacgtcatgggacaaatcaatgcgtcgtcccagcgaatcggtgagatggtgacactgattgacggcattgccttccagaccaatattcttgcactgaacgcggcagttgaagcagctcgcgcaggcgagcagggacgcggattcgcagtggtcgcctctgaggtgcgcacgcttgctcaacgggcagcggcgtccgccaaggacatcaaagcactcattgatgagtcgacaggtagggttgaggctggaatcgctattgcccggcggtcggacgcgagcatgagagaactgaagaattcagcagcccagactggggagatcgtgcgccagatcgcccaagccagcattgagcaagccactggaattgagcaggtcaatcaaaccatcgctcagatggatgaagcaacccagcagaatgctgcgttggtggaagaggctagtgccgcggcccgatccatggccgagcaagcaaatgagctggaaaaggctgcttccctcttcaggatcaaagcaaccgcctcgaacgagccccgcctaacccctgttcgggcgcgtggaattccgacgcgggaagaggctcgatccgtagcagagtggtcaaccttctag

SEQ ID NO: 508992 - DNA, 612 bp, Stenotrophomonas maltophilia
atgcaatccgatgagcatctttcgaatgacgtcatccgagctgtcatcccccatccggacctcgcagatgcccgcatgaaacagtggagacattggaacagctgcggccatcatcggcctagtcaggcgcgcctgcagttcgtcgaccagtcgctcgactgcttcacggcctggaagcgcgagaacgaatgcaaaacgagtgacacctacgtggtagacctcggcaattccatccagcgccaccttgatgcgtacgccggcacggttgatgagcgcttcaagtggagccatgcccaaaacctgcccagcttcgcttgcgagtggggcatcaagcacatccaccaggatggcgtaacactgccggtttggagtgcgtgccgcccaagatgtgtaatcaagggagaactggtggcgattcggaagcccgctgaccggatcacgccttcccgtcagtgctcgaagctcgagctcattcatgactgctgtgccgagtgtttccagctggcgtcgttcttctgccgaaaagctccgcggctcattgtccatgatacacagcgctccaatcgccactccgttcttggtgaagagtggagcgccggcgtagaactgtag

SEQ ID NO: 508993 - DNA, 600 bp, Stenotrophomonas maltophilia
gtgtttgagcgcactgcgctcatgggggaagtatcggaatgggttatcgaccaagcactcacacagttaaagcgctggcgggaggacggcttgaccttgagcttgtccatcaacttgtccgcacgtgacgtggcccgccctgggattgccgaagaactggtagccaagatcctcgacaaaggccttgagtgcaaagacattgagattgaaatcaccgaaggcgaatggctacatgcccagtcgttgcctggtgaacaacttaaattgatggccaccgcggggatcaaactgtccatcgacgactttggcagtggatacagcaactttagctacctgactgagctaccagttagctcgctgaaactagacaagtccctaatcgacaacgttgccagcgatgaacgatcctgtttgaaggttcaagccatcgtcaagctggcaaagcgcctcggttacaccactgtcgcagagggcgccgagtccgaagatcaaatcatcaagctacgatcgctggattgcgatgagctccaaggctatgccctatctcgaccacttggctcaactcagttggccgagctgcttacatccaagtgccgctga

SEQ ID NO: 508994 - DNA, 306 bp, Stenotrophomonas maltophilia
atggaacgctcgcaattcactattgatcgcacactgtattcggacgaggtgaccgctcgcgcggcgcatcgctataccgacgagtttggtgtggaggtgcgcagccaaggcgccaacctcaccgttttcttgtggtctctggacggctctaagttgtcagaggacctctgggcccggttttcccgagacttgctggacgagcgcctgcgagcggctgtccgagcagagaccaacgggctgcagcaagagttgcttcgcgcagcgctaagccaggcacatccggtggtcgcccatgtcgaggtttag

SEQ ID NO: 508995 - DNA, 615 bp, Stenotrophomonas maltophilia
atgagcattctcaacgtcttgctgagccctagccagctcctcgttgctgttgacaccctggcagaggatgcccggaccggcgcccactcttcgggcgccaaaatgctcctgattccgcagcacaatctcgtgatggccgcacgcgggccgacacagttttttcttcgtgtctacgagctggcgcttcaggcgagcttccgcgcagatttcacgatggaacagctttctgcggagctgggcttggtgctggaccaactgtggccgaactacgtaagggcggctgccgaagcgcgcctaccgattgaccatctcgggactgagctggttcttgggggctggtcgcctaggaatggtcggatgatggccactgcgtacgccaagaacgacagcaccacacctgccattgttcagtgccttgatggcggcttggcctcgccgggagaacccttggccggcaggcccgagagctttgccccagccgatgtcctcgcagccggcaaaatccaggccacttggcttaacgcgcgggtagggcggcaggtggctggtggtcggcttctggcgacgttgctgcgcgacgggcaggcggtgacgcaagatctaggtgcgatctag

SEQ ID NO: 508996 - DNA, 300 bp, Stenotrophomonas maltophilia
atgacatacaccctggagcaacttgctgaacgcctgcacgcatgtgaggtcgacttagaagcgcatcggggatacctcaaagcgatggagtacgcgctcggcgcgaccatcgccacccacagtgatccgccatcattgcgccggatctgggacctgatgttggtggaagcggcggacactcatgccggcctcgatggcccgatcttcaccgctgcctttcagcagtctcttcggatgctcaccgaacagatatccctgatggacccaggccctaccagccagcgcccaatagatcagtaa

SEQ ID NO: 508997 - DNA, 435 bp, Stenotrophomonas maltophilia
atgctcaattgctcggttgtctttgtaagctcagcagtagaggagctgactgaagtgcggattgccgagctgatggcagccggcgctgagttcaatgaggcatgtggttcgcgcgcagttgtgtgcttcgatggaagccgctttttcacctaccttgaggggaccgccagcgcggtaggtgcgacgatggtctatgtggagtcgctggacatccactcagagcttgtgcagctcgctagaggtgctgtccaaaggcttcgcttctccgatcagcctctgctgttcatgcgggtgtccactccctgtttgaagaccttggttcgagcggactggaccaacttctcacagcgtttgaagggcaggtttgagcccgtgacgggcatggagcagctcgccgagctcgttgcccgacaccgcgagccagccgaggcctag

SEQ ID NO: 508998 - DNA, 642 bp, Stenotrophomonas maltophilia
atgatgagaaaattgagcgcttcagcattcttggcctgtgcttcggtgagcggcggccggcatcaggtcgggtgttacagtgcgccggggttggatatgctcgaagtcttcatgggtggccttgcatgccctggcttactaacgatcgtcgggccatcctggtctctttcgtccctgcgccttaccgagaaagatggagctgccgctcgatacgggtgcgcctggattgcctgtatagccaggcgattgcttgtgcggcgtgctaatgcaggcctcagcctctttccatcgtgcaatggcgcgtttgacgaacagagaccttcaagccggtctgtcatccacgttgagcgccgccatgatctccccagcgacctccgcatttgcgcagaggaagaagacagcatccttttccgccgcctgggacaggaaatggtggacggtgatcaatgcggcagtcgtgttcctgacgaacacctcgtggcactgcgagagccgaacatgcgcaagctgggctgcgagcgcctgcttggttgcgtggacttcggcacggtgatcgctgtcaattcgcccgggaagacccactccgcatccggtatagacacatttgtccttgaacctggttttccagacgaattgaggtga

SEQ ID NO: 508999 - DNA, 624 bp, Stenotrophomonas maltophilia
atgagcgtgatcggagcattctcgagcactgcgccttctccgcagccgcgcacgacagtgccacctgagtcagtacacggcgcacgtccggatgcagcggctttccgtcagacagtgcgtgcatcagttgagctgagagtgctgccggcggcaggctacagtcggtttccagtggggtcgccagggtgcgcgcttgaagacgggttgccatttccaggaccgcttgcacacgtaccaacaccatggtcatcaccagcgccagtagtgcgcacaggatcaaggtacacagcccctcacgcggatgtggacgtggacccatggtcagccatgcggagagtcccaccagtaacgccgatgcgactgttccggaacgtaccagctgccttggccctgcgctctggaaccataccagagcacttgctccaagccctgcaaagacggcgagggcaggcgcggcatctagtatcagccagcacgctgttaacgcggcgattactgccagtacgaaaggagagggggtgcaccacgcgatataggcgccgcgcacgtccatctcattcagcttggggtggagtcggttcaaggcaggaggcggaaggaaaggtgcacagcctatccgcgtaa

SEQ ID NO: 509000 - DNA, 204 bp, Stenotrophomonas maltophilia
atggaccatgatcgcggggattggagggaaacacgcttgactaacaattggcggcaggccaccgaggccctcccaatcttgatcgtcgaacggaacgaagcttccgtcatgggcaccgacgcgttgatcgctgcggcccaaaccggcctcagggacgcctgcgagaactacctgacggctttgatcgagcatcgaagggcgtag

SEQ ID NO: 509001 - DNA, 1023 bp, Stenotrophomonas maltophilia
atggatgtagttattgcgcacgccctacgtgattctgtggctgaattttgcacggaaaacacaggcacgctttcgacggcggtccttgatccagttcttgccggacaggcaatttgcgcaaaactggcgcagagaattgattgcgtggctgctgcggctcagatcaaagcggacttggagcaaaacggtgtcgccttgttcaaaggggtatttgttcccggagaagacctccccgagacaccctcctcatttgtccccgttccaatgacggggaccaccgctgcgcttcagctttgcgtgattggagccaatgctctcatcggcaagctaaccgtgtcttatggatcagagaacgggggcagcctcttcgtgaacctcgtcggtatggggggcgacggacaaacggcgttcaaatcgcagaagcagatgcgcgggcatacagatgccatgagcttccctttccctggggaggaggatccgcactatccagctgttgcgccctccccagatctcgtttgcttaggtgcgctgcgcaatccggatggagttcctacgaccatcatgcccctcgcaaaaattctggaagaccttgacgaaggcgtgatcaaggaattgatgcagcggaaattcaccgtcatttgtcaggacactttcaaagacggaacgattgcgaagctgggagttaggcattcagtgcgtggcgcagcagtaattcgtgacacggtaaacgcagaacggtgggtcaggttcagccacacgaaagtcaccgccgacgaggacgaccaggtagggagggacgcacttgaggcatttaagagtgctgtggccagccatgtccaggctgttccccttgagcccggcgacatcctcttggtgagcaaccgccgggcgttgcatggacggagcaaggttggcgacgccaaaggtggagaaagccgctggctcgttcgctcctatgctcttgacggtcgccacgcgcaggcatacctgattcaaggaagccgtttttgtctatttccgtaa

SEQ ID NO: 509002 - DNA, 660 bp, Stenotrophomonas maltophilia
atgccctctactacccgtgagaacgatctgagagatcttcagcgactcatcgaacacgcatcgagccaactgcattcgagagcgaagctgataggcgcagcttgcacatattacaatgatagcaaccatgcttttgaagttcataccactcttgggagaagggaactacttcttggtaagggcctcaatgaggagcaggcgcttgcggccgcggttgaacttttgatgcccgatctcctcaagcgaacgactgcgcacattgcccctaaggctgtatccgccgaatcacttccgaacaacgctcgtgttgtacggcggccacgtcgaaccattggagtttcggcaccggagtccttgtggtctgcagtgaaattcgcgggagaaggcgcgaagcaatcgacagttgttcgaatgctgcttcgtaagggtatgaacctattcgacgaaggactgaagcacgataggtccagcaaggtcgacgaacgatttgaggaagcgctgactgcctaccgtggccccagcaggccggtcatggcgcgagtcgatgagccgctttactgtgagctcttggtcactgcccatgaacacggtcggaccctgtcgtcgttctccgcaagctgcttggctgtcgctcttaatgcccaacaagcggtgggctga

SEQ ID NO: 509003 - DNA, 636 bp, Stenotrophomonas maltophilia
atgcatctgccttctaccgaactcgtgcgtttggttgctggtcactgggatgctgaggtcaggttgaagctacgggacaactctggtctggttctagcaacctattcattctcgctcgacttcaccatcaccgactacgacgcggtctccatctacctgcccgagttccaggaagccgcccccaccgtaggcctcaatctcagctacgaccccattgcccgaacggtcggtggccgcgcgcacctggacatgtgcctgtatgacggcctcggttcgcagagcgagtacctgggggtcactgtacgcgacagcggcacgcggcctcccggtcccaccggctattcggtctggcacaccgacggcgccggtggtgacagccaacgcatggactacaccgtcatcctcgaccacaacggcgcacgcattccattgcgcaacggggtggaagaacaactgcgcaacatcgatacggcgcggctgcgcctggtgatgttgcccgggatgtcgcagccggtgttctgcgtacccacgccactcaccctcgataccccgcgcgtacccatcgacgagaaacgttctggtgcctaccagggcgatctgaaggtcgaactgcgcctgcctacctcccgcccgtga

SEQ ID NO: 509004 - DNA, 711 bp, Stenotrophomonas maltophilia
atgaaaccccatacacgttttgcgctgttggtcctgctgatggcaacagccgtacccgtatcggcggccgtcacgctgcagggcacccgtgttgtctacgacggcgccaagggcgcggtgaccgtcaccgcctccaaccgcggccagaaggtggcactggcccaggtctggctggacgatggtgatatccatgcaaaggccggcagtcagaaagtgccgttcgtggtaacccccaccacccgccgcatcgatgccgggcgaagccaggcctaccgcctcacctatgcaccgatggccggtacagcgctgccgcaggagcgcgaatcactgctgtacttcaatctgctggacatcccgccgaagccggaggcgatggagggccgcaacgtgctgcagttcgcgatgcgcacacgggtgaagctgttctatcgccccgccgggctgaccggacatgcgcgtgacgcggcaaatgctctggtgtggtcgcgcgatggcgatgcgctgcaggtacacaacccgagtgcctaccacgtgaccttcagccgggtgacgctgcccgatggtcgagccgtagaggcggacatggtggcaccgggcatgcagttgcgactgccgttgccggaaggtgctgcggttccagcttcactcagcttccagtggctggacgactacggcacaccacgcgatgcacaggcgcgcgtgcagggctga

SEQ ID NO: 509005 - DNA, 507 bp, Stenotrophomonas maltophilia
atgcaccccactgtttccatcctggccatcgcgcttgctgcaacgttgtccgtctccgcccatgccgccgacctgaccatctccggtgagattgtcgaatccacctgcacggctgatatcgccggcgacgtggacgtggacatgggcaagatggatctggtggagctgaatgccaacgaccgcatcggccgccgcgatctggacgtcacgctcgcctgcccgggctccggcgcggcgcaggagctggccgtgcgcttcagtggcgtggccaacaccgacggcagcctggcgctgactgctgccagttccgctgtcggcgtgggctacaagatctatgacaacgccgacacccagctgcgcatcaacaccgcaccgacccgattcgtgaatgtgccggccgatggcagcgaagtgctcaagcacagcgtgtggttcagcaagactgaagccgctgcgcaggccggtacggcccatgccagcgcgcagatggacatcgtctacaagtaa

SEQ ID NO: 509006 - DNA, 2496 bp, Stenotrophomonas maltophilia
atggccattggcgcggcgcttgcggcagcgatgccgcaactgcatgcacgcaccggcggcgaagtcgagttcagcgatggctttgcggccggcctcaccggcgtcgatctggcgcagttcagccacggcaacccggtcgaggcaggcatccgtgctgtcgacatctgggtcaacggtgagccatttgcacgccgcgacgtccacttcgtagccacagatgtgccgcacgtcgcacgtccgtgcctgccgcgcgcgctgctcgatgacatcggcctgggcgatgccgcacgcgtggccgtcgaccaggacccggatccgacgtgcatcgatctgtccgcgcggatcgacggcgctcgcgtgcactatgacgacagccagctgcgtctgatgctttcattgccgcaggctgcgttgccacgccaggcgcggggctttgtcgccccggcattgcgtgaccccggcatgacggcggcattcgtcgactacaacgccaacagctaccgcagcaacggcgaaaccagcagctatctgggcctcaatgcgggcctcaatctgggagcctggcggctgcgccaccgcagttcgatcaatcacgatgcccagggaacgcgtagcaatgtgctgagcagctacgcgcagcgcgacctgccacgttggaacagccagctgctgctgggccagggcaacaccggtggcgagttgttcgacagtgtggccttcagcggcgtgcgcgtagccaccgatgaacgcatgctgcccgactcgctgcgcggttatgcgccggtagtgcgcggcatggcccaaagcaacgcgcgggtaacggtgcgacagaatggcggtgtgctgtatgaaaccaccgtggcgcccgggccgttcgtcatcgacgacctgttccccaccagcggaggcggcgacctgcaggtcaccatcactgaaaccgatggtcgcgaggaaaccttcagcgtggcgttctcggcggtgccacaggcactgcgtgcgggaaaccagcgcttcagcacgaccgccggcgtgctgcgtgataccggcctggcgcaggatgcgctgcgcttcgccgaaggaacctatgcacgcggcctcaacaaccgcgtcaccctgctcggcggcgtgcagcttgccgatgacttccatgccggcctgctcggcgcggcgttcaacacagcgttcggtgccattggcgccgatgccacccacgcccgcgtgcgcttgccaggtgggcgtacgcaggcgggcaacagttaccgcatcaactaccagcgcagcatcacgcgaacgggtaccaacgtgggcctggcggcgtaccgctacagcactgccggttacctcacccttggcgacgtcgcgcgtctggcgcacagcgactggcagttgagcgatgaccgcctgatgcgcacgcgcgaacgcttccaggtgaacttctcgcagcgtgtcggccagcgcagccagctctacctgaccggtggccacgtggcgtactggaaccgtgccggcaaccaccgcgatctgcagttcggtttccacagcagcgtgcgttcggccaactacagcttttcggctacccgctaccgcacgctggccggcgcacccgatacgcggctggcgttccagctgagcgtgccattgggccgtgccgccggggcgccgcgcgtgagcgccagcgtcaaccacagcgatgctggccagcagcggcagcttggcgtcaatggcgcgctgggagaggaccgccgcttcagctacagcctgtcggccgaccagggccgcagcgggcagggctacaacgcctatgccagctaccagggcagccatgccgatctgagcggcggctacagccactccaacggaggccgcagtgccaatctgggggcggccggcagtctggtgttgcacggtggtggtctcaatttcggcccgccgctgggcgaaagcttcgcggtggtggaggcgatcggggctgaaggtgcgcgcgtcggcacgggccgccaggtaaccgtggccggcaacggctatgcggtgctgccctacaccagcccctaccgctggaaccgggtggagctggataccgccggcctgccgctggaggtggaggtggaccacagctcgcagcgcgtggcacccaccgccggcagcatcgtcaaggtgtccttcactgcacgcaacgagcgcaccctgctgcttgatgccagtgacgagcacggtgcagcgttgccgttcggcgttgcggtcagtcatgacgatggacgtgccgccgggcatgtgggccagggcggggtcatcgtgctgcgtgcggcccagcccatcggccgcttgaccgtgcagctgggtgaggacacgcgttgccggttggactaccggacccccgaacagcccgatgcacacggccagtactgggcccaggtgcggtgcctgccgttgccgcaggtgttgctggctaccgacccattggcgccggccgacaccggcaccggttcgtcgctgtga

SEQ ID NO: 509007 - DNA, 519 bp, Stenotrophomonas maltophilia
atgaggctgttttccgtgtccaccgctaccgcagcggccctggccctgctgaccaccgcgctggcggcccgtgctgacaccgccaccatcaccgttagcggacgcgtactgccaggcacctgcaccctcgcggatctgaccgttccgctcgatgacattgaggccggcgatgtgaccgctggccaggccagcggcctgaagcctggcgccctgaatctcaccggctgcgcgggtgtggcgagcgtggatctcagcttcgacggcaccgccgatgccgcgcaggacaatcactggcgcaacagcgccgccagcagcccggccagcggcgtggccgtggccctgctggaaggcaccagcggcaccacgtatctgcagaaaggcgacaccaccaccgtgacggtgggcggtgccagcgctgcaaaactggatgtacgcgccggctattaccgcaagagcggcaccgcgatgactgcaggcgcggtcagcacgcaggtcaccgtgacggctgaatacaagtaa

SEQ ID NO: 509008 - DNA, 1038 bp, Stenotrophomonas maltophilia
atgccttgcagacacttctatagttcccacatcgcaatcgcgcaacggttgtccaggtccgcgcgcgtgcgcaccgcggccgcactgctgatcgcggtggccaccccgtgggccgcccaagcgtgcacgagcgtgtttcccggccaagaggcaaatctggtggtggacgcctgggatgatgccgagccggatgtgctggtggcgaattggcgtaacgtgggcaacgtcagcttcctgagcggctgctcctttgggaacatcagcgtgcccatcgacgcaacgatggctgcggcggacctggagtatgtgcgcaatgtaagcatagacggtcattcgtatccggcgtttggcctgcgcagtcgtccacgctctcccttgttgatctttcgccatactgcaaggtcggcgaatagcggtcagcccagcttgagtcaaccgttcgatatccggggagtcagcgaggtccgtggccttgtcatgaacaacaacacccgctggtcctatgtgtccattgctgcagtgtcgcgcggcggcgacatggaagcggtacccctgatgacgctgggcactgtcacccacgtatctccagacttcccgcacctggtgaagaccgacacgtatcagttcacggccaacctgcgcaccaagacctgcacgctggctgacaagcaggtgacgctggatgatgtaacggccgcggagctccccaatgccgacagcaccgccgccgatcaggacttcaacgtggtcatgcgctgcaatggtgagtttccggtggacttgatgctgagcgacgccacgcaaccctccaattccggaagccgcctgcagcccaccccgcgcgccagcgcccagggcgtacgcgtgcagttgctgcgcgaaggggtgccggtggtgctgggtcaaagctggctgctgccagagagcagcaatggcgcgcagaacattgcattgggtgcacgttactaccgcgaacccggaagcttctctccaggtgtggtggaaggtcaggccattctcaccgccacctatcgctga

SEQ ID NO: 509009 - DNA, 798 bp, Stenotrophomonas maltophilia
gtgagtgagctgctgcgccgcctcgatcacgcctggcgggtgttcggcaccggcctgagctttgctgcgtttggcctcggcgggctgctgctcggcgtcctggtgatgccggtgctgctgctgatgcgggacccggtggcccgtcgccggcgcgcccggcgcgtggtccaggccgcctttgccagccatgtccggctgatgtgccggctgggggtgatgaccctgcagatcgaaggccgggaacgcctgcagcgcgacggtttgctggtcctggccaatcacccgaccctgatcgacgtggtctgcctgatttcgttgctgcccaacgccgattgcgtggtcaagcgggccgtggcctgcaacccgttcatgcgtggtccggtgcgcgcggccggctacatctccaacgatgacggcgctggcctggtggacgattgcgtagcggcggtgcaggccggcggcaccctggtcatcttcccggaaggcacccgcagcgtgcccgggcagccgccgcggctgcagcgcggcgcggccaacatcgccgtgcgtggccggctggacatcaccccggtgcggatcacctgtacccccccgaccctgaccaaggggcagaagtggtatcgtgtcccctcacgtcgctttcacgttcggctgcagatcggcgaagatatcccgatcgcgcctttcctggccgaagacgactcgccaaggggggatgccttggcggcacgccgcgttaccgagcacctttctcgttatttcgacctgtctggagagccgccccgtgcaagcacttga

SEQ ID NO: 509010 - DNA, 660 bp, Stenotrophomonas maltophilia
atgcggccgatttgtccagaccctgatcaaacacgtcgccagattgccccccacctagtgggcgacccactgcccgtacctgtgagccacagccttagtgcctacccggcgcgctatcgcggttctagaccgcggagaaggacctacaggcgcagcgactggcttggagcctcctgcctgaagggctctaccaccaatatctgtatcgataccgcggccaccaagccgggattccggagcgcattcaaagcacgcaggtgcttgatcccattggcgggcgacagcagcaatgtgattgccgaccagcatgaccgcaaaccgatatgcctggcacaatcagcgtcttggcagttcgttacaaggcctcgactaccaaggattcactcaccttgcgcgccccccccccctagaaccttacggagctctcaaggtagtgccaagtcacctagtacgtcgaagcggggcttcgtttttttcagcctgaaagccgtcaatctggatttgatagaacgcggtgctatgaacgtactctctgaggtgggtgacgtcctagagcggcagacaggcgatgcgctctcgacagtcgcattccaaacccacgtcacgggcaatgcaaccttttggcagagcaggtactccattgcccgctggtgcgcctga

SEQ ID NO: 509011 - DNA, 1038 bp, Stenotrophomonas maltophilia
atgagcggtcgcaagcaacattacttacctcagttcttgcagcgcccctttagtcatcgcgttgtcagaaacaactactacgtacatgttcacgagcagcgatcgaggtacagcccaagcactacgggagttggcgcgattcgtgacttttattcaacgatcgaagacacccgcgctgacgacaacatcacagcaaacgagtcgattcttggaggaattctggatcgggtgttgcgcaccaaagaattgcctgagagtggtgatatttccatgcttttcggcgcgttatcgattcgcacgctcaagatgcgaaacgcgatggaagagcttgcgccagccatgattagcactttaagaaagaaggccgctgagcaggcttgggctctagaggcgctggatgaacaaataaatgacgcggcctggattgacacgcagatagataagcagttgcaagagttcggtatggttgacagaaatagacgcgcagccatgagggccatcatcaggccgcagataaagagagagcttgaaagtagtaagccccgaattctcgaagatttcaatgcactatcacaccaactgttcgactatctggaatcgaaggcagcaacgattgcgaatggggctttgtctcgcgtctttactgatacgagcgcattggacaagaggagctcgttttttgatgatttttcatacaccttggttgagacaaccgaggagtcgtttgtactcggtgattgcgcggtcgccgccttagacagtcagtcacggccccgcgtggccttgggtaacgttgataagcgtgtcctccttgatcagatcttcttgcctatcagcccagacctgcttatacacggggctcgaaccccagaggcggagttccctggtagtgcgcaggtcaatcgactatctgcgatgctatccaaccacttcttcataagtctcgaagagtcaacgatccacattgaggagctaaagaagttaattggcgctgcagcaaccccgatcgttagcttagaagaactcgcgagcttctga

SEQ ID NO: 509012 - DNA, 1245 bp, Stenotrophomonas maltophilia
atgactgacagcccctacaggaattaccgcgtcggcatcggcgtgtcgctgctgctggccgtgctcatcgccgcgctctcgctcatcgcggtggcgacgcccaacctgggctggggcgtcgtggcgctggccaccgtcgcgatctgggtcggcctcccattgctgcttgtcctgctgctggcctggctgcgctacatggtgcggcagcgcggtcaggtgcccggccgggtacacgcgctgatgttcgtgccgaccgtcgccgccatgctcatcattccgctgtggcattccctgcagagcagttgggccagccttggtggcggttcgcgtgcctccatcgcagagctgcacgtcaacctcagcgggcagccgctgtggctggacaccacgccgtatgcatccaccggctccggcgctggcccggacctgcccatgaagggtgaaacgcccgggcagttcatggccttccatcgctatcccaatgcacagtccgacgcagacggagcgttcccgtatgaggacgggcgcctgaagcgctccgttgaccactatcgctacgccacaccctctggagatcgcgctgtcaccgatgtgcccctggagcgccagccgtatccggacaccgcccccttcaatgccggatggcgccgcgcagacacaccggaactcgtgtacatctactaccactacagcgatcacgtggaggtcgcgccaacactcgcacgcctcagcggcttcactgccgacgatctggaacgcagccgctttgaaggcctcgtgctgttcaggatccacaactacggcagcgcaccgatcgtgcggctggaggtcaatggcaccgcactggacatcggtgacagggccatcgagagcatcccggacgcgcccggggactgcacggcctacggctcccccctcggcaccgcattgttatcgctggacgcacccctgcaggtgcgctggcaaaccgtcgatgcaccgactcgttggcacagcgcgcgcgtgcaggtgcctgcgttccggcagccgctgccactgcaggggcaatccacgttgcagcgtgtcctgctgtacgtactgcccgacggcacgctggccgccgaacgctacgccgaagtattcgagggcgatagactgcgcggcatcaaggccaccggcctgcccgccagtgcggccacccatgcggtgtgtggcagcgcccgcgcgagctaccgcgaaggtgccgacaccgtgctggccgactga

SEQ ID NO: 509013 - DNA, 1191 bp, Stenotrophomonas maltophilia
atggctaggatgaccaaggaatacattgacgctgacgaggtcgaacagtggttcgaagacgaggtcgatgattcaagcctcgtggacgacgagaagcttgatcccgctacgaaatatgccagaagtcagctccgggtcgtccgtgaaacgaaagactatcagctcgactatcttcaacatgccctaaagccaggaaaggagcttatagatacggctcctgcttaccagcgtaggttgaggtggtcaaacaagaaaaggtctcttttgattgagtcttttcttctgaatataccagtgcctccggtttttctgtttgagcgcgattacaatgcctatgaagtgatcgacggtcgtcaacgcattgagacgatcagggcattcttatccagcgaattcgcgttatctgggctcgagtattggcccgagctcaaccgtaagcgatttaatgaattgcctcaggtcctgcaaaaaggcctgctccgtagaagtctcccagccgttgtgcttttggctgaaaccaaagagccgactgaaggtggactggatgtgcgccgtctcttgttcgaccggttgaacacgggtggcatgaggttgaatcctcaggagttgcgcaatgccttgtaccccggtgagctcaatgcgcttctcattcgaatcgccaggtctaaggtgtttacacagacttggggaattcctgcgtataagaaatcggaggaggcagagccgtcagaggagttggtcaggaatccacttttctcgtcactcgcagatgcggagctcgtcttgcgcttcttcgcgctgagggatgctgtccaaaactcaggggcgggatccttgcgaagaattttggacagatttatgagagagaaacagctgatatctcatggtacagctgccctcatggaggatgaatatatagagacgctgtcgcggttgaatagcgtatttggcggtcatccctttaggcttcccaaaacgtcgcgtccgagtaggccgctttacgatgcattaatgattgcgttgagcttgaattctcaccttgatgtggaaaagaggaagaggaagattcaggcggcgcttgcagccgcgcttgctgacgacgatacatacgatgtgcttgtgggccgtggcaacaccatggaatcggtgatagagcgggttgagcttgctcgacaaattctccaagcttga

SEQ ID NO: 509014 - DNA, 798 bp, Stenotrophomonas maltophilia
atgcctgacctcgatatggtgctagctgagtttacatctgatgtggagagagtcgagcatctgctcactttaatccggggctttaaggactttggtggaagcgttccgccagcggttggcgaaggcgagccgccagtttgggtcgaggcggctcagctccatcaaacggcatctggcaggcggaccgacctcccagttctctcgggatcgttgcagttgtatcttgccggtcgatttgaatactgcatacgtcaaatcgttgaggcggtagctgacgagatttgtacgcgggtcgaaaaatatgcagatcttccgaagagtcttcaggccgagctcagaagcagggtgctggatgtagcgaaggctcccaagaagtacgggtatgacgatcttgaggccgaggctctgcttgaatcgtatgtggcaagcagggccatcacttcgccccctgtttccatttcgtctcaagtactggcccttacagaatcaaacatgcgagatcgtgttctttctgatgttcttctgcgtgtcgggattaccgagttctgggcgaatgtcggcaagcaagctccagtaaagttgtttctggaaaagtccactgatccggaggcgacgagggaggctcagagtcggcttaataacatcatggatgagcggaaccaagtggctcaccctactggcagtacaaacttccctgatccaggtcaagttcttaagactgcaaaattcctaaccttaatcgcaaggacctgcactgatttggccaaaatctatctgtcttcctttgcttcgcgttga

SEQ ID NO: 509015 - DNA, 288 bp, Stenotrophomonas maltophilia
atggaaagacctgatgcctcgaagaagctcgacgagattgagacgatgttggctgctctagtggatttgcaggagatccagaagaccggcaatggattcgtcatcaacggtaagggcattgcttcgttgtcgcaatacgaggaggaggagcggaagcacagggaatcgatgcgcttgcagagcggcatcaagtggctgacgggggtcatggtgatcgccgcactattgcaggccaaggtcatcaacattcctgcgctttggaccatccatcgttggccatggcagtag

SEQ ID NO: 509016 - DNA, 702 bp, Stenotrophomonas maltophilia
atggctgtgtcactcgctacgcgcgatctggctggtatgaaaatcgatgatcaatccgagaacaccggtgcagacgggacgaccttggttgactacagcacgaaaaatagggttgcccttggaggcgctagcagaacgctaggcgccgcagtgattgactaccagaaccggccttttgacgccgttctcggctggaaattttttgagggccgtgtggtcgagatcgactacgacaagatgactctgttcgtgcatggcagtttgcccagcgtagtgggctacacgcggatgaaaacgcggtggatcgacaacactcccgctatcgaagtgaccctccagacagaaggctcacgactccaagcgtggctatctttggacaccggcaacaacggaaccatcgatctgagctatgcctacagttcccgacacaacctcaaagatgttctcacgcagaaggtcggaacgtcacaattcagtgggagcgcaggcaagaagatccggtcggtcgacgttcgggctcccgcggtagagcttcagagtcttcggctggaccaacccaaggtctctttcaccatcgatgaagacgggtcaagcggtgacggcacaatcggcagcgaagtccttaggaatttcaacattctgctggacaccaacaccggagacgtctatctgcgccccaacggacaccttggcagcaaatga

SEQ ID NO: 509017 - DNA, 891 bp, Stenotrophomonas maltophilia
atgttcaaaggtctcagcgcgtttccgctcacgcccttcaacaacgaagacatcgacacccgcgcgttcgccggcttggttgagcgcctcgcggcgtcgggggtggactcgatgggcatccttggctccaccggcagctatgcctacctggaaaaggccgaacgcaagcgggtgctgcgccaggccctcacccacgccggtggcgttccagtaatcgccgggattggcgcactgcgcacccgcgacgcggtggaactggccaaggatgccgaggatgcgggcgcgaccggtctgctgctggcacctgtgtcctaccatcggttgaaggagcacgaggtctacgcgttgttcgaatcggtgtgcaatgcagtgcgtaccccgatctgtgtctacgacaaccccgttgccacccacttccggttcagcgatgaactgcatgggcgaatcgctgccctgccgaacatcgcctcgatcaagatgcctcgcctctccgatgaccctgcggaagcggtggctcgggtttccacgttgcgttcccacatcccgaagcacgtcacgctgggcatcagcggcgatgcggccgcagtgcatgggctggccgccggctgcgatggctggtactcggtgatcggtgggctgttccccgaggtggcgctgcggatcacgcgcgcggccctcggcggcgggatcgccacggcaaaggccttgtcggcgaggctggcgccactgtgggcgctgtatgaccggttcggtgggatacgtgtaatggcgtgcgctgcagcgctgatggggctgagtgggcacggcaacctgccgcggccgctgcttggcctggagggtgatgaccgggcgcttgtagcggacgtgcttgcgcagcttgggctgtgctag

SEQ ID NO: 509018 - DNA, 543 bp, Stenotrophomonas maltophilia
atgtttcgattgtttctgctgcttgtctgcgcggtgccagccattgcaatcggcgcacgtgaagggcaggcaccggagtgggtgcgggaggtggctgccgacaaggacctgcaggttgaccccgaaatggttggtgtgaggcttgagccgaccgcgcggagcgcgctcctcgacacgcgtgcacatcgcatcggggcgaggcgttttcgcgcgctgtatcaggtattcgattccaacgcggataacccgatgggcttttgcggcgctggacgcgagatccatctcttcgtctacgaagtgacgccgctggagcccgtggagcgcggcaggatacggatcagcagttgccttgagaatgtgtcactggccagccagaactcggggcaagtgggcgacgagtccgacttttcctcggttacctggcaacgggatggattcaccgtccagtggcgggggagcgggcccggaagcgatgtttcacgccgctatctgctccgcaacagccgcttcgtcgtggatcaaccgggtgcggcaagtccttga

SEQ ID NO: 509019 - DNA, 462 bp, Stenotrophomonas maltophilia
ttgctggccggcgacgctgcaggcgccgccgacgcgttcgagcgtggccgccagctgcggccgcagcaatcgctgggccagaccctggcggcgttgcatggcgcgcaggctgcggacgccacctggatcgaccagcgcctgcagcagctcgctaccagcgcgggagcgggcgacggctggcccgatgcggcgctggagcgggcgctgctgctgcaggcccagggccatgcaggcgacgcggtgacggcactgcagcaggcggtcgatgacggcttccgcgacgtggcgtggctgcgtgccacgccgctgttcgtccgcctgcgcagcgcgcccggctggccggccctgctgcagcgcctggacgccgacattgcccggcaacgtgcgcaggtgctggccgccagctggcgacccgacgacctggccgcgctcagcgcagcgccggcagcagaaactcggtga

SEQ ID NO: 509020 - DNA, 711 bp, Stenotrophomonas maltophilia
atgagcgcaccgctgcagtccctgctcgatgcactcttcccgcgcggccaccacatcgacatccacgactcggtactgaccggcacggccaccaccgaggatggcgaggtgaccgtgatcggcaccaccgaccgcatcgaggtcggcgtcgaccacgcgctggcgctggccgggaccgtgcttgccagcaccgccgcgcacccgcagcggccgatcgtgatgctggtcgacaccgccggccagcgcctggcccgtcgcgatgaactgctgggcatcaatggctacttcgcgcacctggctcaaaccctcgacctggcccgccgccgtggcgcgcgcctggtcaccctggtgtacggcgaatcggtaagcggcggattcctgtccttcggcctgatggccgaccacatccatgccctgcccgatgcacaggtacgcgtgatggacatacgtgcgatggcgcgagtgaccaagcagccgctggaaaaactgcaggcgctcagccagagctcaccggtgttcgcaccgggtgtggccaactacgtggcgatgggtgcggtggaatcgctgtgggatggcgatcgtgcccagcacctgctgcaggcgctgcgcacacccagcgacggcgatgcgcgcgccgcgctggctgcacagcgcggcggtcgtgcactggcggcggatgttgccgatgcggtggcccgcggcgatgcctga

SEQ ID NO: 509021 - DNA, 540 bp, Stenotrophomonas maltophilia
atgttcgatgtacctgctcacctgcacggcatcgcctgcgatcttcagcaacggctcgatcgcatccaggcgcagcccagcagcaacgactgccagctgctgatcgatggggaagcactgcgcttcccctatcgcctctacgcctacggcgcgcgactggaacgcctggcatcttccttgccgggcgatcagcgcctgctgtgcctgtgcctggccacccggcatcccgatggcttcctgcgacaacgggccgttgaggcattggggcaggcatcggcgccatgggtcctggcgttccacctggcgctgctcaacgagtacgtcgaagagatcgcgctgacgatcgaccagcatgcccggaggatcggcctggccgcttacgcccccctggtccgcgagaacgccgccttcttcgaacggtgcatgcagcgtgccgcaagctattggaatgcctaccacaggcaacggcatccagcgctgcgcacctttcccgcctaccgcctgctgctggagatgcgcagcgccagccgcgcgggctga

SEQ ID NO: 509022 - DNA, 543 bp, Stenotrophomonas maltophilia
atggcgcttatcgctctggatgaccaccgctgggccgaactccagcatgcctacggggctgcggatgacatcccggagctgctcgccaatctgagtattccgaagcgtgaaagatcggaagacgatccgattgaagacacctgggaagaattgtggagcagcttgtgccatcaaggggatgtctacagcgcttcgtttgcggctgtgccgcatattgtcaacgcattgccagttgacgctgactcagacgattggcagttcatttcccttgcacaatcgatagaaacgttgcgatgccaccgaggcattgaacttcctgctggattggagccggagtattcgcaggccattcagcgcatgggtaaacacgcggcaatgcttgtcgcgacgccgcaggaggcttggaaaacctcagcactctttgcagccattgctatcgcgcacggccacaccccaatggccagactgcataccgagattatgtccgatgagatggaccaggcagtcaatatcttcttcgcagaggtaacacgagacaactag

SEQ ID NO: 509023 - DNA, 369 bp, Stenotrophomonas maltophilia
atgcggtgggtgcggaccgttggtccgcacacccctgcaaagccgagcatgggctcggctctacagggtttgtcgcattcggcacgcgacgccatctaccgcctgctcggcagcccgcagcgcatccgccaggtggagccgctgatggtgagccgctgcggcggaaaagggcgcggcacgggccagtgcatggtcctgacacgcataaaccgggcaatcgccaggctggtcgtgctgcggcacgcaatcgagcgcgtgcgcgaggatggcgatgaggcgcagcagataggcaacgatgtgtgcgagggcctgctgctggcctgccgtgggctgtccgaatatgtggatgagcaggcgcaggtgacttga

SEQ ID NO: 509024 - DNA, 1167 bp, Stenotrophomonas maltophilia
atggcgcgagctgggcaacgcgcacagcatctgcacacgtcaatccggaatgccttcttgtcctttctcacgccactgcatggaccgacacatcttctactgctggccgtggcctgcacactgcctgcgcaggccttggcacagaatttttcgaccaaacgcgctgcagatctggagcggcctccacttcagatcttgcaggacgtcatcctgtgccgcgcgccgtcaagcagttcgtaccacatccgacaaggtttcatcgatggcctggatgacctgaatgggaatcctcgctatgccaactggagaggtactccacgatcggacggctcaggccttgagatcgagttgccggcagagatcagtgttttcggcatgaatacgcggaaggtccttctcaactatgcttcattctgggccatccttgagggtacgtcgcttgatgacgtgatccatcgcggaggactcaagcatagggccggactctatgacacccacgatatcgtgggcacccgacccgtggcgcttcggaccatgtcaactggcatcgccaatgtccgctccattgtcgcgcggacagtggacaactcgggcaacgtttatgttggctgcgacgatgtcagcgaatcccgcccgcgggcaggcgaatcagacgacttggatacatcggctgattaccactccaacgcgggcaggttgaagatcattggcgattacctctcgtgtcgtctggagcgcgcagacgccgctgattctgccgttgcgctggtccgcaattatcaccgcgtcccacccgcaacacggtggagtgggcaagcactcaaagacacgtcggagtggctgctgccggagcccatcatggtggacggcatctccgtttccaggatctggctctcaggtgaacacgcctatggtgtggtagaagcaacgccttcgagcgcgctggccggtcgctgggcaatgacggcgaccaaaagcgatgcggtcgaagcgcttttcgtacgcaggcttgacgatcgtgtcgcacccgacggctggatcgaggagcgcgagcgcattgcattccagtgggggcaaggcgccacattgacaggctgcagatatggccagtcctaccctgcgtatggatggtggccagaatgggacgagaatcgggagggcgattga

SEQ ID NO: 509025 - DNA, 864 bp, Stenotrophomonas maltophilia
gtgagaaacttccgccacacagcccgaccagatggaatgatgctgcgcgcgttggcgaggagtccgaaggccggaagttatccggaactcagggcttggcatgccagcattgctgctgcttacaacaactacatgataaagggtggctgcgcaaacagcttaaccccggtcgcactaagccacgagcttggcaagaggctgatcgcccactactcacacccaccaaaatcccacaaattcattacttcgtttagagaagaaacgggagctcacacttgtacaatgtgtggctcagcgtcttgcggcacgcttgatcatgttctacctaaggaaattttccctgaattcagtctctattctagaaatcttgtaccagcttgccagtgcaattctaagagaggcattcagtataaaggcggagatggggctcgaattctccacccctactttgactccgtgctatcacagaggctagttggttgcgacttcgaggatcacgggagagcgccctctctgaaaatcgtcaacctccttgaggttacgcacccgcagtacagctcagtacagtttcacattgagaatgttcttcttaagacacagataaagcgtgccttgcgccgtgactgggccaagctcttgcgcaagcctagcttggtcgtacgagaacttcgccggacgccacgcaaccgtaatcagctgacggaaatcctgaagaccgagttgagtattttggatgattcgtacgaaagctataacaactgggcatccatcttcataactggattgcttcaggcccatacgctgcagtggatatatgagcatttgagcaagcctgggcgaatggaagacgggcctctgctttag

SEQ ID NO: 509026 - DNA, 1632 bp, Stenotrophomonas maltophilia
atgactactgattcgatacgggatcagcatacttctgtatatttttgcagcagaaggccatccagaggcagagacggcgagctctgcatctatatttccccctcagaagacgactggaatgactacggaacccagctgagggctgttgcaaacgtctggtctggaaaagagttcgtccacgcccccgcgctaattgggttctatgggaaggacgcgaagtccgccaatggaagacttcgccttaaggagatcacctcaaagtcttcccgggccattcccgcaaacgaattcgatttcttcctaatgcttcctgcaatggagcattacagaattctcgttggttccatcggcccgaagcagagtaagtccatattaatggctgcacgtgatcttgcgacgtggtatcacttcaagccaagctcgacgtggatccgagttgcgatgcaagacgaagcatttagtctatcgttcatgagagactccgaggttcatttcgccttgtataatgcaggctatgttttacgcgggctggatcaagaggtgacagccaggcctgcgacatgctgggatcttaattttaagatttccagctctgagaacgagcattccattcgacttcgcttcgaccatagcgactttctaccgaggcgtatctcggtaataattggtaaaaatggtgttggcaagtcccaaagtcttcgtgcaatcgccaaaagcttgctccaggcagcacccggcttggtcgacagcaacggcggccgtccaagagttagccggcttattgcattttctccatctggcgaaggaaccgcgtccttcccagcagagtcggaaaagtatgccacttggtatcggaaatttccgattggcaggacaagccgtcagccgcaggatcgtcgcgccagcgaggttatcgtgaggctggcaaggtcgcaagcaaccattgccggagccactcggcttgagctcttccggagctcacttacagcgattactggctatgagcagcttgggctttcagttacttcaggtcttcccatactcttgagggatctacgcggcagcacatccatcgcgagtctaagaacaattgcgagaattgatcgcagtaaggctcccgtcagagtggttgatggagcagccctcccgctaagtagtggcgaggcttcttttgttacattcgcggctcagctttgcgactgcattgagaatggatctttggttcttctcgatgagcccgagactcatctgcacccgaacctgatcagctccttctgctccttgctcgagaagacactccgagcaaccggctcctcagctgtaattgccacccattctgcgtattttgttagagaagtctttagagaacaggttacggttataaaccgaactggaaattttacagagatcgtcaaaccccgactcagaaccttcggtgccgacattggagccatctcccgcttcgttttcggagaggaagacgaatctcgcctcgcccatcaactcatgaggcagattgtgtctcacgaggccgactgggatacggtttataccaagtacaaggacgaactctcaatggaattgcttggagcaattcgcgatgaaatggaatccaaggaagttagcgagtga

SEQ ID NO: 509027 - DNA, 354 bp, Stenotrophomonas maltophilia
atgaagcttctgatctatggcgctgtgctgctggcggcgctgtctgcggcgatcgccagccggcatgtacccaaggccgacttggaactgcggacgtttcgaaaggtgtccgacgctgaattttctgtcatgcgcgaggaagcggttcgacttgtgcgcgagggccgggtacagcacgcgcggtacgcgggggataggtacttcgaggtcagctgtcacagtgcacccgtgatgctggtggacaactctttggagcagcttgtgatcgtgctgtatgcggatagggagattgatgcttcctgcgtagtgccggtgctctcgcattggggcaagcgggttgtgccggaaccgtag

SEQ ID NO: 509028 - DNA, 636 bp, Stenotrophomonas maltophilia
atgacacttcgtaatcacctgctgaaggtcgccgccgtggcatgcgtgaccctgctggcggcctgccaaccgaccgacgcacctgcgccacaggctcccggcgcctcgcagaaggagaacgtcgtgccgatcgtccgatcgttcccgctgacagccatgcatgaaccgatggtggtcgatttcgaactgccaccgcccggcccgaatgcggcccccaccttgctgatcggcctgcgtgtgaaaggcaccgatgaagagcaggctgcgcaggctgcagaacgcctcgtgcgcgacgggctgtcggctgaggtgcggcttgagcgcatcgatgcggctggcaacccgccggtgccgctgacgcgccgccagttcaggggcttcgagccctcggagatggtggcagttggcccggatgggcgtgtgcccggcgtagtacccgacagtgctgatgacgcgtcgctggtggcggccggcctgtctgggccgggcgggcactatcgcaccgtgaccttcgcctgggccgagcaggtgacgcccgggcgctaccgcctgcgcatccagctgctgtcaccgccagccggattggaggctgttccatctgaactgcagttggcttacacacatcgcgccaagtag

SEQ ID NO: 509029 - DNA, 660 bp, Stenotrophomonas maltophilia
atggcctctgctgctacccgcttctgccgtatctgcggcccgggcccgatcctgctggtactgcaggtggtggcattgctggcggtggcgcttgccgccggcttcttccacacccgcgtggggttgctgctggagccggtggatgaagcctgtggtggcccggactctgccgcacgcatgcaggtggccgagcagctgatggcacgttccaccgcgttggcgccgtggcaaccgttgcagtgggttccgacggccggagtggttctggctctgctgggtgcgatgtcgatcagcatctatcggctgggtcgcttgtcggaacggttgcgatgggccaactgggggttgatggcactgcatgccgtgatcctggtgctggccactcgcgtcctgcatctgtatgacatggcgtggaccagcgtagccacgctttcgccggcagcgtgcctggtggagctgggtgagcaggggcggttgccgctggcccaggcgcagcaggtggtgttcgagattcttacccgcgcgcatgcaccattgctgcgcaatcccgatgaccttgccttggtgctggtcgcgttgatactggtggcaatggctgcaggattcatgctgtggcgggcgatcgtgcgcgaacgtcaggtgcagtcgcccagcccctga

SEQ ID NO: 509030 - DNA, 1059 bp, Stenotrophomonas maltophilia
atgcgcgtcctttttccgtctgtcttgtctgtcttgctcgccctgtcctctccgttagttgctgccgccaccacgatgcccgagggagcctacttccagcatcacgattgggtcgtggcctgtgacaacacccgtacctgccgtgccgccgggtacgccagtggcgaaaacagcaccttgagcgtgttgctgacccgcgatggtggcccccagcaaccggttcgtggcgaaatgtcgctgcggccgatcgacggccagcagtcgcccaagggtgccctgcacctgcgtatcaagcagcgtgatctgggcatgctgacgccggccaaggaggaaggcatgtacacgctgaacccggcacagaccaccgctctattgtcggcgctggtgcgcgatggcggcatcacggtgatcgatgctggcggccatgcatggccgctgtcggacaagggcgctgcagcggcgctgctgaaagccgatgacttccagggccgcgtgggcacggtgggcgcgctgatgcgcaagggcccggcggccgagagcagcgtgccggcggcgctgccaaagccggtgatacacaaggcgtcgatgcagttccctctgcccgataaccgggcgttcgccaagctcgcaacctcgcctgcattgcgtgcagcactgcgcgcgaccttgaaggaaccgagctgcgaaggactgctcgatgctgatcgggacacccccctcaagaacccgccactgggaatccagcgcctcgatgggaggcacctgctcgtcagcgtgcggtgctgggacgcggcctataacaccggcgatggttactgggtcatccgtgagcaagcgccttatcgggcagcttgggtgaccagtgacgccacctcctacgggaatggcgagatcatcgcttcccaatctgatcgctccgagcccagctgcaggtccgaacaatcatggacctgggatggcacccgcttcgttgcgacctcagctacggaaagcgtcttctgccgacatgcgctggacggaacctggcagttgcccatgcaggtcaccgatgtgcagtga

SEQ ID NO: 509031 - DNA, 1050 bp, Stenotrophomonas maltophilia
atgcgatttgctcgacgcgtatccctgctggtcttggcctggccgctggcatccgaagccatgccctcacccaaacacctggagtttcaccatctcgactggttcgtggcctgtgacaacacgcgaacctgccgcgcagtcggctacccagccgacgaggaaggcactctgagcgtacagctcactcgcaaaggcggccctggccaggccattcagggtcgactttcacttcagccggcagaaaatcaggcccaacccaaaggcgcgctacgtctgcatatccagcagcaggatgtcggggttcttgcgcccaccaagggcaaaggcacgcacatcctgaatgccacgcagaccagcgcactgttgtccgcactggtacgcgacggcggaatcagtgtgaccgatgctgccggccaccgttggccgctgtcggacaagggtgccgcagcggtgctgctgaaaatcgatgagcaccagggccgcctcggcactcccggggcggtgatgcgcaagggcagcctgcctgaaacccgcgttcccgcggcaccgccgatgccggtggtgcgcaagcccactactccgaactcaaacctgcacgaccctgcattggcacgactggccatctcgccggctctgcgctcagccctgctcaccacgcccaacgccgacggctgcgaaggcctgatggacgctgatgccgattccccactaagcaattccccgctgaaggtccaccgcttggacgcacaacatgtgcttgtcagtgttccctgctggcgtgccgcctacaacttcggcgacggctactggatcgcccgcacacgggcaccctttcggccgcaactggtaaccgacgaagcgaccggctacgacaacggccagatcacagcttcaaagctggggcgcagcctcggcgattgcatatggtcggcaacctggacgtggaacggaaccgcctttgtcgctacatcggaaatggcagtcggcctatgccgcggcgtacccggcgacacttgggaactgcctagactggtcagcgagatccgctga

SEQ ID NO: 509032 - DNA, 546 bp, Stenotrophomonas maltophilia
gtgccgactaagcgcctggcgctgatcgcctgcctgtccctgcttgcggcgtgttcgccgcaggcagcggacagcgctgccgatgccgccccgggcagcacgcaggtcgaaccggccgtgacggccgcggcggcggcggaggcaccggccgccgtggaggccaccaccgaagcggagccatcgaccggtctgccctcgggcgacgatgcgctggacaaggcacgtgcggcagccggctgtccggtccctgaggatgtgtatgacgtcgaggacgtgcgcatctactgcacgatgccggccgatgtgcaggccttcctcgcacgcgagaacacctgccagcatttcgccggcgaagagccgtacgacgacgagcgtcgccgcgaactggaagaggccagcgcgaagtactgcgagggccgcgagaagatcttcactgatctggtcgcgcgtcatcgcggtgactgtgcgatccgtgatgcgctgatcgcgatcaacggccgctacgatctggtgttcgagctggacctgaagacctgcgagggctga

SEQ ID NO: 509033 - DNA, 348 bp, Stenotrophomonas maltophilia
atgaagaagatcaccagagtgcttctgctggctggcctgggcctgctggccaatgttgcttgggccgggaccacgccctccagcacgcagtgctccccacaggcggtagcgcaggccaagcggttgctggccttccataccgatggagatgagcgcgcagaggtggaggggccggcgctgcctctgccgtccatcgtcaatcccgccgattccaaacaacgcttcgacgtgctggaagtgtggggctatgtctacaggggaagctatcgcatgcgtctggagtactaccgctccggtggagggtgtgtgctgatggggcaggaaattctcgagatcgctcgtctttga

SEQ ID NO: 509034 - DNA, 492 bp, Stenotrophomonas maltophilia
atggcaaccaagaaagctgcgaagaagaagcccgccgccaagaaagcggtgaagaaggtcgcgaagaaggccgctgccaagaaggcagtgaagaaggtcgcgaagaaggcgaccgccaagaaggcagtgaagaaggctgcgaagaaggtcgccaagaaggccactgcgaagaaggcagtgaagaaggcggcaaagaaggtagccaagaagtccactgccaagaaggctgtcaagaagaccgcgaagaaggccgtcaagaaggtagccaagaaggccaccaagaagactgccaagaaggcaacggcccgcaagcctgccaagaaggccgtcaagaagactgccaagaaggcagtaaagaagaccgcgaagaaggccaccaagaaggctgccccgaagaaggcagcgaagaaggttgccaagcgcaagccggccgcccgcaagaagaaggccgctccggtcgctctgccggcaaccccggcgccgctgatctaa

SEQ ID NO: 509035 - DNA, 462 bp, Stenotrophomonas maltophilia
atgaaaacccaagccctcccccaaaccgccctgattgccccagccctcgccgcgctggcccgttacgaccgccgccaggcacgtatcgaatacccggccggtcgccgcgacaacggcggccgctggtatgccgccgaccgcgacgcggacgtgctggcagacgtgcgcgagccgtcgcgctcttggccgctgtcgcagttgaaggcctgcggctcgctggcccactgcgagcgctacgaggacgccgaccacggcgctgtgctggccgtgcgccgcgtgttgaaggccttgggcatccaagccaacgacccggcagcccgcgaggcgctgggcctgcctgcgctgaccggcgacgccgccaaggcgcaagccggcacctgggcggtgttcaccctgcgcgccgagcgcaacgccgcctgggaacaggcctaccgcgcgcccctggcgctggtcgtcgtttga

SEQ ID NO: 509036 - DNA, 648 bp, Stenotrophomonas maltophilia
atgaatggcaaaccgaccgattccgaatgcctttttagagcctctgcgtttggtcacgcttcgacggtttccgcgctgattgctggtggcgctgaccccaacgaacgcgacgaatacgggtgcactccgctctattttgcatctgggggtggccacgcttcgacggtttccgcgctgattgccggtggcgctgaccccaacctcgcgggcaatgagggctgggcacctattcaccacgcggccaatctgttcgataaaaacgtggtggcttcgcttctggccggtggcgcgaacccgaacgctcggctggatgatggcagaactcccctgcacctggtcgccacgcaaaaaaataccgacgtcatggaggtgctcctcgcgggaggtgccgacccaaccgcgcgttgcgagcgtggccgcacaccacgcgattgtagccatgggctacggggccacgcactgctagacgctgcatatcgtgcggctgaactagatgcagcgttgccgcctgccgtgtcgcgcctggaagcgttggaggcggaaaacgcgcaactgcgccagcagcgcgacgcgttgcgcggtgccctggaaggcgtgctgtcgagcgagccggccccggtcgtcctcccgcccaagaagcggttttaa

SEQ ID NO: 509037 - DNA, 381 bp, Stenotrophomonas maltophilia
atgacccccgagcaacgcgaacgcatccgcctgctcacgctggacggcctgccggcgtcgcgcattgccaccctcatgggcttgcacagcaagcccattgtttcgtgccagcgcggcctgggcttggcccacgttgcggcgggaaacgcccgccgcttcaaggtggcgggcctgctgaccgccagcccgccgaagcaacgcgccaccctttttgccgtgcccgtcgatttctcgccctctcctgccggcgacttcgtgcggatgccttgcccccctgattcgctgcctgttgtgttggtcccgtccgtgggtcacgcgccaagcgcgccgctgttttctcccccacctggaccaccaccatgcccgagattttccgactga

SEQ ID NO: 509038 - DNA, 327 bp, Stenotrophomonas maltophilia
atgcccgagattttccgactgattggcgaacccgttttcgccggattcgctgccgacccggacggcttttttgaagaagacgcactgaccgaacgcgaagaaatcggcgcgtccgccgtcgtggacgtgagccgcgacgaacggggcatctaccgcctggaagaaccgatttttgatgacgtgctgccgggcaccgaacgcatgaccatggacgaagccctggacctggtgcgctcgatgttgctggaaggtggcctggtcacgctgcgccccgatatcactgacagcgagttgcttgataacgagcaacggcgagggggcgagtga

SEQ ID NO: 509039 - DNA, 1281 bp, Stenotrophomonas maltophilia
atggccacggcgaagaagaagccgcgcaaagcggccagcggcagcagcccgaaacagcagtgggacgaccacgccaagcgcctggcggataccaccatcgccgcgctggaaagcggcaacctgccgcgatggttgaagccttggaaagccggcgaaccgcgcgtgggcggcctgccgttcaacccggtgacacgcacggtttacaagggcggaaacgtgcccgccttgctcatgcgcatggatgagttgggcagcgatgacccgcgtttctacacctacgccggagcggtgcaagtcggtggccaggtgcgcaagggagagaaatcgacagagattgtcagcgttcgccgttggagcaaacgcgaggacggagccgatggcgacgacaacgcgccaggcgatgacgctaaggtcaaaaccggcctggtgttccgcttccccaaggtgttccacgcctcgcaaatcgacggcttgccgccatacacgccaccgcccccgccgccggaagcctggcggcatgcagcctgcgaagcggtcctggaaaaggccggcgttccgattcaccacggcgcgggcgaccgtgcgttttaccgccccagcacggatgagatttttctaccggaccagtcgcagttcccaacgcgcgatggctatttcgccaccgcgttgcatgaggctggccacgccacgggccattcgtcgcgcttggcgcgcgacctctccgggtcgttcgggtcggagtcctacgcgcgcgaagaactgcgggccgagttcgcctcttacatggcgggggaatcgctgggcattggccacgaccctggccaacaccacgcctacatcgccagttgggtgaaggtgctgaaagaagatccggccgagctcatgcgcgccgctgcggacgcccagagaatcgtggagttcctgggcattgagccaccggctccggaagcggtggccaacctggccgctgaccaggcgcaggcgcaggcctggcgtgccgagttcaacagcgaactgctgacgggctacgcgctcaacatcgaagacgccggcattgatgacaccgtgttggcccgctatgccgacctgtcggcgcgtgaggcagtccagacctacgccgacgactacgatttgaccccggtcagcatctgggacatgcgccaggaaaacgtggccctgcggagccagcgcgatggcctcaaatcggcccttcaacgcgtcctgggcgacgagcccgagcctgcgcctactgctccccagcccaagggggtgagcctatga

SEQ ID NO: 509040 - DNA, 1551 bp, Stenotrophomonas maltophilia
atgagccgccgtcctacctacgcccagatagccgcagatttccgcctttggcaggaatacgcggacccgaacggcaccatggaccaaccggcgttcgatgaaacgcccatggatgagcggctgggcctgctgaaacaggcctttggtcccgaactgcccgccttggaaccgggcttctacggcgtgaccgaactacaccgggccacctgggacggggacgtgggccaggtccgccaactgctcgcccagggcatgcatgtggatgcggccgacctggacggcgacacgccgttgctggccgccgcacgtaacgggcacgaacgcctgttagacgtgctgctggaagccggcgcggacccgttcctggaaaaccatgagggcgaatcgcccagccaatacctcatcgttcaaagccgtgtggtggacccggttcaccacgccgttgcatcgggcgataccgccacgttggccgacctcatcgacagcggggccaacctgcgccggttcgacaagaacgggaacacgccggcacacgtggccttggcccaggcctatcgttatgacctgggcctggaccgcatcgacgtcgacacgaaacagcgcgccgtgctcgacatgctattgcgtgcggaccctgacctggtggacgtgcccaacgggcagcaccgggaaacgcttcaatcccaggtggacgccatggacctggcaggctgccccagcccaccgctggccgccgccaatccgcaagaagccatgtgggtggcgctgttcaagggcgacgctgcggaactggccgacgtgttgaaccgttgccacgcagacgtgaaccagcgcaccagcgacggggccacgcccctgcacgtcgcagccaagaatggccgggctgcccaggtcaaaaccttgctggcacaccaggccgacccgaccgctgcctggtgcggcatgacgcccctgtatgtggccacatcggcggggcacgccaacaccatgggcgtgctgctcaacgcgggtagcgacccgctggcggctcctgcaggaggctgcgcgctccacgtggccgccgagcgccgcgaccccgccgcgctggccctgctcctggacaacggcctggcaaccgtggacccccgggacgaaagcaccggccagacgccgctgcacgtggccgccaggcgaggcaacggcgaggcctgccgcctgctggtggcccatggggccagcctggacgtggccgaccacctgggcaggacggcgctggaccatgccaagggcgacgcggcggtgctggatgccatcaccctgggacagaccgaccggcaaacgctggctggggctcctgtggggcccgtggtggccatcgccagcccatccccttccggtggtggctccgatgccgagctggacgccctgcgggcgcgtgtggcggaactggaagccgccaacgcgggcctgctggccgaccggcagcagttgaaagatgcgctgcgcgacgtcttggcatctgccaaacctgcactatccccaagcagccgaaaccttggcggaccgcaatga

SEQ ID NO: 509041 - DNA, 1599 bp, Stenotrophomonas maltophilia
atgattccccgccgcccaatgcacaccctcaaacccaaccgcttggcttctggcattcggcgcgcgcggggcatcaccctcctggaactgctcctgggcttgggcgctgcatcggtcatcaccacggccgtgttcctggcgttccagcccacggacgtgcgggcagaggtccagcaaacccagttcgacttgtccgacacggccacgcgcatcgagcgctcgttgggtctgaccggcaactttgccgggctggacaacagcctggtgaccggcgaccgattgatgcccagccgcctctatcgcaacggccgcttggaaaacgcgtggggcggcacggtgactttcaccgacttcaccgtctcgcgccctgctgacgcgttcctggtgcggttgcgagacgtgcccaaggccgcctgcgtgccgctggtgtcttcgctggcgggcaacgtgtgggatgcccgggtgggcagtgaatcggtgttccctgataagcggttcgaccctgccaccaccgcgtccacgtgtgagcgcctgggcggcgatgaggtgtcatttgtgttctattccggcctggtggccggcagcgccgtcgccacgccctcgctgaccttgccaccggctccgccgagtggtgccaaccctcccgcccccaccacgcccacgggccccgtggcaggggctcccagcgtggacgatgccacgcctggcactcctgggacggcgagccctggcatgcccgtggctccgcctcctgttgctccggtgacaccagcgccggcaccggtcatcccgggcccaggcgcatccatcccgccgtccaatccgacgaatccgccggcactgtcccgctgcaccataccggggccggactatcaaaacgtggccacctgccccgccggcacgtggggcatggtccagcagacgcgcacctggtcgtgtccagaggcctgggcctcggcagagccaggcccatggtcggacaccggcaacacgtgcaccgcgtgcccggggcccgaaacggagagcaccacccagtgggttggcgcgtcgcaggcctgcccggctggccaaacgggcgcgcacacgtgggaagcggaacaggtggccacgcgtcagcgttcctaccactgcccagccggcaccacggttgcacctggtcccacttatgggggctggtctgcctggaacgtcacgggcaaccggcgcagtgaatcgaacacctgcgttaccgtggcccctgtccttacccttgatgccacctgtagttttacgggggcacaaaccaatcaaggccctgaaacctggaacggcggttgtatccagcccggccagttctacatgcgcacctcaccagtttccgctgtgttctggttgcgttctagcgttgatttgtcgcaatacgccatccagtggtccggcgactgcgtgggcaatgcgacctcgtgcaccgctgagcaagtgcgggtttccgtcaactcaccccatgacaagacggcaacggtgacggtgacccaccgcgccacgggtcagcagttctctagaaccgtgaccgcgcaatggcgtgttcaaggcatcgacaagggcggtggcggcaattaa

SEQ ID NO: 509042 - DNA, 579 bp, Stenotrophomonas maltophilia
atgaaccgttttgctctcgccctcgctgcctttgcctcgctggccttcgcgaccgctgccgtcgctggtgaggtggaaaaggtggccgtcccgaacgtggggaccatcacctacgaacacctgtttgatgccgtcagtgaagccagcgaggggctggatgacttcatggcccgcatctcgccccgcttgcgtgcgttctcggatgaaaccggctttgaggcgtgcggcgtggtggcacgtaacgacgatggccgctttgccgtggccatcggaacaaaccactctcacgtggcttgcgtgaacttcgccagcaaggttccccaaggctttcagccgacgatggaaaccatccacagccatggcggtgaaaaaacgtttgccgccagtgccacggacattgcgttgctgggcaaggacgcttttggttcccgctcgcgcacgtcgctccgcgtgacaggacagaacctgcacatgttcagccagacggattaccacggcggtgccggttacctggccaccccgaacggggccatctatcagaacggccctaagagcgtgcgggaagtggcggcgcgttaa

SEQ ID NO: 509043 - DNA, 267 bp, Stenotrophomonas maltophilia
atgcattcccccctcttcaagcacacaacccagcccgccatcgatgacacccgggttgtcatgaaagccgcgattccccgggaacgcgatggcgtgacgttctcaaagcaggcgttcttcttgctccccgtttcgctgtccgaacgggtcaaggcgagcgtgcacggtgcacctgggccgtcgatggtggctctgattgactgggcgctggccgagctcgaaagccgtggtgaaacgctggtggttgaagagaatccaggcgcttga

SEQ ID NO: 509044 - DNA, 378 bp, Stenotrophomonas maltophilia
atgccacccaaaaaactccccaaaggcgtgactcgacggaccgatggggtgctggaaaagctcactccccatttcgatattgggcaggtcaaagcggtcgttgcccaacacggggcgaagtgctttacgttcagcgcacaacaaggcttccaagcaatgggcctcagcctcgccgatgccattgcttctattgctggcatggatggccctggttgcttctacaaggccatgaccacgtatcacgatgaaaccttgtggcaagacgtctaccacgtctccacaccgaaagggttggcatacgtgaagttccaaatcgtgttgcctccacccggctctcatcagagcccaaagctcgttatttcattcaaggcgaaatga

SEQ ID NO: 509045 - DNA, 789 bp, Stenotrophomonas maltophilia
atgaacaccaagaccacgaacaccaacaccctgccccgcctcgcggtcggtcagtgtcctgtgtgcggttcggccggttcgctggtgcatttccatggagaagcgttccccgtcgttgtgggcgacttgtccgggtccgttggcgacctttcgggcgaccgttgccaggtgtgcgaggaagttttttttgacgacagcagcgcccagcgttttgccgatgcgggcgacgcgctggtgatgcaatcacgcaaggaagaaggtgcgcacctcaaggccatgcgcaagcgcttgggtctgacccaaggcgaagtcggcctgttggttggcggcggccacaacggcgtatcgcggtatgaaagcggccaatccgacccaggtccggcggcgttcaacctgctgcatctgctggacaaaaaccccttgctggccggcgaactgcccggggtcgtggtcacgaaaatcaacacaaagacgttccgccatcaccttcatgagcgcatgggggcgaaaggtgccatggccctgagcgcaaaaggccagaagggcgggaagacggtcaagcccaacaaggtcatcaccgtggccggccagcaagtggtcatcaatgtggacgcttctgccgtcctcggcactgtcagccgggcaggtaagcgacacgtggccggttccaaagtcaaacaggtggacgtgggcaggctggtggcggcgagggctgctgcagaacggccagttggccagtcaaagcgcaatgctgcggccaaatccgcggttgccaagaagagccgctga

SEQ ID NO: 509046 - DNA, 330 bp, Stenotrophomonas maltophilia
atgccgaacaagcaaggcgttgaccggctggccgaactggcccgagaaatgatgaggtccgacgacctggacacccaggagcggggcgaacggctcatgtttgaggcggaccggcagcgcggtgagattcccacgatgaaagacccgcccgggctcgtcaaacggctcctgggctcgcttgtcctggtgttcgggggcacggccttcctatgggccacagcgggctggaaagtcgccctgggcgtgttcctggtggcttggggcatcgaactgcggttgcaggtcaacgaggccctgacgaagcgcctgcgagagacgctgacctggtag

SEQ ID NO: 509047 - DNA, 420 bp, Stenotrophomonas maltophilia
atgagcctgcctaccgttgccgccgttcaaaaaccgccaggcattgccatcggtcccgtggtgttcccagtggaacaggaccacaccacccgccaggtctatgccgagattcctggggtgggcaaggttgtcgctgcggacctcaatgccctggcggcccaggtggaagggtatttggctggcatggccaagaaggtggagcgcatcacccaggaacgccgggccgatgaactggccaaggccaaggccaagcgcgacgccgcaagggatgcgatgcggcaaaagctcgaccgagacacggccaaggccttccagcgtgaggcgctggcctacgcgttcatggccctgttgttcgtgagcattgccgcgccgcagagtgcaccagccgcaacgacggcagcacgccagaaactgggttaa

SEQ ID NO: 509048 - DNA, 2205 bp, Stenotrophomonas maltophilia
atggctgcacccatgaccaccaaacccgaaacaaacaccgatgaaaccctttggggaaccaaagaagacgagatgcgcctgctgatgcaggacgaagaagagttgacgccgccaagtgacgacccgttgtcgtccggccgtgtcatctacgacggcccgatgggtcgcatcgcctcgtcggggttttggaaagaagacaaggagggggcttggtattgcgtccaccccttgccgctctggccggtggaaatcatcgaggccgccgcgccggacggctctaaatcggtctacgtgcgcgtgcgcttcgcccgcatccacggcggggttggggaagtcaaactgccgctgggtgaactgggcggcttcggccgcaaagaccaccccctggtgcgcgccggttggaagccccccaccaacaagcgggcggcagcggttgaagaaatgctgacctactgcatcaaggaacattccgaacgcagggtgctgcccacccgcgagggctacgaaacggccggttgggtgtcgcacgaccagcacgtgcgccctggcatggacgtttacgtgggcccggcaccgggctccactgtcaccgccggcaccaaggtggtatggcagaagaccatgaccgaactgatggaagacagcggaatcctggcgttctgcgtcgctgccgccttgggctctatgttccgtggagtggtgccattgccccactccaccagccacatcctcaacctgaccggcgcgccttcgcggggcaagaccacgattttaaaagccgtttcgtcgctggccggcgtgcctgacaagccctcttacgtcgatggggccagcaccgcccgaggcttggaaaaccgtttggcatcgagcaaccacgggtggttgttggtggacgaaatggaccagttgttgatgaaggacgcggacggcggggccaccaccctgatgttcatttccaacggtggcggccgcgagaaggccacgcagacggggggcaccatcaccggggccacctggacggtcacggtgctgtccactggcaacaaagcgctgctggacctggccgccagcgcgaagaagggcgaagcgctgaccacccgcatttttgagctcgacattttggacggcgacctgacgaccttcactgaggtgtcggcgttgcccagtcgcctgcatgcgctgtcacagaaccacggctggggttacccggccgccgtggaagccatccgcagccgtcgaggccattgggtcgaaacgttctacacctacgatgaagaactgcgcggcaacccgcgtttgtcggcgattttcagcgaccaagcgcgcctgctggcgttctttgaactggcgatgttgggcgctgacctggccggcgaaatcatcagtgagacggctggggccgctgcgcacgaagccatcagcgcggccatggcgcgctatgagcaggagcctgaaaacgccatcgggcaatcgcttcaccgccaacacaaacttctgctagacctgcatgagtggttgtcattgaacgcgggccggttcctctggaaaggctacgcccaccgggagccggtgcgacgttacaaagacaccgccgggcaggactacgttgacgtgtcggaagagcaacggcagaccgaacaagcccgccacctggccagcatggccatgggcaacgcacgcggggcgctggggcagattcatcaggtccgtttgatggattccgaaacggattttgaagggacgctggtgctgggcgcggccgccctggatgagttggagcgcagtgccggcatcgaccgggccgaactgaccacggccctcaaaacgtttggcctgctccaaaccaacgagaaagaccgcgacggttacaagttgtccacgtcgctggcccggcaactgggcggcggctcccgtggcctcaaaatgctgctgcgcaaacccgacctggccgagcaagcccggtcgttggcctcgcatgcaaagcggggggcatggcgtccggccggcttggccgattcggacgactacgaggcccaaaacggggatctctggcacacccaggaccaacgcgctctccaagcccatggcatcgccgaacaggggcgcgatagcatggacgaacggctggaaatccccgggtttgaagacgttcccagcctggacgatgccgaacacattgcacgactctttgagggaacgccatga

SEQ ID NO: 509049 - DNA, 1011 bp, Stenotrophomonas maltophilia
atgaaaatggccaccccatccacgccgaccgctgacgatgaggtggccgcccttcttgcacaggccgatgcgctggtggatgcccgcaagtctggcggtccgccggaaccgccgaaggtgcaatgggaagacgtggacttgctgaacgaagtgcggcgcagcgtgctgttcttccgcccctacgccacgtttgaccgccctctgcccacgtttgaagaggtgacagtgacaacagagggcgcattgatggatggccaagcccaagcgtggcgcagccgtgaccgtgaccccgccggcccatggttggccctggcgttatcgcctcgccacgcagtggctggcattgagaccgacgtggtgggctgctggcgtcatttctggcgcatctggcgcgccgaactcgtggatggcgaggactgggaagtgcaggccgggagccacccggccgcccaggaatggttgcgcctggcgcttcaagaagcggtcacagggcgcggcgttgtccgggtattcccggcgcacaccgacgtggtggcgataaaagaaacccaagaactggccgatgccggcagggcgctgggatacatgagtgcctggcggcgtgccaacggggaacctcggcgtaaagagccgcccaaacgctcgctgcccgaaatctacgccgaagcggtggcggccgttcaagaagccaacgccttgtttcatgccgctcaggcggccgtcgacgtcaagcgagcgcaacgggcagaggttcgtcgccgtcgaacctccgaacggctggcccaaccagttgccacgtggctgcatgaaaaggggtggcggcagtcgccagcactgacagcactggaccgggaactaaggcaggcgaacgccgaggtgcaaagcgccaaggccatggaagaagaagcccgcgccgcactgggacgccaacaggcactgcgggacgaggcgggcacggggtggaaaaaggcccttgccgatgaggcgaatagtgctacaaaggatggatag

SEQ ID NO: 509050 - DNA, 1884 bp, Stenotrophomonas maltophilia
atgtccatcacgctcaacggttccgccctcggcacccaacaaatccgcagcctggccaaaaccgattcctggcagtcgccgagtgaatacgtggaccccaccaccggcaaggtctaccgggccgagacgctgggcgaactgttggagcagttggaccaggcaggggtgccgctgttcgataacgaagaaatgcggaagcgcgggctgacgaccccgggcgggaaggccccgggtggggacgatgacagccagtgggaacgcctgctgattgacctgtcggcgtatcagaacccggagcgggcccgggaaatcatcctggacgcgctgcgcaacccccaagccaccgcgaccaagaatcaagggcaaggccgggtggcggattaccacatgcgcggcaagcgcgcggtcatcgcgcacgaaatccaccacgacgacgagcgcggcccccacttcatggcccaggtgcacaccacggcgctggaccaggccggcaacggtgtaacgcccaagttttcgttcacccgtggcgagttccgccaagcgattctgcgcgacatcaatcagcggctggccgaagagggcatgagcggcctggtgttccgcatccgcgacgaaaccggggcgaaggtggcagagcgcaaggcgcagttgaacgccgaggaatcggacgaatacaaggccgcagcggagaagggcgagttgcccccgctgctggacgaagacagtgccgacgaagtggccgagcagttgccgttgtccacgcgcaaagagacgctgcgcaaggcggcccaggaagtgggcgcggaagcggccaacctttacgcccaggcccaggcgcttcaaaagcagaacgccatctaccggggcgcgctccgggccctggaaaaagaagaatcgttggttgctcgcattggccacttggagaaccaggtgcaggccatccagcagcaggcggccgaagctgaagcggccaatgccgccacgattgccgaacaagccacgctggtggcccaagccgttgaacacgcggaaagaaccacttttgagcttgaaacgacccaacagcaggccgcgaagttgtccgaagcgctggacgacaccaaggccaagttggtcgaagccgaaggcgaactgtccacggccagcgagcaggtggagcagttggaaaaccgcctggaatcgatgggcaaaacgctggccagcgtcgagcaggagcgcaacgactaccgcacccaggccgctggcctggacaaggaactgaccgccgaacgcgaggcccgcgcgcaggaccagcaggcccacgccgccacggtcgagaagttgcgcggcgaactggtggacgtaaagcaacaggccgaagccgacctggccaccgttcggggcgagttgaaggccgagcaggccgcgcgccaggcatccgcgcaggagcttgaaaaagtttctgcggccttggccagcgagaagcaggcccgcagcaacgccgaacgcgacctggatgggaccaagcgccagttgtcgcaagccatcgagcagggcaaaacgcagtttgaagcccgcgagaaggccgaggctgccaacgcctcgctgcgcgaagaactggccgccttgaaggcccagcaagcggcgcaggcccagcagttggccagcgaacaagccgcccgcgcgcaagccgagcaggccgcccgtgacgccctggctggcaaggcaacggccgaagcccagcgcgacgcccgtcccacccccgaagccatggcagaggtgcaggccgcactggccaagacgcagggccagcgcgacgaactgcgcgaacgtctggaacggctgctggccaacgcgccggccccgggcaataacggcccctccggcaacaccccgggcgcatga

SEQ ID NO: 509051 - DNA, 357 bp, Stenotrophomonas maltophilia
atgcataagaaagcccccgccaccaagaagccatccaccgattgggccgcagaacttggcaacctgggcaacgtcgccgaggaagtggccttcaagcagacgtccgccgcgttcgaccatgagttgagcatgcgcggccctggggctcccttggcccaggtccaagcgaagatccgggccggtgctggctccggcgtgaccaacgtcctggtgcgggttcccaacgacaccttggaacgcatcaaaacccacgtcatcggcagccacacgtccgccgtggcagtgctggcggacgccatgctggactacctggaatccagcggccagaccttggtgagccgcgaaaaggacaagtga

SEQ ID NO: 509052 - DNA, 651 bp, Stenotrophomonas maltophilia
atgatgacccccgcaaaaccccaggcagttcccaaagccatccgcgtggtcaacgccaagggtggtgtgggcaaaaccatgtgttccctccaagtcgcgggcgcgctggcttccgctggtcagaaagtccaactgattgacctggacccccagggcggttctatgacctgggcgggcatcgctcgcagcaagggcagggaacccaccttccgcgtcggcacctcgccggtcgctggctacgactggacggtatacgaccacccgccgggcctgccgcagtccgtgaacctggccggggaagtggccctggttcccaccgtgatgaccaaaggcgattgggccgccacggtccggttcatccaggagttgcaggcccaaaacgcccgcttcctagtgctgcccaaccgcgtcgaaaacacctctgaccagcaggacatgatggcccagttgtttcctgaacaacccttcctgccgaagcgttcaggcctggtccgcgccttcaacaacggcgtaacggtctacgacgaaaagaacggcgtcccgcttggccagcagattcgccaagagttcgatgtggtcatggccgcactgatggcgctgttgaagggtgaaccttcacgccgctactcccccaacggcctcccgctttaa

SEQ ID NO: 509053 - DNA, 354 bp, Stenotrophomonas maltophilia
atgcttgatgcgcttcactctctcgttgattactacgccgacttggtggaccaggaacgccggttgatggccgccgtcttggcactgcccttcctcctggttctgctggcgttgtccctttgggtcgcctggctggaacgtggggaacccgggcagggcgacgccggcagcacggggacttcttggaccgcctcccaagagccccagcgtgggacaccgccgacacccccggaacgttcggtttggcagttacacccgcaaagcatccgatttctgaaagcacacggggaaaccatcgccttggtcctgttctacatgtcggccttggccgtggcccgtcagttcgtgaactga

SEQ ID NO: 509054 - DNA, 216 bp, Stenotrophomonas maltophilia
atggcccatcgcactcacttcaacatcgccgcccacactggccccatcacgggacgctttgaagtggacattgaccccaaggttcgcgcgaaggaagcagccgcccgcgacatgttcgcaaggtatgcggaaagagcccgcacgcttcaatcgcttcctgtgaaagacgccgactccgccattgcggcctggctgaaccccacggctattaaataa

SEQ ID NO: 509055 - DNA, 372 bp, Stenotrophomonas maltophilia
atggcactgggaacatgtgcggaatgcgggcatgcagtgagttcaaccgcagtagcctgcccgggatgcggagcggtcacggggaacgcggcgattgttgccccgccggtaaaaagcggcggcggcatcggccgcgtgctgcttttcttgttcttgggcggcctcggcatcctcgttttcatgattgttctgggctcaatcattggctcaacacccgaaggcaaggaacggcagcgggaacgcgatgccattgagttgtgctggaaggactacgagcgcaagagcttcgaccctggcaccaagcttttcattgccaccgcgtgcgaaaagatggaagccgatttccgcgccaagcacggccgcaacccgtaa

SEQ ID NO: 509056 - DNA, 306 bp, Stenotrophomonas maltophilia
atggcccccattcccaccttgccaaacgtgacgaatcgaacccgcgaccgcttgcggcgcggcgacgaatacgcccgaatccttgaccggttggaacgccaggcgatggtagaccccgacgaagaactgcgccggcaggcctcgtttggaaacgccgaggcggttgccgcgctgctggacgtgggggtgccggcgacgggcaccgccctgcggtttgctctgctggccaggggcgcagacggcggcctgaccgcccggctcatcttcgacgccgggggcaggattccggtggacctgttgcactga

SEQ ID NO: 509057 - DNA, 3081 bp, Stenotrophomonas maltophilia
atgaaccgttgcccgccagcaaaggggtgcgccgtgtctgagcctgccaacctgcggggccgtcgccccgccaaaacgggccctttggtgagcggtggtcgcgtgcagttcgttgacaccgccgaggccgtggaagagttccgcgacactgccgaggcaatcggccggaagcccgccgactgcgccagggaagccctgcgcgactggaccgcgaaaacccgcgcggtctacgacctggggaaatatgcactgttcctgttgctggcctgcttctcgcctgcggccttcgctttcgacgtgccggaaaccgacctttccaaaaaactgttcctggacaagttgttcccggaactgacgggtgccggcggtgtgtcgcaactggccgcgcccatcggtgcgttcaactctgccgtgctgattgtcgccggcatcctggtgttctacaccctgttggcaggcacgctttccacggcgcacgatggcgagttgctgggcaaaaagtggtcctcgatgtggattcccatccggaccaccttgggcgcggctgccatcatgccgacgtttggcggcttctccctggtgcaggccatggttatctggctggcgctccaaggcgtgggcattgccaaccaggtctggggcgcatttgccgacaatcccatggcaggcgcggcttacgttccgccctctgaaatcaaacgccttgagcggacggctgggagcctgttcctcatccacgtctgccgcgtcgggatgaatgaagacgggaagttgaccaccgacctctcaccggttgggttgcgccccttggttgtgaatatgaagcctgtcgagacgagcagcaaggtggggtttgaagccatctcggattcgggcttttcttgcggccgggccatgttcgataagcccacgggcaaagagtttcccgctacagacaacaccgccgcgtttgctcgctctttgattgaccccaacgcgttgtccaagcaagtgttccccacgcacgtggcggcgctcaacgccttgaatgcgcgcatgtctgcgttggccgaggcctatgcgaagagccgatatgacaacaatgggtttggcaactctgcgcttgtagcgccggaaatcaaggccgcagcgcaggcctactctgatgccatccgcgcttcggtgaacgcccaagtggggactcttcaagatgccggtttcagccaagccatgaagcaagacggctggatggtcaccggggcgtggttcgtcaaactggcgcactcgcaggacgccatcgccagcgctacttcccgctctgctgaaatcgctgtccaggacaatatgggcaggtatgcacacgcccagttgctttgggccgaagccagccaagcagtgcaagacgttgaagccccaggggttgggcaggtcggatctccgcgctctaatgaactcatcgacaagcttttgggctgggtcatggaagccggtcggggcgtggaccctgatggaatgagtgggcacccgctcgtcgccacaaagaacaccggtgagatgatgaagtcgtggggtatcggcatctacaccgtgggcagcattgcactgacagcggccggcgttattgcgggcaatgtctacggcaaggggctgggtagcgatatttcgctcatggttgtcgttgatttgctcaccggcccgttctttgcggtggttggccccctggtcctaatgggggcagttctgtcgtctgtcatcccgatgattccctacgtcctttggattggagtggttctggggtggatggtgctggtcgttgaagcagtcatcgcatcgccgctttgggccgtggcccacttggctcccgacggggacggcgtggtggggcgtggtggccagggctacatgctggtgctgtcactgaccttgcggccggccttgatggtgctgggtttcatctgtgccgtggccatcttagtgcccatcggtgagttgttgaactccacgtttgccgctgtgttccgcatgagtgtcatgcaagacaacgcgtcttggggtgggtttatcaatgtcgtgatgggtctggccatctattcagtgctgatgattactgtcatgacaaaggtgtttgccctcatccacaccattcccgatagcgtgctgcgctggattggtggttctgctgataacgtgctggggagcaatgctcaaccactggccggtgccgttgagggccaatccacggcgatgctgggtgccggcgttgccgctggcgcggtgactcaaaagcttggcagccaaatcgggcagatggccaaggaaagcgctgcgaacaagcatcgccaggaagagacggccgagcgccagcagcaggtcgatttcggcaacctggaacgggctcgcggcgacgcctggaacgcagaagagaagcaggagcgcggcggtggaacggccgcgggctctgaacgtgcggcccatgcccaggccaagcacggtgaagccgcgttgaccgctgccgggcatatgaaccccgagtttggtgcagccctgggggaagcccgtggacaagggcccgaggcggtgaatcgactgatggccgagcatgccaacagcggggagggcgcggagccttaccagcgcctggttagtgaggcccagggtgcattcggcaaggcgcagggtcatatggcggccaccgaggcccaccaggctgctgctgcagccaaggcggccggtggcgcgttgatgggtgggacgccatccggtggggcgtctggtggctctggcagcggttctagcggtgggaatgggctggagcgcgccacggctcagattcaggccttggatagcggctctggcccgcactacgccaacagttccgacgccatcgatgcagcctgccaggccgacccggagtttgcccagggctacaaagacgcggtggccaacggccaaggggaagcgtttgtggggcaggccaaggagtgggctggcgtgcgtgctggccaggtgcgcaacaaggtggccaacggcgacgagaaggcgttgccactgcgtgccagcgatgccgtgctgctccgggccggccaggatggggtgctgtaa

SEQ ID NO: 509058 - DNA, 504 bp, Stenotrophomonas maltophilia
atgttccgctttgttaaaaaggccgcttccaaggccaccgcttcaacgctcaacaagaccgcaaaagtcctcaacaccgaggaaatcaaggacaacgccacctcagccatcgctacggcgaaggctttttgggccactcgcaagggcaccgaccgccgcgaaacgttcgccaatgcagtggccaggcgtggtttgactcatgacgacctggcaacgctgtatcgccagcacgcattcattgcctacctgaccctggcctttgccgtcgtcgcagtcggcatcggcgcaagcaacgccctggatggcagcttgggcggatttttggcagccctgggcgcgttcttcgccatggctgggttcttcttccgggccagtttcagggcgatgcaactggaccgccgtgagctccatggcgtgagcgtctgggccaggaatcccatcgactgggtgccagggtggacctatgaaccgttgcccgccagcaaaggggtgcgccgtgtctga

SEQ ID NO: 509059 - DNA, 258 bp, Stenotrophomonas maltophilia
atgagcgacgacacccaaacccccgatgacggccgcacctgggaagaacgcctgttcgacggggtgaccacctggcccaaggccaaccccaagaaagcggccgccttggcggtcctcctggtgggccttgcggctctgtcttggcgctaccccgtggccctgctctacacgatttggctgcggaagcagcccgttcccgccctggtgttcggtgccttggttggcatcgtgctctgggtagccaagggaggggcctga

SEQ ID NO: 509060 - DNA, 408 bp, Stenotrophomonas maltophilia
gtgacccgcctgtcccgcccgcagcgccttctgctccagctcgccatcctggcgacgctgctgatggtgcttgcgccgctggtcagccgcgcgctgcaggcgccgccgatggaccacgccgccatgggtcatgacatgcacgacatggccatggccgggcacgagcagcacaacgctgcgacgacagcgcccagtcgccccgccgatccccacgccatgcacggcgaagcctgcgagtactgcgtgctggccatgcgcctgctgccgtggctggcggtgctggtgctgctgttgccgttgctgtggcggccgcgcctggtgttcccgtggtcgcagcaggcgctgcccgcgctgcactggccagcacatgccgcacgtgggccaccacgcgtctccatcgtccgctga

SEQ ID NO: 509061 - DNA, 681 bp, Stenotrophomonas maltophilia
atgagtacccccgccaacttcaacggtgcccgcccggtgatcgatccggacaacgccacgatgctgctgatcgaccatcagagcggcctgttccagaccatcggtgacatgccgttcacccgcgtgcgcgcccacgccaccgcgctggccaggatggccacgctggcaaagatgccggtgatcaccactgcctctgttccgcagggcccgaacggcccgctgatcccggagatccacgacgcagccccgcatgcccggtacgtggcgcgcaagggcgagatcaacgcatgggacaatccggaattcgttgccgcagtgaaggccaccggccgcacgcagctgatcattgccggcaccatcaccagcgtgtgcatggccttcccgtccattgccgccgttgccgatggctatcaggtgttcgcggtcatcgatgcctcgggcacctattcgaagatggccgaggagatcaccctggcccgggtggtgcaggccggcgtggtgccgatggacaccgccgcggtggcctcggagatccagcgcagctggaaccgcgacgatgcccagcaatgggccgaggtctacacgaagatcttcccgaactaccagctgctgatcgaaagctacctgaaggcgcaggacgtgcagaagaaccacgagccgctggattcgcagcgcagctga

SEQ ID NO: 509062 - DNA, 321 bp, Stenotrophomonas maltophilia
atggtgagcgtgatctttctgctgaccctgcttggcctcatggtcctgattccgttctggacgttcaagcgctttggcgacgccaaggcagcttggcaacgggtgaggggcggtgaccgagacgctcgcacgcacggccgcttcatgattcatggcgcgttgtttggggttgggatggtggttatcagcgcgttcttggcccaagccaccttcagcatctggcaccaggtcgccaccgggggaggcctgtttgcactcggcacggtcgcggtgctctgcctgctggcctttttctggagcaaggggaggtcgcgcggatga

SEQ ID NO: 509063 - DNA, 765 bp, Stenotrophomonas maltophilia
atgcctgacgtcaaattctcccagctcgccgccgccagtgcggcctcggtcgccgccggggccggcctgtggacgatggcgggtcacatcctcggcctgcgcatggagtacgtggggccggcttccattcgcgtttccagcggcagcgcctggattccgtcgttgcagcaggccatcgaggtgccggccgcgctaagcctcagtggcctgacgctggcggccagtacctggtaccacctttacctgtacctcaacggctcaacgccagcgatcgaggccgtgacggcggcgccggctgccccatatagcgggaccgctcgcgccaagaccggcgataccacacggcggtacatgggtagcttccggaccgatgccagcaagaacatcgtgcgctttcaccacaacccctgcgccaacctggtcacctacctggtcgacatcaacggctcaaacctatatgtgcttcagaacgggactgcggtgtcttcgacagacgtaactgtggccgtagcgcccatcaccagcagaaccatgaacgcgttcgcggagaacacgtcgacgaacgcactggtggtcatctcccagccggaggtcgggccggccaacaccaatggcggcatcctgcagttccttcgcggccaacgcatcatgttcggtccgatggccctggatgcatcccagcgcttcaactacgtgtattcgacggcccctgaaagcggcacggggctatccgtatggtgcacgggctatttctacgagaggtag

SEQ ID NO: 509064 - DNA, 228 bp, Stenotrophomonas maltophilia
atggagccccctatcctggttaccgtcgatcacgcgcgcgcggccaagctgggcgagcaaagtggtgtgctgtgcgccgccggcatccgcacctggatgggtcggcatgggctgaatctgcgccagttcctggatgaaggcctgccggtggaacagttcgaagcgttggacgacgccttcgcacggcgcctggcagcgattgctcgcgaggaggccagtcgtgggtag

SEQ ID NO: 509065 - DNA, 231 bp, Stenotrophomonas maltophilia
atgtgggttcaaatcgtcgtaatgatcgtggcgctgatcgtcagttacgtgatgcgcccgaagcccacggtacccaagcctgcggccttggaggacttcaatgtccctaccgccgaggacggccgcgaatgcagcatgatcttcggcacggtatggattgatgatcccaacgtcctgtactacggcgatctgcgtactacgccgatcaaggtcaagggcggcaagaagtga

SEQ ID NO: 509066 - DNA, 783 bp, Stenotrophomonas maltophilia
gtgagcctgttttcacgacatgtcgagctgtacgagtttggccgcggcgcccagcgctggcgctatacctccagcgatcgcgccgaaacctacgattcgcagtcattcgcggccgtggcaatcaagcgcggccgcttgggtcagtcggcccaagaggcccgatcgaacctggaggtgacggttcccctgtcacttccgttggcatcggtgctgcgcccctatccgccgaccgaacgcatcatcgtgcgttggcggcggatccgcaaaagcgatggcgcgatcgccggcacctggaacggtgtactgagcgatttcagtgaacggcagaacgacctggttctgacctgccagagcaacgccggcgccgccgcaaccaatggcctgcgccgatgctggcaggcgcagtgcccatttgcgctgttcgacgccgattgcggcctgaacccggagctgttccgcgtcgacggcgtgctgtcggccgcctccgcccagacgatcacctccaacgtcttcgcgacgaagccagacggctggttcgtgggcggcttcgtcaagtgggtccagggcacagccgtcgagtaccgcttcgtggttggccacgtcggcccgaccctcacgctgctgaccgcagcgccgctcgctgctggcgtgctggcatccgcctacccagggtgtggccacgcgctgcagatctgccacgcgaagttcaacaacgcgccgaactacggcggccagcacaccatcccaccgaagaacccgttcggccctgaccccatcttctaa

SEQ ID NO: 509067 - DNA, 1701 bp, Stenotrophomonas maltophilia
atggcaattttcctcgccacccagcagagcaccggtccgaactggcgtagcgcgagcttggcacgcccgcgaacccgcatacctgtgccgttccgtgccgtcaatgcaaggcttggcttcattgccggctcaacaagggaatccaccattgttgaaccagagcagcgatccgccggtcccgcgcaaagaacctcgttcgacgattggtatcaccggatccatgtcctgccgttgcgcatcgacctcggcaatcttgtgaccaaccaggtgcgcttcgtgcaggtctggaacgcctatctgctgccgcagacattggcttctgtggctctggagaacggagaaggtgtcgagctggtcggaccaggagcaccgccgcttcccttcgccccgctgcagctgcggcgatggcagctatcgatcacaactgaggggccgcccgtcattgcggctacgttgtcctatgacttcgtggccctggggcgccgcaccgtcactattacgggcaaccgtatgtcggcatggatgctgccgccggattgggagcgccccatcaccgaaacgctggcctgggcaactgaggtccaacagtcggttgccggcaatgaggctcgattccctctccgcgctgcgccgcgacgctcttgggagttcagtgtgctggccgatcgccgcgagcgccaagtgttggagcatgcgctgttcgactggtcggcgcgcacctgggctctcccgatctggaatgacgtgtcgtggctgaaggctcgcttggcgctgggcgtgcaggctattccggttcaagccgccattcaacgcgactaccgggtcggcggcctcgccatgctctggaaggacgtcaccacgtatgaactggtggaggtcgctggcgtaaccgtcgacggcctgcagctggcacgccccaccgccaatgcttgggcgccaggcacgcgtgtgctgccctgcaggacggcccgcatagccgaaacgcccagcctggagcgggtcactgaccaggtcatgcgctcgaccgtgcgcctggctgcggtggaaacctgcgattggccggcagtggcgccttcggcgatctatcgcggtcgacccgtgctggagcagcgcccagacctcgaccaggcgcagacggccgagttcggcagacagttggtggtgatcgatggcgatatcggcccggtggccctcgatgacatcaccggcaaggcgtggcccctgcagtcccacgcctggcagacctgggggcgcacggaacaggccaacctgcgcagcctgctgtactggctgcagggccgagcggccgcgctgtgggtgccgtcctgggccgacgacttggagctgatcgagccggccctcaccacctccagcggcatcgtggtggcctgggcgggcgtagcccgttttgggcgtgcccaggccggccggcgccacctgcgcatcgaactgttcaatggccaggtgctctaccgccaggtagttcaggcgaccgagctggatccccagcgcgagcacctgcaactcgacacaccacatggcattgccctgcagccgagcggcattcgcttgatcagttggatggtgctggcccggctcagctccgacaccgtcgagctgtcgcatgaaactgatggagaaggtgtcgcgcggtgccgggtgtcattcgctggcatcggcgcagaggagagtgaggcgtga

SEQ ID NO: 509068 - DNA, 975 bp, Stenotrophomonas maltophilia
atggcctacgccgagttcagcaacgttcccaacctccaaacgctgatcgacctcatcgttcagtttgctcaggctaacggctggaccgttgagcgcaacaacctcgtcggtgcaaaccgcactgccaccgttcgtattccgggcgtgtccgattacgtccaccttttcaacatcgaccagcgcagcctgctatcgcgactatccatcggctatgacggggctgccgtgccaagctcgcagccccttgcatcgcctcgcgacgtgtccagctacgacctggtcggcccattccctcgcctgaagctctttgccaatggaaccgcgatccacgccgcgatctctcaggcggttgctggtgaataccgtcaccacgtgttcggggtgcttgaaaaggcgggcgactatgttggtggcacgtacgtcgacggcacgtactgggcaaggaccggcggttggagcggcatgatcacagcgtccggcaacaacgtcgtcatcttcggccacaacaccagtagcacgggctgtggccatgtcagggcagactcgactgcggacggccgagccaacagctaccacaggctttgcaactactttggctcttcactggacgtcgagggtcaagcgggcagcggcgttggatcgatcgggcaggccggcaccagcaacacctacgacaccatgtggctggggtttgcccttggcgggtccgacgacaatacgttctcaggcagaagcgttcttcagccggtgcatatccgagtgcgtcgtaccggcacggatccgtacgtctcaccgatcgggcgggtgataggcctccgtgcctgttgcctggacaagctggaacccgagcaggaaatcactatcggcgatgagacctgggtggtgttcccgtggctgcgaaagctggccatgaacagcaccaccaattccccgccggcgagcggcctttatggttgggcagtgaagaagtcctga

SEQ ID NO: 509069 - DNA, 975 bp, Stenotrophomonas maltophilia
atggcctgggtaactgacaccgcagccaacatcaccgacctgctggcccggctgcgtgactttctgacgaccaacaccgcactggtgtcggcgaatcaacaatggcaggtggtaggtggtgtggccagcggcccaattgcggccaacgacttcgtttcgctcaagggacgcgggctggccggtgaggaagaaatctacatttcactgcaggcctgggtcgtcacggcaagcaacttctacaacctgcgcatgcgcgggcatacggcgtacaacgcggcacttccaggtatggaccaggccggggccaactccaattacgtcgcgatcctcggagtcaactcggcaatcaaatactggttcatcgccaacggacgctgcttcaaggtagtcacgcgcatcaatggccgctacgacgctatgtatggcgggctgattcttccagagcacctcccggctgactggaactacgctgtgttcatcggtggcgcctacctggggagcaatgctgctgcctctttggacacctacgagcactccaacttctggaacgcgaacgcgagtggtcgtaacaacatcgccaactcccaggcatatctgtttacaccgatgcaggcctggcttccgattcggaacaagtacaccaactcgaacctgacctcgggtcggatatcgatcccttggtctgctgtgcgcaattcgaacatccgaaactgcctggatggacagcgctggctcgagcgcgggcagctgatgggcatcggatggagcagtgacgatcgcactgcatccaacgctcgggtcgatgagatgcccgaaggtggtcagttctacggcagcttcgacggggtgttctacacgccatctttcggtgcgaccgccgagcagatcaccaccgttggcggtgttgaccatttgcttgttcccaacatttaccgcactggcgatggcgagtacgcggcttttgcactggagtga

SEQ ID NO: 509070 - DNA, 483 bp, Stenotrophomonas maltophilia
gtggccaagccccgcaccgcgccgtccagcgcacccaagaccatccaggacagcaagccggccgctgccccggccgtcacggaagagaagcccgcagagaccgcttcgacgcagctggatcctccagccgatgccgatgtcgacgctgccgcatcgtcgggctcgggcgccggcccggcgctggaaccggccgcgaacgatcaggctcctgatgccggcggcgtcgcttccgcatctgcgccgccgaccacctccgaagccagtggcacagccaatgccgctgccggccacgacgccgacgtcaatgcgcacgacgatgatgcgccggcgcgcgtctgtttcgaggtgctgactccgttcaagttccggggcagcgtcctgaagccgcccgcctggatcgaaatgtccgaggacgacgcggcgatctaccaggccgccggcgtgctcggcaccgaaccggccgaacccttcgaccacgtctga

SEQ ID NO: 509071 - DNA, 306 bp, Stenotrophomonas maltophilia
atggccgtgcccaccctaaagcgctgccttggccagttgcggaatcgccagcaccacagcgctaagcatcctcaacggaggaaggccattggggcgctggtgcatgcacccctgttcccaaccgcgtcgcgtgtaggaacggtccaggtccaggatcctgagaccaggcgcgattacacggtcgaggtctgcattcacagcggtgtgatggtgatttcgcacgccaccgacaagcgctggctgttggaactggacgagatcctcgacctggccatcgctgccggcatcgataggggggccgactga

SEQ ID NO: 509072 - DNA, 483 bp, Stenotrophomonas maltophilia
gtgaccgcgccgagcatccgcctgcaggctgccttcgctgctgtgcttggcacccgcactctggagtcgcgtgagctgatcgacggcgtcatggatcacggcttcgagtatcgcggctatgtgcagcacggcctgaccaacgcactcaactgcggaatggtggaacgcgtcggtggtcgcttctcgcgccggtaccgtctgaatcaggactggcagatcgacccgaagcgactggacgccgcattggcgcagtacgccaagaacaccggtaacgctccgaagcgatgcggagccgagccccgcgcggcggtcgcgccgctgaacattggcccagcgatcaacccagcgccgttggtgccatctgtcggcaccgcgtgcatgtcccaggaagagcgcgagggcgagctgcctccgtacctgggcggccggatcgtggattccctgcattcgcacttcgatcggatcctcggcggggtggagtga

SEQ ID NO: 509073 - DNA, 714 bp, Stenotrophomonas maltophilia
atgcgaacccgtaccggtgccatcctgctcaccgtgctgctgctgagcatcggcctatcgcttgttctccccgcaacggcgtcggactttagggcattggtcgccgttccggggatcgcagcagtggccggagggattttcttgctgcttcgggatgaactgtcataccaacgccagcttgatcgtgacgacaagtccaatgccttccacgtggcggcgcagtcgcacatggcaaaggtgctgtttgataagcacgtggaattcgcggaagactactcttcggcggcgcgcacccttgtttttaagctgttccgcgacggaccgactgaaggtgcgcggaacattgattccctgcacgacgtacgtagcaaacatgcgctctggatctcagccggattggcaaatcggctggatacgtttgagcgacagttcgtcgacatcggcgcagcaatgatgctgtggaataacaggcattcgcgggaccgcctgccagaggatcaccttgagagggttttcgacaccttctatcgcctaaccggaatcgcccgcagcgagcttgacgttgatgatccggaggccaacgcccacagctctcaaaagatgatgacctggctgcagggacttcttggtgtggaacagctcaccgaagctcgggaaagagcggtggcgggtgccacttcctctcatccatctacacggggtcccaacgcctaa

SEQ ID NO: 509074 - DNA, 336 bp, Stenotrophomonas maltophilia
atgtacaggcatttatcggaatctgaaaaatcattagtgaaattgatgcttcaaggtgtggattttccgggcatcactgctgattcacttgcggcgattgaagttgaggagatggatgatggcgggatggggagcctgctgttcaaatcaagcaatctcgaccgtttgcttggaaaggagctggccagcaaaacctttgtcgacacggatggggttgaagttatagtgacactttcactggacaattatggagatctttttgagttggatgtatggaaagtcgacttctcgccagttattagccttcgtcccaggaggctgtccgctgcgggctaa

SEQ ID NO: 509075 - DNA, 828 bp, Stenotrophomonas maltophilia
gtgaggcgccagccgccgttgcgccgccgcttcctgtccacggggctgctggcgctccttctcctgccggctgcctcggccgaagatatccgctcgccacgctggctgccgggcagcactgtacgggtcgccacgactccctccctgcgccccctgcccgcggccctggccgatccgtcatcaccgccaacgctcgcccatggctatgccaacctggtggcgcggcacgcccaattccgtttcctggaacacccctacccgacaaccgccgcatcaatcctcgctgtatgccatcacgaggctgacctggtcatggtgtttggcggcgcaaggcaccaggcgctgccctgccccggccttgccgcgtccaccccgttccgtggcggcgccaccctgttggccggacgcgccggcgagtggctgccacgggagatgcgcgaactcgacggccgggtcatcgccgtcgttgaaggcggaccctacgccagctggctgcacgcgcatcacccgcaggtccggctgcggcagctgccagaccggcatgcagcactggcggcagtcgaaagcgggctggcggacgtggcgactggcctggagcccacgctgcgccccctggttcgacgccatttcaatggcagcctgcgcctgcagccgttcgatagcggcttctccaccgacctttacctgctggttcgccgggaagaccagcaactgcttgggcgcatcgaacaggcattgcgggagatcactctggaagagcacgcaggcctgctccacttgtgggcaggccagaccctgcctgccgcggccgggaatgcactggactag

SEQ ID NO: 509076 - DNA, 240 bp, Stenotrophomonas maltophilia
atgaagactcatagcgcagtagttgccggcctgcttctcagcatgtcccttttcaccacagcgtccgcccatgatccggcgcttcatgccgatccggcaaccccggctgctcccaaggccaagccggcgacctgcgaacagttggccgaccgttcgaagttcaaggtggacctcaatgatgcccagaccaaggcgctgaaggaacgttgcgaagcgcaggcaacaccgaaaaagaagtaa

SEQ ID NO: 509077 - DNA, 369 bp, Stenotrophomonas maltophilia
atgtccgccttctcggcccgccaccgtcgactcatccagctcagcatcttcgtgctgatgctgttgagcatcgttgttcggccgattgtgatccagcagggcgagctccacactgccgagcacgacatcgctgcaacggcagagcacgggcactcacacacccccggaaatggcgacaacgtagatcccaagcatgcatcaggtgtccacagcgtccttcaccaggccgatgtgagctttgccggcatgctggtgttttcgaatctgaacctggctactgtaccgccggcatctttactgcccggcctgcgctccgttgatgagccattgggccaccacggctcaccttttagacctccgatcgtctga

SEQ ID NO: 509078 - DNA, 1047 bp, Stenotrophomonas maltophilia; identical to SEQ ID NO: 502698

SEQ ID NO: 509079 - DNA, 1185 bp, Stenotrophomonas maltophilia
atgccgaaggttacgagagaggcgctgacacggaaaaccgtagacgcagcgaaggccacaggcagggcctatcgcctgcgcgacgcgacggttcccggcttggtgctgcgcgtgtctgccgctggcgccaagtcgtgggcgatggtgtggggccgtggccaggagaaggcgttcgccaactaccccgctacgacgctggaaggtgcccgcgaggccgcccgtcgcctctccgccgagatcgacaagcacggcgccccgctggccgtggtgacgcccaagagcgaactcaccgtggccgatgcctgccgcgactacgtgaccgccctggagaaggacggacgcaagaccgcgtcggatgacgcaaagcgccggtttgagcgctgcctctatggcgacaagctgggcaaggtgcgcctcaaggatctccaccaggatcacatcgaagcctggcgcgaccgcgtggagaaaggcgaccttccgccgctgccagtgaagcgcggccggccaccggtggcgaagcccctggcacgttccagcatcaaccgcatccgtacgacgctggtggccgccctgaaccacgccgtggcccgccgcaaggtatcccctgatctcgcgttcgagtggaacgcggtgaagccgctcaaggacgccgggcagcgccgggggctgtacctggagcgtgagcagcggcgcgcgctgttggaagccgctgaggggccagtgcgcgacctgatcgaatgtgtggcactcacgggctgcaggccgggcgatccgtcgctatgcctgcgctcggactatgacggccgcacggccagcgtgaggttccgcagcaaggaccacgaccgcaagatacccctctcgcccgctgccactgcgctgttcgaccgcctggccaaggggaagctacccaaggcgcacctgttcacccaggacgggaagaaggtgtggacgcccagcgactggagcgagcttgttcgggatgccgcagcgcgcgctgggctacccgctggcgtgacgctctacacgctgcgccactgctggatcaccgacgccatcgtgggcggcatggacctactgaccgtggcgaagctggccggcacgtcgctggcgatgatcgagaagcactatggccacctggtgcagggtgcagcgcgcgacaagctggcacaggtgcagttcctgtag

SEQ ID NO: 509080 - DNA, 549 bp, Stenotrophomonas maltophilia
atggcaaccaagaatgcatccgtgaagaagcggccgggccgcccccgcaaggcgcccgaggagaagctcgagcaattcagtatccggctcccgcccaagctgaagttgggtctggagttgcttgcccgagctcagcaccgctccctgagtcaggcggtcgagtgggcgctcaatgccggcctctccaagtaccagctcaacaacaacagctactacgcatcgctgtcatcgttgctcgatgacgtgtgggacttcacgccggccaagggcgctctcaccatgttgctacatgccccggagctgatgacctatcaggatcgcatcgcggcagagctggttgaatacagcgtggagatgcaggcgctggagcagggcaaagactgcgagatcacccatgaggagctgtttgagatggtcgagaagcactggcccacaatcctgcaaatggctgagtacgtcatcagcaatggggaatcgccgcgcggcatgtcccttcttgcgcaagaccgtagagggtggccgggctttggagtgactgcaaatccctga

SEQ ID NO: 509081 - DNA, 363 bp, Stenotrophomonas maltophilia
atgacgcacatcgtacaccaaccatccctgcccgcaatcgggcaaacccctgacgcgcattcagacttttccgacactgcgcgctgggccaccgtcgccgtgactaaccgcgagcacgcgcccacgtatgtccccggcgacgtgctggtgatcgacctggaagtgacggacttccgctacgacgcgatgtatgccgtggaaatcaacggtaagcagcatctccgctacgtccagagccggggcagcgatggcatgtacgtctacgtgctgtcgggcatctacaagggaacattgatcccgcgcgctgcactgcgggtactgggccttgtcacctacgccaacacgctgcggagggtcgggtga

SEQ ID NO: 509082 - DNA, 210 bp, Stenotrophomonas maltophilia
atgtcgatcaccgtatggctggtggtgaacctggtgcatggggtgcagcgggcgcaggtggtgcacgacgtgcacgtggtgcatcccgtgcagtacctgcaccgcgtgcagcaggggcgcggtgtgcgccaaacaacacaccgcctggtagtagttatctgtgtagtgtctggcgctacggtttttgcccataaatcgctctatccgtag

SEQ ID NO: 509083 - DNA, 399 bp, Stenotrophomonas maltophilia
atgcccgcagctgcccctgccgcccctgccattgaaggttccgcccggcgctggcggcggctggcctggtggtcgctgttcatcgtcggcaatgcggtactggccgcggcgattgcgctgggcaatgtaccgctgcgtgacaatccgggcggcggcgccggcctggcctatctggcggtcgccctgcccggccacctgctcgcgttcggtgcgctggccggcctgctgccgctgctgctgggcctgtggccacgcagcgcgcgtacgctgagcatcagcgcggccgtgctgcagggcctgtggctgtgcctgctgctggtcgacgccaaggtcttcaccctgtaccgcttccacctcaatgccatggtcgtgaacatggtgttcggcggcgccctgtag

SEQ ID NO: 509084 - DNA, 273 bp, Stenotrophomonas maltophilia; identical to SEQ ID NO: 498400

SEQ ID NO: 509085 - DNA, 2928 bp, Stenotrophomonas maltophilia
atgttcaacgtcacggcattgaccgctcaaggcacggacagcaagtccggcgcggccgtggtcgagtatctgatgctcaccgagtattacctcgacaaagacgggaacgcgcaggacaccatggcctggggcggcaagatggccgcgcacctcaatctcttgtccacggcggtaacacgggagagcatgagcaagctggccgaaggattcgccccccagacagggagggcgctttgccagaacgcaggccagaaaggcaaggtgcggccaaaggtggacaagaacggggatcccgtcctggacgcccaaggcaagcccgaggtcgtggtggtcggcggccaccgggtcggctacgacgtcacggtgtcggcgcccaaggacgttgggattctctttgcaatggagtcgccagaacggcgcgatgccgtgctcaaggcgcaccaagccgcctctgcagaagcgatgaaccggctggaacagatggttgagactcgacggggaaagggcggcaaggacgtgatcggcgtgaagggcctggtgtggtcaagccaccagcacttcgccgggcgtgacctcgacatggatctgcacacccaccatctcgtttatggggtggcgctgggagccgatggcaaggaatcgaccttcgatgccgtcgaaatctatcgccatgcccgggccatggatgaaatctacaagctggagctctacaagaaccttcaagggttgggctatcaggtcgagcacgtccgagaactggacgacgacggcaaggagaccaaccgatcctacgcacgccttgcaggcatcgaccaggacgtcatcgaccacttcagcaagcgccggaaggccctgctcgaatacgcggagcagcatggggtcagcacccaacaggcgaacaaggccacgcggaagcacaagaacgagcccacttacacggagttggtcgagcactggcaggaggctttgaaggacttcgagctgacgccggagacgttgaaagcagcgcgggggaacctggacaaggtggaacacaagagcgacgccgagctgctggaactgctccacgagaacgaagccgtgttcaacgacattgatttggtgcgggtgctgggaatggaatacgccggcaagttggacgcggccggactccatgcccgcattgagcagttcaagcaagacaatgggctggtgctggtcaacgccgagcgcttggcagacgaagaccgggggcagacactggcccgcaagcacacggaagaccggttctgcgcgccatggatgttgcaagcggagcaagcggtggtggacatcgccaaccgccgggccaacgagacccagcaccatgcttcgcaggccgcggtggatcgcgtcattgaggactaccagaaagccaagggcttccagctctcgcaagagcagttggtggccgtgaaccacatctgtcgcggcagtggcggggtggcaaacttgagcggcttagcaggcaccggcaagaccacgatttccgagctctacaaggaagcgctggaatctgaggggatggtgctgctgggggtgtgcgtgtcgaacaaagccgcccagaagttggaagtggaatcagggatgccctcaacctccatggcacagatgcttcacgacttggccgaaggcaagcgcgaactccagcccaacgacgtgctggtcattgacgaagccggcatggtggacacgcgggacacccgagccttgttggcctacgcagagaaggcgaaatccaaggtcatccttcaaggcgacgccgagcaactgcagcccatcggggccgggtccggttttcagctcaccaagcaagcggtgggcgatgtgaagttgaccgagattcgccgacaggcgcggcaggaggaccgcgagacggcgatggggttctacgccaaaaacgagaacggtgaagtggtcgatctgaaaaagggcacccgcagccggcgcgaaaccttggagctgggcgatgagcagaaggagcgcctgatggactccatcgtggaagcccactcgcaggagaaatgcatcgagcgcctggtgaacgactacttcaagaatccagcggcgctggacgacaagctggtgctggcccacagccgggccgaggtcggcgctctcaacgcagggattcgaaaaggcctcaaagaacgcggcgagatcggcacggatgaggtggtggtggaggggcgcgtcaatggacgaaagttcgatctggccttggtagagggagatcgggtgatgttcacagccaaacgcaagtacttgggtgtggtcaatggcacccaggccaccatccaatccatcaaagcgtcgcgctcgggcggctacgatatcgtcggcaccttgcgttcggagaacccaaaggagaatgggcgcaaggtggtgtggaacacgcacgagcacaaggcggtggtccacgactacgcggtgaccgtccacaagagccaagggcagggcaagcgcgaagtgttccaccttatgaaccttgggatgatggacaacgccagttcgctggtggcctttacccgtttgactaaagggagctacaagctgtatggcacctacgatgacgtggagcaactcaacacccgcttggggttggagcgattgaaggcgaccgttctggacgcggggctaaaagacgatccgcaacggccggttgtccagcgccttggggcagctgcacgccccaccactcaacgcccagccgctcagcgaacgcgcatccaaggcaagctcgacgcgctgctgaaggagcacgcggaacgcccaaaaccgcagaggagcgagggcgagcgcaaggcccgttggctgctggaagtgctggagccgttgcggcgggcgcgcaaggcgtctcccaagctgccggcgcagtccccgaaacacacgcagggcttctcgttgtga

SEQ ID NO: 509086 - DNA, 708 bp, Stenotrophomonas maltophilia
atgaacaatcacaatcatcacgagaaagatcaacagttccgcgctcagatggcatcgagcaaggagcctgtcgcagaaaaatggacggagttggaccggaaggcccaagagcaaaaatccgaagtggagcgcatgcagcgctccatggagcgacgtttggacccggagcggctggtggcgctggaggagcgagcagcggacttggccaatcagcgccatgaaatggaggtgagagggcgacccaatctcttcctggtcaagcagcgggcagcgtatgacaagcaaatggcggagctggaggctggtctcaaagagacccgcaaagacattcgaacgtggcttcgaaagtcggatccggcggagattgcgaagcatcaagagcggatggcgagcaagcaagaggagctagtgaagaccatcgagcagcgccagggagtgagccagatgccctctgagcgcgccaaggaagagcagcaacgcgcgggacaggtggagattcccatgatgcgcctggacgagtggcgcaagcagcgccagcgtagcgatgacgtgcgggtggactttccgaaatacggcgcgggcaagtggggtggggccacctttgccgcaacggccttggccgagcagaagaagatgcgcctctatgaggaagagttcgattggcagaagcaaggtcgcgagcgccaacccaatgtgttccgccagtaa

SEQ ID NO: 509087 - DNA, 2931 bp, Stenotrophomonas maltophilia
atgagattgaatctttacaacctgttggacctcgccaaccaactcaagcatcggatcctgctgcgcggagcgcctcaagggatcgttgatgccatgcgtcaaaaatcctcggccaactacaagaacgtccaaggcctggtcaacgcgcacaaccgtgtctccagccgccggctggtggttccgaaaggtcgtgagaagaacgccacggatttgggagcagaatacgacgccgtaagcggctgctacgtggttccggagtcgatggacgagaaggacgagaagttctctgtcttctggccttcggctccattggatctgcagaatcaggagggcagggcggagctgaccaaagacgggcggctgatcgagagccgggtgcttcccagggacaagttccaagggggagatagcacggcgctcttcttgatgtatgcagcgcttcccatcctcggtgcgctgatctcagctctcaccgccatcccttacgtcggtatcttggggtggttgctgcttccggtcgtcgtcccctacgtgagggccattcaaaggagcgagggcaccgcggatgcgttgcgggcgttcttcctgacctttgcattgctgttggtgctcatcaaaggcctggggacggcggcttggaccagcgacaccgtgttgaacggtgccatgacggcaatgaccctttatctcgtggccgggttcctctactgcctgattgctccggtggagcaagatcaggaagcgtggggcggaaggctggcacgtctgaaggcttttgtcctttggagcagtgttggcatggttgcgctgctgatcacgacgctcttccctccggtgatcggcggcttcgcctggttcgtgatggccggcgcatacgggtttgtctactactcgcgggactacaaagagcgcacgttggcgcttcagtcccaaagctcccggttcaacctgggcaagcaagggttgatggagcgggcgacggccgaagccttggagaaccaagttcggaaagccttggctgacaaaaccccattcgttgcctggggcacggcgaccggccacctgaagaaaaaaggggcgaagttctgctacgacgccggttcccccgcgggcatcagcgtcgatgacctgttcatgcacgccatgattttggccgaaagcggcatggggaaatcgtcctacattcggtggctgatggccgaaatcatgaagtcgggctacccctgcgcttttgcggtcttctgcggcaagggggcgctcgctggcgaggttcgcggcatgctggactacgtggtggagaccggcgtccacctggggttgattgaaggcctggatgcccagggcgtgaaggctgcgctgaccaacactcgcatggaagacgacgagacggatatttggaaggggatgtccgcggacatcatcgatcacgcgaccgtcatcctggaagcgctccacaaccatgagaacaagatgcgggcgttggatgccgcagagaaactgggcctggagcttgagatcgaaggattgcttcagaagcaagatgctgaggtggccaatggcggggatggtgctgatatcgatctggtgatcgccgacctggaagcaaaaatggccattcgccagcaagagctttccaaggagcgcgagtggcagtggacgctggagcgcctgaacaaggttctcatcgccatcaacgacattcgcaccacgcagaccagcagcttgcccggtgaaagcttgttggcggcggccaacttcctcggcgtgcaacccatgcatctgggaagcgatgaggactttgcggcccgcaagaaggactgggaccttcggctggaaacggctcaaaagaccattcacccggaccttctcgtcggcggctcattgcttcagatgtcgtttgagttcgtgctcaagaagtggccgacctacccggccgaaacgcgcggcagtttcatggccaacgtggaccgtcggatcaatcccctgatgcgcggcaagtatttggtggacgagaacggcgtgccctggcacagcattgagcgaggcgaagtggacgtgggccagatgctcaagggcacctccatgggcgtgaacctgcccgacacgcgccacggcaccgccggcgtgttggttcagaacctcatctgccagcgtctgaacaacggcatcaagctgcggaacgaagtcagtgaagaagaatggcgcgggcgcggcgagctgccggtgatcttgatcaaagacgagtgccagaacctcattgggcgcgaggaccagatcatcctgccgatctgccgctcaacgaagatgggctgtatctacgccacccagaacgtggacggcattcgggtgaagctgcccggggatgcggctgatcagttcttgggcagcttccagaacctcgttcttcagcgcaccaccccgaagagctacgagtatgcggccagccgctacggagtcgaagaaatgacttccttcaagcagaaggccgttggcttggactactccggtgggattgagatggcgttggacaactcgttgttcgacccgaatcaccccatggcggccggcatgaagcaactgcgcagggcgggtgctgggcgcttggtggcgacccacatcgaccccgtgaccaagatgcgctggaccggccagaaactcactggggttaatgccgtgaaggacattgaggtgccggcgtccggtcaccgcgaggcccaaccgttgttctcgcaagccgagttcaccggcctgctgaaccagcaggggcgagccattctttggttcaaccgggctggcgttcgtcgcgccgacgtgtgcaacacccccttccttccacttagccaagtcgaggaggtggttgcggccatcaagaaggagcgcgaggcgcgctccaaagacctccaatccccacagcaggagaccaagcaatga

SEQ ID NO: 509088 - DNA, 1209 bp, Stenotrophomonas maltophilia
atgagcaacaccccccaaagcccggaagagcttcgccgtctgcaggagctggctgagctttttgatgacgacaccgccccgtcgcccgccaccaccactccgcccacaactccaagcggcggtagcgaggtgttgaacgctgccaagcattggggccgcgccctcgggcgcaggaccaaggagctgacggagaaggctgtcgagaagaccaaagaaacccaagaagccttggcacgtcgagcagaggaggccaaggcagccaaggcagccaaggcagccaaggaagccgccgcagccgagcaggcgcggcaacagcaagaacaagaacaagccgaacgggaggaagcggcgaagcctgacgcccgttcgcagccggtggacgtgtgcgcccccgagccgggtttggaacccacaacggttgcaccggaaggacccagccgggcccaagatccgctggctccggtggtcgttgtcgaaccagaagccgtagagccgacgccggacgtgcttgcggaagaggaggcagtgaagccggcggacctttccgttgcttcggaggcattggaagatgaggaggcgttgcccccgtctacgcccgcgcttcgtgtcgcggacgcggcagcggttcaaccggagccctcgccagcgcatgtcgcccatgctggctcgacctcaacaacggccagccgcaagaagggttggtcaatcgtcgttgtggccagcgtcgcctgcttggtgctgggtgggggcattgcttggtgggtcactcgcgacaccgggaaaaacgaacccgctcccacggcggctcctgcgtctgccgtggctgcgcctgtttcaactctggaagtgccgggcccgggggttaagcaagcgccccctgtttcggctcctgaacccgagcaagcgccggttgcggccgaagcgccgcccgcgttgccggttgagaagggcgccgtgcctgctctcgcagaagcgcccagggcggcggcacgggccgaggttcaaccggtggagaaaggcgacaagcacgctccagacgcagttcgaaagccggcccgggtgggttccaaagcgatgcctgccgcggaagccagagcaaagcccatggctaggaaatcggcagcggaaacgccgcgggatgaaccgcagtggcaggagaaggcagacagcgacatggacgcctgggcaaagaaggctggaatcaactaa

SEQ ID NO: 509089 - DNA, 1278 bp, Stenotrophomonas maltophilia
atgaatggccagtcaggctgcgatatcaaatgcgtcacctcggtgggtgcgcctctcaaccagcggtgtgcatgcgaagtggttgacgtctttcgtctacatgagtcgatccgcggtgcctttccggagttcatgactgatcccgccgtgcacgcgcacctgttttccccgtatgccctgttcgttgaccgtgcggcgttggacgccatggggcgcgtcgcagcggcggttttcgccgttgcagggaatccgcgataccgccagcacgtcctgcaatgggcccccgacatagcaacccatgagccaggttcggcgggtggcgtcctgggactggactttcacctgaccgtcgacggcccgcggttgatcgaggtcaacaccaatcccggcgggctgctcctcaatgcagtgctgctcgatggcgtgcggtcctgcgcgccggctgcgtggacgacctggaccaccgcggcaaaggctcgcaacgcggcggtcgatgcatggctggaggatgcccggcagcagtcgggctacgcgccgtcgcgtctggccgtcgtggatagcgctccgcgggagcagttcctttaccccgagtttgggctgtacgcggacgcgttccgggagcacggcgtggactgcgtgatacgcgcacccaacgaactatggcttggtccggacgggcttgcagatgcccacggccggatcgacatggtctacaaccgcttgaccgatttcgcacttgaagaagcctcgcataccgcccttcggcaggcgtacctggcaggagacgtcacgatgaccccacatccgcgtgcgcacgcgctgttcgccgacaagcgcaaccttgcggtgctcggggatccggcggtgctcggcggctttggggtggatgcgtcttcggcggccttgctggcccaagtgattccgcccacggtcgaagtggtccccgggaaccgggatgcattgtgggcagcgcgcaacaactacttcttcaagcctgcagcagggttcggcagccgcgggagctatcgaggcgacaagctcacccggcggacgtgggagtcgatgacgtcggccacctatatcgcacaggccttcgcgccaccgagcattcggatcgtgcatgggggccagtccctcaaggccgatgtgcgctgcttcgcgtccgaggccggtgtgctgttgttcgcagctaggctgtaccaaggccagaccacgaacatgcgtacgccaggcggcggattcgcagctgtgctgaccacgccagccgtgattgcatga

SEQ ID NO: 509090 - DNA, 399 bp, Stenotrophomonas maltophilia
atgagcatgcaaatgttggctacaaatgtccgcacccgagacacccgcaagcgctttgccttgggcatagcgatggtgctggtgttgtcgcttgcaactgccgctaacgccgcgaatttcacccacaagtacgtgatgcgcggccaagtactcgatgtccaggagaacacgctggtcgtttgcatcgggaaagaggacggcgcccaggtgggccaggtactcaatgttgtccgccacacgcgcggccctcacaggcacaagtcaacctcgcctactttcgtgcgcacggacattggaaaggtccgcatcacttcgatcattgatgatcactatgccaacgcagtcgtggtggacggcaatgtagaaataaacgatagcgtcgaactcctgcgcgactga

SEQ ID NO: 509091 - DNA, 318 bp, Stenotrophomonas maltophilia
atgactgccccccgctctccagccacgtccggatctcgacgttgggtcttctggatctttctcgcgctcgccctgttctatctcggggtcgagcatcgggcccaccttgcgggaacgctccgctggctgccactggccatcctgctgctgtgccccctgatgcacgtgttcatgcacaaggggcacggaggtcacggaggtcacggaggtaatggccgcgacggcgatgccgacgacacaccgtccggtcaccatgacagccgtcgcaagcaggaacttaaggacgacacgtccaacacctcgtccagagggcactga

SEQ ID NO: 509092 - DNA, 513 bp, Stenotrophomonas maltophilia
atgatgtccaaagacgaagcaggcccgcctctgatgacggtacgccagctggcccagcggggcgacgtcacggtgcacgtggtgcgcaactatctgcggcgcggcctgctgcaagcagctacgcataccgaaagcggctaccagctgttctcagcctcggagctccagcgcctgcacttcattcgtacggcgcaacagctcggcttcacgctggctgaaattgaggaaatcatccgccacagcctgatgcgacatagtccctgcccgctcgtgagggacatcatccggcgcaggctcgacgacacccgccaacaactggatacggtgctggccatgcatggccggatggagcaggccgtccacgcttgggcaacgctgccggactccattccgacgggcggcgatgtctgcgcattgatcgaagccgtcgccgtgacgcaaggcggcaagttcgtcaagtccaccccgcgacgactcctcggacgtcgcctcactcaggagaatttgccatga

SEQ ID NO: 509093 - DNA, 225 bp, Stenotrophomonas maltophilia
atgggaagtttcagtatttggcactggctggtcgtgctgttgatcgtggtactggtgttcggtaccaagcggctgaagaatgccggcaaggacgtcggtgaggcggtcaagggtttcaaacagggcatcagggacgacgcgccgcccctgcagttacgcgacgccagccctgaggccgggctcgaggcccagagcagccgcagcaccgaaacgacctcgcactaa

SEQ ID NO: 509094 - DNA, 930 bp, Stenotrophomonas maltophilia
atgttcgacttgtcggcttatgcactgagattcctggaataccttgttctcatggtgcttttcgggatcccactgttcggatggtacggttcgcgtcgatcggcagtcgccgacgccttggccgggtggccactcatgggcgttctattggtgagtgccgccgtcgctgtcgtacttaccggggccgatgtcgtcttcaagaccgcgggcatcatgggaatggcgattgccgaagttgatcgtgattcgcttggctggtatctgctcgagacgtccgcgggtcgggcagcgatggcgagaggcgcactgctggtcgccctgatgtttgtgctcggatggcatcgccgccacgggaaggtggagtccgccttcccgctggcggcgacgctggcgggcggcgcactcgcttcactggcatggaacggccacgcggccgctggtgagggcgtggcaggcgtggcccggctcagtgcaggcatcgtccaccttctcgcggcaggcggctggatcgcagcggtcctgatgtttctggggatgctcctgcgcgacaagcaggcctcgggcaacgggcgcctgcgatcaacgcatgacttgctgcatggattttcgactctgggaacgattttcgttggggcgctcatggtgtccggcatcgtgcattacggggatctcaccgcttggtcgttttccgcgctgttcctgaccacctacgggaagttgctgctgttcaaactggccctgttcgctggaatgctgggcttgggcgcgctgcaccgatggacgttggtgccgcgcttgggacaggcgctgaccagcggtgatcccgcgcaggaggtgcgtgcgttgcggcagagcgttacggctgagtccgccttggccctcttgatcctgattgttgtttcagtgctcgggacgctcagtcctgcgtaa

SEQ ID NO: 509095 - DNA, 384 bp, Stenotrophomonas maltophilia
atgaagtcgtcaaatatctttcgttccttcgcgctcgtcctcggcattgcagcggggcagttttcactacaggtcgcccacgcccatgcagctctgcagcagtccacaccggcggcaaatagcgtggtggtttctccaaacgaaatcgatctcgtgttcaatgaaacattgctgccgcgggcgtcgcgtctcgagttgctgatggtgcacggcaattccacgatgccaatcaaaaacttcaccacggagatcgtcaatgatggcaagaccttgcgtgccaagctgcccaagccgctggctgcgggtatgtatcgcgtggagtatcgcgccgttggaggcgacaaccaccccatgacgggcagcttcagcttcacggtgcgctga

SEQ ID NO: 509096 - DNA, 2814 bp, Stenotrophomonas maltophilia
atgagcactacccccggctacgtctccaacgccgagctggcctcgcgcctctcgacgctggtagaccgctggaaccggcgcgagaatcagatgatcgcgctgctgactcaggaggaaggcaccgtcgtcgtgacggacggcctgggcaacaaccacaccctcccctcgttcccgcagctccagaaggacgtggccgggctgaccgacgagctgaccggctcggtcgtgcaggtgcgcgacctggtgtccgtggcaaccggcatggcgaacgccgcacaggcgtccgcagatgacgcctccggcttcgccgacgctgccgaagcatccgccgtgcgcgctgcggaatccgctgcgagcatcgacgacgacgtgcaggccaccgccgacgcggcgaccttcgctgctgccaaggcggccgaggctgccgacagcgccaccgaggcggcaagctccgcagtggacgccgccgcttcggcgacggcctcggccacctcggcgctggcttcggctggctctgcaagccaggcgggcacgtcggccaccgcagcgggtcaggcgcgttcggacgcgcaggcagcggcgactgctgccgccacgtcacgggatcaggcgcagactatcctgggctatgcgaccgacgcggccgaccgcgcggaagctgacgccaccgctgccgccgcatcggctgccgcagccgccgacagcgcgaccgccgcagcgacctcggtcacccaggcaaccacccaggccaaccgggcggaagcccaggcgtccgctgcgtcgaccaaggctggcgaggctgctggcttggcgaccaccgcggccggtcatgcctccgctgcgtccggctcggcgtcggctgcctcgacctcggcgcagaccgcatcgtcggccaagaccgctgccgaggctgcccgcgacaaggcgaacctgtacgcgaacgccccgcagggcaccgaggtgtcgccgggcgagttctcggcgaagcattgggccgcccaggcgcaggctgccgtcaccggctcgctggtctacatgggatcgtgggatgccagcacgggtgcgttcccgaccaacccggtgaaggggcatttctacaaggtgatcggcgaaggcactgtcggtgacatccactggcgagtcggcgaccaggcgctctacggcgctacctgggagaagatcgacaacaccgatcaggtaaccagcgtcgccggaaagcagggcgacgtgtcgctcgttgctggtgacatcggcggcctgggcgcgctggcaacccgcagcgacgtggacttcaacacccaagtcaccggcaagccgacgacctatccgcccagcacgcactcgcacacgaaggctcaggtgggtctggacaaggtggacaacaccgccgatctggacaagccggtaagcactgcggtgcaggctgcgctcgacggcaaggctgcggcgtcgcatacgcacaccatcgccaacgtgaccggtctccagaccgcgctcgacggcaaggcagcgtcctcgcacacgcacaccatcgccaacgtcacggggctacaatcggccctggatggcaagtccgctgtcggccacacgcacaactccaccgacatcgccaacgtcgtcaacgtcaccgacgatcagagcatcggcggcatcaagacgttcgcggccggtcagattcgtgcgcagggcttcggcggcaatgcggcggctggtgtggtctatctcggctcgctggatcgctacgtctacgtccccccgacagccaactcgattgagttccggtttgcggacggtacgggtggcgtcgcgtccctcaacgctggcggcaccgtctggacctcggcgaacttcaacccggcagggaaggccgacgcgggccacacgcacaccatcgccaacgtcagcggcctccaaggcgcactggacgccaaggcgaactcgacgagcgctcagttcaccaacctcatcaacattggcggggcgagtgacctgtcggtgcagctcaacccgactggcgggcggtccatccgcttcgctgcgacggctacgccgaacaccggcatttgggacgcgacgaacaacgtgtggctgttccgtatcaacggggataacagtgcgaacttcgccagtcatgtgagcgcacagaacatcaccgctgtcggtgaggtctactgcaacaactggatgcgctcgaacacgtccggtacgggctggtatcaccaggtccacggtggcggctggtacatggccgataacacctggattcgcaactacaacggcaagggtctgtgcctttcggggccgggcggaagcggcggcgatctccgactggagagctactcgccgaccatcgcctgctacgacacggacgccggcacgacgcactggatacactgtaacgacaaccagcacggcttcctcgccaacaatgccttcgcgtggtgcgcctaccgcgacgcaagcaacaattggatcgccacgggcaacatcgtcgcctatgcgtccgatgcgcgtctcaagaagaacatcgtggacgcctcggcctccaaggtgggcgacttcttcgaccgattccgtgtgcgcgagttcgattgggacgccgaagctatcgccgagttgaatcccacgttccacccgagtgcggagcatgaggtcggcggcatcgcgcaggaggccgaggaggtctactcgttgatggtcgccacgcacgcaaacggcatcaagacgatccagtgggagaaggctgttcccttcctgatcgctgaggtgcaggcgctgcgtaagcgcgtcgcggaccttgggggaggtgcctga

SEQ ID NO: 509097 - DNA, 381 bp, Stenotrophomonas maltophilia
atgagcacgaccccgcgccacattccgttcggcatcatgctgcagggccccggcagccacatgcatgcctggaagcacccgtccaacccggccgatgccagcgtcaacctgcagttctacatcgacatcgcgcgcaccgccgaagacaacggcatcgccttcggcttcgtggccgacgggttgtatatcaacgagaagtcgatcccgcatttcctcaacgtttcgagccgatctcgctgctgtcggcgctggccacggccacgaagaagatcggcctggccggcacgctgtcgacgtcctacagcgatccgttcaccgtcgcccgtcaattcgcctcgctggatctgctcagcggcggccgcgccggctggaacgtggtga

SEQ ID NO: 509098 - DNA, 393 bp, Stenotrophomonas maltophilia
atgagcagcaaatcccacgccgcgaccgccaccgaacccggcaggcccggcagtacctattccgatggccccgtctggcacgccttcggcctcagccgcgccgcctatcacgtggtgccgcgacgcaccctgcagtcgatgccggtcgagtggcaggcgcgctttgtcgcgctgatcgaggaagcacgcgaagtgcttcctgacgaggctttccctgagtaccaggtgattcgcatcgacgccggccggttcgcctccgacccaaaccggcgctatcgccatgccgcgcccttcccccttcgctccgctggcgccgagcaggcgccccagatagcgccgctcgcaggcgcgttcgtcaacaccgacacccaattcaagcaggcccgccgatga

SEQ ID NO: 509099 - DNA, 699 bp, Stenotrophomonas maltophilia
atgaccgcgaacctcacgcttcttcctacgaactgtcccgttctgcgcgacgcatttgaaacgatcagcgcgatcgctgtggaggctgtgtggctgccccaccaggcgaaggccatcaccctcgcgcaggcccagaccgcgctgcgggatctgcaccaccggctgcggcgccagcaggatctgcgcgtgttcgaagccgccgtaaccgcctatgttgcgactctgcgcagcagcatgcaggacggcgacacgcccctctgcgataccacccgcgcgcggctggcgcaggcgaccgaattgctggagctggtcaggagtcagagtcgcgtcgtggtcgatccggccgacccgtggcggggcctgtaccaccccagtcgcctcccagcgcgcaacgccgacggcgagatccggtgccatccggacgtgccgatgtgggctgacggtcgcgaggcatcgctgcgccctctgttccttgcccagggcttcgacttggccgtggtcgagggcgagttttccgaagaaggcatcggatcgggcgtttacaacgcctcgcaggaactgcacgactggaatcctgaggcacctggagaggactggcgtctcgtgtggctgggcgaaaccgaggacggactggccgcgtggttcgtgcggcctttggcgatcgccaagcaagaagcggcgagtacgaaccatgaatga

SEQ ID NO: 509100 - DNA, 702 bp, Stenotrophomonas maltophilia
atgagctggcttcacacattctggaatggagtgagtccctgccttgcgccaggggtcggtggatgcgtcgtatggtgggacgcatgggccgcgatcggtgctttgatgggggtcttggccaccacggtgctgggggtattcacttatcgccttggtagggccgctaatcgcgcaagcgcactcgcagttgagatcgcaggcaacgaggcgaagcggcaagccgacagggataggaaggagcgaatcctgttgctgcttcagattacgggtgaagttagtacgaacatcgagaggattcttgaacttcacgcgcatctgagtgacccgcttagtgaaggttactttgtcgtcaatgccgattatcggaacgacttcatgaacagcatgaagcgagtggctttcccgctcgcggaaaggctggcagatcgctatcactatcttgacgggttgactggaccgaccttggtgagagcgattggcatgttctccactatggcggacaactatgtcgcacttctcgcagagcagcctgaggcggagctccgcaaggcttatcggctgctgttcacgatgctgccgatagtcgcgcaagacttggaggtggtccggctcgcttgcgcggaggctgttaaggaaagtcgcattgacgacgcgagagttgcccgacttgcgctctccgtcgccgatgaagccgcaaactga

SEQ ID NO: 509101 - DNA, 756 bp, Stenotrophomonas maltophilia
atggctgatcggcttcccatactcgtggcatgtgagtacagcgatacggtgtcgtcgccattccgcgccttcggcttcgacgcctattcgtgtgacttgcgccccaccgagggcgatccgcgctggcatatccaagacgacgtgcggaaccacctgcaagccggccgctggctggcgatggtggcccacccctactgcacctacaacacactggccggcatccgctggatgtacgacccacacgacaccgccctgccgcagcctgatcgccgccggcatccgaagtacccgaaccggatgcgtgacttcctggagggcgcactgctgttcgccaacttgatggccgcgcccgtggacttcatagccgctgaaaactcaaagccgcacggcttggccatgagcgtgcttggccgacccacgcagacggtgcagccatacgacttcgggagccccttcaccaagggcgccactctctggctcaaaaacctcccagcgctggtggctactcacacaatggcgcaggtgatcgagcagcacggggagatcgtagcgcgctgccatctcatgcggccgggtccagatcgtgagaaagagcgctcgcgatcagaccccgcgatcgctgcggcgatggcccggcaatggggcgagcatatcctttcaaccatagcatccaggcgtctctttgtagctttgcaagtggtgcccactgagcggtcgccgtcacgatcatgcttgaccaaaggaggagctgcttga

SEQ ID NO: 509102 - DNA, 1146 bp, Stenotrophomonas maltophilia
atggcaccccgaccgcgaaagcacaatccgtccataccgccgcatatcgaccaagcgaagatccccaagggcgtttactgggattcgaccggtcgtggccgctggtacatcttggaaaccgcaacgggcattgatgggacccggaaggctcgccgaacggtggcaggcccgcacgccaagctttccgagctacacgcatttgtggaagccggagaaggaaccggaacggttgaatgggtctgcactcagtaccacgacagtgccaagttcaaggggcacgcgcctggcacgcgcgcggactatgagtcggcgcgcaaagtcctcgtgagctaccccacgaacatgggcgtgcccttcggcaagctccaagtcaacaagctgcggaatcacaattttcagcgccttgttgatcggctcgaatcggcaggaacacctaccaaagctaacaaggtgctgcgctactcgcggctcgtgttccgctgggcattgaatcggggcatcgtgaaccataatcctgcccagggacttgagcaggcgaaggagcgtaagcgtcaacgccttcctaccgatgaagcctatgccaagttggtagcgttcgcgcgcgaacgctccaagcgaacggctcggacagagggttcagtaccgtcatacttatggatgatcatggagctgggctacctttgcagactgcgcggcattgagacgctcacgctcaccgaggcgcaaggcacgactgaaggactgcacaccaatcgccggaagcgcagtcgcgacaacctggtggtctggaccccacggctactagccgcctgggatgctgcgatcatgcgccgcgaggccatcattgaccgccatagcctaccggtacagttgcgggccgaccagcgctacctttttcttgcagaacacggcgagcccctgcagaagaccagcctagatagcacttggcagcgcttcatccaactcgccatcggcgcagggatcatcttggccgaggagcgcttcagcctgcacgacctgaagcgaaagggcggcacggacactgccgggaaccgcgccgaacgtcaggacgcattgggcgtcaccgacgccatgatgaaggtctatgacaaaagcgtcccccgtgtgaagcccgccggccagtag

SEQ ID NO: 509103 - DNA, 849 bp, Stenotrophomonas maltophilia
atgacttcatctacctcaattcttacggcgtcacgtgccaggacaccattcctaaaatggcctggtggtaaacgctggtttgttcttaagcacattggccttatgccgtcgagcttcaatacatatattgaggcgttcgcaggctccgcatccgttttttttgccctgcggccggatagatcggttctctgcgacgcgaacgatgagttgatctcaacttatcgtgcgatcaagtggaggccaagccaagttgaatccgcattgcgaagacatgccgaaaatcactcgaaggcctactactatcaggtgagatcccagcaacccaccgacctcatcgagattgcggcaagacttatttatttgaatagaacctgcttcaacggaatatatcgcgtcaacaaaaagggagagttcaacgtaccgaagggttccaaggacgcagttgtacttgaaaccgacaacttcctagaaaccgcgcgagcccttcgcaacgccgagcttatttcgggcgatttttcactcgcagtgaccagggcacgtcgcgacgatctcgtgttcgccgacccaccttacacgattcaacacaataacaacggattcatcaaatacaacgaaaaaatattctcatgggaagaccaagttcggctagccaaatcgcttcaggccgcggcaaggcgaggggcaatggttgtagccacgaacgcaaatcacgcatcgctacgtgatctctactcggacctaggatttcaatgcacgacaacgtctcgtttcagcgcaatctcgggtactggcagcgatcgcggccagtacgaagagctgatcatcaccaacctaggcggacagaggtag

SEQ ID NO: 509104 - DNA, 1278 bp, Stenotrophomonas maltophilia
atgagtccgtctgcgagcggaggggcgtcagggggcgcttcttcaccgagtgcaacaatccccaagctcgatgcaagtgcggtctgtagttctgcgtctagcgctccagttgctgaggcatttgacaggctcggtccgattactggtccaggcggagttctggatgctgtccaagatactgcaagctgtcttgcgggagatcaggtctcacatctaatggaggcttggcaatatctcggtgccgcgattcgttccgtgttgtgcaatgcgggtgacaatgccgttcacttcgcctactacgcgcagctgcgcgctgctctgtcaatctttgctggtagtggcatacgactccgcctaggtgataactattatctggattcagtcggggggcgtcatagctttaagttgaagagtggtgataggacgcacgaggctgtttgggccgtatggaaagagtgggttaagaccccgtacgctcagcaactcctcagtagcaacgtttccataatttcaggtgtagcgctttccgatctgatgttggttcccaccagccctggggttttgctgacgaactggggatatgacttggctcggggccatgaggatcatgatgctcgcatcaaggctagctatcatggaaaagcacgtcagcccagtcccataatgagtgaggcctctgtcgagctcgttcggcgagtttggagcctgctcatggaaagtggcggaggcgtcgtcttcgatgcgagcctagtccgctatttcgtggaaaagtaccttacagagcttgaagaagactctaaagccagcggtggtgcagcggtggatagagggcttgagctttcccggatagtatccagcactagctctcgaaagggcgtacctgcttcgactctggatgctgcctttcaggccgaggtcgatctgagcttgttcgatgttgccttgtcttcagatacagccgcagagaatgtagtctgccgcgcgctgttcttagtcagagtaggaacaatggcactggcgggaaacttggagaatcacggcgaagagtgcaagaagtggcttgttcactggctcgcaagtgccgggatttatgatagtgcatcacatgcggtgccaaaggatctcgccgtaaattacggcgacgcgttggatgagcttggcgatattgatctagacgatctgccgttttctatatggaaaggttcagccgctgcagcctccgcactgctggcgcgtccggaaggcttcatcggatgggcgctacctctgtccgcctag

SEQ ID NO: 509105 - DNA, 273 bp, Stenotrophomonas maltophilia; identical to SEQ ID NO: 498400

SEQ ID NO: 509106 - DNA, 639 bp, Stenotrophomonas maltophilia
gtggttgagaagaacatcacaagtttcatcaatgaaaggaccctagaatacaagctggttcctgacctccagaaagcactggaaccccactgcaacgcagcgatgcccatgttcttctggaaaaccagagaaggcggcattcgctcaagagcgtcttttcccggagagtcattcaaagtcattgccatgttcgcaagaaggccaaaggtcaacgacaagagcaatgcgctctatgccacgatcaacgatgagctactcatctttgctgagcacgctataaacatgggggtacctacacttggcggcttctgtgcagcgcgaaacctcggggagatcacttccgctcactccatctggataccgttgttgaagtcagatgagtcaatgaatctgcttcgctggaatgaatccgactcaccaggaggctctctttcaacctatgaatcaaaggtcgcctcaattaatactggagagcttccagaggcaatactgccgcgatgcgaaccgatgtccttcggtacagcaatagacacaatggaccgtctacgctcggtactgaatcgagaggcagtccttccttattactacgggagctcatacaagcccgtgtatatgcttactcagggtagtcggctatga

SEQ ID NO: 509107 - DNA, 624 bp, Stenotrophomonas maltophilia
atgtatgccgacgacataaaagtaatgattgtatcggcgttactgcctacgctcgactttgatgaagtcttgggatctgaggtgcgattcggcgatgggaaatacagggcagacctggttgtttcctcgcctactcggctgagcgcaatcgaaattaaaggccctcgtgacaacttcgacaagcttgatgaacaagcgcgaggttacggctccatgtttctcgacttttctgtggccacaaccgccaattggctgccactgttgcgttcgcgcttaccccgctcaacagggttgatcacccttgacgaagatggcatccagtatgtgcgcaagccccagcagcgaaacacgctttcaactgacgcctcactgaaatggctgcgctccaatgacctcaaacgattgatgcttctacacgatcttccccaaacggggctacatgaggctttagctgagaaagccctgaagatatccaggaattcgctttccgagttcacattgacagcgatacacgagcgactggcgactaggttcgaatcatttagatcggaactaggtagcacagtcactctggacgacgtgcggatgctgacactcagtgagagaattatcgggaaactctga

SEQ ID NO: 509108 - DNA, 1026 bp, Stenotrophomonas maltophilia
atgacaagatacttgcctattgtccgatcccgtgcggccgaattgcgcggcctaaaggaactgtcgcaggatgcgaggcttaagttgctgcctatcatcgaattgacgaaatcacgtagaacctcaaagaatccagcgggcaatgtcgcgaaaagcgttgaagctgtcctcgaaatattgggagagcagccttttatcgtagatcttacatcccttgaaagtcagcaaaatacagaattcgataatttgcttgatgacgagaatgggttctcacactggactgaatttgcggtagagaatcttcccgcacactgcgttcctgtagtccatcttttggagccatttgatgctgtttcttttcagcgtcaagtagcttcattgagggaaaagttcacaaaattcgccgtccgggtcccgactaactactctgattttgatgagctggttggaaatctcccgaatatgtttgggcgaaccgaggatgttgtcctaattttggatgcggcttacgtctccctaagggggctttcgggggctaacgcccgccttgctgagatgcttggcgcaattgaaggtatcgactttttcgctaaatcaattgctgccagctccttccctatcagcgtcgtctctgccggaggcggggatgaagagggggaattcaatctcactgaagttgaactttggagtgatctctccaagaggttttcaggattggactacagcgactacgctggaatccatccaatggacttctcgggtacggtcacgaactgggttcccagaatcgatgtcatgctggataggtctttcttctatcaccgctatcgcagaactgagggcggctacgtgaagtgtgcccagcgcgcaatcagggatccacgattcgtgcccctcgactgttgggcggtagccaacatccgcaaaactgccgatggtgaagctatcggacgaagcccgtcattctggatctctaaccgggtcaattttcatatctccaggcaagtgatcagagtttcccgataa

SEQ ID NO: 509109 - DNA, 201 bp, Stenotrophomonas maltophilia
atgcgcaatctcgtgagcaattgtaaatctcttccgattgcggtgatggagcgaattcacgccaacaacccaagagccagagcgcacttcaagatagccggagagatcatctgccattggctcctcaaccacctccaagcccaggaattccgctattgccacgacgtttacgggcacgcgcaaaagacccgcatcggatag

SEQ ID NO: 509110 - DNA, 663 bp, Stenotrophomonas maltophilia
atgagcattgagcagagcaaagcgagtggatcgcggcaatcttcggcggaatggatggccgctcgctttgcatcgttagccgggggtcttgctgtcatatatgcctactcctatctactgggatacgcatatctgacattttactttaccgatctccgcgcggtgtgggcagtggatctatttgatataacgaccattgcccagactccggcagtcgtggccgcattgcttgccacaactcttgccagcctagtgctccacggagaccccttgccggttccacccataagggtggcgggagcactggcgctattagccatagcagcgtatgcaatccacctggcggtcagcaagtggatgaatgaatatacctcttactggagcttctgcgcctttgttctggccttgatatccgcgctaatgggagggctcatatatctcagttcgcgagcccagtccctcgccatcgtccaatttgagaactcgcaagatcagacctggcgactactgagagcaattagcgggtctcatttgctgcttattcgtgctgccaatggtgataattttgaattccgaattgtagagtcggtccaagtgacttccattggccgtgggcaacccaaagggaagagcgctagcgaaagtcgtccacataaacaatga

SEQ ID NO: 509111 - DNA, 375 bp, Stenotrophomonas maltophilia
atggaacgcgaacgaccggattacctacaacccatcccgcgctcgcgctgggagtttccgtggctcggcctgtgggcggtgctgctactgggcatggccggtgctgggatctggctgcatctgcggaccggcgatgcctggaatgcacgcttccaagccgaacccgagccggctcagtcaaccagcgttgacgtgacttcccagcccgaaccaatggccgaccgaaaggcagtgttggcggagattcgcgcacgccgggagcaggcagaacgtgagatccagcagcgccgagcggaaacgcgctgcatcggcggcgttgcgttccggcgcattccaggcggctgggagaacatcccgggcgaaacctgcccgtga

SEQ ID NO: 509112 - DNA, 627 bp, Stenotrophomonas maltophilia
atgaccagtagcgcacgcgaggtattgaagtggctggccgtggttctcatgacgtgcgaccacgtcgccaagatcatctatggcggctacgtggctggactcagcgaggcgggcagggtggcattcccgctgtttgcactggtgatggcgtacaacctcgctcagcccggcgccgatgtgctgaagtcggtgagtaggcttggcatgtggggcttgatcgcgcagccggtgcatgcgctggctttcggatactggcttccgttgaacatcctgctcacgttcgccctgtgtgcggcagtgatctggctggccgaccaacgtagatgggtaggcctggctttagccgcggctatattgcccctgttcgtggactaccagtgggccggggtatggttcgtcttgttggcgtggtgcgccttcaagtggcgccagttctggccgctggttccggcattcggcgcgatctgctggttcaacggcaacctgtgggcgctggcggcgattccggtggtgctgggtctatctcgggtggcgtggcgtgtaccgcgtggtcggtgggccttctacggctactacgtggcgcaccttgcgtgcattgggcttctggcgcctatactgcggctatga

SEQ ID NO: 509113 - DNA, 321 bp, Stenotrophomonas maltophilia
atggtcgatccgttgattaccttcgtgctgctggcggccattgcggtcgtctctatcggtgccgctcgcattgtgtcgtggctgctggaccggcgtgatcgtgccgccgtccagcgcgccaaggaagcggccatcgtcgcccaggcacgcgccgaactggatgctaccggctggaccgaagacgacgaggccgcataccagcgcgatccctacgcctatgaccgggaactgccgggcatgtgggaggcgtccgatttcatgggcggtcgtgattacgaactggacccggtcacgcgcgatgaggtgaatcgtggccgttga

SEQ ID NO: 509114 - DNA, 507 bp, Stenotrophomonas maltophilia
atggccagccaccgcagcactggaagcttccaccacgtcatcgtgttgcttaagggaagtgacaagaaggcggccctgtttaccgatttgacgacagctgagctaaagcggcgctttgtcaggccctataagcaggggaagccagcgctgctgccggacaactcggttgtccaaacgcgggaaatcacttggaccactatacgagccactgccgaagccgccgcgcccacattggaggcactggaagcggcgagtcgccgcaatactgatgagctcaaccgaggtggcggggtggtcttcctggggcgcttctcttggggcaacgaagatctggcggaagaagggcaggacgtcacatcgcgctacatccaggccccgccgggggaggatagcctttatcgccgcttgggttcttggcttgcggacaacctaggcaaggctggcattgctctcctgctcaccgttgcttcggcggtggtgctcacttggttgggattgaaaaagtag

SEQ ID NO: 509115 - DNA, 678 bp, Stenotrophomonas maltophilia
atgaaggaacatgccgaatcaatgctcaagcgaaaactgatcgtcaaccggggagagagcatcgatcggcgtagcgcggccggaactcttcagaaggctacgtgcgaggacattgctaggctcgcccttgcgatgcatgacaaaaaacacttcttctcgttgcgcagatctctcgagatgaggttcagccgggatatcaacggaagcggagttcaggcgctggaagtcttgaggaagggggctggtgatgactccagatacctttttcgcgtccactttgagtcagtccacagagatggtgagagctttctctatgaagcagacctcattcgagatcaggggaaagactacgagccgacagtgaactgcggtaagcaccgtttcggtgccaagagtgtttggctgcaaatcgattggagtagtgacgaggttgctcagtggtactccgacactcagcgtctttccaccgccgatcccgacagcctcgaagaatggctggagtccgatcgagagatgcttgtaaagtgtagggctggattcatttgtggttggcagaaggtcctcgcgagagacgaccttgctcgccacgccaatgcgggcacgagcttggaggacctgaaggcgcgactgacctgttctaagtgcggcaaaagaaacgccagaatcctggcactttag

SEQ ID NO: 509116 - DNA, 321 bp, Stenotrophomonas maltophilia
atggacagcaaacaggaagcgaagttcgaacaggtgcttctcgaagccgtggaccaagccaaggcattcaactatcacccaaaccgtttcgtagcgatgatccgcagcaagggaccgtttcaaacggtcaaggacatcgtcgcgagcgctaagccctctgacggcttcaacgagctgctgctggcgggccgaatggacctgacctgtgaggccatcatcgtgcagaccgaatggcgcaagttcttcgatgaagatcttttggcgatcgcagagcggcggctcactgcgcatggctacgcttggacgaggttcgcgggatga

SEQ ID NO: 509117 - DNA, 432 bp, Stenotrophomonas maltophilia
atgcagttagaaaaacttattcacctcagcaagtttgagctttctttgatgtatgtcagagagatgagcgagcacgtcgatgtcgctccactgctggcgaagccaaactgggctcgcgccgtatcagatcccgcttccgttgctacgatggagtggaaagatttcaaccgcctacgcaacggtgcctaccgagtcatctcgaagcatctgaaagaggcctctgaaatcggcgacaagatccgagacctaatctgcaatcgactaaaaatctgcaacaaactgggcttacctgtcatcgtcttggccagggaggtcgcagatgcgctcaaagatacctttggagaagcaaccgcaaacatcatcactgccttgcttatttcccacgtatccctaagccttttctgcaaatgtcattcgaaaggacactcctag

SEQ ID NO: 509118 - DNA, 462 bp, Stenotrophomonas maltophilia
atgcatgtgcgattggcggccttggccgcatggctgctgttgagtgcggcggcaacgccggcggcggcagccgaggtgatgaccttggataacgcgttcgcgcgtgtggcccaaacccatcccgagctgcgcctggtcgatgcgcgagccactgtcctcgctgccgagcgcgatcgggcggtgcagcgaccgccgtggacgctcggtgccgaggtcgaaaatgcgctgggcaccggcgcgacccgtggcttggacagcgccgagttgaccttgagcctgagttcggtgctggagcgcggcggcaagctcgacgcccgccgtaccttggcacaaagccggattgatgcgctggccgtgcagcgcgagaccgggcgcctggacttgctcgccgagacggcgcagcgctatttggctgtcgttggtgccgaccgacaacgcagcctagctgtgatctcccagtag

SEQ ID NO: 509119 - DNA, 2994 bp, Stenotrophomonas maltophilia
atggctacccttcacgagaccgcctacccgcgactgaagcctgatcccaccgccaaggaactggaggagatctataccccgaccgccgttgagattgcattcgccaaacagctgaccacccagccgggcccgcaactggcggtgctgattcatctcaagctcttccagcgcttgggctacttcacgctgttggccgaagtacccgagcggatccggcagcacatcgccaaggccgcccgtctcgggcgcgtactggactccgaccagctcgaacgctatgacgcctccggcagcaagcgccggcacatgccgcagcttcggcagttcattggggtatgccccttggacaaatcgggcgtggcttggctggatacggtggccatcgccgcagcccagaccaagcatacgattccggacatcgtgaacgtcctgctcgaagaactggtgcaccatcgctacgaactgccaggcttccgcaccctggagctggccgccatcggtgcccgcgagagggtcaatttggggtactaccgcagcatcagccatacactgacgcctgccacgcgcacgctcattgatgaactgctgcgcgcaccggaagggtctaggttcaccggctggcactcgctcaagcgcgagcctggccgcccgaccaacaaggaggttcggttctatctgcagcacatccgcatgctgcagcaattggccgagcagctgccgccaatcgaagtgccggtccccaagctcaaacaattccgtgcaatggctcgtgcgtacgacgccagcgagttggccgaattggctccggacaagcgctatgcgctggccactattttcattcgcgcccaacatgccaagacactggacgatgcggccgagttgttcatcaaacaggtgcgcgggttggaaaacaccgcgcaacagaaactgctggcgtatcagctcgaacatgccaaacgggccgacttcctaatcggccagctcaaagagatcctgcaggcctatcagctagatggtagcgatagtcagcgcgtggacgcgatcgacaacagtctggaagcggaagtgtcgaccttgctggccgaatgcgaagaacatatggcctatgcagggaaaaactacttgcctttcatgctgcagccctatggcgcggtcaggccgctgctgttcaatgggctggagctgatgaatctacgtgcgaccagccacgatgccggcatggagccgttgatcgcagccgtgctgtcactgcgcaaccagcggcgggagctgatcgaggttgcctccctgggtctggacccggagaaggattttgactggatgtccaagctctggcgtcagcacgtgctcggcaagcgtgccagcgcagccggcgccggctggatgcacaggaagtattttgagctggccgtgctggtgcaggtcaaagacgagctgaagtccggagatctcttcattcccagcagcgagcgtttcgacgactaccgcgagcagctggtcgatgaagccaccttggcccaggaactcgaagcctatggtcaggtgtcaggcctgcccaccgacgccgagtcgttcgtggtcggattacgcgcacaattgaccaccttggccgatgaggtcgacgcgcgcttcccggaaaatgtgcatgcggacatcctggaaggacgcctggtactgcggaaggggcaacgcgccgaggtctcaagttccattgccaccgtggattgcctcatcgccgaacggctcccggagtccagcatcgtcgatgtcctgatcgacgccagccaatggctggatctgcaccgcttcttccgtccgatcgccggcaccgagagccaggttgaggatcttccccgacgggtgatcaccacgctgttttgctatggctgcaacttgggaccgacgcagacggcgcggtcgatcaagggcttcagccggcgacaggtcgcttggctcaacctcaaatacgtgaccgaggatgtgcttgagaaggccatcgtagaggtcatcaatacctacaacaaattcgacctgccaggctattggggcagcgggaagagcgcgtcagcagatggcaccaagtggagcgtctacgaggacaacctcctgtcggagtaccacatccgctacggcggctatggcggcatcggctactaccacgtgtccgataaatacgtggcgctgttcagccatttcattccctgcggcgtgcacgagggcatctacatcctcgacggcctgttggccaacacttccgacatccagcctgagatcgtccatggcgacacgcaggcccaaagctatccggtcttcggcttggcccacatgctgggcatccaactgatgcccaggatccgaaacatcaaagatctgacattcttccgacctgagccgggaagagcctacaagaacatccaggcactgtttggggacagcatcgactggcaactgatcgccacccatcttcacgacatgctgcgggtggttatctcaatccgtttgggcaaaatcaccgcgtcctcgatcctgcgtcgggtgggcacctacagccggaaaaacaagctctacttcgccttccgggagctgggcaaggccgtcagaacgctgttcttgctccgctacattgatgacaacgagattcgcaaaacgattcatgccgcgaccaacaagagcgaggagtacaacggcttcgtgaaatgggtcttctttggcagccaagggatcattgctgagaacgtccagcacgagcagcgcaagatcatcaagtacagtcagttggtggcgaacatgatcatcctccacaacgtggagggcatgagccggacgttggctgagatgcggaaggagggggtcgaactgacgcctgagatcctggccggcctgtcgccttatcggaccagccacatcaatcgcttcggtgattaccacctggaccttgaaagggaagtggcgccgctgagctacacagctaaggttcttgaacagaccccataa

SEQ ID NO: 509120 - DNA, 744 bp, Stenotrophomonas maltophilia
atgcaattgcgactcacggccctggccgtgtgcgtcgcggcctgtgccgtggcctggccggccgccgccgccgccgaccgtttgaccctggacgacgcgttcgagcgcgtttccagatcccatcctgacctgcgcctcttcggtccgcgaagcgaagcgttcgcggccgagcttgaacgcgcgtcactgcggcccgcgtatgtggccggcagtactattgagaacgcgcttggcacaggcgatgccagcggtttgagtggcgctgaactgactttgacgctcgcctccgtgttcgagcgtggcggcaagctcgacgccctgccattttttacctcccagtccaaagcggccgtcgccgcgggtcactcggcgcgaatcgtgaccttcacgggccgcgaactgctcgaaatgacgcgtggagccaccttgatgctcaacccgaatgatggcggcgccgtgctgtacccggaagagatcgaatccctgttgaccacgggagcgatcgctccggtccggaaagactcgtggactggcgagccgctctggtggggttccccggaccgaccgccttcctggctgatcccggtgctgacgcgcacattgacacagcaaaagtccgtgacttcggcatacctgatccaaacggctcctgaagcggatcgggaagccgtctcgctgctgatcgtactggagggtcggcagggaatcgttatgttcagggccaaaagctgcctaaatgactga

SEQ ID NO: 509121 - DNA, 165 bp, Stenotrophomonas maltophilia
atgcaggaattccgtcgcctcaccgtccccggactctgtcgcgtcctggtgtccgatgcggtcaagatgcggaacgacctcttccgggtgatcaagcagctcgtgaagatccccagttgctgcaagcaccggctgcaccaccacgcagagcgcgaacaggcctag

SEQ ID NO: 509122 - DNA, 561 bp, Stenotrophomonas maltophilia
atgccgtactggaaagctacggttacaaccaatgtctcgatctgggagtggagcaacaagagcgaggtgttcggcaaccagattccgagtgcagacccggacggggatggtgtggcgttcgatctggtgttgcgattcccgggccagcaggcgacggatgcgaatgggctgttctacaactaccagcgcgagtatgacccggcagcagggcggtactcgcagagtaatcccatcggtctacttggggggattgcaagctttgcgtgtgctggtgggaatccgatttcacagtccgattctcttgaattgtgcgaagacgataatggttctgatgctcccattcatcaaaagacatatggcaagtacttcaagtcatgcatgtcctacgttcagccgccgacatggttgactttgccggtgtctggtgcgtccgttctgacgttgtttgttgaagtgccctttgttgccggtgttgcaacagtggggggaggagcgctggcgagctatgaggctggagccgctatcgtctgcgctatggctggaattcaaactctgcagtga

SEQ ID NO: 509123 - DNA, 762 bp, Stenotrophomonas maltophilia
atgacctgcttcttgccacgcagcaagggtgatcgccaagcagccggcgtcacctacaaggtgccggcgctgtcgcggttatgtccggtggaggcgacccaggcgtggctgcaggcggccgacctgcaagaagggccggtgtttcgggcagtcaaccaatggggccaggtgagcgccgaaggcctgcatcccaacagcttggtgcgcctgctgcgcgagttgctgaccagtgcaggctttgccgatgcggggctccacagcagccattcgttgcgccgcggctttgccagctgggccaacgaccaaggctgggacatgaaggccttgatggagtacgtgggctggcgcgatgtgcagtcggccatgcgttacctggacgggcgtgacccgtttgcccgggaccgcattgaagcaagcctgcccagtccaaccgtgccggtaccggcgatggcactgccggcgccggagggcaaatcggccctgcagctgcgcctgcgcatggtgctgaccccgtttgcccgcacgggccgcggcgcggccaaggcccgaggccgaattgaagagatctgcttggccccgttccaggctgtgcgcctgaacaccgccagcagcgagtaccagttgactgctcccaccgatcccgaaagggatctggatgaaatcctggccacgttgctcgatgacatgcaccgcatggccgatacgcaccagtgcttcctggaagcgtcgctcagtacagacgacggccggcactgggactga

SEQ ID NO: 509124 - DNA, 177 bp, Stenotrophomonas maltophilia
atgacgaatgatcaagccgggatgggtgcgctggaagtccagcaacaccgggtaaagagcaaggccaacactcccgggggttatcagcgcaaactccccctgatcgctgtccgcgctcgcgagcttggcttgaagccggcgatcggccgaatccatctcttggcagtactgcaatag

SEQ ID NO: 509125 - DNA, 1467 bp, Stenotrophomonas maltophilia
gtgaacatgcttgccccgctcacgacctcccaggcacccgactacaatttcggcatgctcccgccgctggccgcagctgccgcgagggcagtttgcgccagggccacggaagcctgccccgccttggtccggacgcacctactatcggtcctatcctccgcggttgctcctctctacgtaatgtcgccgcccaactggacgcccattcccatcggcgtcaacacgctgtgcatcgccgatgttggtggaagtaagagcccggtacacgagtgcatgatccagccgctcaaggatcacgttcgagacagcttcgctcggtatgaggtcgcgcggaccgaagcgagcgccgcgtcggccgagcaaaagttccacatcaagctcctgaagaccgagattgcgcgccgcctgcgcaagcaggagcccgcgcaggatcttcttgcgacactggccgagctgcaccgcacggtcacggcggcccccaaacaccgtccgcgcctcgcgagcaaccttgacctggaaagcctgcttgaccagctggatggcgagtacgaagcagtcgatttccttaccgacgaaggtgacaagctgctgagctccagcttgatgcgccacgtgtcggatctggttgatctgatcgacggaaaatcgctggaatttcggcgagagaagaagaggcatctctatgccagccgaccacgtggcacgttcggcttgctggcgcagtccgccgcgatcgagccgttccgcccccggtgcaagcgcaatgagtacaccgagcacaaggccgtcaggctcggcttcttcgcgcgtttcctcgtctgcgtcgcccagccgtcgcctatgggcaatcgatacgcacccgcgggcgacgatgacgaggctctttcgaatctccacgagacgctcaaggagctttacgacctgcaccaggacaaccaggaggccggtggcattgcgcccatcgaactggccttcgcacctgacgcgctgggctactgggacgagctgtgccgcatcactcacaatctcaagttcggacagctcgcgcatatcgccgacttcgtctcgaagatgctcaacttgaccgcccgactggctgcggtgctgcatgtatgggaaagccagacccactacgtctcgatctcctgcctccaacgtgcctgggcgcttgtctactggcatgccacccagtacgaactcgtgttcgtgccgccgcctcccctgccccaacaggaggccgacgtggcagccgtaatcgagcacttgaagatctttcgctttgaaaccgactacaaggaagttcccacggagcccattggcctgttgcttggcattcccagcaatcgtctgcgcgccgcccttctacgcatggagcagcgagacctgatcgagttgtgcggcggcaagacaacgtttatcaactgcatgaagatgttctcgcgatcgcgcaacattacgtggcggtaa

SEQ ID NO: 509126 - DNA, 177 bp, Stenotrophomonas maltophilia
atgaatctgcgggctaagtctgagtcattctggcgtaaaaatagtaagaccgaagtggggggcggtcgcgataggagcacgcttgcatcgaaagaggatgcgatcctccacgcgatcttatcggtcgctggtttttttgcaataatatttaattttgcaaaatattttggtttctga

SEQ ID NO: 509127 - DNA, 318 bp, Stenotrophomonas maltophilia
atggcgatgctttatcctgtcttggcgggcgcgctcctgtccctattgatggtttgtatatccaatcagaatggggtaacgctggctactgggaccgtgctcttgttggttgtggatggcgccagttttgggattgtttcaaagattttctacaagcttgcaatgggcacatatggcagccaagtccagggtgacgaggcgttgtatatggccctcgggggaatggcaattctctatcaagtttacaagcatgtgcgaaaagtatggtttaccattaagcagatccctgaccccaacgacgagcatccgacggtatga

SEQ ID NO: 509128 - DNA, 306 bp, Stenotrophomonas maltophilia
atggctacttcggatttttacgtttctgccgtcaattacaatagtgatgaaacccacatcgctaagctgaaagttcatgaggttaaggtcgggtcggataccttgcagcctgctcaggagatgacgcgtcctaaggtcatcgagcttatcgagaaagggaagaaattcaccacgattttcaggaagtcagatggaaattgggctatcggcgcgccgcttcagatcgctcctgttacgacgaagtatctgaagacgaagagtgatcagactacgaaggacaacttggaaaatctgccttctttctag

SEQ ID NO: 509129 - DNA, 300 bp, Stenotrophomonas maltophilia
atgaagatcgagaaattttggaatagtgcctttattgcagccttgaatcggctgcccgtagacgacgcaaagaaggaagcagacctggctacccaagtctgcattgagcactggcaggccaaccgaggaaatcttgcggtgccgggctataaactttggcaaaatcaaggcattgccgatgtgcctcttagcggattcaatgaagacgggacaccagtaaaaattcctccttcaccgaataaaattctagcaagggagcgcgcggcccagaaagccacacaaggaagaactgatgagtaa

SEQ ID NO: 509130 - DNA, 609 bp, Stenotrophomonas maltophilia
atggattggaggtgtggcgtgtcgagttacatattcgtttcccctggttctgaccctggtatgggtaaagcgctagtagacccgatcttgcaaccggacaagaaagcgaaatccaccatgggaacctgtcggcctgacctgcgccgcagggtgaagttaggcgatcagatcttcgtgataagcggcagcatggggaagaacgttcagcaatatgtgattggagggcttgaggtccaggacaagctttccagtcagatcgcagcgttcgatcagttccctgagaaccggctcagatttgatgagtccggccagaggctgggcaacatcattgtgactgcagacggacgacatcaccccgaagaccatcacgacaaatttgagaggcgaatccagaactatctggttggtcggacctctgtcatccttcagacgcctcgggagatccagcttggcagggagcgatcagtagacatcctagccagtctgtttgatcgtccaggctctacgcgaatccaacaagtgatagggcgcatgagaaagttgtctgaagagcaagctattcgtctgagagaagagctccaagccttgaagagggaagccaggaagtaa

SEQ ID NO: 509131 - DNA, 300 bp, Stenotrophomonas maltophilia
atgaagaagctttggacgctttccgccgccgcgctactggccgcttgctcgggtggtcctgggagcggcgatgttgagaaggcgctgacggcgtatttcaaggaagtgacgggaacgacgatgacgtttgagcacttgaaggtaggcgagtgcgtgcgaggggacagccctggctacgcgtgcagtgtcactgggactgcgcggtatcagctgggcactcgcattgagcaacagcagcttgtcggcactttcgtcatcgataaggttggcggcacttggaccgtcgtagaccgtcgctga

SEQ ID NO: 509132 - DNA, 1119 bp, Stenotrophomonas maltophilia
atggatgttttgaagggggctgtgattcacagtctggagaaggaagcgcacgactcgatgacgacggtgcggaaagccaatgatccgctagacgtgtcggacaagatggtgaatcgcttggcccaacagttggcagatctcgtcggcaaggaaggcagcgcagtgctatgggggcaatttgccccagccaatcgggagggggactttccaggttcggttcgaactctgcttgcggcagagttctgtccaacgctgctgatggatctttcgctagtcgctatgaaggaactgcgcgagcaggctgagaaaaagactggggcaacgggaggtcatatcttctttggtcaataccagagcaagggttcagatttcctcttggtggcaatgatcaagcagaagggcgcgatcaccttatctgaggatcttcgacctacggagatcaaagagatcgacatgtctaaacttcatcaagctgctcgcatcaacttggcgcgctaccaagttcaccttagcgcccccagtggaaacgacgatgcggaaagcacgaaggctacagagactgaggagaagacttatctctgctttgtgaatcgaaagggtagagaggatgtcgcggactatttcgtggacgcgctgggttgcgtaaaaggaacgtcttcttcccagctgaccactaaattgctgaggttcgtcaagcagttcgtacggaatgtgccggagatcgctgactctcatgctgagatcaagcaaggggtggttgattacatgcagtcactcgatagcagccaagtcgttaagctcgacgaagttgttcaagctgcgaaggcgaaggttcatccaacatttgcccagcatctcgatcctctgaaagtgtttcttaattcggacgaatgccagattcctgaagagttctcccttagccgccaggcgctccggccgcatatccggatcaacgctaagaaggcgaactgggggctgtggtttgagacgggtatagtcggtaccagcaattcagaacttctctacgacgctgcgcgaaagagtcttatgctgaccgacctgccgccagagaccgttgatagtatcgaagcagcgcttcgcgctcgtgggcagctgtaa

SEQ ID NO: 509133 - DNA, 1194 bp, Stenotrophomonas maltophilia
atgcccttgatctcaggggggcggttttccttcgagggttcggcagatgagctattaaggagcgcggttcagcggtgtcaggagcttggtgcaggctttggtcacttcgcggacggccctgactatgacggcgatgagcttgagttcacttgggctctcgccgttaacgagtcagggcgcttctacggatcagtggatgatcttgtagctagatgcgagtcaatacatcgcggccagtttcctgaaaatttctacatcgccgcgcttgatttcttttctggcgaagagctaggggaagagagccgtgagctgctcgttttgaagaatctttgtgagctcatccgcttgctaagcgagttaagtgtgagtggggaccttgccgccgaggccgggcgaccatcacacctagtgttcgtgaagccggcctcgtccggttcacctccggtcacggttgagatcactacgcgcatccaagcgaagatgctcgaaggagatttccctgatctggctgtcttgagcgatctcttaacagagagtgggaaggggaaggttcgaacggaggagtacaaagccattttccggctcgcggttgccggtgcgtgtgcagatgagcctaccgcagaggctagatttggagttttgttggatcactggggaggcgttctacgtcgattccggtatgacgttgaatgcctggtggatcgaatttcgtttgaagggcttcggcgcgagatagtcgaggccgagctaaactttgttggacggatgaatactgcggtagtagagaatgccacgaagttcttgggcatacctatatcccttgtggccgtcgctgcggtggttggagggaactctatcggcaatgacctgcttgtttgtgcgggtgctgtgatcgttgctctcgttgtaagcggtgtagcgagagctgtgcgtttgcagatggcaacaacgacaacggcatttgaggctgcgctcgctggtatgcgtgcccgcgcttcggctggcggtggtgtctcggaaagccttgatgatctggaaggtaccttccgccaacgacgcacgttcgcgagcagagtgatcgggacgttcaatacgctggcttgggtgcccccgctgctgggcgtggctgtggtggtttggaagtttcccccgctgtggcttacgcagttgctcgctgatatcgggtgggcatag

SEQ ID NO: 509134 - DNA, 612 bp, Stenotrophomonas maltophilia
atgaccccacccattcccgaaggctaccgcgaggaccgaaatggtcgcttggtgcccgaggcacagatcaagccgatcgatctggcacgcgaccagctggtgcaggagaagatccagcgtgccctggagctgcgcgaagaactgcgcaccttcaaggcggacacgttcgctgacattgcagctttcgtgcagctcagtggtgagcagtacggcgccaagatcggcggcgacaagggcaacgtgagcctgtacacctacgacggccgctacaagatcctgcgcgcctgccaggacagtatccagttcgatgagcgcctgcaggccgccaaggccctcatcgatgagtgcctgaacgactggaccgaaggctcccgtgccgagctgcgcaccctggtcaacagcgccttcaaggtgggccaggacggcagcatcaagaccggcgaggtgctctcgctgcatcgcctcaagttcgatgatccgcgctggcagcaggcgatgaaagccatcagtgatgcagtcacggtggtgggcagcaagacctatgtgcggttctacgagcgcgacgcacgcgggcagtaccagccgatttctctcgacgtggcgggggtctga

SEQ ID NO: 509135 - DNA, 228 bp, Stenotrophomonas maltophilia
atggctgagcgcggccaattcctggtggtccctgcagaatgggtgggtggcgataccttcgccgactcgacccaggcgatcgaagacgcgcaggcgcgcagcaaggtcgacggcaagcaccgcgcggtggtttgcgtggttgcccgcaccacgcccagcccggcaccagtcatcgtactgacgcgcacggaagcgggcatcacccagccgcaggtggtccagccatga

SEQ ID NO: 509136 - DNA, 1176 bp, Stenotrophomonas maltophilia
atgacgctgcgtctgaagcgcctgctcaccgaggccggcatcaagcagggagacctggccagcgctgctggcctgagccgtccagccctcaatgccctgatcaaccacggccagctgcccaccagctgcgacccggcagcggtgcgcgctgccatcagttcctgcctgacccagcacggcgtgaacgacgccgcctggcatgaacaggaggggccgacgtgcagcaacacgccggccccgatttccccaccgcaagacaccaataacgacaacgacatccacgacgaggaagatcccatgctactgcgtttccaggcattgaccccacaggccaagcgtcacttcggcctcaccagcaatcccttcgccgatccggccagtgccgaagaggtgttcctgtcgccggatatccgctatgtccgcgagagcatgtaccaggtggcccgccacggcggctttgctgctgtgatcggcgaaagtggcgctggcaagagcactctgcgcgaagacctggtcgatcgcatccagcgcgaagagcaagcggtcattgtgatccagccctacgtgctggccagcgagggcagcgatgcagtgggcaagaccttgcgtagccaccatatcgccgaggcgatcatggccgccgtcgcgccgctggccaagcccaagagcagccccgaggcccgcttccgccagctgcacgaatcgctgcgtgacagcgcccgcgccggccacagccatgtgctggtgatcgaggaggcccacagcctgccgctgccgacgctgaagcacctcaagcgcttccgcgagctgaaagacggcctgcgcccgctgctgtcggtgatcctgatcggtcagcctgagctgggcgtgaagctctccgagcacaacccggaggtacgcgaagtagtacagcgcatcgagatcatcacgctgccgccgctggacaacgagctgggcgcctacctggcacaccgcttcaagcgcgcccaggtgccgctggacaaggtggtggaccaaggtgccatcgatgcactgcgcaccaagctggttccttcgcgcggcgccgggtcgctgctgtacccgctggcggttcagaacgcgctgaccgctgcaatgaaccgcgccgccgacctgggcgtgtcgaccgtcaccgccgacgtcgtgcggggggtgtga

SEQ ID NO: 509137 - DNA, 492 bp, Stenotrophomonas maltophilia
atgcctgacgtaaagatttcggccttggccaacgctgatgctctaactggcgcagaacagctcgcggcgctgcagggcggtaagaacgtcaaggtgctggccagcgctcttcgcgcgggcctggctcccgtgccggaaggctgggtaacagtgactgccttcctgaacaactggcaggactatgccgtcaccgacacgaactacaaccgagtccagtaccgcaagaacggcgacagtgttgagctacgtggcttggtcaagaatgctgcctctgcctccagctccgccatcctcactctgcccgctggatatcgtccgctgaagaacacgatcaggttgacctgcgcctatttcggcgtgagtggcttccgcgcggcgcgtgtggatgtccagcctggaggctcactgttctttaccttgggcattgaccacaacggaacgggaccgaccgattggttggtgctggatggtctggccttctcgatttcttga

SEQ ID NO: 509138 - DNA, 1098 bp, Stenotrophomonas maltophilia
atggcaccgaggcaacgaagcaagagccgccagggatggccggacaacctgtaccccaaccgggatgggttcaagtaccggcacccggtcacgaagaaagagacgtggatgggcaccgaccaggcccgcgcgttcgccgcggccaagaagctcaacgcgctgctgatcccgaccgacgacctggtcgcgcgggtcatcacccccggcgagacggtagccgatgccattgtcgtgttccgccgcgatgacgtgcccggcaggaagtgggcgccgaagacggccgaggtctacgaaagcgtgatccgacgcatcgaggccgggctgggttcgaaggcagtggccgacgtgacggtgaaggtgtgcgccaccttcatccgcgaggtgaccgaatccgaccgcgcgcgccagcagttccggctggtgctgggctggatcctggcatgcgccgtggaggaaggctggatagataccaaccccgcgctggccacgcgccgattccagcatgagcggaagcgcgtgcgcctgaccctcgacgtgtaccgggccatatgggacgaggccgcaccgtggttgcgcaacgccatggacctgtcgctggtgacgctgctgcgccgcgaggacgtggtgacggtgaagttcgccgacgtgcgcgacggccacctgtgggtggtgccgtcgaaaaccgagggctcgacgaacgttcgactacagatcgccgtggccgggccgctgctcgacctgctggccaggtgccgcgatgacgtggtttcgccgttcgtgatccaccgcctgccggaaaaggccagacccagcgacaagcgcgcgaaggaccgagcgcaccacacgcaggtgctgcccgagcagctgtcgcgtgcgttcgcaaaggcacgcgatgctgccggcgtgggtggcgaagcaccgccaaccttccatgagatccgcagcctgggcggtgcgctgctgcgcgatgcgggctggaccacggaacagattcaagcgctgatgggacacggcaacgcgtcgatgactgagcattacctgggtggccatgaagcgccgtggcagccagtcaccacgggtatcgcgctacctcgatag

SEQ ID NO: 509139 - DNA, 915 bp, Stenotrophomonas maltophilia
atgaaggccatcgatctgttcgccggcggcggcggatttactgaaggcgccgagcaggcaggctgcgaagtggtgtgggccgcgaaccactggcccgcagccgtcgagacgcacgcggcgaaccatccgcgcgcccagcacgtttgccaggatctgcagcaggctgactggacgcagctccccgacttcgacctgctgctggcttcgccggcatgccagggccacacaccggcccgcggcaaggaacgcccgcaccatgacgccacgcgctcgaccgcctgggcagttgtgtcggcgctggaatgcaagtcgcccgaggccgccctggtcgagaacgttccggccttcctgaagtggaagctgttcccggcatggtgcgccgcggtaactgcgctgggctacgcagtcagcccgcatctgctggatgccgccgacttcggcgtgccccagcaccgcgtgcgcatcttcatcgtgctgaccaagagtaagcacccattggagctgaagctgccgaagatgccgcacgttccagcgagcagcttcatcgacttcaacgccggcacctggacacccgttgagcgccctggccgtgccgcggcaaccatcgccagggtgcgtgcaggccgggcggcgttcggtgatcgattcgtggcgccctacttcggcaccggctccggcctgactggccgatcgctggaccgtccaatcggcacgatcaccacccgcgaccgctggagcatcatcgacggcgaccgcatgcgcatggtgtcggtcgaggaatccaagatcgccatgggcttcccgaagcactatctgctgccgacaaacaagaaggacggcatgcagatgatgggaaacgcggtgtgcccgccgaaggcctgtgaagtcatccaggcactgagggctgccgcatga

SEQ ID NO: 509140 - DNA, 192 bp, Stenotrophomonas maltophilia
atggctgaggtaatcgaccaccgcgaggtcggccggcagctggccagcatgtccggggtggatctgtccgaggctcggccggcaaccgtgcgcgcatgggaggcccgtggcttggccctgcaggcgctggcgcgcggcgacaaggccgaggcgcagagagtcatgaatcacgcgaagggaggcatcgtatga

SEQ ID NO: 509141 - DNA, 1197 bp, Stenotrophomonas maltophilia
atgaccagcatccacgtacagccgaccttcgacctggccacgcaggccgagaaggatcgccagcgggccgagctggccaccgacgtggcgcggttcctgcgctcgggcggcaaggatccagatcctcggcaacagccccatcgaccgatccaccatcagccgccgtcaggtggtcgagggtggccacgacagccgcacgaagaagggagtgcgcgcatgaagaccatcgaatactccatcagcgaagccgacgccgtgcgtcacctgatcgtgtgcgacacacagttcacgtgggctggcgtcaccaatctcacgttgccgcagatgatggacctgcaggcccgtggctgggttgtggaaggcgacgacaacgacgagttccagctgaccgaggctggcgaggcagtcgtggccagggcgctgcagcacggtgtaccgaagaccctggcggacgtgcagcccggtgggagggtgaggctgggggatgctctgttgccctgcccgctctgcggaaacgatgccgagttcgtgccctacaagaacaacggactcaccctgaagtgcaagagcatgggctgcatccagcggcaccagtgcaccctccgctacggcatcgaatggttgcggacctcgatgacagaacattggaatacgcgcgccctctcctcccagccctccccgggtggtcagggagatgcgctccacgatgctgtcagccgcatcttcgggtgcgacggtagcccgtggcgcacccgcgacgttgcggcagtgctgcgcgactatgccgccctcgccgcccgccagccggtgggggagccggtggccgtggtggtgccgggcgcgccaacgcgctgcaggcactgcgaaagcaccgatctggaatggttcgcccatgttcgcgcggtcaacgacgttcctcatgggcgactgactactcacgacgtggcctgcgtcttcgtgctgggatgcaatgaatgctcggagacgttgcacacggtcaaggctgattccatcgcatcgcttctcgccgctccgcccgtgcaggccgtgaacctggggctgcagctggatcgctacgacgccggcctgctgggcgacggcggcggtggcgacgtcaactggtggcaggactacctccgcgccgagctggatcgcgcccatgagttctaccaagaccaggcagacgcccatggctga

SEQ ID NO: 509142 - DNA, 393 bp, Stenotrophomonas maltophilia
atgatcgagcaaatcgcaatcgcagcaaccggcgtcacggccatctggctgacgcagtcgaagggcgcgcaggtccgtcgcttcgcctgtctgttcgggttggccggccagcccttctggttcgcatcggccatcgccgccgagcagtggggcatcgtcgttctgtgctgcttctacaccgtggcatgggcccgtggcgtctggaacaactggatctctacgaagcgcaagggcgccgacggcctgacgcgtggacagcgagcgttgaaagaagcccacggctctcccgaggcgttcgccgatgccgtctggcgtgcatgcccttccttcatcagtgccgacgaagccagcgcggccatcaccaagtaccgagccgagtgggaggccgcatga

SEQ ID NO: 509143 - DNA, 216 bp, Stenotrophomonas maltophilia
atgaggggactgaactacgactatccccacgtcggcacgaagcgtggcggcagcaaccgcgcccgccagttcgaccacgtgatcgatgggaagcgcgtcacgaccatggaagtggccgaggcgctgggcctgtcgaagaagcaggcagcggcacggctgaagctgggcccgttcccgctcacctgggaaggcctgcgcggagatccgccggcatga

SEQ ID NO: 509144 - DNA, 318 bp, Stenotrophomonas maltophilia
gtgagccgcggtgtggatgtgctggccgtgctggaccgccagttgcgggatcgggccgatcgcgccgcacgctacggcaagcaggccgacaaggcggcggccaagcacggcggtaggcaggtcaccgcggaccgcatggcggaacacgcacgcctcctgctcgccgaactgcgctcgatgcgcgcgccgctgatcgaattgcgctccgccgcccacgcttccctcgcagcccgtgacctcacagaccaggtcatggccgacgagcgcctgcttgcagccctggctgccttcgaatcggaggacgcatgcgcctcctga

SEQ ID NO: 509145 - DNA, 351 bp, Stenotrophomonas maltophilia
atggcactgcagccatacagcgaccgggcacgtagcgcccagcgcaactgggacaaccaggaagatccgcgcttcggtcaggaacaccgcgccgagctggcggcggacctggccaaggcctaccgcaccgacccggcgaagctgcgcgaggccgaggaacagacggccggcaccttcagcggtacccactacaccgaggtgtcgctggcgttgcaccggctgcaccacaccgaaccagcagacctgctgggctcgggggtgctggaaaccctgtatcagctggccaagcccgaggccgcggcgatcgacgcgcagctgctggaaatggcgctgcagcaggtggccgcatga

SEQ ID NO: 509146 - DNA, 447 bp, Stenotrophomonas maltophilia
atggttctgggaacgctgctgttcgttggcgtggggatcgcagcactcttctttaccggcgcccttctcaacctattgctatggctgagtagtcgcggcgctagctggctgctgctcgcgtcgaccgcctatgtggttttcagcctgttcgtgctgctgccactcgccgcatttcgcggaaccaggcgtttcgctggtggtggaatgaccgtgggcaaaggcctgttcggcttcacgctctgggttctttgcattgcactgaccttcgccaaatgggggaagaccgtcacaatcgtcgggcttctattcttcggtgtcggcatcctccccatgggcatcgttgccggattcctgaccgacccctggtatgggggatttatcccgttgctgttggtagcgctctacgttggagcctcagctgccgcgaaccacttccttgaggattga

SEQ ID NO: 509147 - DNA, 381 bp, Stenotrophomonas maltophilia
atgggcgaggcagtggaaaacgtcgactacccggaggtgatccgggctatcgatttcgaacccggctacatccggagcatcgtagggttcgtgccagcaccaggtcggttgaggctcatcacgggtaacggagactccatgcaacctgtgatccaacccggagatgcggtggtggtggataccggaattacctcattcgacggtgatggcatctacctgatcaacatgggcaacggccagcagatcaaacgactgctggacaggggcgtgatccatgtcgccagcgacaacaagagctacggcgatcccttccctatgccagatggcacgttgattggggggaaggtgtatctgcgaaataggatcgagcggttcaactag

SEQ ID NO: 509148 - DNA, 213 bp, Stenotrophomonas maltophilia
atgcacaaggattccgagctgatcgaccagctcggtggccccgccgaagtggcccgacgactgggcttcgcgatgcccaagggcacccagcgagtacagaactggaagtaccggggcatccccccatacacgcgggtcacccggaccgatgtgttcggtccggcgccgaccgacattgagcagcagaccccggaaaccggggccgctgcctga

SEQ ID NO: 509149 - DNA, 261 bp, Stenotrophomonas maltophilia
atggacactcggcgcgccaaagccctggtcggccagatcgttctggccgagtggctggactccagccgcagcgatggctggacgcgggaaaccccggagacggccgacgacctgcgctgcttctcggctggccggctcatttctgctgcctctggtgcggtgaccatcgccggtcactggacgaacgaggcgaacccgcagcgcagcggggaaatgacgataccgagcagggccctcgtatcgctgagggccctgcgatga

SEQ ID NO: 509150 - DNA, 141 bp, Stenotrophomonas maltophilia
atggcaaagaacgagaagaccagtccgaaggtcgcttcgaccgcttccaagctcctgtccaatccgaagtcgtccaaggccgtgaagcaggttgctgcgtcagcactgacccaggcttcggacaagggcaagaagaagtaa

SEQ ID NO: 509151 - DNA, 228 bp, Stenotrophomonas maltophilia
atgaacgaaacccggacgcagacccgcgcaggacgcgtcgccgaatggcagcggcaggacgcgctggaagtgcaggcactggcggcagacataaccaaggtcttcaccggtgcggcctccgagaccaccgacgtggtgcagcgcgtgctggcctcggttcttgcggatccacctgccgttgcgaaacacacgctccgaccgatcgccaaggccctctcaggcctgtag

SEQ ID NO: 509152 - DNA, 366 bp, Stenotrophomonas maltophilia
atgaaaagcctaacaattacctacgacgacgcggtggcccgcagccgctcgcttcgtgagcacatcgcgactcaggtgtatgccggcgcgggcgtgacggcggttgccggccggctcgacatggccccgtcgaagctgagcgagaagctggccgggtgcgacagcagcggcaagccgcgtgggctgtccatcgatgacttcgagcgctacgtcgacgagaccaaggacgtgacgccgattcactacttggtcgagcgctacctgatttctccagaggcgcagcacgccgaggcaatcgcgcagttcaccaagctggtggcggcgatcgagccgctggccaagagcctgggggtcaagtggccatga

SEQ ID NO: 509153 - DNA, 204 bp, Stenotrophomonas maltophilia
atgaacgccaacacgatcaacctggccgacgagcagcgcgagcgtcgcattcgcgagctggcagccgccatgagggtcgcccggtcctgtggcgaccgcccggcgctgcggcgcctgtggaacgagctgcgcgcttcggtgctggcccgttcccctgagcaggtgcgttccatggagcagcgcatgggggtgtcccatgcgtga

SEQ ID NO: 509154 - DNA, 846 bp, Stenotrophomonas maltophilia
atgcgtgagtacggacagatccagtgcgcgttctggcagagccaggatgcacaggagtggaccgacgccggcaagctgctggccgcctacctgatgaccggcccccactcgaacgggctgggttgctaccgctgcccggatggctacgtgatggctgacctcgggtggtctctggaaagggtttcggaagggtttgccgaactgtctcgaaacggtttcgcataccgtttcgaaggggttgtttttctgcccggattcctgcgctggaacaaggtcgccaacggcaacgtggcggcggcccgcatggcggagttcgaggcgcttccgaagggggaggcaaaggcccgcgtggccggcgcaatcctgaagtacgtcaagcacttgggtaacgactaccgaaccgttctccaaacggttgcagaaacggtttctgaaacggttcccccaacggttacccaaacagaacccaacccaacccaacccagagagaacccaaaccaaaccacttgcgctgcgccggccgagccggctccggctggcgacctcctgccagcagcgcctgcttcgcctgtggccgtcagcttcctgctgaacgacggcaaggacttcgaaatcaccgaggcccaggtccgtgagttcgccgagctgtacccggccatcgacgtgatgcagaccctgcgggcgatcaaggcctggacgatctccaacccgaagaaccggaaaacccgcagcggagcgatgcggttcgtgaattcctggctgagccgcgcgcagaaccaagccccgacccgtcagggcgcagcgccggcgcagcagaagggtgcactgccgaggctcagcgcatga

SEQ ID NO: 509155 - DNA, 450 bp, Stenotrophomonas maltophilia
atgatccacctgactctcccgtacccgatcagctcgaaccgctactggcgcgctgtgatcatcaaagggcatgccgtcatggtcccgaccaaggaggcgaaggcctacaagaccgaggtggcgtggctggccaaagcagcaggcataggccagccgcatgttggacggatcgcgctgaccatccgcctgtttccgaatctgcctcaggactgggcaaagcgtgcgcgccgcgacccgcacacctgggacgacacggtgcagtgcatcgacctgggcaactgcgagaaggtgctgtccgatgccctcaacggtgtggcgtgggtggacgacaagaagcaccgccgcatcctgctcgaacgcatggagccggatgccaagggcgcacgcgtcgagctggtcatcgagcatttggccgcggcacccagcctgttcggcgaggccgccgcgtga

SEQ ID NO: 509156 - DNA, 213 bp, Stenotrophomonas maltophilia
gtgaccactgccgaggcccgcacgcggaagcgatacaacgcctacctgcgccggcacggccggtgcgcggtctgcaccatgcgcgcccgtggtatcagcccggcgcactgcaaaggctggcccgagcggcagggcagctgcgacaccgacggcaagctgccggtgttccgattcgacgaggacgtgctgaaggggatgcgcgatgacgactga

SEQ ID NO: 509157 - DNA, 534 bp, Stenotrophomonas maltophilia
atgacgactgacgactacctggtacagcagttgcgagcctggggacatgcgcaggcgaaccgcttcgcgctgacctacgccgaccgcagcacgcacgtgctggagaaggcccgcgacatggcccccggcacccgggagcgtgccctgcgcgacctggtgggtcgagatggttccagccgccggcggttcatggccgatcgcagcggggtggagggaatgggcatgctgccggcgtgggcggtagacccggtgcggtcgacgaatgatgccgacaagccacacgacaacccggagatcgccgtcgatgtcggtatccccgacgaactgcggtgggtcgagcaggcgctggcgtcgatgatgcggcagcacccgctgcgcgccctgatcctccacaccgagtacacggtgtctgccagtcaggcggtcaaggcgcgcattgtggccgagaagtacggcggcacgctgacgctgcgacagtaccgctatgagctgtcgaagggtacggactggttccgcggccgattggcggcatag

SEQ ID NO: 509158 - DNA, 195 bp, Stenotrophomonas maltophilia
atgtacggcacgtgccctgaatgcaaacaggcagtcatgaaggtcaaagcgaaatcgatcgacatcatggatggagcgcgctcgttgaagggtgtcacctacagctgcaatcagtgcggcgtagtgctgagcgtcgatgttgatcccttggcgtacaaggccgcgatcgcggctgaggtcaagaaaagaggttga

SEQ ID NO: 509159 - DNA, 435 bp, Stenotrophomonas maltophilia
atggtgatacctgatccgctgcggccctacgtgggcctgatccgcgttggtctgtgggttgccgcggttggcactgtcctgctggtgggcgcccggctcgggtcggactaccgcagcaagaaggaccaggccctgatcgccgccgccgagcagcagcgcgacaaggcccaggccaacgctgacgagaatctgcgcgccgccaacgcctgcggcgcgctgctgcgggaagtgaaccgccagacccagctggccatcgacgaatccgcccgtcagcagaaggctgcccaggcggctgccgacctggccgaggcagcagcagtccagagccagcgccgcgccacccaggccgagcaggctctgcaggcggccaagacccagccggggtgccggcagcagttggagcagaccctatgcgacgccattccgttgctgtga

SEQ ID NO: 509160 - DNA, 519 bp, Stenotrophomonas maltophilia
gtggcacgaccgagcaagaagaccgccaagctggtacaggccattgtggagcgcctgtccgaaggtgagccgctggcccagatttgccgggacgagggcatgcctgccgcccgcaccgttcgggaatggcagcagacggacgaggcggtttccgccgccatcgcacgcgcgcgcgaggaagggttcgacgccattgcggccgagtgcctgcggatcgccgacacgccgatgcccggcaaggtcgagaagcgggagctgctgggcgtcctgaagcacaaggacgaggacggcaaggagcagagcatggctctgcccgaggccgagcttgtggtcaccgaggaacgaaccgaggacatgctgggccaccgcaagctgcagatcgagacccgactgaagctgctggccaagtgggatccgaagcgctacggcgatcgtctggctgtcgatcacggcgtgcaggacaacctggccgcacaactgagggccgcccgtgagcgcgcaaccggcagcaagtcctga

SEQ ID NO: 509161 - DNA, 1500 bp, Stenotrophomonas maltophilia
gtgagcgcgcaaccggcagcaagtcctgagctgcagctggtctacgacatcgccgggttcacgcaggatcccctcggctacgtcctgtactgctatccatggggcgttgccggcaccgagctggtcgaccggaacgggccatatgactggcagcgcgagcagctgtcggagatcggcgagaagctgcgcagcggtgccgccacgatcggcgaggtgattcagcaggcggtcgcttctggccacggcatcggcaagtcggccctggtggcttggctgtgcaactgggcggtggatacgttcgaagacacccgcggcgtggtcacggccaacacggccaaccagctggaaaagaagacctggcccgagatcggcaaatggcgccggttggggctgaccaaggattggttcgacgtgacggccaccgcgctgatctccaccgcgaagggtcacgaccagagctggcgcatcgatgcggtgccgtggtctgaacacaacaccgaggcgttcgccggcctgcacaacgcagggaagcggatcatcctgatcttcgacgaggcctcggccatcgccgacaaggtgtgggaagtggccgagggtgcactgaccgacgccctgaccgagatcatctgggcggtgttcggcaatccgacgcgaaacgttggccggttccgcgagtgcttccgccgcctgaagcaccgttggtcgcatcgtcaggtggacagccgcactgtccctggcaccaacaaggctcagattgcgaagtgggcggctgaccacggcgaggacagcgatttcttcaagatccgcgtccgcggcatgttcccgtcgatgtctgccaagcagttcatcagcgagacggacgtggtggcggcttacggtcggcacctgcggccagagcagtacaactgggcacccaaggtcatcaccctggacccggcgtgggaaggcgacgacgagctggtgatcagcctgcgccagggcctgatgttcaaggtgctgcggacgctgcccaagaacgacaacgacatccacgtggccaccgtgctggcccagttggaagacgaacacaaggcagacgccgtgttcgtcgatgccggctatggcacgggaatcgtatcggcaggtcggacgtggaaccgcgactggcgcctggtgtggttctcggccgaatcgaacgacccaggttgcctgaacaagcgcgccgagatgtggaagaaggcgcgcgactggctgaaggaaggcggggccatccccgaagacccgcagctgcgcgacgagctgcaggcgccggagaccgtggcacgcctggacgggaagatccagatcgaatcgaagaaggacatgaagcgccgcggtgtgccgagccccaaccgggccgactcgctggtgatctccttcgcgtacccggtcatggccaagccgcggcacccggacggctcgcccatccagccgtatgaccaagccgaccagcaggccggcgaaccctacaacccgctgtaa

SEQ ID NO: 509162 - DNA, 204 bp, Stenotrophomonas maltophilia
atgtgcaactccgccccgaaggtgaagccggtggccgcagcgcccgaagtggcgcccgagtcgatcgacgatgccgcagtgaacgagcgtgaccgcgagcgccagcggcagcgcctgcgcttcggcgccaggtcgaccatcctggctggtgacaccagctcggcgatgccgaccgcgtcggtcaagacggcgctgggtgcctga

SEQ ID NO: 509163 - DNA, 264 bp, Stenotrophomonas maltophilia
atgtgcacctcgcgccagatcatcgacccgggtggcctgctgttcggcgacaagacgggcaagtacgccgacccgctcggcatcaccaagaccgcagtgggtgacccgaccggccgcgtgcgccgcgctcgcaaggaagccgaggacgagcgccgcacctacgcgagcagcggcgcgtcctctgtggcctatcgatcactggcaccgaccacaaccgtgctgggtggaacggctccgcgcaacaccgtgctggggggaggctga

SEQ ID NO: 509164 - DNA, 1713 bp, Stenotrophomonas maltophilia
atggacatcgcaaagctgcaggcgcactgccgacgccgcaagaccgccttgaaggaagcgcagaacgactggacgccgctgtggcgccaaacgtcggagtacatcgacccgacccgcggtcgcttctacggtgaccaggacgacaagccgcgtaagcgcaactgggccaaggtgatcaacagcacggccaccgacgcgctgggggtgatggcggccggcatgatgtcgcacatgacgcccaaggcgcagccgtggttcaaggtgaccacgcctgacccggccattgccgagcagttcggcgtgcgcgtgtggctcgacgatgtcgctcagcgaatccgcgacaccctggccagcagcaacttctacaaggccatgccggtggtctacgccgaggacggcatcttcggcgttgccccgctgctgatgctggaagactcgcgcgaggtggtgcggttctacgcgctgaccgccggcaactacgccgtggggctcgacgaccagggacgggtcgactcgttgtggcgccgctacccgaagaccgcgcggcaactggaggaacgctacggcgcagatgcactgccggctgtcgtgcgcgatgcactgcccaagaacggcgaccagaggttctgggtggagtcgctgatcgagccgaatccggaccagcgaccgggcatcggccccctggggctgcaggcgccgcgcttccgtccctatcgcgaggtggtctggatcgacggtgtggccaacggccagaacggtgtgatcgacatcggcggccattacgagtcgccgttcgtcgtggcccgttggaaccccgtcgcggaggacatctattcgtcctgcccggcgatcaactgcctgggcgacatcaagcagctgcagtacctggaaggcgagaagctgcgcctgatggagcaggtgtcggatccgaccctcggcggccccgagtcgctgcgccggactggcggtgcacgactgcgcaagggcggcatgatctacctgccgcaggattcggtgaacgctaccgtcgcgccggtctacacacctgatccgaggggtgtgcgcgagatccgcgaggaaatcgccatcatcgaacaacgcatccagcggtcgttctactaccagctcttcctgatgctggaggcgctgggcgacaagacggaccgcaccgcgaccgagatcgtcacccgcaaggaagagaaggcggcagtgctggcgccgacgttggagtcgatcaccgacgaggttctcgacccagcggtggttcgggtgttccgcctgttggagcgcgctgggcggatccctgagccgccgcaggtgttggccaacgtgccgctgaagatcgagtacaccagcatcttggcgcaggccgccaaggccgccgcagttggttcgatcgagcgcaccatgacgttcgtggcgaacgtggcgcaggccactggcgatccgtccgtgatggacaagctggacagcgaccaggtggtcgacgagtacaccgccgccgtgggcggccctgcatcgatcatccggagcgacgatgcagtcgcgaggatccgggccgaccgcgcgcagcagcagcgccagcagcagctggcagcttctgcccagccgatgaaggaggccgcggaggcgctgaagacggccagcgataccgtgcccgaggaaggctcggcggctcaggcgctcattgacgccatgcagggtgccgcatga

SEQ ID NO: 509165 - DNA, 357 bp, Stenotrophomonas maltophilia
atgaagcgccccggcatggacccgcgagaggaagagcagaagaagctcgccgaccggctggcagacatgcaggacgcacagctgcgtcaggatgtgcgcactgtgctggcaaccacggaaggtcgccggatgctctggctgttcctccagaacatgaacgtggatagcagtgcgttcaacccgaacgcgatgacgcagtcactgaaaatcggtcggcaggaggccggccagtggtggctgcaccttatccgcgatagctgcccggagcgtgaggcacagatgcgcgccgaggccaacacagaagagaagcggctgctggcgcagctgcagcaacccgaggaagacgacgatgagtga

SEQ ID NO: 509166 - DNA, 690 bp, Stenotrophomonas maltophilia
atgagtgacaccaccaccgagaccagcacacaaaattctggcgcaggcggagctacgaccaccgcaaccgatacgcagcaggttcccggcagcagcgcgccggcgggatccgagggcagcggcaacggtggtgacgcaacgggcggcgatggccagccgaacaagggcgatggcggcggcgatgccggcaagcccgaggacggtaagaccagcgcggcaccggagcagtacggccagttcaacctgccggaagggttcaccctggaaggcgatcgactgggcgcggccacgcagttcttcaaggccaagggctggacacaggagcaggcccaggaggccgtcgacctgtatacccagatggccgggcaggatgcggcggcgatgcagcaggcaatggaagcccagcgcctgcagcaggtcgagcagtggggcgtggatgccaagcagcagctgggcggcaagtacgacgaaaccgtcggcctggccactactgcggtgaaggccatcaacgaccccgagctgaccaaggcgttcaatgagctgggctggggcaaccatccgaccatgatcaaggcgttcgccttcttcggcgggttccttcgcgacagcaaggtggatggcctgggcggtatcaccgcatctggtccgagcgcttccagcgacccgaagtcgatcctctacggcggctga

SEQ ID NO: 509167 - DNA, 1002 bp, Stenotrophomonas maltophilia
atgtcgaccatcggcaacacctacctgaccctcgcggacgtgttcaagcggaccgacgccgacaagcagatcgctgcggtgatcgagctgctggcgcaggacaacccgatcctgcaggacatgatcgtcaaggagtgcaacgacgggaccacgcacctgacgaccgttcgcaccggcatccccgaaggcacctggcgcatgctgtatcaaggcgttcagcccaccaagtcgaccaccgcacaggtgcgcgacgccaccggcatgatcgaagcatggagcgagatcgacgagaagctggtgcgcatgaccggcgactcggccggcctgcgcctgtccgaagcccaggcattcctcgaaggcctgaaccagggcgtggccacctcgatgttctacggtgaccaggccacctcgccggcgaagttcactggctttgctccccgcttcaacaagatcgctaccagcggttcgggagcccagatcgtcgacgcaggcggcaccggctcggacaacacctcgatctggttcatcgtctggggtgagaacaccgtccatggcctgtacccgaagggcagcaaggccggcatcgatcgtgaggacaagggtaagcagaccaagaccaacgcggatgggtcgatcctcgacgtggtccgcgaaaagttccagtgggacattggcctgtcggttcgcgactaccgctacgtttcccgcatcgccaacatcgatgtatccgacgtgcaggccggcaccgtgaagctgtacgacttcatgcgcaaggcctactacaagctgaagcagcgccgggtcatgggcggccgcgcggccatctatctcaacaccgacatgatggaagcgctggacaagctggccaccaatggcggcaccaccgacaacttcgtgcgcctgacccgcaaggagatcgagggcgaggaagtgctgacctatcgcggcatcccgctgcgcgagtcggatgcgctgctgaacaccgaagcccgggtcgtctga

SEQ ID NO: 509168 - DNA, 435 bp, Stenotrophomonas maltophilia
atgatcttcgatcagcagaacctgttctcgaacgcacagtcggtgctggcgagcgcagtgtccaccaacgtcatcgacctgggggccaccggcaccgtgcgcggtgagggcgcccccatcaagcgcgacatcggcccgggcaccccgatccctctgcgggtgcaggtcgttgaggccttcaacaacgccaccagcctgcaggttgagctgcaggtatcggccaccgagaacttcgctgcaccggtcgtagtcggctcgcagaccaagctgctggctgatctggccgctggctcggtgttcggcggcctgtactacgtgccgcgcggtaccaacctgcgctatgtccgcctgaactacaccctggtgggcaccgcgccgaccacgggcaaggtcactgcgggcatcgttgcaggccatcaggagaaccacctgtga

SEQ ID NO: 509169 - DNA, 324 bp, Stenotrophomonas maltophilia
gtgaccggcctgcgcgtgcgcgcgacccggcgcggcttcttcgggcagcagcgcgaacccggcgacgagttcgagatcgacagcaaggcacagctgggcacctggatggacccggttggcggtaaggccgtggccgagaagtcggcgcccccgccggcagacccgttcctcgaccgcaccgtggatcagatcaaggacgacctgcccgcactggcggtcgagcagctggccgcttaccgcgagcaggaagccgcgggcaaggaccgcaagggcgtgatcgaggcgatcgacgcggccgtggccgagaagtcggcgaacgcctga

SEQ ID NO: 509170 - DNA, 333 bp, Stenotrophomonas maltophilia
atgaagctcgtatccatgaagaaagatggcagccacgatcacggctgtgactgctgcgcgacggcgccgtcaggttgcagcgagcctgactacccgtgggggctgcgcatcaacctggacgaagaccagatcgcagcacagggcatcaagcagctgccggcgtctggtgcacaggtcgccattgaggcgatcgcgaccgtggtttcgctcggagaggaaacgcgcgatggcaaggtgcatcgccgattggagctgcagatcaccgacatggggctggcagccgcgaagggcccgaagcccagcgaagtgctgtacccgaacggtgaggactga

SEQ ID NO: 509171 - DNA, 642 bp, Stenotrophomonas maltophilia
atgacgtcccaggtccaaatctgcaacctggccctgggcaagctggcccaggacatcacgatcacctcgctgaccgaacgctcgaaggaggcgcgggtgttctcgcgcctgtgggatcccatgcgcgacctggtgctggccgaccggctgtggccatgggccatgaaggcgcagcggctggcagtctctgcagaggcgccgatgcccggctgggagatccgctacgcgcgcccgtcggattgcatcacggtgctggccatcaccgacgatcagggcatgcgcgccggccgccgcctgtcgcgctggtgcgagccgcagttccgccagtgccacggcatccagttcgagcaggcgatgggcacggatggcacctcgttgctgtgcgatctggccgaggcctatctgatctacgtcgcacgcgtggaagacccggagcgttacccggcgcattttgtcgatgcgctggcctgcaagctggccgaggaaggcgcgccgacgatcatcggtggcaatgggttctccaacaaatccggcctgaagcagctctatcagctggcgctgagtcaggccgcagcgcatgacttcaacgaggccgacgaggacgagcggcagccgtccatggcccagatggcgaggggctga

SEQ ID NO: 509172 - DNA, 1173 bp, Stenotrophomonas maltophilia
atggcacgacttctgcaaccgagcatgtccggtggcgagctgtctcccgggctccaggggcgcgtcgacatggtgcgctatgccatcagcctgaagacctgccgcaacgtgatcaccaagcccaccggcgggggcgagaagcgcccgggctatttgttccgcggtggcgccaagcacaacgcccggcccacccgcttcatcccgttcatctactcgaccacggtcaagtacgcgatcgagatgggtgatggctacatgcggttctgggtgggcggtgcaccgctgcgcaacggggcaggggagatcgtcgaggtggccacgccctacaccggggaggacatctacaaggtgcggcatacgcagtcggccgacgtgttgttcctggtgcatccgtggatcccgcagaaggagctgcggcgcctggccgtcgaccagttcgagctgcgcgacttcgagtaccggcgcggcccattccgcccgttcaacaacgacgaggccgcgctgctggccgtgtccggcacccagggcgtggtgaaggtgaccaccaacgtcccgaccttcaccgcagagatggtcggctcgctgctgtatgccgaggaaaaggaactgcgctcggtgaaaccgtgggtgtcggcggaaaagaaggtgccgctgggtgcacttcgccgaagcgaccagaaggtctaccgctgcgtgagcatccctgtgctgaccggccttgccgggacgccgtactacgtctgtggcagcgtgcgccccgtgcacgacagcggccgggcgttcgacggcccgcaggacgtgaagttcgacaacgtcaacgactacgccgtcggggtcgaatgggaatacgtccacggcgggttcgggatcatgaagatcaccgccttcaccagccccttcgaggtcaccgccacggtgatcgagcggatccccgacagcatcgtgggcaacgtaccgccgccagtggcaggtccgtggacgttcaacggcgatggcaccacgaaacagttctccatccctggcgcgaccagcagcagctatctggactaccaggtaaagatcgacggcgtgccagtgcagtcgaatccgtactaccccggtggtagcggcaccggcggcaccagtggtggcgggattggccgcggcggcaatgtcgcgcaggaggtgatgtga

SEQ ID NO: 509173 - DNA, 1650 bp, Stenotrophomonas maltophilia
atggcacagggctggacgatcgatcccggcgcggacctgatcaacttctacgaggcaccgccgccgaccggcaccagcaacatcgtggtgacccagtacgcggccggcgctgtcggtggcaccgacgtttgggctgtcggcgcctggtcctatcgctatggttatcccggtgaggtcgagttcttcggcgatcgcctgtggttcgccggcagcccaggagatcctcagaccgtctgggcctcgaacatcggtgactatcccaacttcgggcgtagctcgcccatcgtcgacagcgacgcggtgtcgttcaccatcaatgcgcgccaggtaaatgcgatccgcgacctggtgccgctggacagcctgctggtgctgacgaccggcggcgagtggaaagtcactggcgggcaggacgcggtcgtgacgcccagcaccatcggaatcaagccgcagtctgcctatggcaccggcaaccttcaggcccgcgtgctgggcgagtcggcggtgttcctgcaggcgcagggccagcgcgtgcgcgatctggcctatcagttcgagaaggacggcttccgcggcaacgagatcagcatctgggccgaccacctggtgcagggctatacgttccgcggcatcgaatacagcacggcgccctggccgatcctgtggatgccccgcacggatggcgtgctgatcggctgcacgtacatgcccgagcaagaggtcaccggctggcacccgcatgagaccgacggcgaggttctggacgtctgttgcctgcccggcgagatcgagaccgaggtctacctgctggtgcgccggttcatcaacggcgaatgggtccagtacgtggagcagatggcgccgacccggtacgacgacccgctggactggaagtacgccgacagcctgctgacctacgacggcaggcgtccgaacggctcacccatgacgctgaccagcaccgatgggtggaacgagggcgcggtgatcaccgccaccaccggcgccgcgatcttcagcggtgccggtgacgtgggcaacatcctgcggctggcgattggcgacagtcatgtgcgtgtgcgagtcatggcttatgtgtcgcccacggtcgcgacggtggaatcgatcggctcggtgccgctggcgctgcgcggcgtcgctgtgcaggactggacttaccagcgctcgacgatcgccggcatgggccacctggagggcaaggctgtggtggccctggtagacggcaacgtgcagaaggatctgcaggtggtcgacggcaaggtgcagctgcagcgcccgggcggtgtggtgcacatcggcctgccgtacaccgcccacattgagacgctggaggtcaatgcgaatggtggcgacccgctgcgccccatgaagaagctcgccttcgaggtcgcgctgctggtgcgcaacacccgcggcgtctacgtgggcaccacgctggacaccctggaccctatcgcgcagcgcgatttcgagaactacgacgagcccaccgctccgtacaccggcgtgctgcgcaagaacatgtcctgccggtggggcatggatagcggtcatttccacatcgtcagcgacgaccccctgccgatggagatcctgtcgctgatgccccaggtggtggcgtccgaatga

SEQ ID NO: 509174 - DNA, 474 bp, Stenotrophomonas maltophilia
atgaagatcaccgcggaactggtgccggccgaggctgggcacatcgaagcggtcgcagctgcggcacggcctgcggacgtggttgagctgtgggcctgcgggcgcacaacgcccgccgaggccttgcagcgcggcctggccgggagcgctgaggcatggacggcaatggtgcgcggcgtgccggtgtgcatgtttggggccacgccttactcaatcctcggcggtatcggcacgccttggatggtcggctctaccggccttgacccgctgtcggtccagaaggagctgctgcgcctgtcccgaccggctctggcccgcatgcagagggcgttcccctcgatgctgttcaacgtcgtcgatcagcgcaacgaagccgcgcagcgctggctgcactggctgggcttccacttcctcgcgccggtgccggtcggaccggacagcgcccctttccttccgttctactggagcgcataa

SEQ ID NO: 509175 - DNA, 570 bp, Stenotrophomonas maltophilia
gtgtgcaatcccgcaatcgcccttctggcggccaccgttgtaaccggtgcctaccaggctgatcagcagcagaagcagggcaaggccaacgcgcagatcgccgagaacaacgcaatgctggcgcagcaggacgccgacgccagcaacgccttggccacccgtgagatggagcagcagtcctggcgcacgcgcattgcgctcggccagcagcgcgccgcgatcgcagccaacaacatcgaccccacgctcggcacgccggcggagattctcggcgaaaccgcgatgttcggtgaagtcgatcagcagaccatccgcatgaacgctgcacggcaggcctggggcttcaatgcacaggcccagaaccagcgcacgcagggcgagctggcccgctggagcggcaacgcccaggcgaccggaacgatcctgggctcgctcgccagcgccgcgagtatgggcattggcggcatgagccgggcgggcggtgctggcggcggagggaacctgtcgtcccaagccaacagcatcaccatgcgcaacaacgcgcgcatctcgcgcggctgggggctgtga

SEQ ID NO: 509176 - DNA, 2238 bp, Stenotrophomonas maltophilia
atggcgaccctaatcccacgcaccagcggcccgcaggtcgaggcccagctgggtacgcaggtccgcaacaccgcccaggtcgacctgtcgccgctcagccgtaccgcaggtgccgtcggccaggccgccgccgacctgttccagcagcagaagcagcgcgccgacctgacggcagtcatggaggcacggcgcgaactgtcggactgggaagggaacaccttcaaccctgccaacgccgacggcatcgccaagtaccagggcaagaacgcgctgcaggcgcacgatgcgctgctgggtgatctcgaccagcgtgtgtcgtcgatccgcagcaggctgtcgcccgaacagcagcagcggttcgatcaggtgtcgttctcgttccgcgactctgtgcagggccggctcaacagctacgccgaccgcgagtacagcgcctacgaggccaacgagcgcaaggctacgatcgacaacatcggccaggatgccgtcagcgccggcatgtccggcgacttcggcctggctgacgtgcgcctgcaagaggccgttggcatcgccagcgccgcctaccagacgcagggaatgggggcagaggcgatcaaggccagcgagcgcggcatcgtatcgtccgtgcgcaagcagacggccgcggcgatggccacccgtgacccgttcgcggcggaggactactaccaccgttacgccgaccagatgacgccggaggaccgggcgcaggtcgagcgcacgctgtacccggtggtgaaggaccgcgcggcctacgagctggcgcagtctctggccgacggccgtggggcaatcgagccgcttccggcgccggcggcgcgtggtgtgccgtcggccgcggtggccaaggcgattgatgatgcggcgaaggctgagggactggacgcggccggccgcgcagacctgtatgcactggctgagcaggaatccggtttccgaccgggggtggtgaaccccgaggtgctggacgacggtgaccaggccaccggcctgtttcagtaccgcgccaccagcgccggcggtatcgaccgcaaggacgctgcggcatccgcccggcgcgctgcccgcgagtacaaggagcggctggccaagggcggccgggccttcgccattgcggcgcacttcgccggtgagggcggcgccgatgccgtggtgaaccgtggccgctcggcgcaaaacccgaagacggcgctgtacgtgcgccaggtcatgggccgctctgcgcgctgggcttctgtcgcaggggagggcgcggcacccggtgcacccgtcgctgccgctgaaacttccgcaccctcaacgctggccgatgcgatcgcggcgatcccgcgcacgatgccgccggaccagcgcgctgctgccgagggctacctgcgcgacatctacgcgcagcgcaaggaccggctggagcaggcgaagaaggccgcggctatgtccatctacgacaaggtggcagccgccggcgcgagcgtgccgctgtcgcaggttctggctcccgcggagttggcgctgatgggacaggatccggctctgtatgagtcggtgaatcgctatcgcaagatcgtcgccgaaggcgcgacagtgcaggacgaccccgcgacgctggagagcattcagcgcatgcaggcgctgcagcccagcgaattcgccaagctgccgctgggccagtacgccgacaagctcagcggcaagacgctgaagtcgctggctgaagaccagaccaaggtcaatgatcccgccaaacgcgcggactatatgagtgctgatgatcggctgaagcgtgggttccagatgcttggtatcgctgtggaaggcgatgccggcggcaaaggatccgacaaggccaatcagccgcgcgacgcattgcgcggcgagttccgcattgcctaccagaacgcacagaccgagtttgtgcagtccaccggcaagaagccgacaccggagcaagccgacgtcctgttgcagaccgtagccaggcagtttgcggtggcgatggacaagggccggctcccgggcaagcgcgatgagaaggggaaaatcgtcggaaaccctacggtaaaggccggcatctacagccgcggtgtcgaattcgatctgaaggtaacgcaggaagagcgcgacgaagctcggcagagctacatcgccaagtacgggcgtaacccgacggacgccgacattacgcgcggcatcatcaagcagaggggcagcagcaaatga

SEQ ID NO: 509177 - DNA, 6621 bp, Stenotrophomonas maltophilia
atgaaggactgggacaccgtttgggacgaggtcgaggtcgagcgcaagactgccctgcgagccgcctacaccggcaccagccagaagccggaagacgccgcgcgcgcgaaccagctgtcggaccagcttggccagcccttcggcgtggtggcggcgaatctgggtgactacgagcaggacgcccgccgccaggagatcgacgacgccggccgcgcatcgccgcacgtgggcgacttcctgagcgacccgcggcgcatggcgctggccagcgacgaagccccgaagttggccacctatgccaactcgctggtgaccggcgaggcacgcgccacggccgagccgaacatcttggagcaggtgatcggcggcatcgtcagcggctggcagcggggcaaggcgaatgcgctgtcgctgctgcccgatggccctgcggtgatggacccggcgaccggccggctgaccactgaccgctcgggggaggaagcggcgctgcgtgcagaccaggagcgccgggctcaggccgcagacgtgaccagtgccagcaccgaacgcgggttccaggccttcgatcgggccaacaaggcgggcagcttcagcggtgccgtgcgggagctggccggcggcggcaccgacacgctgggcgccatcgccgtcaccctgggccagtccatcggcatcggtgccccaggcctggcgctgaccgcagccaccggtggcggtagccgcgtggtgactgctgcctcggccggcaccggctcgggcctgaccgagtttggcgccagcatcgccgacgcaatgcaggacgcgaaggtcgacccgaccgacgcctacgccgtgggccagttcctgcgcgacccgcagaagatggccgcggcgcgcgacaaggcggccaagcggggcgtggccatcggtgtgttcgacgcgttgactgccggcgtggctggccacttcatcaacaacgcccgacgcagcgcgtcctcggcgatcctgcgcaccggcgccgaggcgggcgtgcagctgggtggcggcgctgccggcgaggccacggcgcagctgctgaccgaggaacgtctgaaatggggcgacatcatcatggagggcctggccgaggttcccaccggtgcggtcgaggtgcacgccaactaccgcgccgcgcgcgcgtctggccaggtgcgctggatcaacgagcgcctggaccaggtgatgcagtctggccagagcaatgaccgcctgcgcgccgccacagagttggctggagagctgaagctgggcgaacgatcgccggaggacatgaaggcgctgaccgcgcaggttgccggtgaggatgcgcgcgtgtatctggacgccgagcaggcgcgcacactgttccagtccgcaccgcaggtgctgcaggacatggtgggcggtgagtcggcgctggccgaacagctggctaccggccaggtcgtgatcccgatggccgaatggatggccgccgtgccgaggttgccgaaccgcgacgagatcctgcgcaatgcccgcacgaccgctgacgggctttcgccggcggagctggaagcgctcgacatcgacgcaatggcccgcgagttgggcgtgccgctcgacgcgccggcacctgatgcaaccgccgcgaacgcgcgcgcccaggtgcagcagtcggtcatggcgcagctgatcggaaccgagcgctacacgccggcccaggccgagagccaggcgcagctgtggggcgcgatgttcggccgcttgggcgaagtgaccgggcaagatccggtggtgctgtacgagcgctatgcggccggcatcgatgcagccgaggcgccggcagagggtggcgaaacccagccgcgcacgctcatgcagcgcggcatggacgcactgcgcggcctgttcggcgggtcgcaggtggccaccgatggccgcggccagcagaccatcgagcgcgagggcagcgcctacgtgcagcgggcggggcagtggctgctggcggacgaacaggggcaggcgcgcgacttcctgacgctggaccaggcccgcaccgaagccgaacgcaccggcggcgatatcgttcaggacgacccaatcgacggccagcggcagacctggagcgtggcgctgccggagaccgccgcgcgcgaggtgcttgccggcgacatcctgttccagccgacccgcaccgacgaggtgccaaccggcctcgccccggaaacgccggtgccggtgatcgagctggagccgaccaccggcaacccggttgagtggttcgtcgaatcaaacgagctgatgcgcgcacagcaggacggcatcgaggtcattgcgccagacggtcagcctgtccgattcgcctcgcgcgggcgcaagaaggtcatgtccaaggggaggcgggatccgctgcgccaggccgtcgcccgcgagctgccggcgctggtggaatccgcgccgatccattccacctcggtggacaccgacgacaagaccgtgtcctacgcctacgccgcatcggctgtgcagtacgacggtcgggtgtatccggtgcgcctggtgtaccgcgtcggcaacgacggtgtgcgccgggcctacgatttcgagggctttgaaataggaaaccccgacggcctcggcagcgaatcgctgcgccaatcggggtctgacgtcggtgccatggagcgggccggcacggccgagtccgagttgcgtacccgcggtctgccgacgtcggcgctgacgctagcagaggttctgccggctttcaacgcccggccgttcttccagtcgtccgaggcggccccccgaggtcagattcagattggcccgggccggtcgatgcagatcagcctgttcaggggggcggacctgtccacgttcctgcacgaatccgggcacttcttcttggaggtctaccgcgacttggctatggcggaggacgcctcgccgcagatccgctccgacctggacaccttgctgaagtggttcggcgtcgagtcggcggaccagatcggcgtcgaccagcacgaacagttcgcccgcggttttgaggcctacctgggcgagggcaaggcgcccacgccggagctgcagtcggtgttcagccagttcaagcagtggattctcggcgtctaccgcagtctgcgaaatctggacgtggagctgaccgacgaggtgcgaggcgtgttcgatcgcatgctggccagccaggaagaaatcgaggcggcgcaggcccgcgttgggtttgagccgatcgctcgcgacctggccgaggcgcaggcgctgggcatgacggaacgtcagttcgcggactatcaggcacaggtggccgccgcgcgtgagcaggccgaggccgacgtcatggcccagctgcaggaagccgacgcccgcgcgcgcgaacgctggtggaaggacgagctggccgccatccgcggcgaggtcgaggcggaggtcgaggccacgcccatcgtgcgtgcctaccgtgtgctgaccggccgcaaggaagccagcggcgagccggtaccggagcagctgcagggcctgaagctggaccgcgcggtgctggcggcgacctacggcgacggcctgctggacaagatgggccgggtctacgcacgcaagggcgggacgcatcccgaagaggtggccaccctgctgggcttcagctccgccgacgagctggtgcaaggcctgtggaccgtgcggcagacgctggccggtgtcggtgcggaagctgacgcgcgcatgcaggcccgccatggtgatccgatgaccgacggcacgctgccgcagcgggcgctggatgccgtgcatggcagcagaaagatccagctcttggagcgcgagctgggcgtgctggccgacttggccaaggagccacgcccgaaccggcgtgagttgaaggcagtggcgcaggcggtgctggccgagaagaccgcgcggcagatccggcccaatgagtacctggtcgcagagcgcaaggctgcgcgcgcggcggcgcaggcggcggccgcggggaagtacgccgatgcactgcaggcgaagcgtcagcaggccttgaatgcggtgctgttcgccgaagcccgcgcggtgcagcaggaggtcgagtcgaaggtcggctacatccgccggcagatgaccccgcaggcgcgcgagcggttgggcaaggccggtgccgattacctggaggccatggacaccatcgccgacacctacgagttccgcgacgtgtccggccgggctgtagcgcgtcgacagagcctgcggcagtgggtagaggcacgtcaggcagacgacgacctgacggcggtgagcgatgcgctgctggcccgggtcgaggcggaaagcgtgacgaactacgccgatctgccgattaccgagttccgcgagctgcacgatgcggtgaccaacatcgcgcgtctggccaagctgaagaacaagctgctgagcaacaaggaccagcgcgactgggagagcgcgcaggccgaactggccggcgcaatccgcggtgcgatcgcggaaggcaagccgctgccgctctcggatgcggacctgacggcgatgcagaaggtgggcgccacctacacgggcctgatggactgggttctgcgcccggagacggtggtcgagtggttggacggtggcgagaccgggccgtggcacgacttcctctggaaccaggccgaggcagcgcagcagcagcggattgagctgcgcaaccgcgtcggcggcatgctggagcagaccatgaaggccctgacgccggcgcagcgggcggacctcaaccgcctggtgtacgtcccgagcctggggcgatcgctgtcgaagaacacgatcgtggcggctgcgctgaacatgggcaacgccggcaaccgcgacaagctgatgcgcggcgggttcattggcaacaacgccgaggtggtccagttcaccccgcagaacatcgcggaaatgctcggccacctcacgccggccgacgcgcagatggtgcagggcatctgggatgcggtgaacagcctgtggccggacatcgtggagcagcagcgccggctgtcgggtgttgcgccagagcaggtcgagccgatgccgctgattttcaccgccgccgacgggtcgacggtcagcctgcgcggcgggtactacccggcggtgtacgacccccgggcgggtgccggcggcgtcaagcaggcgcgcgcggcggaggaacagatcatggggggcaccttcagccgtgccatgaccagcaagggccacacgaaagagcgcaccgaatacgcagcgccgatgctgctggactaccaccgcgtgctgtcgcgccacctcaatgacgtgatcaccgacgtctcccaccgcggctacgtgaagcaggcgctgcgggtgctggaagaccaggagctgaagaacctgatccagcagcggctgtcggagggcgcgtatcactcgctctacggcagcgtgaagaatgccgtgcgcggcgcttcggtatcagagccagggtctggcccggtggagaagctcggcgacgcggtgctgaccaacacggccgtggccgccctcggcttccgtctgccgctcgtgttcgccaacaccgtggtggcgccgatccaggctgcggcgcgcgtcgacccgaagtatctggccaccggctacgcggcgtactaccgcagcccgggcaagatgacggagatgatccactcgctgtcgcccttcatggaggaacgcgccaactcgttggattcgtcctatcaggtggtgctgggcaagctgacgggaaagcgggggattcgcgcggcggccatgaagatggccatggaggtccaccgctggaccgtgccgctggccgagcgtgccatttggctgggccgctaccagcaggcccaggcgcagggcgtcagcatcgacgaggcggtgcgcttggccgacaagtcgatccgtaccacgcagcaggccggtgcgccgaaggacctcagcgccgccgagcgcgacccccgctataagtgggtccgcatgttcatcggcccgatgatcatcatgaacaaccgcctgcaggaatcgggcctgcgcggcctgtaccttgggcgcgtgcagtcgccggccagggcgctgggcacatggctggcagctggcgtgctgtccaacgctgtgttcgaaatcctgatgatgcgcggtcctgatggtggcgacgacgatgaaaagggctgggacgactggagcgcctggctcgcacgcaagactctgctgttccccttccagacgttcccccttttgcgtgacgtagcgggcgccatcgacgcaaagatcgagggaaagccgagcatgggcaggccgaacccgatcgccgatgcaggcattgctctgttcaaattcggggacagtgcttgggatctggcggtctctggttcggatgctgcactggaggcaatgggcttcgactggatcgaagaccgcgagctggaccccgagaaaatcatcacagacggcgttcgcgctgccggcccggtgactggtatccccagcaatcagatgctgaccaccggcgaatacctctacgacgtcggcaccgggcagtacacccccgacaacccagccgaggcggctgcatacctcatgtaccgccgacccaaggacgagcagtaa

SEQ ID NO: 509178 - DNA, 1539 bp, Stenotrophomonas maltophilia
atgaccatttccgccaatgaccgccgcaagacctacgtggggaacggcgttgccaccgcgttcaacgggccgagggcgttcctgtcgagccatatccaggtgttcaccggtacccatccggtctacaacctggtgccgccgtcgcagtacacggtgaccgggctgcgcgcgaacaccagcaagatcacctttaacgccgcccccgcgttgaacctggacatcctgatcctgcgcacggtgccgatggaccagccggccgacatcaccaatcagggtgcgttcctgccggaaatccacgaagacgccttcgactaccgcgtgatgcagctgcagcagctgctggatagcgggctgcagttggtgctggatcccgaaaccgggcagtttgtatgggacgcgaagggcaaccggatcgcgaacgttggcgatgctgtcgccgatgcggacgctatgaaccgccgggcggtgctggtgctgatcgaacagatccagggtggcggcggcaccattggcgtcacgccgaagttttgggcgttcgagggcgacggggttgtgaccgacttcccgctggccggtgccgacgtgttggatccgctgttctacgacacggcggtggagacggctgcagggtcgaacgtctatcccgtgtcgaagccgggcatcgacggcgctttcaccatcgttgcgggcgtgctgggcgccccgccggccatccgcttcaacccgccactgggtgacggcgtgcgcggctttaccaccctgcgcggctacgcgcggccgtggatcggccagcccccggtctacaccgtcgcgccccgcatcgtgagcgtgagcgccagcaccaccgtagacggtggctcgcacaacaccctgatcctggccaactcggccagccccatcacgatcaccattcgcaagaacaccggcggcagcgtcgactggaaggaaggccagttcttctcggtcctgcagctgggcgacggcgccgtgacgctggcgatccaggacggggcagggccgctgaacatcccggtgagcttccaggccaagtgccgcgggccgcgcagtatcatcagcgccacctgcattgcgccggacgctgacgcctgggtggcggccggcgatctgctgcgtatcgcggcatcccccgatctgcagtcgttcgacctgatcgaccgatcggtgaacatgggcaacagcatccaagcaggcactggcaaggacagcctgttcatgccttacggcatgctgctggatccggtggccagtggtggtatctacgccactttggcggtcgcgcaagcgtcgggcgttgtgttgacggtagacgtgaaccgcaacggcaccagcatcctgtccacgaagctgaccttcgacaacaacgaacgcaccaccaccacggcggctattcccgccgtctacgaggtgggcggcaacatcctggccaagggcgacgagatcaccatcgacgtggaccaagtcggcacttcgctggcaaaagggctgcgggtgtatctggtcggccagagggcgaactga

SEQ ID NO: 509179 - DNA, 1794 bp, Stenotrophomonas maltophilia
atggccgcccgcatctacgaccgaccggacctggaccaagacgtctaccagccggcgctgtacgtcaacggccggttcgcccgtgccaaaccttcgcaggcctacgagggtcgcctgcagatccgcaatagcatcggtggttgcagcgtgctgcagatcggcggcgacaagctacctgacggcacccagctgcgcgtcgaccaggtcaccaaagaggttgtagtggcctggccggcctacgtgaccgcccaggccccaatcgccaacgccaatttcgaggacggcaagactgggtgggagctgggcccaggctggaacatcaccaccgagaaccccccttcgggccagtggtcggcgggctactggggcaactggggcacttcgcggatctcgaacgccgcccgctacacggtccagcccggccagatcaccaccgcgaagtgcgacgtgcggcagggcgcgtcatcggaaggcaatgccggtggctcggtaatgctcgagtaccgcaacgccgccggcgaagtgatccacaccgtcgaaggcaaccaggtcatgtcggccagcaagaaccgcgtgtacccgtcgtcggtgttcggtgctgctccgcccggggctgcgaccatcaacgttgcaggcaacggcatccggtatcgtgagaacaagattctctttgtcgacaacttccagtgggaccacacggtcccatccaccggcatcaacttcgaaagggtgtttaacatcgttcttcgggtgaacgattcgatagggcgatctttcgtatggagcggcccgatcacagtcgcggccaggccggcgtcctacaagttcttcgcaatgttcctcaacccatacgtcctttgtggcgggtacaggcacgcggccaacgcgattgatcgcctcggtggaacaactacgtccgaaaagagcaacacctacctggtgggcgccagtgatgacgcgacgttggctgcggcaacctacaaccttgcacctggcgtttccatctatccggtaagccaagagggtgcgatcggcgatgaattccccgcgatcaacccgccgctgcctggccagggccgaagcgcgacgttctctcggtctggcgcagccgtaatcatcggccataccactgcaccgtacgtaagggcccagcgtgtcagtccgatgggcatagggagccgctatgccgatccagtcactccactgatcgactcggtgatgttctctgcgttcaaccccaagggcgatatcgtctacctcgtggttgaccgctacccctacctgttcgcctatcgctgggatgacgtgaacggcttcggtgagcgggtgaatggaccggtggcgcttcctgggtctcaggttcactcgatctcgatcaacgagtcgggaacccacctggcggcaatctgcggtgccagtccgtcctgccatatctacaagatcggcccgaatggcttcgaagatcgaatcgcagcattcggtcagagcgcgcagggtatggttgccctgtcggatgcagctcgcgccgtggtgtttggcagctcgttcatgacgcagatgcacctctacctgtgggatccgaacaacggcgccggagctgcctacccgttgcccgccggcatcagtggccttagccgcggcgtcgcgttctcgaaagacggcctggtgctgtacgcgggtagtaccaacaccacaggcatgcagatatgggaatggacgccaggggtaggcgccacgcgggggcccgtcaactacgggtcgaatgccagccagatgaccattccgatcgactga

SEQ ID NO: 509180 - DNA, 681 bp, Stenotrophomonas maltophilia
gtgttctacgtcagggggctgaatggacaccatgcggtcagaacttggaaggtggccatcgccgcttggctgctgctgtcctttgccgctgccgcgcaggacgctgttcgtgcctacgacatccctgcgcagccgttggaacaggcggtcgagcgcttcagcgtcatcagtgggtggtcagtgatgtacccgggtgacctggccgccggccgcagcagccatgcactgcgcggcagcctggcgccgctgcctgcgttgcaggtgctgctgcaggactccggtatcgaggccgaggtgatcggcgagcagcgcgtggtgctgcgccggggcgcgccctcggcagccgaacccggtgttggcgccgaacttcccgaggccgagcgtcggcgtcgctacggcgggctgcagcagcggctgcgtgcggcgttctgtgacgaccccgagattgcgcccggccgctatgccgcgacgctgcgtttccatgtcgacagcgaaggccaggtgcatgcgcccgagctgctgtcaggcagtggcagcacacgccgcgatgcacgcctgctgcaggcgatgcagggcctggtgctggcggcggaggccgccgcactgccgcagccggtaacgctgcagatccgtccttccggcaccgaccacgactgtggccggcgcgcgccccttccatga

SEQ ID NO: 509181 - DNA, 825 bp, Stenotrophomonas maltophilia
atggccagcgctggcgctggggccgccgtgagtgagctgccgcgccgcctcgaccacgcctggcgggtgtttggcaccggcctgagctttgttgcgtttggcctgggcgggctgctgctcggcgtcctggtgatgccggtactgctgctgatgcgggacccggtggcccgtcgccggcgcgcccggcgcgtggtccaggtcgcgttcgccagccatctgcggctgatgcgcgggctgggggtgatgacctacgagatcgagggcggtgaacgcctgcagcgtgacggcctgctggtgctggccaaccacccgaccctgatcgacgtggtctgcctgatctcgctgcttcccaacgccgactgcgtggtcaagcgggccgtggcctgcaacccgttcatgcgcggtccggtacgggccgccggctacatctccaatgacgatggcgccggcctggtcgatgactgcgtggccgcggtgcatgccggcggcaccctggtcatcttcccggagggcacccgcagcgtgcccgggcagccgccgcgcctgcagcgcggggccgccaacatcgccgtacggggccgcatcgacgtcaccccggtgcggatcacctgcagcccgccaaccctgaccaagggacagaagtggtatcgtgtcccctcacgtcgctttcacgttcggctgcagatcggcgaagatatcccgatcgcgcctttcttggccgaagacgactcgccaaggggggatgccttggcggcacgccgcgttaccgagcacctttctcgttatttcgacctgtctggagagccgccccgtgcaagcacttga

SEQ ID NO: 509182 - DNA, 690 bp, Stenotrophomonas maltophilia
atgacctccaactcactattccattatcctaaatcaaagcacgtgaggacccagaagcctcgcgtatttaggaactacagaacttacaagaaatacctgcagcttgagttccagcgggtatgcgtttactgccgacagcctgatacctctgctccgaatctgacattcggtgtagaccattatcgcccgaaagggttggtgcaatttgccaatttgctttgtgagtacaataatctgtactacgcgtgcgggcagtgcaattcgcgcaaggggaatgattggcccgatgatgagaatgtcgggccgttcgtcgtaaatccgtgtgaattcgagatggcaagccatttgcgatttatgaaggctacgggtcgaatcgagccaactggtaagcacggaaagcacacagaatacctgttggatctaaacgcagatcagctggtccagtatcgcctgaacacacttcgtcttgtcgctctcctggagcgtgaagtagcgggccttgagctggaaattgacagaatccaaagagccgtatcctctggccgagtgtcttccgaggatgttgctgatgacctggccgccgcgcaggctgatctggtgcgaaccaagcaggccctaggcgcgcaaattggaagcgacccagttgttccagttccggcggttaggtttggccttgctttgcatatttga

SEQ ID NO: 509183 - DNA, 741 bp, Stenotrophomonas maltophilia
atgacggacatcgccgatctgtgtcttcacaggtccaactacatcgataggtttaagaagaatttcgtcaagagtgcgctatgcgaactccgcttccccactgtgctggagtttggggagccgaagttgcctccgtcgatcatcaaggcgctccggaagtcttaccctaacgctgagatcggtagcgaggtgaacttgggcgcgcccggcccaatttcttccaacatggtgcatgtgatgaggtcacagaagggagggtgggcaatttccttcaagcaaagtgcactgacgctggaggtgcaaagctacacgggatatcctgagtttcgcaggcgtatccaacaggtaatagaagctactacagctgctatcgattccgatttcttgactcgtgtgggtctgcgttttgtaaacgtcattgatcaggggcctcctactgacggctgggtcaaccccgctttgcttggccctatcgatgctggagtatttaaaatggtcgctgagtacagcggccggcttgcttctcttaccgaagataatggctttctacttcagcatggtttgcgtatagaaggtgggcgtgatcatccttcgtatgttttggatgtggatgcattttctaataatgtgaccgttgacaagactcttgaggaagtggacgcgttacattcccaagtgttcaatgtctttgaatgggcgctgggcgagcgaagcagggaatatttacaaggggcggagtga

SEQ ID NO: 509184 - DNA, 483 bp, Stenotrophomonas maltophilia
gtggttgacctggccgagcctttgtcctggcagttggtggagttcctgcgcggtcgcgtggagctgatccagaaaagtgctggcttccgcaccgacatcggcaccggtcagatcgtcgttgacgacagcgaagttgatgaagacttcgagggcccggccacattgatctctgtcaggcaactgtcccgtagtggtgggggaagcgcgcaggttacctcggatgcagcgatcaccatcgagttcgaggtcccgcgcaccagcaacctcgcgaatccgcggctgcttgtacaccgtgccaggcacgacttgattcgggcgctcacgttcaacgtgaagacgctgcccaagggcattaccagtttcgatctgcttgaaacccagatggcatccctggaagacgacgcagggcattccgctgtcgtcgctcagatcacagcgcgggctggtctgaccgagacctttgagcccgtccccaacccgtag

SEQ ID NO: 509185 - DNA, 345 bp, Stenotrophomonas maltophilia
gtgagcgaagccgagttcctgcgggatctggatgcttccctgcacgcagcattcgccgtcgctggtatggcgtcggtcggcacgcatacggcgaagaagggcggtgcggtgaccgcaaacgtgcgcgtctacatcgaccgtgacgttgagaccatcggagagcttcgtcagttcgtcgccggtcgggtcgagatcgcttacctgcgtgctgacgttgaaccagagcagggcgaccgcctggaagttggagtggcagggagcggcctcggcgtggaagtgttcgtgaacagtaagaagctcagcgacgacggctcccgcagccggtggctggtgaaccgtggttga

SEQ ID NO: 509186 - DNA, 357 bp, Stenotrophomonas maltophilia
atggagatggccgagatcctaaccgagtacctgcagcgattcgtggggacccaggcaatggctaccgactgggtctgctcactggccgctcagttcggcctgatggtcgactatgtgcccgcaccacctctcgctggttggccggacgagctggccgcaatccaagcgaagctgctggaactgcacaaactgacagggcaactggctggcgccggtattgatgcgctcgcagatcgacgcctgaccgtccccgaagctgatcgtatccaagacctctcccgggaggtccgcaccctctgtttccgactggagcggaacgcgtgccgcgctgccggcctgcaaggaactgaggactga

SEQ ID NO: 509187 - DNA, 393 bp, Stenotrophomonas maltophilia
atgagcagcgattcgcacgcagcgagcgttaccgaacccggccggcccggcagcacctactccgatggtcctgtgtggcatgcattcggcctcagccgggccgcttatcacgttgtgccacgtcgcaccctgcaatccatgccgatcgaatggcaggcgcgctttgtcgccctgattttcgaggcacgcgaggcgctgccggatgaagcgttccccgagtaccaggtgacgcgcatcagcgatggcaagtacgcagccgatccgaatcgccgatatcgacattcaccgcccttcccccttcgctccgctggcgccgagcaggcgtccacatcgcacccgctcgcaggcgcgttcgtaaacaccgacacccaattcaagcaggaccgccgatga

SEQ ID NO: 509188 - DNA, 1956 bp, Stenotrophomonas maltophilia
atggctgacggctccggcggtttccgcttccccttgcatgacctgaagtcacgactgcgcgcggacgagatcaccgttgacctgttcgccggcgggggcggtgctagccacgcgatggagacagcgctggcccgggcggtggacattgcgatcaaccacaacgcctgggctgtggggctgcactcggccaatcacccctttacccgccacctttgccaagacgtgtgggaagcggacccgcgcgtcgagtgcgggggtcgaccggtaggcgcactgcacgccagcccagactgcacgcacttcagccaggccaagggaggtcagccccgcagccgagcaacccgatccctgtcgtgggtggtctcacgctgggccggcaccgttcggccgcgcatcatcacgctggagaacgttaagcagatcctgaagtggggcccgctgatcgccaagcgtgacaaggccaccggccgtgtcatcaagctggacggctcggtcgccgctgccggtgagcgcgtgccgctcgaccagcagttcctgatccccaacaagaagcgcgaaggcagcacctggcgccgctttgttgccgtgctgagggcactcggctatcaggtggagtggcgtgtactgcgggcctgcgactatggcgccggcaccactcgcgagcggctctacatgatcgcccggtgcgatggcgaggcgatcgtctggcccgacccgacccacggaccaggacgcgaagttccgcacgtatcggcggcatccagcatcgactggtccattccgtgccccagcatcttcggtcgcaagaagccgctcgcggaggcgactcaggcacgcattgtccgaggcatcaagcgcttcgtgctggaagcggccgagcccttcatcatccacgccacccacggcggggaacgcaggccgcacggaatcggtgagccgatgccgacgatcaccgcagccaaccgtggcgagatgatgatcgtgtcgcccaccatcgtgcagtgcgcgaatgcatcggccaacggcgtcgcttctggcggtgatccgctgggcaccatcactgcatggccgcgcggcggctcacatgcggtagtcgcgccgatgctggtgcaggccgcacacggcgaaggtaaacctggcgccgtgaagcgctggggcgccgggggttggcccgccgacgagcctacaggcaccatcaccgctagtggcagcggcggctacgccctcgcggccgcgagcctggtcaagttccgaggcaccagcgatggcgcgaacgccggccacccgatgccgaccatcaccagcggcgctggcgcggcgcgtccggccggtgccgcccacgccatgggggtgatggcggcatttctggagcaggccaacggcgggttctaccagggcgccggcagtgctgccgaccagcccatgccgaccatctgcgccaatggcagccaccagcgcctcacaaccgcacacctggtgacgctgcgtaggaacctggacggccaaaccacgactgacccgctcagcaccatctgcgctggtgcaactcaccatggggtgatcgagtgcgtcctgagccctgagcaggaagccggcgcactgcgcgttgccgcgttcctgatgcgctactacggcacgggcggacagcatggcgaactgagcgatcccctggcgaccatcaccacgaaggaccggctcgcgctggtcaccgtgcatctgagcggcgtgccgtatgtgatcgtggacatcgggctgcgcatgctcaagccgcacgagctgttccgtgcccagggcttcccggcaagctacatcatcgatcgcacgcaggatggccgacaggtcagcaacagccgcgccgtcgcgatggtgggcaacagcgtgagcccgccgccactgatcgccatcttggaagcgaacgtaggcgcggccgtgcagccgcagctggaggctgcctga

SEQ ID NO: 509189 - DNA, 240 bp, Stenotrophomonas maltophilia
atggacccgacgctcaccagaatgcatcaccactaccgcgtccgggccggtagagcgaaggcagcgctttacgcccgcgtgatcgagaacaagcgttacacgatgcgccagatcgccgacgaactgggcgtgtcgatgagcactgccgacacgcgggtaaagcgcggcccctatccccttacctgggaatcgctgcgcctggcgcgccttcccgccaacagcaaggacatgcatgcatga

SEQ ID NO: 509190 - DNA, 189 bp, Stenotrophomonas maltophilia
atgactgacaacgaaacccgcatctaccttttcatggaccggcggtcgggcaagcaagtcacggtaggtatcactgttgactgggacgagctggcaaaggagctgggcttccgtgccttgaaagccaagggtggaaaggccgtatcgctccatggcgcagtggaaggcaaggtggtccgcaatggctga

SEQ ID NO: 509191 - DNA, 228 bp, Stenotrophomonas maltophilia
atggctgacaccatcaacctccgctgcccaaagtgcggaaaggtcgggagcgatctgcggcgcgagctcgactatccggagacccatacggtcgagatcatctgccaggactgcgacgacggcgactttcacagcgagcaacacttcgatgctgccgggcagcacatcacgcgcgatcccgaacagaccgcgccagccttaaacggcagcgaggccctgagcaaatga

SEQ ID NO: 509192 - DNA, 192 bp, Stenotrophomonas maltophilia
atgagcgaaccgatcaggatcacaccaaaggacgtcgggggcggctggaaatgcaccgcctgcgggattgcacacacggtgagcatctacgttgccctgcatatgcgggaggggctcgatcacgaatgcccgtgtggccatcgctcgacagttcaaaactggaaagtcactcccggaggcgaacgtggctga

SEQ ID NO: 509193 - DNA, 225 bp, Stenotrophomonas maltophilia
gtggctgatcaaccgcccaccgggaactccgtgcgcgcagtggtaaccgcgaagttcattgcgagccccggtgtgtccgtgcttgaaggtcgcttccagtgcgaactggattgcggccatatcgtcatccgccccggggagcacgtgcgtggcaccaggttctccgttagggcgccccacagtgccccgtgcaaccaatgcaagaaggagccccaccatggttga

SEQ ID NO: 509194 - DNA, 201 bp, Stenotrophomonas maltophilia
atgaccgggttgcgtagcgcgtgtggcagcggtgggaccggcatcgggaccggcatccggaccggcatccggaccggcatcgggaccggcatcgggaccggcatcgggaccggcatcgggaccggcatcgggaccggcatcgggaccggcatcgggaccggcatcgggaccggcatcgggaccggtagagtcgactgttag

SEQ ID NO: 509195 - DNA, 420 bp, Stenotrophomonas maltophilia
gtgtatgcgcagagcgcggtgcatttcgaccagctcgacctgacctatttccagtacctgctggccgacagccagggccagggacgaatgttcctgtaccgccaccaaggtcagctgatcggctggaacctgtgctacatccacgccggaaagctggtggacaagtacatcggtctggcctacccgcagtcacgcgagcacaacctgtacgcggtgagctggatgcacaacctcgagtacgcgctgctgcatggcctgagccactacgtggccggctggaccgactcgcggatcaaggccgaactgggcgcccgcttcacctccacccggcacgcgatccacgcccgttccccgctgctgcgcactgccctgcgcaagctggcgccgcatctgcagggcgaacctgatggaggcggttga

SEQ ID NO: 509196 - DNA, 861 bp, Stenotrophomonas maltophilia
atgttcatcccgttcccgtaccccttccgtcgcccgaagggcatgaccccggacgagtattccgaccactgcgtgtggcagttcgagcgccttttcgaaagcgagtacaacggcgtgtgggaccccaaggtcggccaggccgagtacgccgcgttctacgtcgagccgatccagggcaccggcggctacgtcattccgccgcgcaacttcttcaccggcctcaagcgcgtgctggacaagtacggcatcctgatggtggtcgatgagatccagatgggcttctggcgtaccggcaagctgtggtcgatcgagcatttcggcgtgaccccggacgtgctggtgttcggcaaggcgctgaccaacggcctgaacccgctgtcgggcctgtgggcacgcgaagagctgatcaacccgaccgtgttcccgccgggttccacccactccaccttcaactccaacccgctgggcacccgcctgggcctggaagtgttgaagctgggcaaggaaatggactacgagcgcaccgtgccggaaaagggcgcgtacttcctggacggcctgcgtggcctgcagaagcgccacccggaaatcggcgacgtcgacggcctgggcctggccctgcgcgccgaaatctgccaggccgacggctacaccccgaacaaggaactgctggaccgcatggtcgacatcggcctggccggtgacctcctgcacgacggcaagcgcatgggcctcgtgctcgacgtgggtggctggtacaagaacgtgatcaccttcgcgccgtcgctggacatcagctacgaagagatcgacctggcgatcaccctgctcaaccaggcgctgaccaaggccaagggctga

SEQ ID NO: 509197 - DNA, 1230 bp, Stenotrophomonas maltophilia
gtgctggcctcgatcgcgcttctgctgaccagttggtttgcctggttgtatcgccgtcgcctgcagcggcgccatgcctatcagctggcactgcataaacaggaactggccgaacaggcctcggcggccaagacccgcttcctggccaatctcggccacgaaatccgcacgccgatgaccggtgtgctcggcatgagcgaactgctgctggcctcgccgctggacccgcagcagcgcggttacacgcagtcgatccggcacgccggcgaacacctgcttcacctggtcaacgatgcactggacctggcacggatcgaatccggacggctggagctgcagtccaagccgttcgcgctgagctgcctgctgcaggacctggccgcgctgatgggaccgctggcagcgcagaagggcctgcgcttcaccctcgacaaccagttgccgccgggcctgcaggcgaccggcgatgcgatgcgggtaaggcagatcctgctcaacctgctctccaacgcggtcaagttcaccagccgcggaaccatcaccctgcatgcgcgcagcgacggcgagctgcgcgcgttgcatttcgaagtgcgcgacaccgggccgggcatcagccaggaacagcagcagcgcctgttccgccgcttcgagcaggccgatggcgcccgcaccgcggcgcagtacggcggcagcggcctgggcctggcgatctgccgcgaactggcgcaggcgatgcaggggcgtatccaggtcgagagccagctcggccgcggcacgtgttttggcgtgaccctgccgttgccgctggtggtcgatgccaatgcagagtccgagggcgaagtgcaccgcgaggatgcggccaacatgccgccattgcgcgtgctgctggtcgaggatgatgcaaccgtggctgatgtggtgcgcgggctgttgagtgcgcgcggccatgaagtggtgcatgcgggccatgcgctggcggcactgcgcgagatcagcgcaggggatttcgacgtcggcctgctggatctggacctgccgggcctgagcggcttcgagctggcccagcacctgcgcaaccagggctacatgctgccactgctcgccgtgacggcacggaccgatccagaccttcagcagcaggtggaagcggccggcatcggtggtttcctgcgcaagccggtgaccggtgagctgctggtggaagcgatcgccaaggcgatgggcaggtag

SEQ ID NO: 509198 - DNA, 222 bp, Stenotrophomonas maltophilia
atgcgcgccaggctgaccaccggcgaggcggtcggcgaggtcagcgccagcctctccagcagctccttgtgcagcgccagctgcgcggcatcgtcgccgaagtacgccggcgtcaccgaggacgcatccaccgtcggcgcccgcccctgcggtgtggcgaaggtcacctcgtggcccgcgtccagcagcagcttgaccggctgcatcagctcgttgagatag

SEQ ID NO: 509199 - DNA, 681 bp, Stenotrophomonas maltophilia
atgagtacccccgccaacttcaacggtgcccgcccggtgatcgatccggacaacgccgcgatgctgctgatcgaccatcagagcggcctgttccagaccatcggtgacatgccgttcaccagcgtgcgcgcccacgccaccgcgctggcgaagatggccacgctggcaaagatgccagtgatcaccgccgcctctgttccgcagggcccgaacggcccgctgatcccggagatccacgacgccgccccgcatgcccagtacgtggcacgcaagggtgagatcaacgcctgggacaacccggaattcgttgccgcggtgaaggccaccggccgcaagcagctgatcattgccggcaccatcaccagtgtgtgcatggccttcccgtcgatcgccgccgttgccgatggctaccaggtgttcgcggtcatcgacgcgtctggcacctactcgaagatggccgaggagatcaccctggcccgcgtggtgcaggccggcgtggtgccgatggacaccgccgcggtggcctcggagatccagcgcacctggaaccgcgacgatgcccagcagtgggccgaggtctacacgaagatcttcccgaactaccagctgctgatcgaaagctacctgaaggcgcaggacgtgcagaagaaccacgaacagctggattcgcagcgcagctga

SEQ ID NO: 509200 - DNA, 447 bp, Stenotrophomonas maltophilia; identical to SEQ ID NO: 508235

SEQ ID NO: 509201 - DNA, 1464 bp, Stenotrophomonas maltophilia
atgctccttctacacgttggcgggctggtggtcaggcgtatcacttcagtggcagtgcccaggacagggcgcggactctccctgcaggcagtgctgcgccccggtgcgttgttggcaacccttgccctggccggctgcatgtcggtgcccgtcccggacctgcctgatcgcacacccagcgcctggacccaggtaccgcagggccagggcgtggcggtggacgccaggcagtggtggaaggtgctggccgacccggcgctggatggcctggtcgatcaggcggtcgccggcaatctcgacctgcagcaggccaccttgcgcctgcaggccgttcggatcgtctctggcacgtccgactcgcgtttcctgccggaaatctccgccagcgccaagcaggtgcaggacgccgctgcggtcgatacctacttccatgccggcattgaagcgatctgggacctgggcctgttcggcgccgccgagagtgcgcagctgagcgcgcaggcctcggccggcaatgccgaggcgctgcgcaatgccgcgcaggtagcggtgattgccgacgtggtgcgcagctatctggacctgaccgtggcgcaggcccagcaggatctgctgatgcgccagcaggccgtggatgaccgcggcgaacagttggccctggtccgccagcgtctgcgcctggatgagccgggcgagctggaacgcctgcgtgcgcgccaggcggcgacccgcgccgccacggcacaggcccgggaaaacgccgacaacgcggcccgcgccctggcattgctgctgggccgcgatggcccggatccggcctggcgtgcgtaccgaacgccgccgacgctgggcacgttctcgttgcagcaggtcccagcggacctgttgcgccatcgtccgcagatcctgctggccgaatcggaggtgatgcaggccgccgccagcaagggctcggcgcgcgccgcgatgtacccgcggatcagcctcggcggctccattctgtatgcctacaacctcacccagaacgcgcgctccaattccgactccagtccgtcgatcggtccatacgtcgatattccgctgtgggactggggccaacgccgtgcgcgtttccatgccgatgagaagcaactggacgccgcgctgctcgggtatcgcaaggccgtgctggaaggcgtgagcgaagtggaaggcgcgctgggcagcctggcgcgccaggacagcagcatccaatcgctccgtgcggccaatgatgccgccaaccagcaggtcaagcgccaggtgcggcaggtgcagctgggcctgtccagcgagttcgatgggctggacacgcaacgtgccgcgctcgcttcgcaggcggatctgatcggtgcgcagggcgcgcgcgtgctggcgtttgcgtcgctgtaccgcgcccttggtggcgcaccgctgccggtcgaggctgagggcgaaccgcaatga

SEQ ID NO: 509202 - DNA, 1140 bp, Stenotrophomonas maltophilia
atgatcgcgctggcccgcaagaccctggcctatgagtggcgccggttcctgccggtggtgctggcgatgtgcttcgccggcgtgctgttgatcgtgcaggcggcgctggtgctgggcatcttcggtaccgccgcgatctatgtgaaggcatcttcggccgatatctgggccggtttccccggtacccagagcgtcaactacggccatgcgatcagcgccgatgtggaaagccacctgcgcatggatccggatgtcacccgcgtcgagccctacgaatgggtcgatggcgaatggcgctcaggcgcgcagggcaccggcaacgtgtcggtgtacctgtccggcatctccacccaggacgacgcgatgatgttcgcgcgcatcctgcccgccgacctgcgcgcgcagttgcgcgagccgggtgcggtgatcgtcgacagtgccgatctggatacgctcggcgtggacctgcagaacaaccgtgcctggatcaatggcaaggcggtgcgcgtggtcgccgcgcagccgggcctgcgtggccttggtggcgtcaacgtgctggcctcgctggataccgcgcgtgccatcgccggtaccgacccacatgagggcagtacctacttcgtggcgggcctgcgctcgccggacctggccgatcgtgtgcgtgaccgcttgtccgcgtcgatgggccgggccacgccggtcgagttctggaccgcgccggagttcgccagccgctcgcagcagtattggctgttcgataccggcgccggcatcgcggtgttgttcatggccgtcatcgtctgcttcgtcggcgcggtgatcaccaaccagtcgttcgcgtcggtggtggctggctcggttcgcgagtacgccacgctcaatgcactcggtgcaggccgctatgcgctggcacgggtggtgttcgagcaggcgttgctgatcggtggcgtgggcatgttgctggcggcggcattcagcaccgtggtgctgctgatcgcgcagacccagcgcgtgccggtgcagctgacaccgatggtgatcctcggctgcgtggcgctggttgcggtgatggccatgctctccagcatcatggcggtgcgcagtgtcgtccgctccgatccatcgttgctgctgcgttga

SEQ ID NO: 509203 - DNA, 729 bp, Stenotrophomonas maltophilia
atgacttccacacgcgccgtcgccccgaccctgcgggccgatgcacttgaaaagggcttcctgtccggcgacgtgcaggtgccggtgctgcgtggcctgtcgctggacatctatcctggcgagctgaccctggtatcgggcccgtcgggttgcggcaagagcacgctgttgtcgctgctgtccggcctgtccgcgcccgatggtggccgcgtgcacgcacttggccaggacgtggggcacatgacccgaagcgaggtggagcgcttccgcctgcaccatgtcggtttcgtgttccagggcttcaatctgttcccggcactgactgcgctggagcaggtgcagctgccgctgggctaccgcggcatgcgcaatcgcgaaagcgaaccgctggcgcgcaaggcactggaagaagtgggcctcagccaccgcagccacatgcgcccggcgcagctgtccggcggcgagaagcagcgtgtggccgttgcccgcgccttcgccaagtcgccgacgctgatcttcgccgacgaacccaccagcgcgctggacgccgagaacggccagcgcgtgatcgacatcctgcatcgctacgcacgtgcgcatggcgccaccgtgctgtgcgtgagccacgatccgcgcctgatccggcatgccgatcgggtgatcgccatggaagacggcatggtccgtgacgaccgccgccagaacgaaactgtagagtccgccccatga

SEQ ID NO: 509204 - DNA, 918 bp, Stenotrophomonas maltophilia
atgaccaagacgtcgcacctgcttcccctcagcctggccctgtccgcggcactgctgctcggcgcctgttccagggacgcgcctgcgcctgcacagtcgccttcgggcaaggccggtgcaaccgccgtcggcaaggtcgcggtggcgcgcggcatcatcgacgtcgagggtggcctgatcgcgctggcaccgccggtagatggctcgatcaccgccgcggtgaaggaaggcgccacggtgaagaaggggcagctgctgctgtcgctggatggtgccttgctgcagcaggaggtggcgatggccagcgccgatctcgccctggccaatgaccgcctgaagggcagtcaggcgcagctgcgcgaactggagcgcaacgctactcgcctgtccacgggggccagcgaaggcgtgtcgtccaatcagcaggccgatgcggccaagcagcagctggcgggtgtgcgcgccgatgtcgacgtggccagtgcgcaggtcgacatggcccagcacaagttggaacacgccaggctgaaactgcagcagatgtcgctgagcgcgccggaagccggcaccgtggtcggccaggtgccgggcgttggcgcgttcgtgcaggccggcaagccggcaatctccctgctgcccgcgcgcccgctgcaggtacgtgccgaactcagcgcggcctacgccgatgccgtgcaggttggcatgcaggccaccgtggtgccggacagcgacggtgccgaaaacaccagcacgctgccgcctgcacgcgtcgtacgcatcagcccggtgttcgcgcaggcgcgcctgcctgaagatgcagggcgtggcgtggccaaggtggtggagtgtgtactggagttcgatggcgaggccaaggcgcgcttcggccagcatgtgcgggtggagttccggaagtaa

SEQ ID NO: 509205 - DNA, 183 bp, Stenotrophomonas maltophilia
atggtgccgaccaccaacgggaggatcaccaccggcagccacagtgcggtcagcgggatcgagccgcgcaggagcagctgggcgatcagcaggaccaccaccgaaaccatcgaatggaacagggtggcacccatcgcgacccacggcagggtctccagcgggaacacgacgcgcttcacgtag

SEQ ID NO: 509206 - DNA, 2160 bp, Stenotrophomonas maltophilia
atggtcctcggcggcagtgatcagcacattgttgccagcccccagaatgacgttgccggtggcatcgaccaccgcacctaccgcagtcagatcgcgtccagccgtgatgttgatgcgctcgccctggatcgccgtgccgatggcatagctgtcgctcgcgtcgacgctgcgcgtggtggtggtactggagagcgtcttctttttcttgtcgtagctgtccaggctgtagtcgtgcgtctcgttggacgagagcaggttcacgtcgcggcctgcggccacgcttaccgcgccgtcattgctgtcgaccagcgcagctgtcaggttcacgtcccggccagcgttcagcagcagattgtccccggcctgcaatgtactgccccgcaccgtctcatcacgctggctgacctgcagcgaactgcgcttgcctgcgctggcaaaatcacggctctcgctgtccaccagcgcctggctgttgatgtccccaccggcctgcaatgccagaccgcccgccgctttgatctgcgcggcggccaggttgatgtccttgccagcggccagcaccacatcgccagcgccctgcaccgagctggcagcatgtgttgtcctgctgctgcgttggtggttgcgttcatcgaaggtggcgtcgcggcgctcctccagcgcaatcgcgccaacatccagagtgccgcctgcggccagctgggtcaggccgtcggcgccggcgttgcggatctgtgcagcctgcaggctgatgtcaccaccggccaccaccgacagcatgccgtcgccactgggattggttacatacagaccggcgacccgatcgatgcggttggtctcgtactggtaggtgccaccgccctgctgtgtctccaccgtggaggccaccgtgacattgcccgcagccttgaccgacagcgcatcggtggccgtcacggcggcacccacagcacggatgtccttgtccgacgacagcccgacgtactggccgaaaatgctgccgcccagatgctcgatgttgccggcatcgatggtcaccagcttgcgcccggcgatgttgccggtgttgaccaggccattgcccagtttgatatcgacattggcgcccgccagcagtgcaccgttgccgtcgaggtcgcccgggcgcaggcgcaggtagacctgcggcaccagcgcggtggtggtgctgccatcggccagggtgacggtctgctcgaccagccagacgatgtcactggtcagctgtgccatctgcgcttcggtcagcgccacgccggggcgaaggccccattcgctggcgaccgtggcaccggcctccagcagcgcgcggtactgcgcctcgtcactggcgtagccgtcgaggaagcggcgaccggtcagctggccgatctgctcgcgcaccagcttctgctcgtagtacccatcacccagccgcttctgcacgatatcgggcgagtagcccatctggcccagcaggtggtccgaactcagccaggtcgtgtggtcggtgaagcgcggatcggtctcgaccagatagtggccgccgttgggattgacgttgaacaggctggcgctcggcgcgcgcgtgtccggtgcacccatcgcgatgcgatccggcgatcctccactggctgcgaccacgcgcggcccggacgtaccggtgttgccgctcacgccgccgacgctgctcccttgctgggtactggcaccatcggccgcctgtgccagcgcgcgttcggcaccggtgccggcggactggcccggcccctgcgcaccgccatgacccggcccatccggcagcgccttgggcccctgcacgttgaggttggccatggccgaaccgttctgcacgttcggcgcgttgcgcccctggttgaggttgctcaggtcaccgacatcgatgctcaacgagccgccgctgacaatgctgccgccaatcttaccggtcacctcggaaatggccggagcactccaggtcatcacgtccccgccgaaggtgtggctgacgttggagaactggtgcgtgcgatacagcgtggccgccaggttctccaccttcgccgcgccggtcaggccgataatgtccagatcgccgccggcggcgatgctgccgtagtggttgcgcaggtcatcgctgcggatgcgcatcgcaccgcctga

SEQ ID NO: 509207 - DNA, 198 bp, Stenotrophomonas maltophilia
atgcgcaccggagcgttcacggtggtggtctgtgtgatgaccacgttctcgcggatgttgttgaccacctgcgcatcgatggacaggttgccggtcacatcgatgaccgagctgatgttgtcgatccgcccggcaatgccgctggcgatgcgatcggcactcagcgtgccgccgatggcagcatcaccgccgctgtag

SEQ ID NO: 509208 - DNA, 2055 bp, Stenotrophomonas maltophilia
atggcgcatgccctgctgcagggtgaggccgaggtcccgctgcgcatgcacctggccgtcttcgctgagcgcacgtgcgaccagggtctggctgccatcggcgcgcagcaggccaccgctgttggcgacgttgtccgcctggctgtccaggttgccgccggtgctgatcacgccgccggtgttctgcagctggccgttgatctgcagccgcgcaccgccatcggtgacgacctggccctggctgttgtccagccactgtgcaccgaactgcagctggcccgcctgcaggccacgcgtgccgtcgccgccacgggtgttgcggttgtccacgctggcggccgtgagggtcagcagctggccggccgcgatcgcgccggcggcgttgtccagatgcccgtccagggtcaggtcgaggttgcgcccggcctgtacgcgaccaccggcattggccaggctcgctgcctgcagcgaaagattcgcggcgctggcaagtgttccaccgccgctgttgtcggcgcggaccagcagcaggcgtgcatcgtcttgtgcatttaccgtaccgccacgattgtccagcacaccgccttccagctgcagcttcccagccgccagcaacccaccgctaccggccgtggcacggttgtcgatgtcctgcccggccgtattgatggccaggtcggcagccgattgcacacggccgccctgattgtccagaacgccactacgcacgctcagcgcgcccttctgcgtgcccagcgtgccggcgcggttgtccagccgctggccgcgggtctcgatgtccagctgcccccccagcagcgtgccgcgctggttgtccaggccattgccctgcagctgcaggcgttcgccggcctgcatcgcaccgtcactgttgtccacgcctgccgccgtggtcaccgccaggtcctggccagcgaccagggtgccgtggcggttgtcgagactgccggcatccagggtcaacgtgccggcgctggacagcaggccctgctcgccattgtcgaggcgaccgtcaacgcccagcaccagcgcgctgccgcccgcgtgcactgtgccgccctggttaccaaggctggccgcggtgactgtgccggcaccgccgagcaggatgcggcccttctggttgtccagcgcctggccgatcgccagcgtggagtgacccgcgcctgcaccctgcagcgtgccctgtgcattgatcagctgctgcgcggtgagatccagcacgccattgcccgccagcgtgccaccacgattgtccagcacaccctgtacgcgcaggcgcagcgcgtcttcaccggttgcggtgagcgtgccaccggcggtggtcagggtatcggcggtgatgtcgacgcggcgcgccgaggtggttgccgcggtcagatcgaggttggcgccatccagcgcgaagctgccattgctgagcacgctgccgccgttgcccagcagggtcttcgccgagacctgcagctggccgctccccgcgtgctggatcctgcctgcacggttgtccagcgcctgtgccagcagggccaggtcgccattgctggccagcgtgccaccggcattgcccagcgtcgtggccttgatgcgactggcgccttcgccgctggcgatgatgcggccaccggcgttgtcgagcgtagtggcctcaaggtcgaggcgatcggcgcccagtgtcgcgtcacgatggtccacgtcgccagcacgcagggtcagcgtggccgaggagaccagcgtgcccttgctgccgtccaggcggccggtggtgatgtccaggccttggttgccggcctggcggatgctgccgccactgttgtccagccgtgcggaagtgaccgtcaggcggttggcattgctggcgatcgtgccttcgtcattgtccagcgcagcgacgatctgcagcgtgctgtcagccgttccggcaccgctgagcatgcccttgcggttgatcagttcaccggcctgtacatccagtgcgccgttgccggcgatcgtgccgccgctgttgtccaatgcctgcgccacacgcactag

SEQ ID NO: 509209 - DNA, 1017 bp, Stenotrophomonas maltophilia
atggttgcgcaacccctgcgcctccacctgcaggcgctgtgcattgagcgtgccgccgctgttgtccagcgtgccaccggcggtgatcgcaacttcgcgcatggccgcgatggtgccgccattggcaaggtcgccactggcctgcacgcgcacgttctgccgcgactgcagggcgccggtgttttccaggcggccatccaccgtcactaccagctcgccggcctgcgcgccgatgctgccggcattgcgcacgcccacgccgtgctcgttgcccaccagccagatcttgttggcgaacatgccgcccagtgcgccaacgtccagcgcgaaggtcggtgcctcgccgctggctgcggtcgcactggcctggctgtggtcggcactgaccacgttgttgcccagcgtcgcctgcaactggttggcccagatgccggcgttgacctgcaacgaacgggtgatcaggtcggtgtaatcggcacggctggtgtccaggccatcgccatcgatctggatcgcgccgccggtgacgcggtagccctccagtgcgccggcccccgtgaacatcggcgtgccggtggtcagggtcacccggctggcattgaggaagccgccgccgttgacctggatgccggccgggttggcaatgatcacttcggcgcgctgcccggccacttccacatagccgttgagccggctggccggaccattcacttcattgaggatcacccgtgcactgccggtggcgagccacgggttgccctgcacccagccgcccagctgcgtctgcacctggccgcgggcgttgttgaggatgacgccatcgcggcccacgtcgaactgcgaatagcggttgcgcgacacgcccgccgccgacggcgtggtgatgttcaccatcggcacgccattgggtgccgtcaccatcgtcggccgttcacggcccggcgcattcggatcggaaatgatgcgcgcgtcggactgcgccagtgcaggtgttaccaggctgacccagcccagtga

SEQ ID NO: 509210 - DNA, 1755 bp, Stenotrophomonas maltophilia
atggaacgtagagtggaaacagggaagaagcacccggggccgaggctccatcgtggttggtcattgatgctcgccgttgccgcatggccggcgaccgcccagcaggccggtgatcccgccgcgcaggaactgctgcggcagcaggagcgcgaacgcgtgctgcgcgagcagcaggaacaacgccccgacgtccgcctggagcgggacgcgcagaaggacggcgaccgcctgccggcgcaggagcacccgtgcgtacgcatcgatcgcatcgtgctggaaggcgaagacagccagcgcttcggctgggcactggcggcggccgacccggcggacgatccggccactggccgttgcctgggaaccgaaggcatcaacgcggtgatgaagcgtgtgcagaacgcgatcatcgcccgtggctatgtcaccacgcgcgtgctgtcggcaccgcaggacctcaaccagggcacgctggcgttgtcggtggtgccgggccggttccgcgaggccgtgttctccgatccgcaaggccggcatccggccctcgccaatgcattgccgatccgcagtggcggcctgctcaacctgcgtgacatcgagcagggcctggagaacctgcagcgcgtgcccaccgtcagcgccgacatcaagatcgcgccggccgacggcgagggcgcggcgcccggccagagcgacctgcagatcgactggacgcagcgttcaccggtacgcgccagcgtcaccctggacgatgccggcagccgcgggaccgggaagctgcaggccaacgcgacgctgtcgctggacaatccgctgggcctgaacgagctgttctacgtcagtgctggccgcggcgtgttcaacggccgcggcaaggacaccgacagctggaccgcgcactacgacgtgccctacggctactggctgttcggtgctactgccagcgcctacgactacagccagaacgtggtcggtgcttttgaacgctacgactacagtggccgcagccgcaacgccgaggcgcgggtggaccggctgctgctgcgcaatgccaaggccaagttcagtgcctacgcacgcggctggcagcgcgagtcgaagaactacatcgacgataccgagatcgaagtgcagcgccgccgcaccgccggctgggaactgggcctgacccacaagcagttcatcggcactgccacgctcgatgccagcgtggcctaccggcgtggcacgggcgccttccacgcactgcgttcgccggaagagatggcgcagttgtgggacccgacgttgccgctggaaggcacctcgcggatgaagctgatcaccgccgacgcgcagttcagcgtgccgttccagctgggcaagcagcgcctgcgctacaccgccgcatggcgggcgcagtggaaccgcacgccactctcgccgcaggaccgcttcgccatcggtggccgctataccgtgcgcggtttcgacggtgaaagttcgctcagcggcgagcgtggctggtcgctgcgcaacgatctttcgctcggtatcgggggcggccaggagttctacgtggctgccgactacggccgcatcggcggcccatccgcgcagtggcagtccggccatgacctggccggcatggcactgggcctgcgcggcggctggcagcagctttcctgggatggcttcgtcggttcggcgctgcgcaaacccgcccatttccccaccgactacacgacattcggcttcagcctggcctggcgctactga

SEQ ID NO: 509211 - DNA, 405 bp, Stenotrophomonas maltophilia
atggcccatccccgtgccccgatggagcgcctgatccgcgccaatgctgacgagatcaaccggctgcagcaggccatccacgagagcgccgcgctgcgctggcgtgaccccgaacagaagctgctgcacgcccaggcctgcgcggcgttccaccagcactacgagcggctggcgtttccgggaggctatgccaacgcgttgaaacggctggccgaacacgatccagatacgctggatgtcgcgctgacctttctcgaagtgcggccgtatttcttccgatccggatacatgtggaagacgctgctgaagcgcgtgcaacgggtccccatggggacgaagcagcacgcgcggctgcagaagatcctcgatgcctacgcggcctatcgcgccacacgtgacggctga

SEQ ID NO: 509212 - DNA, 408 bp, Stenotrophomonas maltophilia
atgaccaaccgcaccgccatccatccccgcctgcacaccctgatcggcgacatcgccgccgatgtgcccgaagacctcgcacgcgagatcgagtgcgccttgcacgaacagaatctgcccgtacagtcgcctgccttcttcgcgtgcctcaatgccatcagccgcgccgacagcgatgacggacggccgtgcaacagcctcactctcggtgccagcaaccacgcctccctgcgccgctcgatgtctgggctcagcgcagtactcgatctgctgcaggccgccgaccgggcccgcaacgaaggcggcccggacgaacagttgggtgccttccatatcgacggactgatcttggccgcacgacagctggtgcgcgaggcgcatcattgcctcttcagcggcgatgcctga

SEQ ID NO: 509213 - DNA, 777 bp, Stenotrophomonas maltophilia
gtgctgactgagaatgtgctgtctgagatagccatcgtgcggcaggagattcgcgcatacgaagcaagctctgaggccgctcggcaggaaattactctgacctccacaatcgataggttcttagggggtctgcagcagctgctcagtcagtacgaggcgtcggactcgtctccagagcttgaaggcgaaatctctgacttgcgcaagaggctgagtgagatcaatggcaatatcaatggggctgcccttcaacggcgactggacagcattcttgacgagattcagcagatcaccggaacgatcattccgtcactcaatgcagagtggggtgacagcccggtgcgactggatacgaaggagctcacggtaagggtgtctcgcaatgggcggatggattacctttgggagatcggcagtggggccaactggcttgcgtatcacgttgcggtgactctggcgctccagatctatttcctcaagcatcccccgagcccggtaccgggtcttattatttacgatcagccgagtcaggtttatttcccggcagtggtgatcgataaggttacgggtgagaaagataagagactggtggatcaggaggatattcaggcagttcgaagcatcttcgatgaaattgggaagcgcgtggtggccgccaagggtgcgttgcaagtgatcgtcctggatcacgctaatcaggaagtatggggtgagctagagggcgtgtgccttgtggaggagtggcgggggaagaagctcgttccgttggactggtaa

SEQ ID NO: 509214 - DNA, 1173 bp, Stenotrophomonas maltophilia
atgaggctcagcaggtggggctgggcaacggacatgtcaaccaaggcgacaaaacacagcgctcctgggccatacctcggatacggcctgcagactgtgcggctatgcgcacggcttttgaatgaacctccggattcaaccgtttttgtagagcacgatgacgatgtctcggtgctttatagcgacgggacaaagctccttgagcagacgaagcgagtcaaaagcaaccctttgtcagattggtctgtagacctatggaagactgtccataattggcttgaggatcacgctccatttgatgtcgtatccaagctgtgcctctacataacgccagatcatgagccgggcgaatttgcaagggcgttagcaaaggcaagcagcgcgcaagatgttgcagaattggtcacgcgaatcaagagccagctcacctcggcgaaaaagaagtcgaaggtctatccctttgtcagcaggttcctttcggccgagcccgatgaacagctctcgctggcggctcgctttgagattgttcgcgagggagatccattttccaccatccgcctgcgctatgaagccgcagtgtccccacttctgcttgaacgaatcatctcgttcgcattgggggaggccaaggtgaaatctgaccggttactggagatggggaaacctggcgcgatcaatgctggcgagttcaaagatactgtcaggcgctttgtccaagaaattaatcttccggcctattttgattttgattctcctcccatagatccggccaaaattgatatggagtttgtctccaggccaaccttcgtgcgccagctggaattgatcgaggctagtaagcagcaacagctacaagccatcaatgactacttgagagccatttccagcaagactaggtggggcgaggaggggatactgcttccgggatcactggacgaatgggagagcgggcttctacagcggcattcggccatatgcgacagtcttgacgtgcttcactcaagtctcaacgatgtaagtcgcggcaaggtcgtgtatgccgaatgtcggaagctagagctgtctctacaagggaaaagcgtcccggggcactttactcacggctgttttaacgagctctcgggaacaatgaagctcggttggcatccggcctacctatcacttttggaataa

SEQ ID NO: 509215 - DNA, 975 bp, Stenotrophomonas maltophilia
atgaagctttccgaatcggagcatgagtcaggtcagattgatgaccagcacatgtcagctccgccatcgttcctttacaagtaccgatcattcaatcgtttcttactgcaggaactctgcgacagcgcgacgttcttctcaagtcctgtgaacttcaatgatccactcgattcgaggccgactatagtcaatgacttggaaaccccaagagctgagcaattgcttgaagatctatttaaggagcgctggccccaaagggacgctgggcaagaacttcagaactgtcgatacatggcaactgagcatgcccacaatccgtcagagctagagattgcgtaccgtcgcgagttgaagcggcgaatcgaattactaatccttgactggaccgctagcaaggggattctgagcctagcctcaaactggtcctgcccccttatgtggagccactacgctgaccaacacatgggcatatgtctggagtatgcgacagcagaccatgtcgcacacagcatccgtcaagttagctatgacaagccgcgatcaatcaacatgagtgatctggcgaaatggagactagaagcagatcccattgccagagaaagagtcattgagaccgcattcctttcaaaagctccagcttgggcctatgaaaaggaatggagagtcctgggaagggcgagttcgtccagaggcgccccatttgacctttcagccatatattttggagcgcggtgcccatcagcagttcagacggccattgtgaaaacaatgcacgacgtgtctccaaagatcgaaatgttcgatgtccgcttctccaccgagagtttcgaactcaagaagcaggaagtctgcattgatgaaatccttcaggttggcatacgtccatctgcagaactcgtgtttggcaggcatccaattgagagcaagtcgtcatcggacacgtcccgaaacgaattcaatgacgacttctattaa

SEQ ID NO: 509216 - DNA, 1878 bp, Stenotrophomonas maltophilia
gtggctgagcagccacctaagcaatccgagcgcggaatcgcaggaatccatgtgtgtgagacaacagtggaaagcttcgagtgggagaagcactttcacaatcacgattggatcaatagtcgatgggaagccacccagatagcaaagcacgccgctgaatcatatctccagaccggggaagatgaaaaatcagcaattatgaggttacttagcgcagtaatatccatgcgcttaactggtaacccatcacaaccgttcgcacctctttggcaagacggccatcacagttccccgcacaccgaaaatttgaataagcaagatgcacttctgcttacccaaatggcacatttggcatcagacaattggcttaaagcccgactcgctgatgtggcgaccgttgtaggccccaaatttggtggcaccggatgggagatcggcaagactgcagcacgagcatatcttgaatacaccaagaaattcatccttggtgaagatgctctacgcgccatggataccattgaatgcctacgtaggtctctccaactgggttggatctacgcaaagaaggacagcaaatttcagcaagacatctggggaattgtggaagaaagctttgataacgccgttcgaaataagtggcttggactcgccaattcaattgcagacgagatcttagatcgacgacgggaacttgcagcggcaagcgctcaaaaaatggaaaagatggcggattcttggatcctagacaccgatccgcatgctttccactttgcatctattgcgtttaaaaaatccgcaaagctgtggcatgcagcaagaaactcgaatcgctccaaggcatgctactacaaggcagcccatgcgctgatagaaaaatcgagacagaaagatcgagcaacggtaaaagcagactggatgagcgaaggtattgcgcttttgcgaagacatggcggggatagagaactaattagcaaacttcagattgagttgagcgatacgcggcaacacattcaggacgaaatgcacatcatagagcatagctttgacgcggaggacctggcagaccatattaaatcaaagctcatcgccaccacgttcccggccgctctattagaaatagcattttcattctccgagttcaaatcagctaaagaacttcgtgacgagactttagagtcctctgaaaaatacgcagctcagagaatttttcatcgagtcttcatcaatgaaaacggcgtcccagtggctcgttcagcgcccaccgataaagacaacaatgaaagcattgaagacgagatgatcctaagactctgccaataccatcatcccgttatggcgagcgtcgccatacccgtagcaatcaatacagtaacggagcgtttcgagctaacacttaatcacattctccaggttgtcgatgggtcaccatgcagctctgaggggcaccagtggtcaatcgcgcgcgggttgtttgcaggtctgcagcatgattggcgagaggccgccacattccttattccacaagctgaagccatggtgagatccgcgtttaagcgattaaacgttaacactttgtctgtaaagccgcatggcgaggaagaaaagtcgctgaacgagctactagaccatgcaaaagtttcggaggtaattcatccagacatcgtaattcagctgaaaagcttacttactcatagagccggccataatctcaggaacctattcgggcatgggctcatgaaggatgacgatctattgtcccctggaactgtagtactttggtggaccattcttcgtctagttctctggccctacagagacgtatactttaatagcttaacaacaactccattcgcaaatcacctcaaaaaggaatgctaa

SEQ ID NO: 509217 - DNA, 663 bp, Stenotrophomonas maltophilia
atgttggcggctgagctgggcgtcaacatcgataccagcgcagcgcgcggtgaaggcattgctgatgcaagcacgttgctgatggacaggcaggcgacggcggatgccgcaggtacggtgacggccaccagccagctgattgccaatggtgtttgcagtgcgcatgtgagccggttcagaagaggggggggcgggatgagtgttggtgatatgggagatttcaaagaaatttctgttcaggctgcatatgtgttgatgtgcgttttcctgcaaaattatttggataggggtagtaatcaggacgctcttgttgatctattatcttcggcgcgctcttttttgtgggcagatgacctgcccaacgatccggtaatgtgggatgactggcgcgacgcatttgcagaggtcaacaccgctgggggcgcacttaatgctgaattctgtgtcgcacaaatgaattcatcgggtgggcgtttgacgttgctgaattcgttcgcagtaatgctggtattcctcgaggcgatttttgatcgatccggtgagggtcttccgctgttcgaagttattgggcgtctcacgtcgcctttaaatgattccagttgcctgaatgattcctctgtctgggttgagtggatggagtcggttggaaaggttaggtcgtag

SEQ ID NO: 509218 - DNA, 219 bp, Stenotrophomonas maltophilia
atggcgatgttctacttcctccagatcgactattcccgcggccccagcgatgagatcggggggctgctgggttcacttggctggactcttaaggaggatcgaagccccacggatccaggtgcgtgggaggactggttggacgcggtgagagcgtccatggggaacagcgaggagggcataaaggatatgagtgctacctacactgatctgaagcggtag

SEQ ID NO: 509219 - DNA, 531 bp, Stenotrophomonas maltophilia
ttgtccgaaccgccgccgcgctccgggtctccgggcgcggcggtttcgcaattgcaggacgtgcagaagtgccagaattcattctccctgccggaaggctggcacatggaggcggccggcgagcagcgctggctgctgaagggcacgggtgtgcgcccgctgcaggtggtcctgcagtgcgttaccggactgggccacctctttgaagatccccgggtggtcgcagagctggggccgctggagccgagccggatgaacgtgcgcttcgtcgcatggggcgaccccgaacaatccggctaccccatgcgcgccctgcaacggcgtttcgtgcctggcaccgaagtgcaggaagtcgcggatctgccgcgcgctgaccccaacaaccggcaggcgccacagggcctgctgatgctgcgctgggacgaggaagacccctcacatattcaacaacgcgaggcgttcatcgccacgctgacgcagagccttgaagcgccgggcgctgcgaaaaacaccactggaacggcaccatga

SEQ ID NO: 509220 - DNA, 162 bp, Stenotrophomonas maltophilia
atgctcggaaagccgcatgaaacaagctttcccgaggagacttttaccgtcaaagaccggtttagtctggatagtaaacgggagggtcttaatccggcccccggttcgtaccgtcagttctaccgccaacctgttctgctggccggcgatagccaccgatag

SEQ ID NO: 509221 - DNA, 525 bp, Stenotrophomonas maltophilia
atggaatacaccttcaccctgaaataccagctcaccgaagacgacagcgacccggatggcctggtcgagcgtctgggcgaggccggctgcgacgatgccctggtcggcatcggccagccggggcggctggcgttggagttcacccgagaggcggacagcgcggacgcggccgtgcgcagcgcgttggccgacgtgcgcagcgccgtgccgtcggccaggttgatcgaggtggcgccggatctcgtcgggttgaccgatgtggccgagatcgtcggcgtgtcgcggcagaacatgcgcaagctgatgctggcccatccgggcagcttcccggcaccggtgcatgaaggcagtgcgtcgatctggcacctggcggacgtgctggcctggttgcaggccaagggcagctattcgctgaccagggacgttcaggaggtggcgcgggtggccttgcaggtcaatgtggcgaaagaaggccgccggttgccgcactcggcgtccaaggagctggaagccttggtgggataa

SEQ ID NO: 509222 - DNA, 348 bp, Stenotrophomonas maltophilia
gtggaacagctatcgcaaacatccgacgcgctccccttgccgggaacgggagcctacgaggagttgccgcaattcccgaagcgcagcccccttcccttccggcgcaccattcgccgccaggagctgcggctgatcgtccccttggccgaaacgacgatctacgaaatggagcgccgcggcgagttcccgcgtcgcttcaacctgacgccgcgttgcgtcgtgtgggacttggctgaagtggaagcatgggtcgaagaacgaaagcaggctccgcgcgccggcgtctcgaagcccgatgtccacttacgaaaaaaccgccctgtccgggcgggttcaagcgaggaatga

SEQ ID NO: 509223 - DNA, 1260 bp, Stenotrophomonas maltophilia
atgcccaacattcccattgccgacgctctgttctccgccctcctcagccgcgacgcggctgcactcgatgcgatcgaggcaaaacacgccgccgaatgcgcattcattcgcactgtcatctgcaccgatgctccgggtgccgttgacttagacctcgggctcagcgtgtcctccagcgactatgtgacctcgttttttgaagggccgcgtgcgttcttcatgtcggccggaaccagcgtccatgcccatctcacaggtggtaggtcgagcgtgctgatcgacttctctctcagcttcgactcgaatttcgcagagaagctgcgtgcagtcatcgccggcgagaacattcagcgggctgatcgcgatagggtcatcgaaattctcatgctgaaggctcgaaaccgccatgtgcagttcgacgtgatgccgtttctcatcgagaacacgcgcctggcccgtgacgagccctcaaacgaacgccccctgaatacgctgatcgctttccgcatgctcgaccacctgaattggcatgcctttcagaatgatcccagccgcttcgccttcgatgcttcatacgaggacctgaaagccctgctccggcccgatgccgaagccttcctggcggagttgcaagccagtgagcatattgatcatcacgaagcaaagagcgctggagcgcaggcgctgctactgcggttcgctcgactttggcatgaggaacgcaaacgggacaagaatcgcatcctgcgtgaattgctccgtttcagcatccataagctagggtcgatcccgcttaccgaattgcggctgatctggagtggcatgacctctagccaggggtcgccattcttcggccccatcatgggtaggtcccctgagatgttgcagaagattcgcggcatggcctgggacatgacattgctccgcgttatggagcaaatcgccacagctagccaggtcggctccttcttcatcccctatttcgtgtcaatggatcgccgctggcgccatctccttagcttgaatcctgtgaggctgatgctgatcgacgacgcgcatcgacgcgtgcttttcgcacggaccgatgaactggagttccagcgcgtgctgggagagtgcatgcagaccgcatttcagttggagatggcacctgaaagggtcgaggcccgccgcagggcggcgcagaccgttgaattgaacgcaatgaagcagctcgtcgccgaagaagagcgccattggctcgaacaagagttgcagtag

SEQ ID NO: 509224 - DNA, 750 bp, Stenotrophomonas maltophilia
atgatcgccactgcggggctcgtggacttccactgccatcttgacctctatccgaaccatgccgcggcggtccaagacgcggaggcatccggcgtgttcacgctgacggtgacgacgacacctcgcgcctggcctcgcaatcacgaactagcgcagcgcacgaagcatgttcgcgcggcactagggctacatccgcaattggtcgcggaacgtgaaagcgagatcgagctatgggatcaacaccttggggagacacgctatatcggcgaagtcgggttggacgccggtccccggtacttcaagtcgctcgatgcgcagaagcgggtgttccagcacgttttgcagcgctgcgcgcaggccggtgacaaaatcatcacagtccacagcatcaggtcggccaaggcggtactcgatctcgtcgaagcacatctaccgcccgagcgcggaaaaatcgttctccactggttcacgggaacaaagagcgaggcgaagcgcgcgttggagttgggctgctacttctcgatcaacgcgggaatgctgggcaacgagaggcacgcaccgatggtgcaggctatccctctagatcggatgctgacggaaaccgatggtcccttcactcgcactggcgatagaccttcgcagccaagcgatgtagcgagcgtcgtcgaggaacttgggcgtttgcataggctacctgcgatcgacgtggccagtctcattcgtgacaacctacgagcgattctcgtatag

SEQ ID NO: 509225 - DNA, 1368 bp, Stenotrophomonas maltophilia
atgaagcgacaactcctggcgggccgctttggcccagacgaccgctttgatgtgacggcgggcgtcgatgaacagacgacttacctgcaactcgtcgccggcgaggaatccttagaccacggtatcggaggcgcactcacgagtctgaagaaggtcggcgtgtttccttcggaaatcggcatcgacctgatggtactggccgcccatgtccatgcggcagatactcgcatctcacgcacggaacagtcccaagattcgtggacgcgcgagatacggttggtcgtgccggtcagcgacccggctcgctggagcgcagcagcccccatcctcaagaagtctctggacttcttgacgggcgatcgctggacgatcggcttcagggcacgtccagatcgattcgcggcaatcgcccaagcggcgcccccgagtttgatcgctcctcccttcgattccgtcagcctgttctcgggtggactggatagcttgatcggagccatcgacctgttggaagacgacgccactcccctcctggtcagtcacttcggtgaaggtgcaatcagcgatgcgcagggcaagctgttcactgatttgagaaagcactacacaaagtcctcttttgagcggctgcgtgtgggcatgaccttcaagaagggcctggtggcggatgttggttccgaggacagcacgcgtggtaggtcgttcctgttcttcgcgctcggcgtgtttgcgggcactggactcgggcaccgtttcgtcctgcgcgtccccgagaatgggctgatcgcgctgaatgtgcctttggaccccctgcggttggggtcaaacagtacccgcaccacgcacccgtactacatggcaaggtggaacgacctgcttgtcgcactcgacatagatggagaagttcgaaacccgtactgggacaagacgaagggcgagatggccgcagcttgccgcaactcgaccctcttgaaaaagttggtgacggattcgttgtcgtgctcatcccccgccaaagcacgatggctcggacatggcattgagcactgtggctattgcctgccgtgtctgatccgccgcgcagcgttgacggcggcatggggtactggaaacgacccgacaacgtacaccgttcccgaccttcatgcgcagcccttggacacgcgccaagcgaccggagtacaggtcaggtcgtttcagtacgcgatcgagcgcttgaaaggcaagccgcagctcgcaaacctcttaatccacaagcctggctcgcttgcggatgaagtggcgcacctagatcagcttgccgatgtctaccggcgtggcctcggcgaagttgcacggctcatcgacggtgccgaggcgagaccgagttga

SEQ ID NO: 509226 - DNA, 285 bp, Stenotrophomonas maltophilia
atgcagacggtattcgagctgtatgccacgcatgcgatcgaggcgcgcatctgcaacgacatcggaaccaaagccgtaaccatgccaaccgatgcgcaggctgcgcatcgcgtcgagcaacagttgcgcgacttcatccgaggcggagtgagcgatgcactgacgcgagcacgggcggagacacccaatctcactccagaacggattcaaggcttcgtggacgctgtgtacgagtccgcatttgcaatcttgcagaccctcggcgacgcagaggccaatcaatga

SEQ ID NO: 509227 - DNA, 1935 bp, Stenotrophomonas maltophilia
atgatcctgaccgataacgaaaccaaagtcgatctgctgaacaacgaggcaattgccagtacgatcatcgggctgcttcgtgcgaagcccgaccatccggtgacgatcggcgtgcacggcgactggggtgcgggcaagtccagcgtgctcgaaatgatcgaggccggcttcgctgaccaggatgatgtcctgtgcctcaagttcaatggatggcgcttccagggcttcgaggacgcgaagatcgccttgatagaagggatcgtcacgggcttggtcgagaaacgtccggcgctgaagaaggcggcagtggccgtcaaggatgtcttccgccgtatcgactggctgaaggtcgccaagcgggccggtggcttggcgctgaccgcattcacaggcattccgacgcccgaacaaatcggagccatcgtcggctcgctcgaagcgttggtggcagacccttccaagctcgtcactaaagaaaacctctcgacagccatcgacgaggtgaaggccgtgttgaagccgggggagtccaagaatgtgccggaggaagtggaggcgttccgaaaggcgttcgaccagcttttgaaagatgcaggtatcaaacagctcgttgtcctgattgacgacctcgatcgctgcctgcccgacacagccattgaaaccctcgaagcgattcggctgttcgtgtttaccgcacagacggcattcgtcgtcgcagccgacgaggcgatgatcgaatacgcagtgcgcaagcactttcccgatctgcccgacagcaccggaccgcgagactacgcccgaaactatctcgaaaagctcatccaggttccgttccgcatccctgccttgggagagaccgagacgcggatctacgtgacattgttgttggctggcgctgaagtcggcgagagcgacgaggaatatggaaagctgatcgccgtagcacgggagaagctgaagcggccttggaccagcggtggcctggacgccgcgacagtcaagtcggcactcggaaaacaggccgagaaggcgaacaatgcactagcgctcagcgaccagatcggccccattctggcgagcggcacaaagggcaacccgcgtcagatcaagcgcttcctcaacacgctgttgttacgcgatcgcaccgccaccgcacccggtttcggcgacgacatcaagctacctgttctcgcgaagctcatgctcgcggagcgcttcatcccaaggctgttcgagcagatcgcgttcatcgctgctgtccatccgcaagggctgtgcgaagacctcgaagcactggagagaagccttgcggcggctgacgacaaagagagtgagccgaaggagaagaaagccgctgagcccgctcctacacccgacaatgccgtgttgaccgagtggaagtcgtcggagacggtgcgcgattgggcgcgcctctcgccgaagctgtcgggactagatttacgcccctacctgttcgtgactaaggacaagaaggactacttcggccccgtgtcggtcctgggtcacctagctgctgtggtcgagaagctgttcggcggcaagatgaccgtccaaggctacgaagccgagttgaagcaactcgtgcagcccgaagccgaaaaggtattcgaggccgtacgcagcaagatcatgagcactggcactttcgacaccagaccggcaggcgtcgacggtctcgctgtccttgtgaaagcacagcccggcctccagagccggttgatggacttcctggaggcattgccaagtggcaagtgcgggccttgggtcgtcagcggctggcaaggcgtcatcaaagacaccgaatgcgcgactcgcctgacgaagctgctcggagactggagcaaagtcaccggcaatcccggcctcaaagccagcgccgaagcggcactcaaggatatgaagggagggcgctga

SEQ ID NO: 509228 - DNA, 3522 bp, Stenotrophomonas maltophilia
atgccaacaacacctgaagcaattgcggcagacatcgcggaagcggcaactgcaggctttcgcggaagcctcatcgcgcgaggccaagcgcgagcaatcatctggcgtgatggggcactaccgcccgacgccccgggcttcgcgccacagctcagctacgacttgcattcctatggctacgcccttctggggcttggccttcgcctgcgcgaactgggcggatcggatgcacaggcgcgaaccgcattcgagcaagccgccaccgcccttgaggcggtgatcgccaaaggcaatccggatgaggtcgatcgcgactttcattttgtaatggcggcggcgagctaccatctcgcgcacctttccgcgcgcgcctattctctgctggcgatcgtcgcggcagacgggaatttttcacccacagaacgagtcctgaccttgctgatgaggcgggactttcgcacgctgcgaaccagtgttctcgactttcgagcctctggcgaaggcagtgacaccgagatcgccggacggatgctggtcaggctcgacatggtcgggacagggatcaacttggccggcgacggggaggacatcctcttcgaaggactggacaaggcgctgacggacacgttcatggcggggatatcgctattcctgctggctctcgaccgaggcgagcgggcgctgcttgatcaggcactggagcgacttcgtacgggccttgccgtctgcagcgagatgaacatgcttccacaatggtgggtgcatcgaatcgcgattcatctgctttctgacctatggtctagcacctttcatgagagggttccgtttcagccggcgggcagcgaggcggccgactggcccgcgcttcgcagattattcatcgcactaatgcagagccgcccaaaggccgaaatagatctctggccttcgcagacagaggctgccaaccgcgctgtcgaccagtcagatgatctggttgtctcattgccgaccagcgctggcaagacgcgaatcgctgaactatgcatactgcgctgcctcgccggcaacaagcgagtggtgtttatcactccgctgcgagcgctatctgcacaaactgaagcgaaccttcaacggacgttcggcccgctaggcaaaaccatctcggcgctctacggaagcataggcgtcaacggcttcgacgaggacgcaattggcgaacgagacatcgtagtagccacgcctgagaagctcgattttgcgctgcggaacaaccctgcccttctcgatgacgtcggtcttctagtcttcgatgaagggcatatgatcgggctcaacgagcgcgaggttcgctacgaggtgcagatccagcggcttcttcgccgaccggacgcgcatggacggcggatcgtttgcctctcggcaatcttgccggatggtgatcaactcgacgacttcgcgggctggttgagacgagaccatcctggcggacttatcaagaacgattggcgtccgactcgactgcgattcggcgaagtggtgtggacgtcgccaacagctcgattgaaccttcgcgtcggcgatgaacgcccttgggtacaacgcttccttgttggggaagctcctccccactggataccgccgaagcgccgtcgcacgcgtctctttcccgacgatcagcgcgaactctgcctggcgacagcctggcggctgatcgaggacggccaaacagtactcattttttgcccggaacggcgcagcgtcgaacccttcgccgacgtgattgttgatctccatgaacgtggtgctctgcgctcattgctccaaaccgaccccgcggcgctcaacaccgcgatagcacttggcgaggaatggcttgggccagatagcgcgatcctcaaatgcctgcgcattggcgtcgcgcttcatcacggagccctcccaaccgcttaccgcaaggagattgagcgcctgttgcgcgacagcgtgctcaaggtgaccatctcgtcgccgaccctcgcgcaagggctcaatctatcggccacggccgtcgtcatgcactctcttcaccgaaacggtgagaggatcgaaatctccgagttcaagaacgtcatcggccgggccggacgggcctacgtcgatgtcgagggtattgtgcttttcccgatgttcgacgagatcgccaggaagcggcgcaactgggaagcgctcatcaccgatctcggcgcaagagaaatggagagcggtctggttagactggtcgcagccttgctgatgcgcatgcacgcacatactggtggcgacctcaatcaactggtcgagtacgttgtcaacaatgcagccgcctggaccttccccgaactggcaaacgaagcgcccgaggatcgggagcgtgcccttgccgattgggagcggcacatcgcgacactcgacaccgccatcctcagcttgatcggtgacaacaacatccccgaagagggtgttgaagcggcgctggatgacgttcttcagtcttctttgtggcaccgccgactcttgcgtcaagacgagcatacccagcacgctctcaaggcgggtcttctctcccgaggccggcttatctggagtcaatcgacggcagcgcgccgccggggctatttccttgcaggggttggactggcgacagggcatgcgctcgatgcgattgctgaggacgccaatcgccttctgatccaagccaatggtggcatccttcaaggcgacgccgaggcggcgatcgctgccgtcaccgcgctggcagaacgcgtcttcactttctatcctttcacgcccgaccctatgccagcaacctggcgagacatcctgcgtgcctggctcctcggagagcctcttgccgccatcgctgccggccaagaatccgacacgctgcagttcatcgagggtgggcttgtctatcgccttccctgggcgatggaagcgatacgcgtgcgcgcaatagcgaacggcgacaccgtagacgaactgtctctggacgaatacgagctacgcttggcggtggccgcagtggaaaccggaaccctaaaccgttcggccacgatcctcattcaagccggcttcaactccaggctcggcgccatcaaggccgtgacggacgcaggagcgattttccaaacagctcaggagcttcggcattggctcaactcggaagcccatgcaagattgctcgcaagagctgactggccgacaccagaaacaagggaaatgtggatggagttcacgcgaagcttcgtcccccaggcaaacagcatctgggccgatcgccgctactgggggggtgttcagtggctcggcgtaccgccgccgccacacacccctgttcaacttcatcaacggaatggtcagatcagcgtgctcgcggcagacggcactccgatgggcacgctactgaatgctttgaaccccaagagagccggtttgctcatcgcagaggttgctcaagacattagccgactcgacctcatttatctcggacctgatgactttgttgatatcccgtccgcatag

SEQ ID NO: 509229 - DNA, 777 bp, Stenotrophomonas maltophilia
atggcgcaattcaacgattggtgcttggcgatcgatgctccggtaggcaatcacttcagcagggttatgacgggacaggcggagcgcctgccggtgggtatccaggctaccgcagccattgtgccgacacactatgcatcggaagaacaggtcgcacgcgcacttgcacgtctgggaaagccggcagcggctgcgctgattcaaggctggctaccgaccacgaaagcgatccgatccggagaccttggggagatctatgcgactgaatggatcgacgcacatagcggctatcgcgcgccaatcaagcgattgcgctggaaagaccatcgtaatatggcgatgcgcggcgacgacgtcatcggcatccttcaggatgctcagacgcagcaattgctttttctgaagacggaagcaaagagccgtgccaccctgaccgcacaagtccttacggatgcgaggaccgcactcgacaaggatggcggcctgccctccgcacatgcgctttcgttcatttccgcgcgattgctcgaactgggcaatctaccgcttgccgatgccatcgacgatgcattgctcaagcatgggattccggctcagaacgtccggcatcttctcttcacattctcaggaaatccgccggacaccctgctaaccgctgctctccaggcgtacccaggggcgatcaaccaatggggtgtcggactgcgcgtcgaagatcatgccaatttcatcggagcggtctatgaccgagtgatcgctgatgccaacaacacctga

SEQ ID NO: 509230 - DNA, 918 bp, Stenotrophomonas maltophilia
atgagtttccccgcggacatcaagggctgcatgaaggactgcatcctttcgctcttttggcctcgcaaggacatcgtgggcttcttcgagaagcacggaagcaccaaagcagagatcgcgcctcttcagcttgatggcgagaacgcgctcaagcggcccgaaattgtcgatgctcttttcacagccctcgcagcgcgctccgatcaaggcctcggtcctttccgcgcgatgctgcagtcactgctgaactggtcgcactttgacccatattatttcgacaaacttcgcaagctcgaccggggcactgccaacaagaatctcgagcacctgcgccaactacaggaaattcgagacgcgaagatcaaagcagatcgcgagcgcagggccgcgcaggaggccgcacgccagcaaccgacggtatcgctggatcaactacgtgccgagtacctcgatctcctctccaacaaaacttcgcggcaacagcgcgggtacgcactggagcgcatcctgaccgaactctcgcgcctctcgaccctggaggccaccgaagcttttcgggttcacggggaacagatcgatggcgcagtcaagttcgagggagaacactatctcatcgaggcgaagtggcaagaacgttcggcgagcaacgaacccgtgtaccagtttgccggcaaggtcgccggaaaactgtacggacgcggcttgttcatctccgtgaatggcttcagccccgaggtcatccgcagcctcgtgatgggcaaggaaatccagactctttttatcgatggagaagatctggtcctcgtcctggagggacatttgagtcttcgcgaaatgatcgatcggaaggttaaggcggcgcaaaccaaggggctcatctatgtccacccgatctccggcgccgaaaaaaaactctaa

SEQ ID NO: 509231 - DNA, 912 bp, Stenotrophomonas maltophilia
atggccaagcctgcaacgttcgacggctacagcgaccaatacacggtggactgcgaacgtgtccttgtaacgctgctgcgcggtctcggaccgtggaaggattcggtatacctggtcggcggcctcagaccacggtatctcgtcaccgcgcgaccgcccgcggttccggcgcatgctggcacgctggacgtggatatcgtaatcgacctgcagatcctggccgacaccgaggcgtaccacacgctggaggacaacctcaagaagatgggcttcgagcgcgccgaaaacgacgcggggaagaagctctcgtggcgttggcagacccgcaccgaacacggcgcgttgatggtgttggaactgctcgcggacgcgccggacatcgccggcggtaaggtacaaccgctgccgaccgaggggacgatctcggccttgaacatcccgcattcatccatcgtcttcgacatgcaccaggtcaccgagatccaagcagagttgttgggcggcaatggcatcgccaccgagaacatcaggcacgcaagtctcgtcagcttcacttgcttgaagtccttcgcgttcgaccaacgcttcgagcgcaaggacgcacacgacctggtctactgcatagaccatgcaccagaaggcatggacgccgtggtcgaatccttccgcaaagagcgatccggcaagcatggcgcggtcgtcgaagcatcgctcacgatccttcgcagccgatttgcaggcgacgagaagacagagggctatcgcaaagatggccctatatcggtcgccaagttcgaacttggggaaggtgatgagccggagcagcgcgaggcgcgagcgttgcgccaacggcaggtcagcgacttgattgaacagcttcttgcccggctcgcgagggagggcaccgcatga

SEQ ID NO: 509232 - DNA, 1095 bp, Stenotrophomonas maltophilia
atgtttgagtccagcctgaccgagcaacagttgattgcgcgcttccttgacgccctgcgggagcttccggaggtggaggccgacctcgaccattgggaacccgtcggcacgcacgatgaccgtgggtacgatgctcaggtcgatctgcacgtcgccggcaagtccttcgtcctactgcttgaagccaagaaggccgtctttccccgagatgtacgccaggtgatctggcagcttcgcgcggcgagccacgagaggcctgctaggcacggggaaaagcctttgtcgttcctcgtcgccgaatccatctccccaggcgcgaaggaactactcagaagtgagcgcgtcggctactacgacagcggcggtagcctgtacttgcctgcgccaggtgcatacctctatatcgacaaaccgccacctaaggccctggcgaagtcggtgcgcacgctgtttaccggacgacgcgcacaagtgcttcacgccctgttggcccagcatcaaagctggttcggcgtcaccgagttggcacagcaagccatggtgtcgcccgccaccgcctcgcaagtgctgaccgagttggaacgctttgactggctggaggcgcgtggacagggtccgagcaaggagcgctacctacgggagccggcagccttgctggacgcatgggccaaggaactagcgactatccgtcagccgaccctgcgccggtactacgtgccaggcgcgaaggccgatacgctggcggcgcaaatcggccaagttttcgacgcgcacgacgtccagtacgcggtcagccacgaggccgccgcgcagcgctatgcaccattcctttccagcgtctcccaggttcgtgtgcgggtgctaatcggtgcgagcgccgatgcggcgatcggcgacctcgatgcacgcgtggtcaacgaaggcgccaacttggccgtcatcgaagccaagtcgccgggcgaactgctgtttcgcgagaaggtcgatggcctgtggctggcgagccccatccaaatctatctcgacctgttgcgcggcgaaggccgctccaaggaaatggccgggcacttccgcaaggaaaggatcgggttctga

SEQ ID NO: 509233 - DNA, 507 bp, Stenotrophomonas maltophilia
atgtcgcagtcttccctctcttccgatgcctcgctgctggtgcgtgacggccgtggccgctatctgccggcgtcggccgaccagatcctggacgccgcgcgtcgggtcatcgaccagaagatgcagcgcggtaccgagttcagttcgccggcagtggtcaaggagtatctgtgcaccaagctcgccggcttcgagcacgaggtcttcgcggtcctgttcctcgatacgcgccataggctgatcgagtacgtcgagatgttccgtggaacgatcgacggcgccgaggttcatccgcgcgaggtggtcaaggaggcactgcagcacaacgcggcggcagtgatcttctcgcacaaccatccgagcgggaatcccgagccgagcgctgccgatcgagccttgacccagaggctcaagcaggcgctggcgctgatcgaggtacgcacgctggatcacatcatcgttgcaggcgaccagacgacggccttcgccgaacgcggctggctgtga

SEQ ID NO: 509234 - DNA, 810 bp, Stenotrophomonas maltophilia
atgagttcaccccagaccacgaacccgcagcaagcttgcgaagccatcctcatcgaaggaaagcgctacaacatcgagcacggcatcctgcccagcgagaatgccgtcgccgaccgtctgctcgcccgtggcgtcgagctgagggaggcctacggcgagttgtacgaaaagctgcagccgcgtccgccggcactcaaagtcttcctggaccttctgctgagcacggcggcgttctggagcccggagaagatcgcccaggcgcgcgtcgcgcgggaagagctggccagcgtcaaccggcagatcgcgcggaaggccgaggaactggcgcaactgctagagcggcgtaccgacctcaacagcacctccggtttcagcagcgaaacgcactaccacgtctgcgacgtgatcgaagcggcatccgagcgcaaccacctgttcaactcctgggtcaaggagcgcctggatgctcttcgcggccagttcgacctgaaatactggccatcgctggatcagttccttcgagaactggctgccgatgcggagaacgccggcatggaagccacagatcctttgactgcggcggccaccgtggcgtcgcgcccgtcacgggccgacttcttcaaggcgctgttcgcttccatcgaggaaaacagcgcacacaactacgggctgctgcccagggacttcaagctcaccgacggcaccttggcttcgttggcgaactgcgcattggaccttaggctggacgagctggcggacagcacctacgtgaagcggcttcgccagcgcgaacgcaacggcggcaaatga

SEQ ID NO: 509235 - DNA, 2052 bp, Stenotrophomonas maltophilia
atgaacgccgttaccaaaaccgaatcccgcgcggtcacccccgcgcttgaagtggccgacccgaccaagaacctgattctggttccgctgtcgcggctgctggcacgccgctccaagcgcaacgtgcgcacgaccccgcgcatgtccatccccgaactggccgcgagcatttcccgcgtcggcctgctgcaaaacctcatcgtgattgccgccgccgatggcgagcagtatgaagtcgtcgccggcgaccgtcgcctgaccgccttgaagctgctggcgaagaagaagcgcatcccagcagacgttgaggtgccgtgcctgctggtggccgacgcttcggcgcgaaccgtcagccttgccgagaacgtgcagcgcgagaacatgcaccccgccgaccagttcgtcgccttcgccgcgctggtcaaggaagggcgcccggtggaagacattgccgccgatttcggcgtgtccccgctggtggtgcagcgccgcttgaagctggcgaacgtgtcgccgcgcctgctggccgactatcgcgccgaggccgtaacgctggaacagttgatggccttggccgtcaccgacgaccacgccgcgcaggaagccgccttttacggtgcgccgacttggcagcgcggcccgtccgcgctgcgcgagcgcctgaccgaacgcgaaatcaatgccacgcatccgcaggtgcgtttcgtcgggctggacgcctacgcggcggcaggcggcggcatccgccgcgacctgttcgccgaaggcgatgccggaacctacctgaccgacgccacgctgctggaaacgctggtgcgcgacaagctggacgcgctggccgaggaagtgcgtgccgagggttgggcgtgggtggatgccacgccgcacatcagccatgccgatcggcaggcgttccagaacgcaccgcgtcagcgccgcgaaccgaccgcccgcgaagctcgccgtatcgcttcgctgcaaactcgcctcgaaaaaatcgacgccgaactggaagatgcctacggcgccgaggacgagggcagggtggaaacgctggaacagcggcgcgagcaggtggtcggtgaactgcacgccgcggaggacgccttgcagggctacgccccggacgtgcgtgcggtggccggtgccatcgtcacgctcgaccgcgacggcgaggcggtgattcatcgcgggctgctgcgcgaggccgaggccaaggcgctgcgcacactgcagcgactgcgacagggtttcgacagcgcagagaacgaagccgggaacgacgacgaaggcgaggacgccgagcagacccggaccgccgccgtgtccgaccggctggctcagcggttgagcgcccaccgcaccgccgcgctgcaaatcgaagtcgcacggcatccgcaggtggcgctggcggcgctggtgcatggcatggtgcagaccgtcttgcagcccgacgcctacggcgacggcttgccgctcggcgtgcgcctgaccgtgcaggaccggctggagggcttggccccagactggccggaatcgcctgccgccgtagcgctgcgcacgttgcagcaggtcgcgggcgaagccttgccgcaggacagcgccgaactgttcgccgcgctgctggcgaagtcgcaggacgagctggtgcagctactggccgtgtgcgtcgcggctacggtagacgtggtgacgccgcgcgccacgcaacgccagcccggtgcggaactggcgcaggccgtggggctggacatggccgcgtggtggaaaccgaccgccgagggctatttccggtacgtaccgaaggcagcgattctggaagccgtgggccagttcgcgcccgaacacgtcacctggctggcgaaattgaagaaggccgacattgccagcgaagccgaacggctggccgatggcaccggctggatgcccgccatcttccgcgccgaaagcccgcaacaggccgagcaggatgcggcaaccgaagccgaagcgccggaggatgccgctgccgtggcggatgagcagtcgcaggccgaggcattggccgcgtga

SEQ ID NO: 509236 - DNA, 210 bp, Stenotrophomonas maltophilia
atgaaccgcggcaccccgaacctcccacgcatggccgcgacctatgctcccggtacggtacgcgcccgccgctggaacggcgatggtgatgtgcgcggctaccgtccgccgcgcggctggacggcctgcgccgacctgaccgacttgcaccccatcacgggccgcgccttgccgcgtgccgtgtggtggatcatcgaaaccaaggaataa

SEQ ID NO: 509237 - DNA, 756 bp, Stenotrophomonas maltophilia
atggctgatcgaagcaccgattcctggtatccgaccgccgcgtatctctacgcgctgcacctggacggccccgcgctggcctgggagtacctgcgccgccatcccgactaccggcgcgactggctgcgccgtcgcctccggccggaggcggcgcacgtttggggactgcgcctgctggaagacccggccctggatgcgcgcgacgcgcatccagcctggtttcccgatcacgatggcgtgatccagctccacccggatgccgacccgcggccggaggcccatccttttgagttctggcgcatccccggtcacaagcacctgatccacgacggcaagcgcctggtgctgacggcgcgttggcctggctgctgcgtgcggctcgcactgtcaccggacctggccgatggtatggcctatctctatgccgtccgcgcgtgtgctgaaccctgcacgcactaccgcacgatcacgaccgagctggacaagctggcgacggtggacgggaccgtgcctgcggcggtggcccgctctcggcccacgccggccgcgctgctggaattgcacacgctgcaggcgctcgacgcgaccctcgcgggcgcgtccttgcgcgaaacggccgcggggttgttcggcgccgaggccgtggccgccgactggtacacggacggcggcctgcgctcgcgcgtgcgccgcctggtacggcgtggccaatcgctgatgcgcggcggctaccgccgccttgcacagctcgaatga

SEQ ID NO: 509238 - DNA, 588 bp, Stenotrophomonas maltophilia
atgaggacgctttttccgtccggcactgcgccacgtcctcgctcgcgcctgcgcgctcgcctcgtgctggcgggcctgtccgcctgcggcttcgccgcgctggcctgggcgtccctcgtgtcgccgcttccgcgcttgacctacaacccgtccgacagcgtggcagtcggctggtatcgcctcgaaccgctcgaccaccggaccggctcgctgccgcctccgttggccgtgaacagcatcgtgctcgtcccgctgccggccgatgccgcagcgttggctgcacggcgcggctacctgccgacgcacgttccgttgctcaagcgcgtgggtgcggtcgcgccgcaagaggtgtgcatcgtcggccacagcgtgcgcatcgacggcgtgccggcggccaccacgctgcccgccgaccggctgggccggccgctggcatcgtggccgcagtgccgccgccttgaaccgggcgagctgttcctgttgagcacgaccaatccggcgtcgttcgacagccggtatttcgggccggttgctgcatctaccgtgctcggtattgcgcacccggtctggctggagacacgccgatga

SEQ ID NO: 509239 - DNA, 393 bp, Stenotrophomonas maltophilia
atgaaagcagagcgctggcaacgcggcctcaaatggatcctgctcgccacggtgctggggagcatacttcactacgcggacaatctcctgttcttcgccgaatacccagaaccgccctggatcaatcgatccatgatcgatgcattctggttcctgatgacaccgctggcatgggtgggctatcgcttgatccgggtcgggctacgcaacgccggtgttcttgtcctgataggctatgtcggctgcaacctgctcgtgctgggtcactaccgtttcgcgcccatgtgcagcatcgctccgcgcatcaatgtcttcatctggctcgaagccggactcgctgtctgcttgcaggtgtacctgattcttccttacatccgaaagtccacggcttag

SEQ ID NO: 509240 - DNA, 873 bp, Stenotrophomonas maltophilia
atgactgatgacacccttgccgtggaactggccgctgccgacggctatgtcttgggcgcctgccgctatccggcccgaagcccgttgtgcgggcgcgtggttgttgccggcgccacggcggttccgcagggcttctaccagcgcttcgcccggttcgcgagcgcccagggctttgaggtcctgaccttcgattaccggggaatcggtcgatcgcgtccgcgctcgcttaggggattccgcatggacctgctggattgggcgcggctggatctggcggccgccgtcgacgcgatggcggacccatcggtgccgttgtacgtcgtcggacattcctacggtgggcacgccttcggtctgctgcccaaccatcgcaaggtggcgggcttctacgtcttcggcaccggtgccggctggcatggctacatgcccttgggcgagcggctgcgcgtattggccatgtggaagctggtactgcctgtgctgacctggtggaagggctactgtccctgggcgatgctgcgcatgggcgaagacctgcccgcggatgcgtaccggcaatggcggcactggtgccagttccctcgctatttcttcgacgatccggccatgcgcgggatcgagcgggaatacgcgactgtacaaacgccaatcgtggcggccaatgcgctggacgacctgtgggcttcgccacgatcgcgtgacgcgttcgtcgaggcttaccgcaacgcgccgctgcagcgaaaggacctcgatcccaggcaagcgggaggcacggtcggacacatgggctatttccgatcgccggccgaaccttactggcgaggaatgctggagtggttcgcgagcctggcgcctacagtaccggcacgatga

SEQ ID NO: 509241 - DNA, 570 bp, Stenotrophomonas maltophilia
atgagtccccgccaatccgatgcccggcagcgcgtcgtctcggctgcggccgaaatgctggcgcgccatggtctcaatgcaaccagcatccgcgaaatggccaagcgcgccgaggcgccagtcggctcgacgtaccaccacttccccggtggcaagcaacaggtggtggtcgaggcggtgcagttcgccggagcacaagtcagcgcgagcctggagcgacacctgcaggcgggcgccgcggcgggcctgcgcggattcctggcgatgtggcgcgagatcctggtgcgatcggacttccgcctcggatgcccggtaatggccgcggctgtcgaggagccgattgatgaggtcgctgccgaagccttgagcgcagcggcgcaggttttcagcgactgggaggcgaaactggccgcttccctggctacgcaggggcatcggcccgaatctgcatcaagacttgccactttgatcatcgcgagcgtggagggtgcgatcgttttgtgcaaggcacacagaagcattgcgccgttcgatcagattgccggggcgttggagcgccttgtcgcgtga

SEQ ID NO: 509242 - DNA, 303 bp, Stenotrophomonas maltophilia
atgaaaaacgatccaaaaactcaagctgccccgtgcaagcaagcgcccgggaagttcgtgccggtaatcgaccgcaatcgatgcgagggcaagggcgactgcgtccccgtctgtcccaaggacgtgttcgtgctcggcgtgttggccaagtcagagcgggccgatctttcatgggtcggcaaggtgaaggggtatgcccacggttggaagcaagcgttcatgccgaacgcgggcgcgtgcgaagcctgtggcctgtgcgtctcggcctgtcccgaacgtgccatcacgctagcgcgtgcatga

SEQ ID NO: 509243 - DNA, 591 bp, Stenotrophomonas maltophilia
atgacagagaaaaatctcggcctgcgcgagcggcacaaggagaacacccgccaagagctgttcagcttcgggcttaggttgttcatggagcagggcttcgacaacaccacgatcgaccagatcgttgggccgttgggcatcgccaggcgcaccttctttcggtacttcaaggtcaaggaagacttggtctttgcatggaatgccgagaagacggccgagcttgtcgacgaactgaacggcaggccgcccgaggaggcgcctttcgaagcggtttgcggggcgctctccagcctgctcaggcgctatgacgccaatcccgacatggccttcgcgctaatgcgcctgttgaaggaaacgccttcgctggtcggcagggaatgcgagaagcggatgatctgggagcaggcgcttgcggccgcgctggtgcagcgcgtgggtgagcacgcgatgagccccctcaaggcgcgaatcgtcgtgggcacggtcatggccgcatggacggctgctctcgacgaatggtacgaaggcggcggccaggcggatctacggcccatcgtggagaaggcattctccatggcccgcgagcgatga

SEQ ID NO: 509244 - DNA, 1449 bp, Stenotrophomonas maltophilia
atgccgaatgcatgggccaatgcgcgggctagcacgcctgtcgatggcgcggaatcggtgcgcgacgactggtggacgcaattgggcgaccctgccatcgacgtgctcgtcgcttctgccttggccgataacccgacgctcgcgcaagcggctgcacgcgtcgatgaagcacgcgcaggattgggcgcgagtcgcgccagacgtgctccgcagcttgatggcaatggtgcgctgtcgcgaggcaagtcgcagagtcagacgggtggcaccgacacgataaacgccacctcgggttccttgggcaccagtctctcgtgggagcttgacctgtggggacgcgcccgtgcgacggaagaggcggctcgcagccgtctcgatgcgcgcaacgccgatgcagaggaagcccgactgtccctggtggcgcagatcgccgatggcgtcgtggccttgcgcgcctgcaactattcgcttgccattcgcgatcaggatatcggctcgcgtgaaacagagctttcgctgatccggcagcgccttgccgtcggcaatgtcgcacgcgtggaagaagccagcgcactgagcgcgctggcctccgcgagaaccaatcgtctgagccaggaagagacctgcatgaccctggtggacgccctggttgcgctcagcggtcgtgaggcaacgacgattcggagcctcatgagccggccacctttgccgttcggcggtgcctcgacggcatccgctatcggccaacagcatgaaacggcgggcattgtgcccaccgcaccgccagcccgtccggaccttcccgcaactgtccttctccagcatcccgccgtccggtcggcagagcgggaacttgcagccagctatgccgagatcggcgttgcgcgtgccgagaggctgccccgcgtcgatctgtccgcgctcctcaccgggcagtggattcgcacgctgggttcgacgatccacttcgatacttggtccgccggtgcggcggcgtccgtaccgattttcgatgcaggcctaggcgctgccaacgtggatggcgccgaagcgcgataccgcgtagccctggcgggcctggcatccacgctgcgtaccgccacgcgtgatgtcgaggattctttggccgcgctgtcgtcggccgagcagcgtgcggacacgtcccggcaggccgccgatgcggcggctgtcgcgctgcgagcgaacgaagcccggtatcgcgctggcgccatcagcttgttcgagctggaaggttcgcgccgacagttcaacggcgcgcaggaaagcgccatcgccgctgcttccgatcgtgcgcggtcctgggtctccctcatgcgcgccacagggaacccgccgttgtcggccgcagcattgggacagcccgtggccgtggaatcggccgacaccccgaccgaaacccctgtcgccggcaacgaaagtcatcgctga

SEQ ID NO: 509245 - DNA, 1131 bp, Stenotrophomonas maltophilia
atgagccaagaacaagaacaccgcaagccgcccactcaggggcacttccgaaggacccggactgcgtatgccgtgggcgcgattgctctgatcgcggcggtactggcggtcgccgtcgtcaagcgcgaccggactcctgccgaagccaatgccgctgccgtgccggcgctcaccgtaaccagcgccgcccctcgggaagtctcgtggccggtggagatcagggcttcgggcgcgatcgctgcgtgggaagaagccagcatcggcgcacagattggcggctatcagctcatcgacgttcgcgtcaatgtcggggatgtcgtcaagaaggggcaggtcatcgcacgtttcgatccggctctgctgcaggcggatcacgcgcaattgaaggcgaatgccgatcaggccgccgccaaccgccagcgtgctctgacgctgcagagcagcggcgccatgagcgatcaggacgtgctccagctcgtgacgcagtccaagaccgccgacgccttactcgccgccaatcagttgcggctgcgttacaccgacgtcaccgcgccggacgatgggatcatcagcgccagaacggcaacgctcggcaccgtcgttcctgtgggccaggaactgttccgcatgattcgccggggacgcctggaatggcgcggcgaattgaccgccgagcagctcgcccaagtcgaggtcgggcaggaggtcgcgcttgagcttcccgacggcaagaccgcgaaggcgacggttcgccagacctcgcccatcctggacagtgccgcgcgtctggccatcgtttacgccgacatcgaaccgagaagcacggcacgggccggcatgtacgctaacggcaggcttggactcgggactggtccggcgctggccgtgcccgccgagagcgtggtcatccgcgatgggcgcaaccatgtcctggtactggccgacaccagcgccacgccccgtgtttcgctgcgaagcgtcaccgtcggccgacgtaatggccgggaggtcgagatcaccgggggacttggcaaggacgagcgtgtcgtcgtccaaggtgcagggttcctcaaggatggtgacttggtgcgtatctcccaaggacagccagcgggagcggctaggccatga

SEQ ID NO: 509246 - DNA, 3090 bp, Stenotrophomonas maltophilia
atgaacttcgctacttggtccattcgcaatcccatcccctcgatcctgctgttcgcgctgctggcgcttgccgggttgtggggatttcagaagttgccgacacaagacttgcccgaccttgatctgccgatggtcacggtggcgttgtcgcagccgggcgcggcccccgctcagctcgaaacggaggtcgcacgcaaggtcgaggacgcgctcgcgaccttgagcggcctgaaccacctgagcacatcggtcacggacggcctggtgtcgatccaggtgcaattcgtactggaaaagaatctgtcggacgcgctgatcgagaccaagaacgcggtggacggcattcgctccgacctcccgcctgatctgctgcaaccgacggtcagcgcgtccaacagcgtcggtgctcccgtgctcacctatgccatcgcttcctcccgcctcagcgaggagcagctttcctggttcgtggacgatacagtcgccaagaccgtgctcggtgtgtcaggtgttggccggttcgagcggcttggcggcatcgaacgcgaggttcggatcgaggtcgatccgctgcgcatgtctgcccttggcatcaccgcggcggatgtctcccgagcgttgcgccaggtacagcagcagtcctcgggtggccgcgggcagctcggcggcgaggagcagtcggttcgcacgatcgccacggttcgccaagcatcggagcttgcgggcctgcggatcgcgctatccaacggcaagagcttcaggctggaccagatcgcgactatcgtcgatggtcagggcgatcccatgcacgcggccttgctcgatggtcagcatgtagtcggtttcagcgtgtaccgcgccaggggctttgacgaggtgcggctggccgagggcgttcgcgaggccctggccggtcttcagcaggccgacccgacgctcagcctgacggagatttcagggtcggtcggccagacgttggagcagtacgagggctcgatggcgatgctgtacgagggcgccattctcgcgatgatcgtcgtctggcttttcctgcgcgactggcgggcgacgctgatcgcctcgaccgctctgccgctgtccatccttccggctttcgcggccatggcctggctgggctttacgctcaacaccgtcacgctgctggcgctcgcggtggtcgtcggcatcctggtcgatgacgccatcgtcgagatcgagaacatcgagcgccatcgccacatgggcaaatcgatccgggaggccgcagaggatgccgtgaccgagatcgccctggccgtcatggcgaccaccatgagcctggtggtcgtattcctgccgaccgccatgatgagcggcattggcggcttggtcttcaagcagttcggctggaccgccgtgatcgccgtgctcgcgtcgctgctcgtcgcgcgcctgctcacgccaatgatggcggcctacctgctcaagcccgagccgattcccgagaaggaagatggccgggtcatgcgctggtacatggcgatggcgcgctggtgcctgaagcaccgcaagaccaccttgggcggcgcggtcatctttctggccgcttccctcgcccttgtgcccttcatcgagacgggtttcatcccggcctccgacagtggcacgacgaccgtgagcatcgagttgccgccggccagttcgatgggggacacattggcggttgccgagtctgcgcgcaaggccgtcagcgatgtggatggcatcgcccacgtcttcgccacggtgggcactgcgcagagtgccgggccaggaggctcgcgtgctggcgaggttcggcgtgcgtcgctcacgctcacgatggggccgcgaggcgatcggccatcgcagcaggtcattgagaaagctgtgcgagagcgactgctcaacgttgcaggcgcgcgcttcgccgtcggtggtggagggccgggtgagaaactttcgatcatcctcgccagcgacaatgccgaggtgctcaaggcgagcgcagaggcggtggaatccgaactgcgcgacgtcaagggcctcacgggcatcgcctccaccgcgagcctagaacgtcccgagatcatcatccgccccgacccagaacgcgcggccgagcgtggcgtgacgaccgcagcgatcggcgacgtggtacgggtggcgacgagcggcgatttcgattcgcaggtcgcgcgcctgaacctggacaaccggcaggtctatatccgtgcgcgcattcccgatgcagcacggcaggacatcgacacgatcggcaacatgcgcgtgccgggccgcgacggaccggtgccgcttgccagcgttgccactctgtccgtggagagtggtcctgcgcagatcgatcgccacgaccgccttcgcaacgtcaccatttcggctgacctggggggcaccgcactcggaacggcgcaagcggcagccgccaacctgccttcgatcaagtcccttccatccagcgtgaaggtggtcgaggccggcgatgcagagatcgtcgccgaactcggcgcgggcttcggtatggcgctcgtggttggtgtcctgtgcatctactgcgtgctggtgctgctgttcagggactttcttcagccgatcaccatcctctcggccataccgctgtccattggcggcgcgttcctcgcgctgctggtcacgcgcagccagttgagcgtgccttcgatgatcgggctggtcatgctgatggggatcgtcaccaagaactccattctgctcgtcgagtacgctgtcatcggcatgcgcgatcgcggcttgtcggttcacgacgccttgctggacgcgtgccacaagcgcgcgcgtcccatcgtgatgaccaccatcgcgatgatcgccggcatgttgcccatcgcgctggggcttggcgcggattcgagcttccgccggcctatggccatggcggtgatcggcggcctgatcacatcgaccgcattgagcctgctcgtcgtgcctgccgtgttcctgtacgtggacaagttcgagaaatggctggcatcgctcggtttctttcggcacaccgagcgcgccaccgccggcgcgggggcgcttgaacgatga

SEQ ID NO: 509247 - DNA, 693 bp, Stenotrophomonas maltophilia
atggccgaagccgagcgcggtgaatcgacgtgggggatcggcgtcgccggtggcatgcagtaccgcgtttaccgggacttcgataaccgcgtgcgtggcttgccgatgatcacctatgagaacaagtggattcaggtggcaggtcctggcttggacgtcaagctcccgtcgttggggccggtgtctttcaggctgcgtggccggtatgccatggaggagttcgattctggcgactcgccgtacttcgcgggtatgcgcgaccgggattcgagcttctgggtcggcggtgccgccatttggcgcaccggcattgccaatctgtccgccgaagtgctgaccgatgccatgagcaacagcgagggaacgcgggcgacgctgcagatcgatcggcgtttcaccgcaggcccgatcggcctgacaccgcggctcgcggcagagtgggtggacagcaagtacgtggattactactacggcgtgaggtcggacgaagcgcaaagctggcgcccggcctacagcggcggttcctcggtcaataccgaaatcggactgcgcgttgactggcagcctgtgcccaagcacacggtgttcctcgatatgggcgccaagcacatgggtagttcgatccgcaacagcccgctggtcgaaaagagcacgcagtacggcgtgggcctcggctacctgtatcggttctga

SEQ ID NO: 509248 - DNA, 960 bp, Stenotrophomonas maltophilia
atggcaactcgcaatggctccagacgtttcaggaatctcgacggtagcgcggctcccggtaccgtggtgccagcatttcgcatgttggtcctggacagccttgccgggcgtggccgcggtgttccaagaaaagcacccgtcccatgtgtcgaggccgacctcgcagcgatcgccaatccgccgggacctggagaaggcgctcgcctcacctggattggacatgcaagctggctggtgcagctagagggcaagtcgtttctcattgatccgatctttggcgaccttgccctggggccgggggggcgaaatgtcccggccggcgtgctgcccgaaaacctgccgcccatcgatgccgtgctgatcacgcacaaccactacgaccacctcgatcttccctccctacagcaggtcgatgcgccggtgatcgccggcctgggcatgcaggcgttcctcgcaaagaagggcattcccgcaagcgaactgaattggtgggaatccaccgcgcttggctccgccaaggtgtcttttgtgcctgcccagcattacagccgtcgtggcctcaccgacgccaacgaaacgctatggggcggatttgtcgtcgaggggccatccgccagcatctatcactcgggcgatacgggatatttcgacggcttccgggaaatcggccgtcgctttccggcgattgacgcggcgcttctaccgatcggcgcctacgaaccggcttggttcatgcgggcgcaacacatgaatccagaggaagctgtccaagcctatctggacttgggtgcgcggagctttttcgccatgcactgggggacgttcaagttgacctacgaaccgctcgatgaacctccggttcgcctggcggcggagtggaaaagacttgggctggctgcatcagaaaagcgagttctcgccgtcggcgaaaccacagaagtgcgacgtccaaatgaataa

SEQ ID NO: 509249 - DNA, 423 bp, Stenotrophomonas maltophilia
atggcggtgggatgcaatcacccttggggcggcagtctgggcaacttcgccacctacgccaataccgggattgagtttcggttcggctacttgctgccggacgacttcggtacggcgccattgcggccggcgggtgagaacacatcgccaatccgcacgagcccgccagggggctggcgcggccacttcttcgtcgctgccgatgcgcgttgggtcctgcacgacatcacgctcgacggcaataccttccgctccagccacagcgtggacaagcgcccactggttgcagacatcggcttcggtttcgcatttgcccatggccactggcgtttcgccttcgcgcgctaccaccggacccgcgagttcgagggacagcgcgaacgaccggcccttgggagtttcaccattggcaggcggttctga

SEQ ID NO: 509250 - DNA, 915 bp, Stenotrophomonas maltophilia
atgagctcgaaatacatcgtcgtgatgaccggagccacaagtggctttggccgattcacactgcaggatctggccgcttcccctgacacaagggtcatcataggcgctcgtggagaaaatcgcgccgtgccgaaaggcgttgatgtgctgccgcttgatcttgcctctctagccagcgtccgcgactttgctggcgcggtgatacggcagcttggggatgagcgtatcgacatccttgtcctcaatgcaggcctgcatggcacacccgccgatcagcgtagcgccgagggctatggcctcacgtttgccgtgaaccaccttgctcactatctgctggcgcgcctgctgctgccgcatatcgctgagcagggtcgagtggtgatcacgtcgagcaacatgcacaacccgcccatcaaggcgatcgggcccaagacgctcgaccttcgggagtgggcgtatccgtcgaaaggcggttcgggtgacggcatacgctcctacacggcctcgaaattgtgcaacctcatgacggcgttgtacctggccagacaggacgcggtgatagcacgccagattgatgtcatcgctttcaatcctggccttacgggtggcgccgccggccgtgaagcgtcggcttttcagaaagcgattctcggcatcgtgatgcgcacgatctttcctgtagtcgggctctttcgtcccgagttcgtcatgaacgcacccgaacactcgggcaggatgctggctgacgtggcactgggaacactttccccaccgaacggacgcatctacgtctccctggtcgagggaaaacctacgttccccgatccctcggcgctggcatgcgatcgtgatgcacaagaccgattgtggcgggagagtgccaatatggttggtcttgaggagtcactcgcatga

SEQ ID NO: 509251 - DNA, 984 bp, Stenotrophomonas maltophilia
atggacaacctgactcataccctggtcggcgcggctttggggcaggcagggctcaagcgccggacagcactcgcaatgccggcattgatgatcggggcgaatctgcccgacgtggatgttctgtgtgctttctttggcaacggtctcgtgtgccggcgaggctggacgcacggtccggtcggatggctcgtcttgcccgcggttctcacgctcgcgctggtgtggttcgaccgatggcaaacgcgcagagcgccgaggcctgacgccaggccagtcgtcaggccccatcagcttctgctgctcagctatatcggcgcgttgtctcatcctttgcttgacttgatgaacagttggggcatccgccttctgatgccgttctcggagcgatggttctacggcgatgcgcttttcatcgccgacccttggatctggctcgcgcttggcatgggaatctggatgtcccgacgccgcgagcgctcgggcacaagcagagccgagcgtccggcggtagctgccttgctggtggccacgctctacagcggggctatggctgccggcgggcgggtggcggaacagcttgtggctcgccagttcgaggctctgggcctggggcagccgctgcaggtgttggccaaccccgtcctcgccgacccgtttaggcgccggatcatcgtgcgtacggcggatgcgtacggcttcggcgacttccgctggtttccatcggctcacttgtcgttggatcgccaactcgtccctacgcatatggaccagtcagccattgcccaggcggctcggcagagcaaggcggtggccgattttctgtattggtcgcgcctgccgtttgcgacggtccactccagcgctggaggaaccgtcgtgacggtcggtgacgcgcggttcggggcgcggccggacgtcggaattttctcggtaacggccaccgtgccggcagagcagggcgctcaagcagctaccgatcattag

SEQ ID NO: 509252 - DNA, 939 bp, Stenotrophomonas maltophilia
atgaaacgagtgcaattcggccgctacggcggccccgaaacgatgtcattgggagagcacacattgccggagctcgccccgggacgggtgcgggtccgggtcaaggctgcggccatcaatccgctcgactggaagatccgccaaggcgtcatgaagatcgtcaccggcaggaaattcccgcaaggcatgggctcggatttcgctggtgtggtggagcaggtcggcaccgacgtcacagactttcgggccggtgacgaagtgttcggcacggtcgagatcaagaaacagggcgcgtttgccgaagtcgttgatgccgacgcacgcttggtggttcgcaagcccgtctccctttcgttcagcgaggccgcatgtattcccattccggcggcgaccgcctgggccgccatcgtcggtgctgccaaggcgcagccgggctcgcgcatcttcatcaatggctgcagtggcgccgtgggcagtgccgcagtgcagttggcgcaggcgcatggcgcgcacgtcagcggctcttgcggcccagcctccgtggccagcgtcaggtccgccggcgtcgatccggtattcacctatgcggacaaggcgtcgttcgcatcgaacgggcgttacgacgcggtgttcgataccctcggaacgctgtccgtttccgagggactggcgttgctgaaaccgaaaggccgcttcgtcgacatcaaccccacccctggcaggatgctgcgcggcttcgtttcagggcgctacagcatggtgttcgccacggcagggttcaagaacctacaggaactcgcaggcttggccaacgaaggcaaactgcgctcatggatcggcttggaagcaccgttcaccgatgccttggccatcatcaggaatgcggaactcggcccgcgcccgcctggtcggatcgtgctgctcatgcaaggcaaatga

SEQ ID NO: 509253 - DNA, 1110 bp, Stenotrophomonas maltophilia
atggcaatgcgcgctgcgcgcaatttccagctgcccgacgaggaagcggaattgcagtggaacggtccgcaggagtggcgccccgcttcacaaggcatggatgcgccgccacaaaaaggcattctgttggtccacggactgggcgactcgccctggtcgttccatgacgtcgcgcatgcattggccgcacagggatttctcgtgcgcacggtactccttcccggccacggcacgcgccccgacgacctgctggccgtgacggccgagcaatggcagcgcatcgtccaggagcagacgctggcgcttgagaacgatgtcgacggaccggtgtacctgggcgggttttccaccggcgccaacctggtgttggagtacgcctacggccatccagagatcgcgggcctggtgctgttctcgcccggtttcaaaagcatgccgttcgactgggttgcgccgctggctgcgctggtccgtccctggctgatgagccccaatggctcgttccccatgcaaaccccagtgcgatacatgaacgtgccgaccaacggatacgcgcagttctatcgcaccagcgtcatcgcgcggcgtctgctgcgcgagcggacctacgacaagccagtcttcatggtggtcgcgcagcacgattccgttctcgatacggactacctgctcgatgtcttccagcgtcgtttcacgaatccgcaaagccggttgatctggtacggaacgaaaccgaaggcattgaccgacaccacacgcatcctgattcgaggcgaccggcttcctgagcagcacatcagccagttttcgcacatgggcctgatgttctcaccggccaatccgctctatggcgacaagggcagccttcgcatctgtctgaacggtcaagccgaacgcgtggctcaagcctgcgaacagggagcgcccgtgtggtactcggattggggctaccgcgaggacggcaaggtccacgcgaggctcacgttcaatccgtacttcgattggcagacttcggtcatgttggccacgctgggcaacgaggagagtcctcggaccgccgtcaccaacatcgccggggactccaatgcctcggcaagttcgaacccatag

SEQ ID NO: 509254 - DNA, 870 bp, Stenotrophomonas maltophilia
atgaacacgtccgctgccaatcccaatgagttccgccttggcggggatcttcccatcaaccggcttggcttcggcgccatgcgcctgccgtgcaatggctttcgcggcccggcgcgcgacccggaaactggacgcgcggtgctgcgccgggccgtggaactcggtgtcaacctgatcgacaccgccgagttctaccagagcagcgatggttcggtacgcgcaaatccactcatccgagaggcgctgcatccctatccctccggcttggtgatcgcgaccaaggtcggcgtcgtgttcaacacggatggcagccatcggcccgccacgggcgccgatatgcgcaggcttgtcgaagagaatctggccagcctggggctggatcgcctcgacctggtgtacctgcgcatcggcgaaatgacggtgccgcacggcgagtcgctggccgagcgcttcgaagcgttggccaagctgcgcgaggaagggctcatccggcaccttggcatcagcaatgtcgacatcgagcacctcgcccaggcgcgctcgatcgcgcctgtggcggcggttcagaaccacttccacctcggcaagcgcgacgacatcagcctgttgaacgcatgcgctgccgatggcattgccttctgcccgttcttcccgctgggcggcggcttgcaaaggctcgacgacgggcggctggtgcgcatcgccgcccggcatggcgccaccaccgcccagatcgccctggcttggttgctggcctactctccggtgatgctcgccattcccggtacaggtgccatcgcgcatctggaagagaacatcgcagccggcaacatccacctgacgaaagaagaccatgccgaattggcgtaa

SEQ ID NO: 509255 - DNA, 1248 bp, Stenotrophomonas maltophilia
atgaacactcaaggcaagaatccgaccgaatccaacagcatgaatggagaaagccccagtggaagtgccccgtcactgtcgggaaagcattgggcgcaaccgcaattcttcaatgacaacgtcctgattgatgcattgatcaaacacacgttgagcctgatgccctacggcatgaccgatttcggtgaagtcatggacgtcgtgtaccagctcaacggcagcgatgaagaatcctggatcagtgcgtgggccaccttggccagccggctgcaagacagggctgaagaagcagaaaggaaagacaagcgggttactgcatcgaccgcttacctccgcgcttcgacttactggcgcggcgcactgctgtacttcagccggttcgaagataagcgcatgcgtgagtacgcggtcgccagctcgacctgctacgagcgctatataaagctgtccggctaccccggtgagcgcattgaaatcccgtacgaggacagctttcttcccggctatttctacaggtcaccccacgcgggagaaaaggctccgctgctcatcgtcacgcccggccgggatacttgggccgaagacacgcgatgggtttgcgagggcgcgcttcagcgcggcattcattgtcttacctacgatggtccaggccagggattcgcattgaggttgaacaatctaacgttccgcccggactgggagagggtcgtcagcccactgatcgactttgcgctggaaaagttctccgagatcgatgcgtccaacatcgcgttgatgggcttgagtttcggcggctatctggcaccccgcgccgccgcgttcgacaaacgcatcaagctctgcatcactgaccccggcaacatcagctgggggcgcgagatcatcaagcaactggaacatttcgctaaccggccgctggccgagcttcctgagcagctgcggaatctggtgagtgactacgcctggaagcacggcgtgcccaactcgatcaaggatgtagtgcaggccctccagccctatgacaactcggccattctggaccaagtgacctgcgaaacgttcgtcctggacggcaccggcgaggtcttccacggcgccaagaagttctatgacgccttgcagtgccccaaggaatacctgttgttcgacgaaacgtcgacggcgcagtcgcactgccagatcgggggctacgccacggccaccgaatacatcttcgaccgggtcgccgagcggcttggacgcgcttga

SEQ ID NO: 509256 - DNA, 588 bp, Stenotrophomonas maltophilia
gtggcggcggagctgtttctcgagcgcggcttcgatggcgttgccgtggatgacctgatcgatcgcgtcggcggctcgcgcagcaccatctacagccacttcggcggcaaggaaggcttgttcaaggaggcgatgacccgcctgtgcgcggaagtggcgaagccgctggaacagctaaacatcaccggcgaacccgcggatgtgcttccacggctgggcaggcagttgctgaaatcggcgctgtcgccacgcaccttggcgctgcaccggttgctggtcaacgaggggcggcgctttcccgatgtcgcacaagcaatgtgggacgtcagctacggcaaggccgtaagcattctcgctgcatggatcgcgcaacagcaacagcagcagcggcctggacaggggctctcaagcgcggtgcctgcccagtcgctggccgaacagttcatcagcatggtggccagcaacgccaagctgcgcgcagcctcgggtttggcctccgctccgttgtccgatggcgaggtcgacgagatcgtcgaccaagccgtcagtactttcctccacggcgcatccctcggggcgcccaagtag

SEQ ID NO: 509257 - DNA, 945 bp, Stenotrophomonas maltophilia
atggagatcaggcatctgcgatgcttcatggcagtggcggaagagcttcacttcgcgcgagcggccgagaaactgcacattgagcagtcgccgctttcgcgtgccatcaaagaactagaagaggatcttggcgttcagctattcgcccgcaccacccgcagtacccgactgacgcgcgcgggccgaatgttcctggaacacgtgcctcgtgtatttgcctcgctgcagcaggctcgtgacagcgtgaaagccgccgccaacggctttcacggccaattgcgcatcgctttgtctgacggcatcacgcctacctgcttctcggccctcttggcactttgccgacaggaagagcctgagatcgagattcgcttgaccgagattcccttgtcgcagcagatcaagggactgtacgaagatctctacgacgtgggctttgctcagttggatgaagcaggtgatggacttcttgcagaaccgatctggcacgatccattgatggtggcggtgcctgcccgtcacccgttgctcgcctacaagcgcatacctctggacgagatgctgcgctatcccttggcactctgcgatccgcaagcatgcgaaggacacgcccggcaagttgatcgcgctttgcgtcaatcgagtctggagccgttgatcgccgaacgggtggcgtcgttcgatctgatgatgaccctggtatcggcaggttttgcgctgggattggcaggcgcgtcgcagattgccgctggccgcgaaccaagcgtggttgcccgtccacttgctgaccgttcgcacgtgcttacgacttacctgttgcgcatggatagagagccgtcggatgccctggctcgtttcatcgaacgagtctatgccattgaaccaccaagaggaaaaacctctgctgtgcgagaacgaactgacccgcctgaggagatcgcgccatga

SEQ ID NO: 509258 - DNA, 276 bp, Stenotrophomonas maltophilia
atgaagaagatcatcccacttctgcttgctgcaacgctggcggcgtgcagcaaaccagagccgaccgagacgagtggcaagcccgtgccaatcgaaacggtggagtcgctcgccgccaatcccgagcgcctgaaggaactgcgacggcagtgcaagacagaccgcgccaagctgggcgatgaactatgcaaccgcgtggccgaggcgacgaatcggcgctttatgggtgatggcgaaacccgatacacgccgccgaaagagcagccgaaattctga

SEQ ID NO: 509259 - DNA, 465 bp, Stenotrophomonas maltophilia
atgagccagtaccgtctcaacctgttcattccgcccgagcacgccaagcgcctggacgaactggctgccaagaaaggcgtgtccaagtcgtccatcgtcgcggcggcgctggcgtcctggctgtcgcccgacgcgggcgaccagcgcgaagccgccatcgccaagcggctcgaccggctgtcgcgccagttcgagcgtctggagcgcgaccagaacatcgagattgagacgctggcgctgttcgtccgctatttcctgacggtcagcacgccggtgcccgaagcccatcaggaagcggcccgtgcacagggtaaagcgcgcttcgagcagttcgtcgaacagcttggccgccacctgctgcgtgggcgcagcctggtgcgcgacgtggtggaggaactgcagccggatacggcacggctggacgacgcggcggcgctggccgaggcgcaggagcgtgcgtcatga

SEQ ID NO: 509260 - DNA, 729 bp, Stenotrophomonas maltophilia
atgaagattcgccttctcaccctcgctgttgccgcgttgattggcgtcatgcccgttgcgcaggcgcaatgggtcgtcgtcgatccgaccaatctcgtgcagaacacgctgaccgcggttcgcgcgctggagcaaatcaacaaccagattcagcagctccagaacgaagcacagatgttgacgaaccaggcacgcaatctcgccagcctgccgttcaacgtggccaaccggttgcgctcgacgctcgccaccaccgaacggctgatcgctcaggcgcagggactggcgttcgaggtgcagagcatgaacgccgagttcgcgcgtttgtacccggaacagtacgccgccaccgtaagcggcaaccagatgtaccaggatgcgcgccaacgttggcagaacacgctcaacggcttgcagaccgcgatgcagatgcaggcgcaggtgtcgcagaacctgtccgacgacgagggcgtgctggccgacctggtgagccggagccagtccgcgaccggcgcgttgcaagccatgcaggcgaccaaccagcttctggccctgcaggcgaagcaatccatccagacgcagcagctccagctcacgcagggccgtgcgacggcgctggaattggcacggcagaccgccgccgtcgaacgtggccgcgaagtgacgcggcgtttcctcggcacgggcacggcgtacacgccgcagcccgtcaccttctacggcaactga

SEQ ID NO: 509261 - DNA, 294 bp, Stenotrophomonas maltophilia
atgaaacgtgcgcccgtcctgttcgccttcgcgtgcctgctggccggctgcggccggccgcaggcgctgtcggtcgatgcgctcgccgccgacccggcgcggctgcacgcgctcaccgcgcagtgccgccgcggcgagcaggacggcgcgttctgcgcgcgggtcgcgcaagccgacctccgccgcttcctttccgggcaggccggcccggacgaataccagacgctcgccgacctgccgccgattccggccagcttcgacgaacccatcgccgcagtggagggccggccatga

SEQ ID NO: 509262 - DNA, 1368 bp, Stenotrophomonas maltophilia
atgaacgacgtcgccatcatcgatcgcttcctcaacacgttctccacctacatcgactccggcttcggcctgctgcgcggcgaagtcgcgttcctgaccgcgacgctggtggccatcgacatgactttggccggtctctattgggcgcttggccacgccaccggtcagggcgaggacgtgatgaccaagctcatccgcaaggtgctctacgtcggcgccttcgcctacatcatcggcaacttcaactggctggccggcatcgtgttccgctcgttcgcgggcctgggcatgaccgccaccggttcgctgagcatggagacgttcctgcagccgggacggctggccaagaccggcattgacgccggcatgcccatcctcgaccagatcagcgagatggccggcttcccggaagtgttcatcaacatgacgcccatcgtcgtgatgttcctcgcctggctggtggtcatcgtctgtttcttcgtgctggcggtgcagctcttcatcacgctgatcgagttcaagctgaccacgctggccggcttcgtgctggtgccgttcgcgctgtggaacaagaccgcgttcctcgcggaaaaggtgctcggcaacgtcgtgtcgtccggggtcaaggtgctggtgctggccgtcatcgtcggcattggcacgggcctgtttgccgagttccaggtgacgccggacgagccgtccatcgaccacgcattggtcgtgatgctggcctcgcttgccttgctggcgctcggcatctacgggccgggtatcgctacggggttgatttccggtgggccgcagctcggcgccggtgcgatggccggcgcagcactgggcgcagcgggaaccgccgtcgcagttggtgcggctgctaccggcgtcggcggtgcggtcgcagccggggcgcgcatggcgccggccgccgcgaagatggccgccagcggcgcacgtgccgcagtctcgaccgccggtagcgcgcggtcggcattccaggccggttccgccgctgccggcggcggtgcgaagggtgcgatggcgggcctgggcaacgtcgccaagagcggcgcgcaggcggtcggccagaaggccgccgccagcgcacgctcgttcggccagcgtgcagccgccgccttccgtccggatggcgctagcagcggcgctgcgtccggtgttgccgcatccggccaggccgctggcgacgccccggccaacgccgccaatcagtcgcaacccgcgtgggccaagcgactgcatcgccgccagcagatcagccatgccgccactactgccgcgcacacgctgcgcggtggagacagcggcggctcggcgcaagggccgagtctgcgcgattccgattcttga

SEQ ID NO: 509263 - DNA, 1287 bp, Stenotrophomonas maltophilia
atgagccaggacgaaaccccggacgtgcccattcccgatgccgcgccgaaggtcgcaccggagaacgtgacgctgcgggcgcaaccgcgcccggtgacgcgcctcaatcggcgcacgctcgctattctcgccggaggcctggcggtcgcggtcatggccgccaccatgtggtcgctgcaaccgaaaccgcgacgcagcgacagcgacccggctgagctttacaacgtcgaccgcgtatcgcgctcggaagggctggaccgccttccgaccgactactcgaagctaccgcgacaggtgccggagctggggccgccgctaccgggcgacctggggccggccatcgtgaagtcgcaaccgccggcggtggccagctactcgccacccggccaggacgcagcagcggccgagcgcgacgcgctgcgcaaggaggccgaagcggcggcgggttcgtcggtgttcttccgctcgggcacgcagaaggccgcgccggtggcgcagtcgcaggtcgccgccgcgccgggcttcgccgccaatgcggcgttcgacccgatggccgccgggccggcctcgacggcggccctgccggccgacccaaccgccgtgcagaaccggcaagaccagaaggaggcattccagaaagccggaatcacagaaacccgtaattccggcaatctgcaaatgccgacttcgccgtatcaggtgatggccgggacggtgatcgcggcggcgctggtgacgggcatcaagtccgaccttccgggcgatgtgatcggcacggtaacggagccggtgtacgacaccgcgaccggccgctatctcctgatcccgcagggttcacgcatcttcggccgctacaacagccaggtcgcctatgggcaaagccgcgtgcaagtggtgtggaaccgcatcatcctgccagacacgtcttcgctgacgctggacaacctggctggcaccgacccggccggctatgccggtttggaggatggcgtcgattggcattgggatcgcatcttcgccggtgcggcgctgacgacgctgctgggcatcggtgccgagttggccgcgccggagaaccgccaggacggcgatcgcgtcatcatcgccgggcgcgacagcctgcaggacagcgtgaaccaagtcggccaggagatgacccggcgcaacctcaacatccagcctacgctgaccgagcggccgggcctgccggtacgcatcatcgttaaccgcgacctggtgctgcgaccgtaccagccgctgttcttcaaccgggggacttcgcgatga

SEQ ID NO: 509264 - DNA, 243 bp, Stenotrophomonas maltophilia
atgagcaccacgcgcaaactgcggctggggccgctgccgaaaaccgagagcgtcaagctgaccttcgcgtgcccggccagcctcaaggccgacctcgaccgctacgccgcgctgcatgcgcaggcctacggcgaggcagtcgatgcgacgacgctgatcccgcacatgctggaggcgttcatggccggggatcgcggtttcaggaggggagggcgcgcagctccgaagcctgcgacgaagtga

SEQ ID NO: 509265 - DNA, 729 bp, Stenotrophomonas maltophilia
atggacttggtgtttccgcagtccccacagttaaccagtgagtgctggcaatgtcttcaggccgttccgtggcgcacctttgccaacgccttagacggcgcaatcgatatcgccatgaatataatttctgaactttctgctcatggctatgctcaggtccaagacgttgagagcatagaacaagcgctatcggttacaaaggggcttggtacgttgctgcccctgaatgggtcagttgttcaaaaactccttccaagagaaagggaggaggttcagtcaaattcatttagtagccgttacggtcgcggaattttccctctacatacggacaccgctttctgggaaagacctgctcggttcgttgttatcttctcagctattgcttctcgtggcgcaacacgagttctctcgttgagggatacgaaatgcttgatggaatatgctcgtcgctctaatccagtatttttgagaaaaacggtcaggggcgatatctactctcatccttgggagggggcggaaataggtgcgttgtatgatccgtgctatatgctgccggtcaacaagcaagcccgagattttcaagaggccacaatggatgctgcggatcgctctcaacggttgcattggtgtggggcgtcggtgcttattattgacaattggcaggtgatgcatggcagggatggctgcgaggatgaccatcgcgtgcttcaccgcttctatagggggtga

SEQ ID NO: 509266 - DNA, 951 bp, Stenotrophomonas maltophilia
atgagttgggaacgcgctgcgctttggtctaaggctgtattgtttatgcaacgggctacgctccaagacaaggagagccctgagttcggcctttgggcatcgctgggccttgagcttcttgcgagagctgcggtggctcatacgagtcctgcgttactggctgagccagatagagagcaacgcaatctgttgcacgcgcttggggttagcctaagcaattcaccaaaatcaattccgacaatccaggttctttcgcactgcagaactttggtgcccgcatttactgaggatgattttaaggcagcgtctgcgttactaaatcgacgaaacgaagagctgcatacgggcgctgctgcattcgcgacgtttccgctccaatcttggataggcagcttctttcgctgttgtaagacattggcggatcatcaaggtgaatcgcttgcatcgctcttcggggcaggtgaggctgctgtcgccgaggaaatcctaggcaaggcagaagcaagcgtggtttctcaagtgaaggcttcgatcgctgcacatgccaaggtatttcaggccaaggatgatgatgagaaggcgaaactcactgcacaggcgaacgaggaaggagagaagctctctcatcgagggcaccatcgtgtggaatgcccgtcatgtaagtgcacagctaccgtgcaaggcacaacgtacggaggcgaaaggcttgagcatagggacggactaatcatagttcgggagagtgtgattcctaccaaattcgtctgcaacgcatgcggtttgaggctgagtgggtatcaggagctagttgccgcgggggtaggagatcactttactcataggtctgagtactcccctccggactactacgagctggtggatccaaatgaccgcgagaccatggataggtacgccgaggatcatggctattttcatttcagcaacgattag

SEQ ID NO: 509267 - DNA, 1125 bp, Stenotrophomonas maltophilia
atgaacgccctgtttcctaatcgccagcaacctgtgttcaatggcgctcagttgcgcactgcccgccacttctggggaatgacgttgcaggagatcgcagacgcaatctccaccacccggcagtttgtctctcagttggaaactggaaaggccaagcctggccgatccgatgccatcgtccaagccttagccaatgtcgttgaagtgcatccagatttcttgtttcgtagcgagcgcgagcaagtccacgaggagcaagcccactttcgcaagctagccgcaaccaaagcaagcacgcgccaaatggtgctggccagaggaagcatttttggccaagtcgttgactttattgccaagcgagttcggcttccagatgtgaacatccccgaccattcgaactgcacgagcgccgagcagattgagcgtgcggccgaactcacgcgtatgcactgggagctcggactcggtccgatttctcacatggttcgggtggtcgagcgcgcgggtatcgttgttgcgttcttcaacgaagcttccgcgcaggtggatgctctttcgattgcctcgaagcggccgatcatcgttcgaaacgatgcgaagaagagccccttcaggcaacgatttgacattgcccatgagctaggccacttggtgcttcatgaggggcaagtgaccggtgaccgaaagactgaatcggaggcaaatcgctttgcgtctgcattcctgctgcccagatccacttttgcgaaagccttccccaggaagggaacacgcctggactgggctggcatccggcaacttaagctgacctttggcgcgagcaaggctgcgatcctctaccgggcccgttccttggatcttatcgacgaaaatcagtaccgcagtgcgatcatcaccttgaaaaaccggggtgaagcgattgaagaggcggaggatggcttggtcccgaatgagatcagtgaactcatccccaagtcgctggacgtgttaagaaatgcgcacgggattggcttcgcggatctggctcaagctcttttgatctctcccgatttcctcaaacagatcatgacccgccccaacgaagaattagagtcaagtagacctgcgtttagagtcgttcattaa

SEQ ID NO: 509268 - DNA, 630 bp, Stenotrophomonas maltophilia
atgcttgaagtcctcgcgaaggccgcagaagctaccagcactgagttggactgcgcctggacccgtgccgttctctcttggggctggatcaagaacgcactacttctcttggccggctctcgcacccacgactggttaaccattcgccataccggcaacgatctgatcgtgggtgtgggctctgtgcctgtgcgcttcttcatcatcgcagatcacagcaagccgtcgaagcgacgaatcttgagtccgacagaagcggaagcaatccagttgtccgagatgagccagagttcattcgccggcgaaggcttctccgtatccgggatgcccacgctgtggcgcttcatcgtggaacgcgccaagtccgaagatgatgagagcaaggtcttcttcgttggctatgacggctatggaaacatcctagccaaatggcagttcaccgaatcggtacgtgctttccattccaccgatgccgacatccctcgtgctgccgagctggctcccattgacttggatgccatctacgacccgatggaagaccaactggacgccgagcacgactcggccaactatgaactgatcccagaagtacctgctcgaacgaacttgaatgaacgccctgtttcctaa

SEQ ID NO: 509269 - DNA, 150 bp, Stenotrophomonas maltophilia
atgcccgctccattgctccgtcacccacaggatgtggtcacggcgccccgcctgcgcgacgttgattgcgtcgcattccccgaattcccggtccatgccctggccacgcactcgtgcgtgcgccaccgtgtggccgttgccgtctgctga

SEQ ID NO: 509270 - DNA, 1098 bp, Stenotrophomonas maltophilia
atgtcgtcacgcaagttcagtatggagggcgcgttgcacctgatatcaggtgggcctggcgtcctgtcgccggcagatcttttccacacaattgacgatgacaagacccgcgaaaggtttaagggctgcaatatctacatggtggcgattcgtcgacgcatgctgattgatccggcatcggttgccatccagcagggtgctttgatcggcaacctgatggtggcacgtgaccaatggcggccggtgccgttccgtctggcattgcacgacgtgctggatcaccatccacccggcaccctccgcgcttgggctgcgccgaccggaacgcaccttgtactcgacgtcgatggcaataggctgcagatacgatcccacgtcatcgtggccaaagcagagtgccagcttacacctgaggaacgggatctgagtgttctctatgttggtcagggtatcggtcgcacccgttcccgactggcgatcgaccggctttacaaccactcgacgctgcagcgaatcctcgcggacatgcatacccaccagcccgaagcggaggtactgctgctgctctacagattcggcgattcccgagtgatgatcagctcggcgggcgatctgaaccttataccctcctctactgttgaggaggatcgatcacatctggatcgtctgcttactgcggaggtggggcggcacgcgcgcgtgtgccttgcagaggctgcattgatcaaccatttccagcccccctacaacacaacgttccgtggcaccgacttcaccaaggcgcgcaaattgaagctgttgcgcgagatccttaatcaggatctgaccggcctgatcgttgaaatcgactctcacacgatacgctcgcggctgcgcaccgagcactgcgcacccagggaaccggatcccgcactcctggaaggttaccgtcgaatagccagtattccgggcgaactgcagcgccaagcccacgccgagctgcagcagatcctccatacgcacatcgcccatttcccactgacccaagccgaggaacgcgacagcttcctgcatggcacctgctggcatggcgaatcagagcgccagccactgttctag

SEQ ID NO: 509271 - DNA, 978 bp, Stenotrophomonas maltophilia
atgaccgatggcggaccgcagcttgcgggcgaattggccgcaggggggcagccaaggctatttgcccagatagtgttcgaggagggcgcgcgcgggggcatcagcgaccaattggctttgacaggtcccgacctggccgcgatccaacgcctgttcgctgcattgcgcgatctgcttgcagacgaactgtctttaatcgaaaagcacgctgccgacgcatttactggcacaccgctgacctggcaatgcggctattaccacgcaaacgcccccatgcagactcgcaagccgccatcccgctgcgtctggttcgagccagtacgtacacccggcaccaagggaatgatcgaagccttgtctgtctttcagcggtcgtcggggcaagtggtcggcaggagttccggcatcgaccacttatgcaccatgctgagtctgctacgttcaaatctagactcattggaggccgttttagaccagcccgtcgcctcagatatcgtcacgcccaggatgaacttgcaggtcaaaaccgacctggatgcaatccaccgcaccatggtcaagattggcctcaatctcacagcacatctgttcgccccgggcgtcctgcgtcgtgccgagtttgacgccgctgtcgcctatgccatgggtgaggggaccgccccacggcgagcacaactgccctccgaattgctggggccagccattgccgagcgacatgtgttttacctggaggtgaacaccgatcctcacggcaacccggcactgttcttcatggctcgtctttacgacgcgggcccgattgagagcttcctcctagcccaatttgccgcgccagccgccgggctggaatcaacagttgttcacgtggactatacgaccaatcagatcgagcagatgacgcttgaggagcaccttctgcgagccttcagactgacaggacgcgaggatcctgcgctgttgttccaagacaaagcctaa

SEQ ID NO: 509272 - DNA, 777 bp, Stenotrophomonas maltophilia
atgatgatcgccggactaattgacgccgcaattgcgccgaacgtgtttacgctgcttcatgaagcacaggtaattgttgggaagatcatcatagctttcctgaggacagactatttatccgcaattgcgactctcgcggcagcattcttcggcgcaagattcgcgtttcagtttcagcagaacgagaagacgaaggagctaaaggagcttcagatcgccagggcaaatgcagcgctgcagcgaattttgcgaatggtgaacatagtgggggactacaaagtgaaggtcgtggatccagttcgtcatatgggtcccgccgcagcaattaacatgggttcgacgctttcagaggatgtgagccgggagcacttcgacgtagccgaattgagtttcatggttacgaaagaggagcaggaggccgtgtttgatctgtggcttgaggagcgacgtttccacaacttgatgcaggtaattgatcgacgttcaaagctgcatcatgacgaataccagcccgtggctgaggcgaagatgcttcatgaaaggagagatcttacgctgccgattctgcgtgttgaggttggcccccgtcttatcgatgggcttgagagccttaccaatttcattcttcgggatgtggatgacacactggcatccatgatcgctgcaaaggacaagcttcgagctgcgttgcaactgcgattccccggccagaagttcttggacttcaacctccaaatgcctgagacccatttgagcaagcagcctgatagtccgtag

SEQ ID NO: 509273 - DNA, 207 bp, Stenotrophomonas maltophilia
atgatcaagatggatccccacaaccgcatagatctaaccggctcttgggtcggtttcggattccaaggtgggcacatgtttacgcccgaaggtcatcagctggagccgtgcgacatggcctggtggtccctgacctgcaacattgcacgcgaatggcggctgatgatggctgaggcggctcccggggctgcatacggcgaaatctag

SEQ ID NO: 509274 - DNA, 441 bp, Stenotrophomonas maltophilia
atgaagttgagctttactgcagactgcaattgggaagccaaggtgggtcgaattaaaagccattacgttgagcatgctacggagtttgccgacaaaaagtatggcgaagaagtggtaagtgtggccttgttgttcatgtgtcgagaccctgaacttggcttcagtcgcagggtgcagttccgtaggaagaaggcggagttttacactgatgtcatgctggatttgccgacaatagtcccgctttcgatgaaggaaaagatgcgatacgtttcccgggagctacttgagcagctttcagaacagcttaacaaagtgaagttcagagatttcgataaggctcgctttattggcgacttggatatctggctgagggacatcgaaagccgatatgacggcgagacatcgggtgcgtggggctacgacccaggtgaggggtcgtag

SEQ ID NO: 509275 - DNA, 666 bp, Stenotrophomonas maltophilia
gtgaaggtaaccgcagtctacatcgatcttgaatactacagtcaccccaacccgctgcgtgttcgctgccagctcgcgtccaactacctttcgctgttcatctccgaatggataaatcgccgcgatctggacctggggtcattcaacaggttggttttcgttgagggctcaaaggttgacatgcaagtcatgggggaaagggcgtttgcggtgaggatctcagaaacagcaagtgccagtggatcaccgttcgctcccggtgaagcgaccacttccgatgcggacgttcacagctactttgttgacaagtacctggaaggatttaatcgaatcgatgactacttcgggatttcgctatcgaaacctcttgctgaggcaatcatggtgcatttctcgaatggctatacctatgagacggccatagctgggcgtggcgcaagggacgggaagctgaggctgttccaccgatacgccacggataggtaccaactggttgcagtggaagcggatggggaagccgatggtttggcagccgagtacacgctgatggagctgattcccgatccgttcaaggtcagttaccacatctcaaacattgtgattgagggtcgacgaatttccattgcgaacaagacaggcagcgcagttgtggtgaaggagatttag

SEQ ID NO: 509276 - DNA, 462 bp, Stenotrophomonas maltophilia
atgaagcactcctggcgtatcaccaagtactggcagcggatgcccgaggggtacctctgctcaccgccggaagagtggacggacttcggcgatgtcggcagcctggtgagcctcgaggattacctcgttgtcgagcatgcctatctggacgcgatcaggcatttctgcgtcggcatcggcgtcgagtcactgggcatccagtcgcttgaaaagcgtgactcacgcgattaccacgagggccagctgctggatctggatgggatcgggcaggtggcgcgtgacgtgctgcgcaatgtcatctggtgcaggctggtgggcgacagcgccgaagttcatttcggttacgactactacatgttcgtggtgtcgtcggtggacgcgtcggccgcactcgcgcaggccgatccactattgaacatcgagccgttcccatcgccctatctgcgcgaacaggaagggtag

SEQ ID NO: 509277 - DNA, 735 bp, Stenotrophomonas maltophilia
atgatttcttttcctctgatgcttgcgttgctatcttcccacgccccagcgccagccggaacagttggaagcgatgtggtaaagggaatgaatgccggccttttaagttcggccatttgtgatcctggtatggagttgctgccagatggcgggggagtcgtggttcgtcgttgtggaagcaatggtactgtcgcgggggttggtagcaacattgatgctgcgaccacaaacgcgaatggactcctcgctgtcgctgaaaagggggttgtatgcggcgtctctgcgcgggatccttatgtcagtatgccggcgcccggagtggggataaaggctgattgcaacggaagttccatttctgcgtatgggatgacggcaaccactgctgggatgaatatcctagagctcgcaatcaatctggctgggtccaatgtgacgtgtaacgtggattactactatggcgcggcacatggatatagatatccttacacttgtagtcgcccgggcgcgtcgtggggggttgcgggtatcggttccagtgtcgatgatgcaaacgcgatagcaatgcgtctaattaagaaatcttctgaaaccggtacgcattgcgtattcgataatgctgaattgaatggagttgtttttcgcgtgattcttggttgcaatgggtcaacgtatatgggttatgggagtaacataactgctgccgcgatggatgcggcggcgcaagcgggcgcatga

SEQ ID NO: 509278 - DNA, 138 bp, Stenotrophomonas maltophilia
atgaaggtgtcgcgattggtgctggcgcaagagttgcaagcggggctcacggctccctggcacttggaaatggctctcaagcagttgaagaaggagtcgcgtcgtttgggggtgttggcgttcagcgccgtcttgtaa

SEQ ID NO: 509279 - DNA, 381 bp, Stenotrophomonas maltophilia
atgccatggcagaagatcagggaacttcctgaccagcgattcgtcggcccctacggcacggaattctggcgaatccacgaaggccaggtcttccaccagggtcggttgctgcgcaaggccgacgcggccagtttcgagttcatccccgaacactatttcatcgcgcgcgattcgcacgccatctaccacgcctggacccgcctgcctgcgattgaccgcgacagcttccgccagtgcggcgattactggctggacaagcgcaatgtctacttcgagtacgagacttcgctgaaagccttggccgaagccaattgcaccactttccgcagtatgggcggcggctacggtgccgacgatcacggcggctggtactgcggctga

SEQ ID NO: 509280 - DNA, 225 bp, Stenotrophomonas maltophilia
atgattaggatgccgttactgaattttggtggtatcaatcgttggcagggcgaaatcccgattggcgagggaagcaatcaatcccagatttcaaccttcaacgtctgcgagaacgatggcggagaatcggggctgctttcggccaagagcggactctctcaatgcctcgaaccggcccacgaatctgcgtggtatagaacgaatatcgggccgaaccctacttga

SEQ ID NO: 509281 - DNA, 1287 bp, Stenotrophomonas maltophilia
atgacctcgccgctatatgacttggacgagctagtgctccagtgcagaaatgagcgtgcacgcaactacattcgggaagcagtgtccagctacagagctggggcatttcgagcggctatcgtctcaacatggatcgcagtctgctttgacatcatgcaaaagtttcacgagcttgccatcgccggagatgctgctgcgggaaaagaagcggaagcccttgagcgaatcagggccaacggcgacgtgaccgcagctatgcggttcgaaaaggacctcctcaacaaagcaaagtcgcccttcgagctcgtgaacaacctagaatacatagacctcacgcggctctacgacgacagaaaccgttgcgctcatccctcgttcgtcgcggacggggaagcctactctcctcctggagaactcgcacgcttacatatcagaaacgctgtaacggtgcttcttatgcaccctccagcgcaggggaaatatgccctggaccggctgctaaccgatgttaggtcgcagctgtttccaaggaaggtagacgaagcacaagcgtggctggctaacggcgccatgcgcaggcctcgtgattcgcttacacgcaacttcgtggccgtgcttattaaggattatctgatcggcgaagctgactaccctgaaaaatcgcgctactcatccgcgctaaaggcggtacgcaacttacatcatcaacaatggaatgaagctgtccgagcacactgctcgcccgtgatccggcagctcgacgacaccaaactaggagttgtcgtcgaattcttctcgatttgcaatgaggcgtggagtctcgtagaagctgacgtctcacagcgggtattaagcttcatcagagaacttccctctgataagttcgacgtcattgagaacgccctgtccttcgatgcctttgccaaagaagcaaagaagcgaattgcgagatcgaccgtcgacgagatcgagaacgtcttttggtttgacatacctgcttcagtggccgatcgcctcattgacatctacctgcgatcccggtctttttcagaggcaaataaaactggtcgattacttacagtatatgcatctgagctctccgttgagcatgcgcagcgaataatcacagggtcggcagccaatgaggagatcgtcgggagctttgattttcccggtcttctcaacgcgctccacaagaagacaaaaggcgtgcgagagctaggagatttcgtcactttactcaatgattcagggcttggcgggttcgctgatgacatcccgccctga

SEQ ID NO: 509282 - DNA, 465 bp, Stenotrophomonas maltophilia
gtggaacataacttcgaaaggctgaaagcccacatacttccgctgtcacgctcgggcttattcgaggtagcccgcaccgagtgggacttggtgagtgtggagatcacggaagagttcgatcactgcccttgcggccaagaaataaaagagcattgctacataacaaatcgcatcacaggcaagtcgacttacgttggcaacgtttgcatcaatcgctttattggcattgatacgggcaacctgttcgatggcctgaaacgcatcgcaaaagacccgtatgccaacgctaacctcgacgtcatcgagcatgggcgcaagatggggtacatctatgaaactgaatatgaattcttggtcagtacgcgcctcaagcggaagctgtcggaaaaacagcttgaatggaagcgcaagatcaatcgccgcatcacccaacagatctcggtgcaacgtcgcacacgcacctaa

SEQ ID NO: 509283 - DNA, 351 bp, Stenotrophomonas maltophilia
atgcttgcgttgcccaagttggacggagaagtgctgagcttggaggcgaggcggtttgatggcccgctagccgtttggaccggctactcggcgaccgcagagattgaagagcaggtcatcaatgacggactggctgcgcccgacgacggcagcccgctggttgcgttgacagccaccgtggtacccgcgcggctgttcctgttcgaccggcccggcgcatccagcaccaggcgttacctggtgcagggagaccgcgtggagatgctggatgaacaggatggctgggtgaagctgcgctaccgcaacccgaagcagggcgcggtggtgggctggatcaacgtcaacgattga

SEQ ID NO: 509284 - DNA, 615 bp, Stenotrophomonas maltophilia
atgacaatgggaatcggtttcgcggcgcgactgaagcggttgcttgggagagggagcccgcagtcggttgctgtgctgactgtgctgattctgctccagagtgggctccttcagccaggagctgcctggtcgaaaccaatcgcggaacaagcgcagctatcgttcgaagtagcgccggcatcaccggtaacggtcttccttcaacctgacgggagcatccaggtccaactcccctcaggcgcgacacagcagctgccacgcgctccatcggagtcgccagaatctgaaacaaagctgagggcgttggatgtggattttgatggtcagcttgatctggtagtgcagatacccgttggaatggtcaatttttcgacacttgtctataaattcgatcggaatcttggcaggttcatgacactgcccgtcatccggaaagccaggcgaagttgcggggagttcggctggatcgaactggattccaagaatcagtgctccgtagcagctgccgaagtgccatctggcgtgttgatgtataccgtccttccaacggagttctgtacctttatcgctccgagcgtatgcttgcgttgcccaagttggacggagaagtgctga

SEQ ID NO: 509285 - DNA, 825 bp, Stenotrophomonas maltophilia
atgcgcacaattgcaatcttcctggttggcgtctgcaccattgttctttcaggctgcgcgactaccacacttcccaatggggttgcttcagcgggatacactgaagttgtttccgtccctctaggccctctccgttacttccatacgacttctgttctaccggggaagaacgccgtaggcgctacgaacctcgtccgctgcacgaacaccgcgcggacgatcaacctgcagatcgcgaacgggctggcgcttgatgccgcagatgtgtgcgcacgtatcgatgctgcggctgcggcatccgagtcatggataccggcagcatcaaacaggtaccgaatccttcttgtgccggaaggcactgctggggcaatacgaacaagatcgcttggcctctttgccacaggcaggcagcttgcgtttgtggcacctgtatacagcaatcaacatagaaccttcgcgaatcttgttgacttggttgcgcacgaaagctttcacgctttaggccacgctgaaaaaaatccccgaggacaggacgaaagaagcgcctactacgcgggcctgtgcgcgcaacttcggatcaacggcctcattgcagaagaagacttaccgggggcccctctcgcgtccggcgatcaggcggtacgctactcctcgcaggaagcctatcgcgtgcgcctggaaacctatccgttgctggcggacggaggcatccggcttggagcttcatccggcggcttgatgctggaccgatgccagcagatcagaagcgaggttgtcgggcttcagtcgagctcattagttcctcctaggggtctgcttccctga

SEQ ID NO: 509286 - DNA, 1446 bp, Stenotrophomonas maltophilia
atggatgttcttcgggatggcgggctgttttggctgggcgatgatgatcaagtgccgacgtcgttgcctcctcaggagggatgcatcgcgggcttgttggaagtggccgatgatgggcagatcacgctcgacttgattggagttcttttagacgatggcgaagacggcatctgccttgggatagaggaggtcggtccacgcaccattcgaggacttctaaaggggactggcgagcacgttttgcttaccggcgcccgtcccatcaagatgcactacaccgaccagatatcttctcaggtcatgcgtgccaccgccgccttggtgtctaagcatcccatcaccctgagtcaattcactgaactcatgatgcctcttgagggatttgaggcttgggcttacccagggactgtgagcggagaacggcctgtgggcgacgacggtcagcgccacctgctttctctgcggttggcccgcgactgcgaccgagtctacgaaacgtcctttggccagctgacctttcaaactgactttggcggctaccttccctcttacgacagtacgtcagttgatgtctcattgaagtcgcagctagtgctctgcttgtctgcacacgctagcctcgaccagatccttgactacttccgaggatttgaagacctcatcctactcttgagtaacagttcgcggtcgctgccctggccgatagcgaagagtgcatcactcgatggcctagtccgcatctattacgcaagggcgaaccagaacagtgccgttttcaacaggcaccaatgctggctaagcttgactcgcctgggagaagatttcggtgcggtggtaaatcgttggttcgagcgtcggcgagagctgggtccaggtctgcatctgttccttggcatgcgccgccctcggcctatgtacatcgaacacaagttcgccaacttggtgtggggcctcgagtcgctgcatcgacggctatacgacggcgacgccgaatcgaatgagaagctccgactcaaggttgagagaatcatttccgccctatcacgagtggagtgggcaaatgcaagagacaagagatatgcacttggaaagttcaaaaatgttgaagcgagcctcgcggagagaatcgagcaacttctgctgagcattggcctgggcttcgataacgaaaagctgcgcgaattttcggaaaagtgcgcagacttgcgcaacgatctatctcactatggtggtgaacgtaccccggggacatactcggatgtgattgagggatacgtagagttctcgattgctctaagtcacctttaccaccttctcctgcttcatctggtcgggatttctgacgtccatatccactggttggtgaacgaacatagggaccacgtccggcatcaccttgcacgcgtcaacctcgtccctcagatgaaggctccatctgcgtcctag

SEQ ID NO: 509287 - DNA, 261 bp, Stenotrophomonas maltophilia
atgggagcgggcatcaagagcctgcagcaacagatcgatagcctcaaggtcagatatccaagatccgacgacctcacggtagcaatacatctcaatcgcaacatgcgcgtgcaggtcagtgagttggatctatcgggcctgagcttgggaggcctgtggctcttcggggcagaagacgagggtgccacccgatggcgggtcgtcggcgaccttctatccccgaacgcagataccgccgtgtacgagtatccgtgcggatag

SEQ ID NO: 509288 - DNA, 288 bp, Stenotrophomonas maltophilia
gtgttccctcatgcttatgtcgacctgtggtccatcgccagcatcattcagcttaacggcagctaccagatccgtcgttatcttggcgactccctgatgggcattggaacggacggtggatcgacgctcattgcgctcgatctccgtttgctcagacccggccagatcgtctcattcgatctggccgatctcgatatcagccagggcaagcccatcgccgaatctattgccgaactctttcgtaagttcgacagcggcctgctgactagcgacaacctttatccttga

SEQ ID NO: 509289 - DNA, 609 bp, Stenotrophomonas maltophilia
atgccgatggcctgcgcgtactggcttcgcagatccagtaccgcgacctctgacgatcgtcacggtagtgccggccgttcgcccgcatgcgaagtttgccccatgctgaccctgcaacgcggccgccaccacggactgctcgtcgcaccgcgctggccctccacccgcatccagctggaagaagagttactgcaacgcctgctcgacgcgcaggcattgctgcctgccgggctgggcctgctggtcacgcgcggcttcgaacccagccaccgccggcttggcagcttccgtcgtggcgtgcgttggctcggcatcgcggtgttccgcgcctgctgtccgcagcgccatgatgaagtcgatgccatctttcggcgccaacggccacgacatcgatggccgtcatatcgatgtctcggtggtattgcacggcaagcggctgcggctgctgccactgggcgtgttcaccccgccgcgctggcaggatcgtcgcaccgcccgccacgccaaagcgatcgcctgcgtgaagcgcagcctccagcaatgcggtttcgcgctgcacacaaccccaccgaagccctgcagatccactgcgattatcgtccgcgctga

SEQ ID NO: 509290 - DNA, 897 bp, Stenotrophomonas maltophilia
atgttcaaccctcagacctcgccggataccggcaatgccacttcttcgccggcatcgccgggtggtcccttgcagctcgacttgctgggtggcccgacgaccgggaactgtggaccggcagcgccccgtgccagccgttctccgtcgcgggtaaaggcaaagcccaggatgacgataggcacctgtggccccacttccttcgcctcatccgtgcccgacggcccgctgtcgtcatgggagaacaggttgcggcggcggttggcaagaactggctcgacggagtgtctgctgacctggaagcagaggactacgcctgccgggcggtcgttgtcccagcttgtgccgtcgacgcgccccaccgaagggatcggctctggtttgtggcccacaccgacaacacgggactggaaggacagcccgggcatgtcgttcgcgccgcgcaaggatggcgcgagccgtctagatcttgtcccgaggcaggtgtactggatcgctcagaacacccctcatgcactgtggagaacgccaaacgcccatgtggtggatgcgaagtcgaacgtggtgaagctagaaggccggaagccatccgacccccaagttgggctggcggaccaggtggcggcattgtggccaacgccttgcgccagggatcacatgccagcgcactccccggagtacgtcgcggagaagaaggcgcaagggcatggaatggcagtgctgccggactacgtgcagcacgctcccattgggacggggccggatggctcatcggacacgacggaaaagcccggcgctttgaacccagcattcgtcttctggctcatggggttcccgcccgagtgggtaagttgcgcgccggcggaaatgccatcgtcccggaagtcgcggcggaagtga

SEQ ID NO: 509291 - DNA, 666 bp, Stenotrophomonas maltophilia
atgagcaacgtgaggagaaacctggcagatgtgcagctcggctggaggatgaggctgtgggcaatggctgagctgcttcggctccgcaccaaagtcgctaaagcgtgcgacagcttttactactgctctcctcttggacggccgcactcagcagcgactgccgcttcgatcaactctcgcatctccctcttttcagctgcggactgctcgcgctttctatcctcgatgcgtcgactatcagcaatggattcagcggtcctcgcatcgtgccacatcagcgctaaaaagttcaaagcaatgctggctagggccaccaaaaaaatggatgcaatacgaaccaagcccgacctacggcccatcttttttgggcatacgcctgctacgaaggaaacgaacgggattaacggaagaatcagaccggccaaaactaacgctgcaattacgacgttgcgcgaagcgtatggaacaaaatctgtcgaaggatcgaacacgagcaggacaattgctggaccacctgcgattggcgcaaccgcgagtaaaccctcacagattgtctttactagctcgaactggctcgcacgcttcacttcttctggctgtgggctcataccgcattccttgcttgatgttcggcagatggtcacacgttatggcggcgagggatag

SEQ ID NO: 509292 - DNA, 258 bp, Stenotrophomonas maltophilia
atgcgccacctggccctgcccatctactgcgccgtcgtcgtgttcctgctgctcgccctcctggcacgcgtcatttacaccgacgccggctcgttcctgccgcccgtgctgttcggcatcggctatttcgcctggcgcggcatcaaggatgcccggcagtcatggccggagttcagggccgatcggcagcgcgacgcagaccggcgccgccgcgaggcgcagcgcaatcgccatccaatgaccgacaccgactactga

SEQ ID NO: 509293 - DNA, 891 bp, Stenotrophomonas maltophilia
atgtcgaccatcatcatgtcgcagtgctggccgctacagggcctgagcgtcacgcagaaggcggtgctgatctcgttggctgatcaggcgaacgacgacggcgtgtgctggccggcggtgggcaccatcgccgcgcgctgctgcatgtcggcgcgcgctgtgcgtacggcaatggatcatctggaggccgtcggcctgctgacccgtgaccgccggttcaacagcagcacggtctacaaggtcaccccggccaacttcgacaaggccgctgcgccgtcgaaggctggccgcaagtcaggaaaagcaggtactgcaccgggcgcaggggctgcgccccatgcagggggtgcgcccgctgcaggaggggatgcgccccatgcagggggggatgcaccgggcgcaggtctaggggtgcgccccgtgccgcctaaccgtcatataaccctcaatgaaccgtcaggagaaccgtcatttccggcggccctgccggccgcgccgctggcggtggtttccgaaactgacctacaggctgcgtgccgtgctacctgggcggcctacgccagtgcctaccgtgaccgccacggtgtggcaccggtgcgcaacgccaaggtgaacagcaacgtccggcagatcgtgcagcggctgggccatagcgaggcgccgctggtcgcagcatggttcctgaccgtcaacgagcgctacgtggtgcagaacatgcacgacctgggcgcgctgctgacgaagtgcgaggcataccgcacgcagtgggccaccggtcggcaggtgaccgaggaggccgcgcggcagaccgacaagacgcagaccaacctgagcgccgccgacgcggccaaggctctgctggcacagcggagggcggcacatgctgggtaa

SEQ ID NO: 509294 - DNA, 663 bp, Stenotrophomonas maltophilia
atgctgggtaatcaggagcaggatcggctggtcgatctgctggtggccactgccgaggtgattggcgaccagctcagcccgaacgccgcggcctacatggtttcggatctggcgcagtacccgctgccgatgctggagcgcgcgctggcgtcgtgccgccgggagttgaaggcgcgactttcgctggcggcgatcctcgaacgcatcgaggacggccacccggcaccgaacgaggcatgggccaacgcgatccgtgccgccgacgaaggtgcgaccgtggtgtggactgagcagacccgcgatgcgtgggcggcggcgctgccgctggtgcaggcgggcgacaagatcgctgcccggccggcattcctggaggtctacacccggttggtgaaggaagcgcgcgctgcgcaccgggtcgccacctatcagctgtcccttggcggcgccgtgtgcggtcgggatagcgttctgcgcgaggcggtggccgctggccaactcatgaaggagcaggtggagcagtacttggcccttccgcccgccaccccggccttcgacccggtggcgctgctggccggaacggttgaggcatcgccgacagcggacgaacggacccgttcgcgcctggccgagatcgtcgcgctgctggagggcaaagcggcatga

SEQ ID NO: 509295 - DNA, 1251 bp, Stenotrophomonas maltophilia
atgccgcagaaattcattgatcaaacgaccatccagccggatggcaggccaggcgacgacgcattcaccgcctttgcaacctgcaacgacaacttcgaggatgccgaggagcgcctttcggcgttggaaagtgggtcatcgaacatcggccaggacgtggccgacctgaaaacgggcttgcagcaggagacgcagctgcgcactgatgccgacgccgccgaagccactgcacgccagaatgcggacgcagcactgagtgcacgcatcctcggtaagaacatcgtcatcaacggtgacttccggttctggcagcgaggtacgggcttcgccgctgctggttacggtgcagatcgcttcttgaacaacatcaatggcatcacctgctctatgactcggctggcgctcggtgtgggtgagatcgcaggtttcaagtacgcgtgccgtatgtcattcaatggaggtagtgaccctgctcactacgcaaccttgcaacatcgcatggagaacctcggatactactcgggtaagactcttacgttctcaggttatatgcgcgcaaacacaactggcgtaaaggttgcatttgagtgcgcgcttatcgccgcaggaggaactattccgggcgcggttccgtccactgctatcggagtgactacgttcactttggggacttcgtggcaaaggttcactgctaccttcactgtgcctagtttggttggcgcaacactcaatgatagttcttcgttgagtttcaacctgtggctgtcggccgggtctaaccacaacccgcgtaatcacaatctgggtttccaatctgccattgttgacttcgctggattgcagttggaagaaggtgctgtttcaacgccgtatgaattccgaagcgatcctctcgaattgtcgctgtgcctgcgctactacgaaaagagctacaacctcggagtcttccccggaactgccgaccgtaatggtagttatcgatgctctatcgtaaatggtttcttcttctctgctggcactatcgtgtttgcggtgcagaagcgggctacccctgcaattagcgtgtacgcagcgcgtgatgggacggctggtgcaggctcggaggtaaacaactctggcgtatttgtggcaaacaggaacgttacgccgagcaatatgggcaccagccggttccagacgggtagcaacaacggtggtgctgcagctggcaacactattgaattccaatggactgcggacgcggagctttaa

SEQ ID NO: 509296 - DNA, 450 bp, Stenotrophomonas maltophilia
atgccaatccgggcagttgtatacgcaagcagcgccggcgaggggatcgccggagacaagctgggcctgtcgaacggaaagcttgatcagattgtggatgatgccgccaggtttaaccgtgacgcaggcgtcactggggtgctccttttcgacggcgagcgcttcctccaatacctggaggggccagaggacggattgtcagtagcctattcccgggtgctgggtgccagcagccacaacggcgtggtggagctgcaaagaggcagggtggggcagcgccgcctgccgttctggccgatgcgctggctgcctatcgaatcggtgcagctgaggagcttggcgcatgcggactggttagggttcgccgagcgtcgcgaggcgaagtggcccaaccggaccggcatggatcttctccgccaagcggtggagccctatgccaacgccgcatga

SEQ ID NO: 509297 - DNA, 228 bp, Stenotrophomonas maltophilia
atgagtacccgtgcagaaatcgatgagatgctccgacgcctcgaagaaaggctccctgaatgggccgaggtgtacccggaggatcagtttctggcgatgctcgcccagtctctcgactacatcgcctatagcgcagacccggaggcgcgccggtactgtctgatccggacgggctgcctccgtcccggaagttgcgagcgagaacatgcgcagcgttaccgtcgctga

SEQ ID NO: 509298 - DNA, 504 bp, Stenotrophomonas maltophilia
atgtattcctcccacagcttccgcaccgccccgatccctactggctgggtccaggccggtgagcgctgggcgctctggtacaacggccgcgagacggccagcgtcacgcccgatggcggtcctggggtccggctatggatggaaggccagaagatgtggcaggtgaaggaagtgcgcgcggccaacgtccggcaggcgaagcggtacgccgagcgctggtgcgcagccaggctgtatcccgatctgcctctgcgtgaggccgtcgcccgactgaccgacagcacaccgatccagccgctgccgccactgccaggcctgccgccaacccgcgagcagcagcaacaggcccggcgcctggccgaggccggggcgaaggaggtcgagcggatcaaggcggcgcttgaaccgcgcaggccgcgggcagagacgaaaccccgagcgagggacgcccgcaccaaggcatgggtgagggcggggctggagcagctgcgtcaaggcgactga

SEQ ID NO: 509299 - DNA, 723 bp, Stenotrophomonas maltophilia
atggggcgcaatcagctcattcgtcgggcaatcaatgagatcgaggatttggttaaggaatcctcggttcttggctatgcgcagccacagatgtttccgattcctgacgagatggagccggagattccacgtgtaatgtttagttctaagggcggccacagccagctgttggtttctcagattagcatcacgtttaatgttacttactcggatgattgggcgcaggatcacgatcggtgccttcggtatcttttgtcgaaggtggatttgctattcgctattgcgcgggccggatggaagcatttccctgggcctagcttcagtggtgtgactacagtttttagggtgcctgccgatagccagaaatctgctgttgccatggctgcgccattctttgccaatagtgaagctcttgttgcatctgcgaacgagttgtcattcaggcgatcactcactgcggataaccagttttttgacaacctagctatacagacttttgtgggcgttgatgagtctaggttggtgacgttcaacggaataccaaagatgtgtagtgacgttcttgaggcttgtggtgttgagatatcaagtgactacaatgaccgatatgctttcaatgagcgtgacgaatatgtcagctcggcagaaacgctgagtaagatgcttggcgcaggatttgcgtctgcgctaaaggctgttggcaccataagacaggggggttga

SEQ ID NO: 509300 - DNA, 603 bp, Stenotrophomonas maltophilia
atgaagtggacccgcgaggaaatgcaggtcttcttgaacgaagatttactcaaggagaaccttgagccagtagttcaggagctgcaggagatgcgagccggtcgtgggatgattgcggctaaccacgaggattctctgttgcagggtgacatctatgatggcgtcccctgcgtaacgcgcaagggcggagagctcaaaatctctggccgtcgcgttctgttgctttctaattcttgcgacgccagtcctgataatccgcgtcacatcccactggatttgaccatagctccgttgctgcgtttggatcgctacggacaaatgctgcttgacaagggtgttagccaaggagccgttgacgacatcacgtcagcgataaggaagcaggaaaagaccaatctgatatacattcctgctggcgccaaagtcgattgcgagatggttgcactgttggacagggtccagtcgctaacaatcacggatttcctggcggccgcccctagtcgcttggctgttctgacacagcgtggtttctgggttctcttggtgaaactctcgatgcatttcctgaggccgcatgaaggtgtagcccgcactgctgcgtag

SEQ ID NO: 509301 - DNA, 420 bp, Stenotrophomonas maltophilia
atgggcattggcatccaactcgggcgcatcaccgatgagatcggcagcagcgattttctgtatgcgttcttctcgacgatcaccggcaacctggaaccggatggatggggaagccgctttccgatcatcatgaagcagctctacgccggctgcgtgcagaaatcagacgcggctactgcgctgtccgagatgcacgtcatccgccgcgagctggcccagctgccgccggtccaagtcatctggtcgttcgatgatcgcgcccagcgcccgccatggggggaggcaatcgcccctgacatcgagtccttggcgacctacttcgtcaccgcacggggacgcgatctgatcgcgcttctaactgaactgtttgaggagctccaagatggcgaggatgacgtcgctcggatcgtcaactattga

SEQ ID NO: 509302 - DNA, 297 bp, Stenotrophomonas maltophilia
atgctcgacactctttcacgcggaattgacgtaattgcaggccgattgcgtcagatagctgcaggttatgaccggacgatactgttcgctgcgaacgtcgttgatgccgggtgcgacagtggtttcccggctttcccgcaattgggcaagtgctcttgccgatccgtccaacgacaattcgccttcgccatcgccatcgccatcgccatcgccatcgccatcggcatcggcatcggcatcggcatcggcatcggcatcggcatcggcagcatgatgatcgccgttgccgtcggttga

SEQ ID NO: 509303 - DNA, 2817 bp, Stenotrophomonas maltophilia
atgaatccggcacgctatctcgaagccgcacggcgatcggtacaacgccatggcggcggcatcgcagggctgggattggtgctgttgcgggctctgaaagtcattcgtgccatgggcgtgcgcggcttcatcgcgcgcctgcgctcggccggtgcagtccgcacccgtgcctgcgagcctttcgatgcgcctcccctgccagcaccagtgcccctggagcagctgcagctgcgtacaggcgtgatggcccacgtgttctaccccgacctgatcgacgagtttgccgccacactcgggcgcatgccgctgcgcttcaccctgctggtctcggtcatggatgacagggccgcggtcagcgcacgcgaagcattcggcagcctccacaacgtggaggatctggtcatccgccaggttgagaaccgtggccgcgacattgcaccactcgtggtgaccttccgggaggaaatcctcgcactcgaccttgtgtgccacatccacaccaagaagtcgctctacaccggcagtgagcaggagcagtggcgtcgctacctgctggacagcctgctcggctcgcctgagcgcatcgcttggctcgtgggcattttccaggccgaccagaggttgggcctggtctatccggaaagttacacgggtgtaccgctgtgggcgcacacatggttgagcaatggggccgcctgcgaagcccttgcacagcagctggggatctccctggatgcgcagcgctacattgattttcccgccggctcgatgttctgggcgcgggtggatgcattgcgaccgctatacgagctgaaccttccactgagcgcgttcccgcccgagcggggacaggtggatggcaccctgcagcacgccgttgaacgactattcggcgtcatcacccgccaccagggatttcgcctcggcatcctgccgcccgatggcaccctggcattggctgccgaaggcgagcgcaacgtcggcgaggcactgcagacccgcttggccgaccgcgtgacgctggcgtcactcgaagcgcgcctggttacggtcgatatcttcgatacgctggtcacccgcgccttcctgacaccgtccgccgcgcgcgaccatctggcctggcgactccatcggcagtggggcatcagcgatttcgcccggcatcgcgccgatgcggaaagcagcctgcgagagcgcttgcagcgcgatcccaccctgacggaaatccataccgagctggctgcgcgcctgtcgctgccgggcgtggacgcggacatgctggccgatgccgaacgggcgcatgagcgtgccgtgctcagcccgcggcaaggcgtgctggcagcgcttgcgcacgcccagctgacgccactcaccgcgttctccgacatgtacctgtccggcgatgacatgcgccaggtcctgcccgacgaggtgcagcagcgtatctcgcgctggtggatttcgtgcgagaccggcctgcgcaaggacgccacgggcagctggaagcagctggcacagcgggagggccgtgatgacggtctctggctgcatatcggcgacaacgaacacgccgacgtccagatgccacaactggccgggctgctcacgcccgtgcacgtcctgcgcccgtcagcactgctggacgtggtgcccggcctgcgcccgcttcgccacccatcgggcgcgcaggcaccgtggccggagcagctctggcgcggcctgctggccaatggtttcgccaccctcgccgacacctcaccacaacgcctgctcggccgtccccagctcgatgggcgcatgctcggccatgccgtactcggaccgctcgtgctggatttcctgctgcatgccgtcagcgtcgcccacgctcatgacgttgaccacctgttgttcctgagccgcgagggctatctgctggagcaggcattcacccgtctgcaacgcgcacatccggccgcagccacgttgaagggcagctatttcctggcttcgcgccggggcacgctgctgcctgcattgttcaccactgccgatctgccactcatcgtgcagggcacgttcaatgggtcgctgcgtggcctgctgcaggcccggctgggtgatgaggccgcgacccggatcgcaacgctgcagcctggtctgatagagcgcgacgtgttcttgccggagatggcaggcgacgtgctgcactggctggaaccagcagccgatgcgctgctggcgctggctgaccagcaacggcagagctaccgcgcctactgcgcacgaatgataggaacctctacaccgatggtggtggatgtcggctactccggcagcatccagcgcaatctggcacgcctgctcgacagacccttggggggggtctacatggcgcttcgcgccggcgccagtgcgctggcagaccatggctgggccgaagcgcggtatttcgatggccgtagcggcagcagcgaggacgactcgatcatccttgccaatgatctgctgctggaatcactgctggcggcgcctcagggacagttcaacggcttcgcaggaagtcccgacgagcctgctttcggaccgatggaactgactgcacaggccgtatccacactcgctgacgtccacgccggggccttggccttcatcgacgaggcctgcaccgcgatcggccaggacatcgccgggttgaacctggacgccgaaggcgtccaagtgccactgcattgcctgggaagtggccgctggaatgccgatcaggcgcttgcccagctggccaccgaggacgcattcaccggccgaggcacggtcagcgcagcaacgccgggttaa

SEQ ID NO: 509304 - DNA, 276 bp, Stenotrophomonas maltophilia
gtgagttttctagcaggcttcgttgtcagcttcgtgttgaaccgcatatgggtgttcaacagcaagggcaggtggtggcacgacctgctcaagtacagcgtgctggctgcggtcaacctcgtgcttggaaatgccatgatctgggtcctcgccgggccagcttcgctgccaccgctgctggcgaagctccttgtcatgtgcatgatcgccatctggaactatgtaattttctcccggatcgttttccgtgcagttgatgacgccgtagagagctga

SEQ ID NO: 509305 - DNA, 2187 bp, Stenotrophomonas maltophilia
atggcccatgcggggcgcatcggaaaaatcctgcgccaatggtcggtagtcgcggtcgccctagcctgcgtgctctacgtgggtctagcgatcacaccatcttcgtatggcgcagccttcggccttctgggacttgaaccagaagggttactgctgggcatcccacgtggcatccgctcagatgagtggatggtttacaccccctatgtccagatcgcggtagccaatgggcttgatacggtcaattcccattcgccttatcatgaaacgttacgatctttccaagctttgcccattctggactggggaatgctgttcaagccttaccactggggcttcctgttcctgcctccagccaatgcctattcgctttacttcttgtccatgtcgatggggttcctcgttggctggtcattgtttctgcgcctactgcgcgcacctgcttgcgcctcggtgctgatcgccaccgccctctatttctccccgtttgtacaggtatggtggacaagcaatgcaggggcgtttgctttagctccttgggtcgccgttgcctggctgtacttcgacagacgcattctgcgcattgcagcaagcgcatatgcgctcgccgtctggatgctttcatgcgcttaccctccgtttctatacagcgcaacgttcgccatggcgttgctcgtgttgaccttccgacgcgacaagctcagctggagccggctctttgacgcgagcgttgccggcacactcgcactcgctctctttatcggttatttccatgccttgatagacgtgatgcagaacaccatctatccaggtcgccgggagagtacgggaggaggcgtggagtgggcgaaattgcttgcccacctcacgccgtcgatcacgacccatcgctacgagccgttggacaccttcgcgaacagcaatgcctgcgagatcgccgtgctgtcgacgcttctccctctctatgcagcaacactcataaagcgcgatgtgttcaagctctgggttgcccagaatcagggcagtatcctgatacttgtttctgggcttgtttttctgggaggctggatattcctcccagtctcaccggccatcggaaagatcacgggtcttttcatggtgccacctgcgcgcgccttgctcggcttcgggttgctcctgaatatcgcaagtgcggtcgtcctcgccagatgtggcgtcacgctgtcagctaccaggttcctgatactgggactatttacgctcatgggcagcgtcaccaagctcgtctatgctccaaatggcatgcacggtcttttcagctggatggacgccgtgccctatttctgtctgctgcttctgatcgtcggcgcgcggatcgtgcaacatccctccaaacgtctgcacggcgtccttctcgttgcgctgctcggtaacattgtcagctacggcttgttcaatccattacagtcggccaaaccgatcttcgcgatgaacaaggacaggattgaaggattcctcaggcagtcaggtgcggagcaagatgcacacggcacatgggtcgcccgcggccacttcggtgcactcatcgctggcgcaggaattcccgccgtcaaccatgtcctttactacccccagttcgcctacttccggaaacacttccccaacatgccggaggaggagttcaatctggttttcaaccgttatgctcatatctcggtaggcgacgggcccagaccacagattatcggcgctgaccatgtggaagtaccaatggcggcgatgctgggacgggcggaagttggcggcgatgtcccagtcattgagatcgttgccaacagaccagtcacagccggccagagcttgcccatcggccatgtggattcggtaagcccgtgggagaaccactcagtcacattacagggttggatcaaggccgcttcgaacagtggcacgaagattcgcatatggacctcatcccaggcaacaagcgcctcactggccatcatggcgcgtcccgacgtggctactgcagtcgatcctaggctcctgaactcaggaatacgcttgaccctctccgtacagccggaagcaaagcagaccgaattgtgcattctggtagaagaaagtactggaagtatctccacggtccgattcccgaacggcgatacggcctgtacgcggcttgcagctcaaccacttcaatag

SEQ ID NO: 509306 - DNA, 999 bp, Stenotrophomonas maltophilia
atgaccatgatcctgcccgagcaccccaatgtcgcaatgcgcgtcgcagttgtaatcccgtgctacaaagttaaacgacacgttctgggagtcattgctgctatcgaccaacgcgtggagcgaatctactgtgtggacgacgcctgcccggaagagagcggcaattacatccagacggctaccactgattctcgggtcgtgatactgaagcacagtgagaatcagggcgtcggcggcgccgtaatgacaggctatcgcgctgcaatcgcagatcagatggatatcatcgtcaagatcgatggggatggacagatggacccctccctgctccccgatttcatcgcaccaatcattgcgggggaggcggactacactaaaggcaataggttctgggaactctcgcagatccgccagatgccgttgcttcgccgaattggaaacctcggcctttcattcatggcgaaagcgtcttccggctattgggacatcttcgatccgactaatggctacacggccattcacgcaaatgtggccagccatctgccgatgaactccataagtcgacgctacttctttgaaacagaccttctcttcaggttgaacaccctgcgggctgtggttaaggatgttccaatggatgctcgttatgccgacgaagagagcaatctgaaggttagtcgcgttgtcggcgagttcgccttcaagcatgcacgtaacctcctcaagcggatcggatacaactatttcctgcgcgaccttccgatcgcagcgcttgaacttctagcaagcggacttcttctgccattcggcctgctgttcggaatgtatcactggcaccaatcgtccacagctgacacagcgactcctgtcggaaccatcatgctttcgattgtcgcagtgacgacgggcctgcagttccttttggcgttccttggctatgacatcgccagcgtcccgcgcaacccgcttcatagatccatcaaacgcagagcacagtga

SEQ ID NO: 509307 - DNA, 2283 bp, Stenotrophomonas maltophilia
atgtcgatcctacctttgacccttcgacccgcacatcagatccagctgctccaatcccgggagcagcttggagacgtctggcatgcgtatggcagtgatccccagttcgagctctcctgggaaggcggtgcacttttaggcggctggtatgcgttcagcggcacgataacggtattgcgcgggcggctgcatgcaccacggctgtatccggcttacggcgaggtgctggccgaacatgatcgcgtcgagcttccctttactgcgcctcagggccagcgggtgcggtttgatgtagtcatccgctttgctaccacgatgtcccgcttgcgcttcgatccctccgtggcgccgatggatttcgagctgagcgacctgcgcctgcgcaggcttgggcgcgtcgaagcactgcgcatgatgctgcaggcactggcggcggaacgcgaaaccgagctcagccgcatgcgcctgtatgccagaactacgctggacttcctgcgctacgggcggcggggtatggccgaacgtctgtacatgaagtacgcaaaccgcaattcggccggtgaattctccgactatgaggtctggcaggagttctacgatgcccgtggcgaggcatttgatgcgcagggcgcgacgttgctcgctgcgctgaaatccaagccggtcgtttcaatactggtacccacctacaacacgcctgaagaatggttgcggcgttgcattgaaagcgtgcgtgctcaggtttacccgcactgggaattgtgtcttgccgatgatgcatccacggccgaacatgttgcgcgagtcctgcaggagtatgccgcgctggatgcgcgcatccgttatgaggtacggcaggagaacggccacatctcggccgcgtccaatactgcattgcagatggccagtggcgagtatgttgccctgctggatcatgacgacgagcttcacccgatggcactgctggagtgcatgcatgctttcgaggtaaaccctgcatggaaaatgctgtttaccgacgaggataagatcgacaagcacggtcggcgctccgacccctacttcaagtcggactggaacccggatcttttcctttcgcagaactgtgtctgccatctgaccatctgccgcgctgaattgatccgggcagtcggtggtttcactctgggcctggaaggcgcgcaggactgggatctggtactgcgcatgaccgagcgtctgtcaacggccgaagtcggccatgtgcccaaagtactctatcactggcggatgatcgagggttcgaccgcgatggcgccgggcgagaagtcctatgcgcatcacgctgcgcagcgaagcgtgcaggggcatctggataggatgggggggggcgctaaagtgctggaaatgccgtcctatagtggctatttccgcattgcctatccgctgccggagcctgcgccgctggtgacactgctgattccaacgcgcgatcgtatcgacctgctgaagcagtgcattgactcgatcctgaagctgaccacctacccgaatttcgagattcttgtcattgacaatgattcacaggaggcggaatcgaaggcgtacttcgccgagatccaacgtgatggtcgggtacgcgtgctgcactatccacatccgttcaactattcggccatcaacaatgcaggcgcgcgccacgcgcgcggcagcgtgcttgggctgctgaacaacgatatcgaggtgatcacccccggttggctcgaggaaatggtgtcccacgcgctgcgggcggaaatcggcgtggtcggggcgatgctgtattaccccaatgacacgatccagcatgcaggcgtcatcctgggaattggaggcgtcgccggtcactgctacgtcggcatgccgcgtggttggccgggtgacaagcatcgcggcggactggtgcagagcctgagtgctgtcactgccgcgtgcgcggtggtgcgcagggaggtgttcgaacaggtgtctggcctggacgaggggctggaagtagcgttcaacgatgttgatttctgcctgcgcgttcgccaggcgggctatcgcaatctgtggacgcctttcgccgagctttaccatcatgagtcggcgtctcgtggttacgagacgaccccgtccaagatcgcgcgtttcaagcgtgaagaggcattcatgaaggagcgctggggcatgcaactgctccaagatccctattacaacgtcaacctgacggtagaatcgacgccgtttacgctttcttacccgccgcgggctccggcgtactga

SEQ ID NO: 509308 - DNA, 2187 bp, Stenotrophomonas maltophilia
gtgataccgcaccgacgcagacctgcgaaattctgcttcgatcccagggcgcttcacgatctggtgctcgaggatggctcggtgtgggtggcaggcggttctgatccgcagttcgtcctggaccattcggctttcccgctacagccagggtggtaccgtgtccaagctgactttgctgagatcgatggacggatcgagcgaccgtgcctgtaccccgattttggcgagggcatcagcgaggacacgcgggtggacttgttccctgacctggggcgcgggcgattggatcagctggttcacataacggctcctctgatcgcactgcgcttcgatccttcgacttgcccggccaagttccgcttcggcggattgacactgaccccggtgcaaccgctggaggcgcgatggctggccatggacgcgttgctggcgccgcagctggaatacgacccagcattggccgcatcgacggcggcctggggctatggcaacccgccggatgtggcgcacatcgaaagcgtgcttgcgcgcactccgttggcacgtgagacggggcgatccgcctacggcttatggtgtgatcgtcaggaccgactgctggacgcactggcgtcgggcgttggtcgcggcgcagcactggatatgccgtggctgacgttgttggtggaggatcctgccaacgcattcactgaagcctccctgctgcgcttcgatagtgcggaagtccaggtgatcagggtgggtggtcgtgcgctggcggcgtgcatgggagaggcaaaagggcagtggatcggttgcctgcgcagcggcgaccgcctgcatcgacacctgccatcactactggcccaggttgctctgcgtttcccggcagcgccaattgcctacaccgacgaggacgtttcccttgctgatggcgggcgggcgcagccgtggcgaaagcctgcatttgaccgcctaagattcttcgaacaggactatcttggccagtcggcctttgtacggcgccaggcgctttgccccgacgtcctgcgggttgctgaccaatccgggtggttcggtgtgcttgtcgaactttccaacagcaccgagcacgaacgcctgcccgtgcatatcccgcatgttctgcggcatgttgcagccgcgccaggaccgaactgtgcgccgatgatggctgcgggccacgcggccgcggaaatggccgcggtatggcagagattcttcgaatcccgccgatgcctgcatcgcgtggaagcaacggcaggtggcagtctgaggtatctacctcacgtatcgacatggccgtcggtggatatcatcatccccacaagggatcgcgtcgatctgctcaggatgtgcctctcgactctgcttgagcggaccgactatcccagcctccatgtgcacgtagtggataatggctctgtggagcaggagacgctcagctatctgaacgagataggtggcgatgagcgtgtatccgtgcaccgctatgatctgcccttcaattattcggcgatcaacaattttgccgtcggcaaaggatgcgctgaagttgttgtcctgctcaacaacgatatcgagatcatcgatgcgtcctggttgaagacgatggttgggctggcggtgcagccggagatcggcgcagtcggcgccaaactcctctatcccgatggtcacctgcaacatgcgggtgtcctcttggggatcggcggcgtggcggcgcatgcgttcccccacgctgcacctcgcacacgcgccgaatatggtcgtgccggagtgcttcagcactattctgctgttaccgcggcgtgcctggcggtccgccggcaggttttcgatgcagtttccggcttggacgagtcacttgccgtggccttcaatgacgttgatttctgcctgcggatcggcgctgcaggatggatcaatgcatggactccccatgccgttgccgtccatcacgagtcggcaagccgcggcagcgaggataaccctgaaaaacaggcgcgctttgctgcagaggtagttactatgcgttcacgctggttggaaacactcgagtcagatcctgcctacagtccgggggccagtctatccccccccggttttggaactgatccgctccgccatgcacagcgtgttgcgcgtgccgcattcgcggcaacccccgtttcgtccctgcctgcttga

SEQ ID NO: 509309 - DNA, 2184 bp, Stenotrophomonas maltophilia
atgaaatcgagtacaaatatgaccgatacgccagtgaatcttcagcacgcactgcatgctgcaggctaccaactcgattcggaaagccgggtgtggtgctcgccaggctttggcagcattgattacagcgacggagatggtgcggagaacctgctcctggagacattgcgtggcgcacgggacgtcagcgtgttctcgtccgaactcgcggctgcttgccgtgactggccctcgcgataccacctgtccaccgagcgtgccaatctgctgagaccgttcgcagcagtcctggtctcgggtgcgcaggtactggaaatcggtgcgggctgtggcgcggtcacacgttacttaggcgagacgggcgccgaagtgcttgcacttgaaggttcccagcggcgcgcgacgatcgcccgcgagcgtacccgagacctgcagaacgtgcaggtgcttgccgaacgcttccaggatctcaagctggccgcacgctttgatgtggtgacgcttattggcgtgctggagtatgccagcctgttctccgacagtgacaaccctgccgtggacatgctgcagcgtgtccgcaggctgctcaagccgggtgggcgtctgatcctggcaatcgagaacaaactgggcctgaagtacctcgccggtgctccggaagatcatcttggtatgccaatggtgggcgtcgagaaccggtacccggaaaaaggccccagaacgtacgggcggttggagctcgatgacctgctcgtacaggccgggtttgccgcgcgcgagttcctggtaccgctgcctgactataaaatgcccgccaccgtcttgtccgggcgtgggctcgcagcgccgcgccagcactttgatatcgcaccactgctgtcacaagcggttcgccgtgacccgcagctgacgccgaccaccttcaacctacagcgcgtctggccagaggtgtccagcaacgggttgtcggttgatctggcgaactccttcctggttgaagcatcggccgaatccatcgaagcccagacccctgcagtccttgcatggcatttcagcacgcagcgagtggctcgttttgcccgccagacctgcttcgttgatgggccgaacggcgtgcgcgtcgaatcgatggcgctgaccaacgaaacgatgagcgatgccgggaacgtcaagttggttgtctgtgacccgtcggactatctgcagggcaacttggtggttgatgagtggcgcgcgctgctgactagcccgggttggcggatggagcaaatggccgcgctcgtagccgactatctgcaggcgctgcgcaacctgctggagcaagagggtatttcaacgagtccgcaatggccgaccgccggggatttgcttcccgatgactttatcgacgcgacaccctccaacctgatgcgctccgaggcgggtgagatcacctatttcgatcgcgaatggtcagtgccggccccgaccttgggctggttgctgacgcgcgcattgttgttcacctacggcggcacgcccgtagctccaatggatggcgatgcacccgcgtgctcggttcgtgattggctggtgcagcttgtttcgcgggtcctgaatgatcctgcgggcgctgcggtggtggatgcggccatactggacgagatccatttccagctcgaagccaccggtaaggatcagcgggaagcgctggagggtatgctggaggcgcccgttccccgccttatggccgcagcggccctggcagagccatcaaacgacgtgctggccaagcttgacgggctgcagcactcgttcaatctgtcctcgcagcacatgatcaacatgtatgcctcgctggcggcgctgcacgatgtagtgggtagcatgcaagctgggttgagtccagccatgcagggcatcagcgcgcaggtccagcatatctccgccggtcagcaggcgttgcatgcgcgactggtcgcaaccgacgaccgcgcggaggaatccatgcgccactggagcgcagagcatcgcgcgcttgccgatgatctcatcggcagcctccaggacgagcgtcgccaagaggtcatgcggagcttggagcagactgtgcaaaacctggttcaatcgcagaacgagctgcgtgatgccgtgcagctgctcatggctgaccgcaagaggagctggtggggagggcgtcggtga

SEQ ID NO: 509310 - DNA, 1341 bp, Stenotrophomonas maltophilia
atgtcctctgaattggctacgcagtcgtccagctccgagctcatcgtcgatgcgaccggcgtgggcaagtgctaccacgtgtacgagcgcccgtcgcaccggctcctgcaggggctgactggcgggcaccggcgctactaccaggaattctgggccctgcgcggtgctgacctgcatctggcacggggcgagacggtggggttgattggtcgcaatggatccggtaaatcgaccttcctgcagatgattgcaggtaccttgactcccaccgaaggcagcattgcggtgaaggggcgggttgctgcgctgcttgaactcgggagcggcttcaacgcggactttactggccgggaaaatgtgtacctcaacgctgccattctcggcctctcgaaagccgaggtggatgaaagcctcgaccgcattctgggatttgctgatatcggagccttcatcgaccagccaatccgcaattactccagtggcatggtggtgcgtctggcattcgccgtccaagcccaggtcaacccacagctgctgatcgtcgatgaggcgctctcagtgggtgatgcgaagttccaggcaaagtgcttcgcacggctgagccagctgaaggaagacggagcgtccatcctgctggtcagccattcggcggaccagatcgtgcagcactgcgaccgtgcgctgttgattgatggtgggcgagtgcagcagactggcaagcccaagcacgtcgtcaatgcttactacaacctgctgtttggaacaaatgattcgtcctcggctgatgggtccgggcagacgggggaaacctcgttgttggcgcaaaaagccttcagtggtgcgcagcagggttacgagcagcgggccaattacaatccccacgagttccgttggggtgatggtgccgcacgcatcgtcgatttcgacctgcgttcgcctaccacgctgtatccggccgtaatcgaatcgggaactgacctcaccctggccctgcgcatccacttcgagcgtgatgtgtaccgaccgattcttggcgtgacggtcaagaatgcggagggcgtggtggcctatggtaccaacaccgagtaccaaccgctgcccgatttcacgcaggcgggcagggccggtaccagcgtcgatgtgcaggttgccttccgttgcgccttggccgatggtgattatttcatctccgttggggtggctagccgtggcgaagaggatgtcattccacatgatcggcgttacgacagtatccacatcaaggtaatgcaggccagattcttcggatttagcgacctgggaatgcagttgtcgttgccagtggaggcaggtctgccatga

SEQ ID NO: 509311 - DNA, 834 bp, Stenotrophomonas maltophilia
atgagcgagtcacagcaagccatcaccgcgatccgcctcaccgggccgctggatgcattgctgcgccaccgcagcctgacctgggagctggcacgccgtgacattctcggtcgctaccgcggcgccagctttggcctgttgtggtcgctgatcagcccgttcctgatgctgatcatctacacgctggccttcggctatattctgaagtcacggtggccgggcacaagcggcaacatcgctgacttcgccatgttgctgttcgtgggattgatcgtccacggattcttcgccgaatgcttgacgcgcgcgcccactctcattactggtaatacaaatctggtcaagcggattgtgttcccgctgcaggtgctgccgtggaccatggtgttttccgcgctgttccatgcgttcaccaacaccatcgtgtttttggtactgaacttggtggtgcgcggtgaattgcatgccacggtgctgttccttccctttgtatacgcgccgctggccatcggtctgctgggcgtgggctggctgctgtcgtcgttaagcgtcttcctccgcgacatcacccagattaccggagtgctggcgacggcgatgctgttcctttcctcggccatcgttcctgtggaaacgctgccgtccaagtaccagttcgtgttcatgctcaatcccctcaccttcatcatcaatgaagcgcgtgatgtagctttctgggggcgccagcctgattggattggattggccacttatacggtcggtgcaaccatctttgctttcatgggctatgccgtgttccagaaaacccgtcgggggtttgccgatgtcctctga

SEQ ID NO: 509312 - DNA, 957 bp, Stenotrophomonas maltophilia
atgccccaggtctatgctgcgctctggaacggaacccattacctgatcacccgcaagcgggtcatcaacaactggtgggcgtccaattcggtgatggtactggctgcagaagcactggaagctgccctgaccgtcgccgtatcacccgcattgccgcgggacgaggactggcagcctgcgcttgcgctgctccaaagtgcccaggtcgccgccacatccgccggctatgcggacacgacccgaggccagggcatcctggtgaatctcaacaatgccgtccaggcgatgaaggcgtcaccgccgaatccggaccaggttggatccgctgtcacccacttcacccggagactgttccgtcaatccacgctgccagagcgcgtcaggaacctggcaaacacgttgccggtgttctcgccggattcatgggggcccgcgctgctgacggcacagaacctggcccgggacacccgcgcctgggcggcgcaggttcccatggttgtcgtcaaccaggctgggcaatggacactccctggcggccgcaggcatgacaacgagaccgaggaagatgctgcccgccgggagttcaaggaggaaaccggcatccccctcgacaccgtcaacttcccgcgggatctgctcgagccgaatcgacgctatgcattggtccgcttcaggactgtcgcccgggatctgcagaacatcgccgatgcagtctgcgccaacgtgcaggcaaggcccagtgtgatgcgcccgaccgccagtggggtgaccgattgggaaatcgatcatgcacagctggtggcggccgccgatcttggcagctacctgggcgcacgcgcggcgatcacaccacccaacacgcaggatttcgcgaccatgctgcagcagatgtccaggccctacagccagtcgattgactggtacgcctcgatggccggatccctgtcttccagctga

SEQ ID NO: 509313 - DNA, 354 bp, Stenotrophomonas maltophilia
atgaagcttctgatctatggcgctgtgctgctggctgcgctgtctgcggcgatcgcgagccggcatgtatccaaggccgacctggaactgcggacgtttcggaaggtgtccgacgctgaattcgctgtcatgcgcgaggaagccgttcgacttgtgcgcgagggcgtggtgcaggacgcgcggtacgcgggagagagatacttcgaggtcagttgcgacggcaagcccgtgatgctggtggacaactcgttggagcagcttgtgattgtgttgtatgcgggcagggagattgatgctccctgcgttgtgccgctcctctcgcattggtgcatgcggcttgtgccggaaccgtag

SEQ ID NO: 509314 - DNA, 1254 bp, Stenotrophomonas maltophilia
atgaaacaaggaagtctgtcggagtatttccaaggcgtcgccgccaagcggctgacggaggtggaagccgacgtccttaagtccaatcagcacgagttcaatggcgtcaaggcattacgccagatgttgggcgagcccgatcaacgggtgccttatccgtcgaagatgatgtacctgagcgatggccagcctgagccgatcgttgaggacgccgtattgacttggtacgacgcccggcagaaggctcgagaagagcgtggcgtgatgcgcgatgagtatcgcctctacttccccagcacgtcggtctctgccaatttcggcgtcggtgatgtgcttgtaatcgctcactgtcaggatggctcgcttctgctgattgttgcgaagggcggatcaagtatcggtcagcaaatcgaatggttgttcggtgtggatacgagtggatcgcgctacgttctcaaatctgaaaatgactttgataagcgggaacttggctttgcgtcgcgagttattttggagagtattggactcgacatcagctcacttgatgatagccatctcgatgaaatgatccgtcttttcggcgtttcgttcccaaccacactgcagttttccgcgttcagtcgttccaagtgcatagaggcagatccgctcgccgatccggatcacgctttgatggtgtggatggagaaggaggaacagcttttccggacgctggaaaagcacattgtttccaagcgattgacggacggtttctttaccaagaatggtgatccggacgtggattcatttgtctcttactctctttcggttcagaaccggaggaagagtcgcgtaggcttgacgctagagaatcatttagagcagatcttcaaggcatatcgacttagaaactctcgaacagcacgaactgagaatcgctcaaagcccgattttcttttccccggccaggacagctatctggaccgtggattccctgaggatcgactgctgatgctcggcgtcaaatcaacatgcaaagatcgctggcggcaagttctagcggaggctgatcgcatcgcttcgaagcatttgcttaccttggaagctccaatttctcagcaacagactgatgagatgcgttcaaagcagctcacactcgtaatccctagttcacttcaatcagctttcagcagctctcagcgtacagagctgatgagcttgtcggacttcatcgccttagccaagtcacatcagcgcgaatcaggacttctgtag

SEQ ID NO: 509315 - DNA, 1605 bp, Stenotrophomonas maltophilia
atgagatcaaaagtattcattaagacgcttaacggtaccgacaccatatcaagccttcttgaacatgatgaaatgaaacatgaaactgatcaggctggatcagattccgttattgtacggatagatttatgggcaagcgaggacggcacatcgcatcaaggcgaacttcacatatactacgaagatcgctggatcgatattggaaagtgtcttctattcttcggaagaagaagtggcacctatggaattgggacgaaagacccaatgaagtggcagaattttgttcgcgaattcggcgctcccgccacgattcttccgagaagatcgcagtatcagagaatagtttccgcactcggagttgagaccgcactcaaggtcctttcccagatcaatgatgttagcgcccttcgactaaccaacagagcttccaacaagctggcgagcttcatgaagctctcagagcttgtacacctactcagtgttgatacagaggcattcctagcttacacgacacttggcaagatcacagaacctagtgcccgcgccagcgagccaccgaagagaatactctgcgaaatgacgctcggaagtgcagtgtggccgcttgagttcagcttcccgacagacggattgaagggtagccaaccgatcaatgcgatcattgggccaaatggatcgggaaagacaagaaccttatgttcgctggccatgaattcacggaactctggtggcgattggccacgaaggacagtcctctatgttcaagacaaggaaggaccacgtagcctaaatgttcttcaaaaagggggccttgtaattgaactggcgtcccctccatggagcaacgtaaccaaaaagctagaagatatatcggcatcaatagttgaaggaatttcaagcatagaagtaattgccagattgttctctgatttgattgagattgaacgtctatacgtcccactgaaccctgaagcaagcggcccttcccaagggcatctgccattggacaaggatggagttgactacataagttacctccattttctgaatatatccagaagagacaagcaagtcctcctgaagcacggagctccgccattgatttctgacggaaaaggaaatctatttctcccaagctctggtgaatcaacaatcctctccctacttacttccatatttgttgaagcttctgacagcacgcttattctgattgacgaacccgagaccaatctgcaccctagctttatcaccatactgatgaacaagcttgccgacatcttgttggctacaaactctttggccgttgtggcgacacactccccattcgtagttagagagcttgacaagtgctctgtaaccatcatgaaaagagggggtgagagaggagcgcagatattcttcccaactctccagacccatggagcaagtgttgcggagatatcctcatatgtctttgatgatgacgattcgagaaagggatttgaaacagccattgaggcgatttcaataagaaattcgctatccaaggaagagacggttcggatggcgttcaagcagttcggtactgacggcgtcaacttcgctctgagccgggagctgaaatga

SEQ ID NO: 509316 - DNA, 972 bp, Stenotrophomonas maltophilia
atgagcgggatatctggacagcttactcccaaacgagagttagaagacgtaatcggccatatccacgcttacgcaatgaatggaaaacacaagaatgtagtagctgccaacatcagctggctgatcgacagatgctccgaatatcgcaatgattttcagtttgccaagttacgcttgaataagcccaagaaactgtcaacggatgaggcagccaacctgcagcgactctataaggctgccgcgttcgagggccagctcgaagtgagcaaaacgggttccttggtagcctgtccactttgcggaatcaggcagggagtaaccattgatcactatctcccgcaagataaagcactgtttcctcacttcagctacttctcatacaatctaattcccgcgtgcagcaactgccagggctgcaagggcgcagcctatccatcaagacaaattcgatacccactattcctgaagtcagacagaaagattcgccagcatgcgcgcagatctttaagccgaaaaatgggacgtaagttcagaattcagaattaccagcggttaattcatccatacttcgacaccagtattgatccgatgaacgtcgccttgaagtttgatttcgacaatatcgcgggtccacactctttccagttggtttatggcggccgcgctttgacgcctgccgcaaggttatttcaaaatcatgttcgacgattgaatattagagcgagaattcaacctgtggctaggcattgctgggaagcacttaagcgcactctccgagccacccccggcccttactcgcatagtgctgtgcgcgctcatatcgatcttctttatcatcactatcgagagctcgatggatccggagcaatctcgaccatgctttacaaggccatctcgctttccgcaccctgcgttgacatgcttgtggtcggtctcacgactcccccaccaaccccatccactacaaggtag

SEQ ID NO: 509317 - DNA, 147 bp, Stenotrophomonas maltophilia
ttggtgctaccggagatcgacatggcacagaacaatcagaaccagcagaacgagcagaaccagcagaaccagcagaaccaggatcagcgcaacgagcgcaatgagcagaaccagcaggaacagcgcaacgagcgcaatcagcgctga

SEQ ID NO: 509318 - DNA, 951 bp, Stenotrophomonas maltophilia
atgagggccttcagttacgaacgcgccaaatccccggccgaggccgccaaggccgtcgccggaaccgaaggcgcgaagttcctggccggagggaccaatctgctcgacctgatgaagctggaggtcgagacgccagcgcacctggtcgatgtgcaggacatcggcctggacaggatcgaacccaccgacgagggcggcctgcgcatcggcacgctggtcaccaacaccgcgctggcctcgcatgagcgcgtgcgccgcgactacgcggtgctgacccgcgcgatcgtggcaggcgcctccgggcagctgcgcaacaaagccaccaccggcggcaacctgctgcagcgcacgcgctgtccgtatttctatgaccccaatctgccctgcaacaagcgcctgcccggatccggctgcggcgcactcgaggggttctcccggcagatgggcgtgatcggcacctcggacagctgcatcgcgacctatccgggcgacatggcggtggccctgcgggtgctggacgcatcgatccagaccgtcagcgatgacggcagtacgcgcagcatcccgattgccgatttccatcgttcccccggcgacaggccgcagcaggacaacgtgctgcagcgcggtgagctgatcacccacgtcacgctgccagagcccctgggcggtcggcacgtctaccacaaggtacgtgaccgcgcgtcctatgcattcgcactggtgtcggtcgccgcggtcgtgcagcgagacggctcggcgcggttcgccttcggtggagttgcgccgaagccgtggcgcgtcgaggcagccgaaccgctgatgcgcgacggcgtaaaggccgcgacccggcaggtgttcgccggtgcccgtccgacgccggagaacgcgttcaagatcgcgctcgccgagcgcaccctcgcggcggtgctggtggaaggagagcgctga

SEQ ID NO: 509319 - DNA, 267 bp, Stenotrophomonas maltophilia
atgccatggaacccgccactcaagcgctggttgctgggcgcgttctccctgatcctctgcagcggaatgatcatgctgccggtcatcgtgctgactgttggaggcagcgctgcaggtcgcggcaaagggctgtatcagctgttcaccggcagcctcttcggcacattccttgtgggaacggtgctcgcctacggagcggccctgggtgcatggctgctgtttatcggaacccccaagctgctcttccccaagctgggctcgcgctag

SEQ ID NO: 509320 - DNA, 1047 bp, Stenotrophomonas maltophilia
atgttccgcaagaaggatcccggcaatagtcccaaggtcgagcagtcggtcgccaaggcggtcagctacgagatcaccgtggccgacatggcacgccgcagcgagcggcgcgcatggtgggtcgccacaggctcgttgctgatgtcgctcgcactggcgggcggctactactacatgctgccgctgaaggagaaggtgccgttcctggtgatggccgatgcctacacgggtaccgcgaccgtcgcgcgcctgagtggcaccttccaagggcaacagatcacgatgaacgaggctgtcaatcgcagcaacgtcgctcaatacgtgctggcgcgcgagtcatatgactcggcggtaatgggcctgcgcgactgggaacttgtgttcgtgatgtctaccgatgaggtgggccagggcatgaagcagcgctatgcaggaaacaatcctcagaatccctttgtcctgtacggccgaggtaaagcaattcgagtcaagattctcagcattacgccgctcggcgtgcagcccaatggcagctttcgcggtgcttccgttcgcatccagcgcagcctgctggacaagcgcactggcgcgtccaattacttggacaatcagctggtcacaatgcgttttgattacaacaagaatcttgcgctttccgagcaggatcgtgttctaaatccacttgccttccaggtcaccgagtaccgggttgacaatgattatgctcgcggtgtgccggtgccggatgacagcgcaatgcaggttcaggcgcagcaggccgcgcagcaggctcagggcatctacgatcccagtaatccggcagcggcgacgatgatcgacccggctaccgggcagccgatcccggttcctgccgccagccaagtgccgggccagccgctgcctggtcagccggtgcctggtcagccggtgccgggtcagccggtgccggggcaagcaatgccggggcaggccatgcccggacagccggccatgaggccggcgcagaacaattccaccggaactgctgatggagcaagcaaccgatga

SEQ ID NO: 509321 - DNA, 828 bp, Stenotrophomonas maltophilia
atgaatctcatttccgtggagaacgatatgagcaaggtgatcgaaaaccgcaagtcttgccgcggcgcgcgccgctcgcgttttgccacgctagcgctgggctgtgcactggcactttccatcaatccggtatcagccagcgggtggccggtcttcgatctttccaacctgctgcaatccatcgaggaattcgggctgatcgacaaacaatcagggcaggatctgattgagttccagaagcaggcggaacgctggagtgcaaccgctaagcagtatcagcaagcactggttacgattcaggcgcagatgcgtgccatcgggcttcccgaagggcaggcgctggtcaaagtggatccgaagtacatggtcgccgaaacctgtggcggctctggaatgaatttttctctctctggcctgatggcgacgttaggcttgagcggtgacgaggacctgaagaagcgtcagcagcagatctgcgtgaatatccgcatgatggaaaaccggaagtacaacgaatcgattgacttcctgaatgataccgtcccgagcatgcagaatgcattggtggacatcttcaatgcgcgcacgaggaataatgatcagggcacggtgcaaggcgctgacagcgagtcattgcgaacagcaaatgacttggcagtggcggcgcagaagtggcaagggcgtatggaatcctacgatgcctacatagaagtgatgaagaccaatcagaagctgattgccaagaccgcgcttaagggcgacccgaccacacgtttcgtgcgtgatatctccaaaactgcaatcctcgcaggcgcgctggatcaataa

SEQ ID NO: 509322 - DNA, 1137 bp, Stenotrophomonas maltophilia
atgatgaaatcggtcgccaactttgaattttctggtggtcttcacgaactgcttggatttgctacacgtgtccaatcaatcggcgacttcgtgttcttccgtctgatccttaatttcctgagggagaggatcagtgcattcggcctgcagctcatggaaaacatgatggcgtgggttctcggaatttcccttaccctgatgacactttgggtgctgattcagggttaccgcattgtgactgggcgcagccgagactcgatgatgatcctggtgacgaacatggcacgtgctgcgctgattgtgagcgtggcatccagcatgggcatgttcgggaccaatttgcatacgttctttacgaagacggttcgcgatgagatcactcatgtggtgaccaatacgaacaagtcgccggaagagcagatcgatgacaatctggcctatcttcaagttgcgttggctagcatcgatgccatcgatgtgatgtctgatccagaaatgatcgatgagaaggcccgggctatgtggtacgtcgggcttggtactgcaggtcctgcaatcacggcgggttcgatgctgctcttatatgagattgctatcgcgttgttcatcggattggggcctttgttcattctgtgcctgttgttcgaacagactaagtccttgttccagcgttggctcttttatggcatcggtacgctgttctcgatggcagtgctggccgcgatgacgagcatcgccctcgatatggtttatcgcgtcgcaaaagcattctggctggagtctgcgggtgcgaagctcattctgggtccagcgttcgagaacggcctgtccagccaggcgatgcagcaaggcgggatggggctgatcctaacgaccctgattctgactgcgcccccaatggccgccatgttcttccagggaactctgggtagcttcatggcatattcgcagataggcggtggcgccgcagccactccgagtgcggatggtcggccgccgggcagccatggtcaggaacgccccgcgagctcaaatgttgcttcaactggcagtgatccgggaaggatgagtggattcggcggtggcagtgcggtggctcatcagagtgatactggcaagtatggtgccgctcgatga

SEQ ID NO: 509323 - DNA, 1161 bp, Stenotrophomonas maltophilia
atgctcctgcacccgctctgccgcccggccctgcttgccgtttccctgtcactggcctgtgccgcgcatgcccagtccgtacccgagcgcaccaatcggaaccgcagtgccaccgatctggatgcggtgaaggtcaccgccgaacgcacccacgccgataccggcgcccttggtgatcgcgtgctgcgtgataccccgtttgcgatcaccgccgtgggccgcgagcagatcgagcagcgccaagtggtctcgctgggcgaagcgttcctgctcgacccttcggtcaccacccaggtcagcgcctatgccagtggctggagttcgccgatccgcaaccgtggcatcgacctgaacttcgacagctatcgggtcaatggcctgcaggtctcctcgtggggtaccgagtggccgctggaagtgatggaacaggtcgatctgctgaaaggcccgggcggattcctttacggtttcggtgcccccggtggcatcgtcaactacatcaccaagaagccgaccgacacgcccaccttctccgcccagctgggctggcgcgagcagggcatcgtcagcggcgggatggacgtcggcggccgcttcggcaacgagcagatgttcggttatcgtttcaacgcctaccgggaaaagggcgaaaccttcaacggtggccacgtcgatcgaaaggtgggcgcactgtcgctggacgcgcgcctgaacgacgcactgatctggaccttcgacggcgtgttccagtcacgcgacctgcgcgaggaatcgccgcagtactacttccgcggactgacctcgttgccacgaccgatcgccgggaattccggcaacagtgtccccggcacctactacgacactcgttccagcctgttgtcgacccgcttggactggcagatcaacagcgactggaaaaccagcctgagttatggcgtcaccacctcgtggaatgacgtcaacaagatcttcgcctacatcgattcgcccaatggcgacatgacgtcaacgtctatgaactgggtggcaagagcgagtggaagctggcgcaggcgatgctgcagggcagcttccacaccggtccgctgcagcatcaggtggtggcaggcatcagtcaccagaccgggctgggctgggaccgtccctacgaatggagcctga

SEQ ID NO: 509324 - DNA, 354 bp, Stenotrophomonas maltophilia
atgagacgttggggttataaggattacgtggggtcggtaagctctgatgtggaggagggcatgggtaagctgggttatgattttggtcaggctattctatttgcatattcttctctcgagttgaagttggaaaattttcccgaggaggagatttttgccctaacggcgcttcttgcttgcattttggataggggggctttgtcgctttatgaagctgaggatgagattcaatctaagtttgcaagaagttgcgcggacgacagcgtcgggaatgtctctcgagcgctgaatggagccgagctcgtagatttcttgcgcgacttggagcgagtaaaggcggcgctgagtgcatga

SEQ ID NO: 509325 - DNA, 543 bp, Stenotrophomonas maltophilia
atgaaggcgttcccttatgcagacagagaaacaatttcggtgctttctcaggcggttggagcgctggcgggtggggaccttgcacagatcactctcagcatgggaatcagcaaaaatgctgtggataataatcgacttctaaacacagtagagctggcccgtatcaaggagttgagcaacggcgacgtcgttcgtgaagctgagctcacagcagcagcgtgtgcccttgtcaaatgttcagcagggttcgcagaaggcagtgctgagagggccgagtgggcagccatcgaagcgttgggctcgaccccggaggcgctggacgatcggcagtggctgaaggtccaagtacagccgggctctctgtacacggcgggcaatggcgtggcaacccaaggacaactgttcgactatgcttttgcggactacctgtttgactggggctcgagaaatcaggcgggggtgcgtttggaggtctgcaggctattggcggagcagcgcaggcggctggtggtattgcgatatcaccatcgtgcgcgtcgataa

SEQ ID NO: 509326 - DNA, 129 bp, Stenotrophomonas maltophilia
atggaggtcgtcccgtgggtccacgtgcccaaggtgctggaatcgattggtcgcatggctgagtccgtctcgcggaccgagctggatggcgagctgatagcggttggcgactggggagtgcaaaagtga

SEQ ID NO: 509327 - DNA, 2193 bp, Stenotrophomonas maltophilia; identical to SEQ ID NO: 492739

SEQ ID NO: 509328 - DNA, 537 bp, Stenotrophomonas maltophilia; identical to SEQ ID NO: 494773

SEQ ID NO: 509329 - DNA, 768 bp, Stenotrophomonas maltophilia
gtgcgaatgtcccccggcgccggcctacggccgtcacctcctcctttacttcgcacacaacccccgctccctccgcgtgtcaggcatctaggcggcccaggcactggctctcgactatccgcaagccgagccgctgcgtgggtggcagttgccgtagacgcatgcgtggtcgagcgctgggggaagaggggcttgcgtgcgaatgtcccccggcgccggcctacggccgtcacctcctcctttacttcgcacacaacccccgctccctccgcgtgtcaggcatctaggcggcccaggcactggctctcgactatccgcaagccgagccgctgcgtgggtggcagttgccgtagacgcatgcgtggtcgagcgctgggggacgaggggcttgcgtgcgaatgtcccccggcgccggcctacggccgtcacctcctcctttacttcgcacacaagcccctcttcccccgcgtgtcaggcatccaggcgggccaggctgtggctctcgactatccgcaagccgtgcgctgcgtgggtggcaggcgtctggacaaagtaaaggaggaggcgaccgccgaaggcggacgacgggggacatttgtccagacgcctgccacccgcacagcggcccagaccttcgcggtggcagttgccgtagacgcaggcgtggtcgagcgccggagggagagggcatccgggcggctttggcactgctctcgaccgtccgcaagccgagccgctgcgcgggtggcaggcattttgacaaagtaa

SEQ ID NO: 509330 - DNA, 624 bp, Stenotrophomonas maltophilia; identical to SEQ ID NO: 508156

SEQ ID NO: 509331 - DNA, 273 bp, Stenotrophomonas maltophilia
atgcggcagcacctttctttcatcgaaccgttccgcttcacccagtgcgaggcgacgggaaagcgtggctattcctacagcgaagcccgacggttcttggctactcgcaagcgcgccggttggcacgttgcggtcaccagcgtttaccgctgcgcagagtgtaaccgctggcatctggcttcattgaaagcgcccaaagcacccgctgacgaggaccggcaaagagttccgcgcttcaacgcacacacctggttgcggagattgaacgcatga

SEQ ID NO: 509332 - DNA, 357 bp, Stenotrophomonas maltophilia; identical to SEQ ID NO: 507082

SEQ ID NO: 509333 - DNA, 1017 bp, Stenotrophomonas maltophilia
atgcggctgcgcgacgccgacaggttttccgacgaggtctgcaggttggccacgaccgaggtgaagcggttctggatcgcaccgaggtcggcgcgggtgctgttgatcgcacccagggccttgtcgacgatttccatcgcctgctgggcacccttcacggtgctgacgtccaggtcgctggcgtacttggcggccggcgcggccgtcgaggcggtgaaggtcggcgcggtagcgccggtccaggtgcccggggtcgcggtgatggccttgaacgagccatcggcgttgacgctgtccttgaccgaggtcagggtcacgccagcggtgccgttcacttccgcgaacacgccggtctcgccgatcttggcgttgatcgcggtcaccagtgcttcacgcgaggccttgccggtggcagcggcgtcggcgccctgcttgaccgagacatcggcaatggcaacgccattgatctgcaggccgctggtgctgaaatcagcgttggtgcccgggtcggccagggccagcgcgttggtatcgaacttggcgccgcccagggcgttggccttggcatcgatggtcttgtcgatggcgatggcctggccggcgttggcaccgacctggaacagctggctggagaacgaaccgtccagcagcttggtgccgttgaagtccgactgcttggcgacgcggtcgatttccgagaccagctgggtcacttcggcctgcagcgccttgcggtcgctggccgagttggtggcgttggaggcctgcaccgacagctcgcggacgcgctgcaggttgttgccgatttcggtcagcgaaccttcggcgacctgggccagcgagatgccgtcgttggcattgcggatggcgacgtcggtaccgcggatctgcgtgccgaagcgctcggagatcgccaggccggcggcgtcgtccttggcgctgttgatgcgcgaaccggaggacaggcgctggatggtggtagccagcgagctgccgctggtgctcaggttacgctga

SEQ ID NO: 509334 - DNA, 1470 bp, Stenotrophomonas maltophilia
atgacactccttaaaaaggctgcgggtccaagaatcgacgagtcagcaccctggagcggcgatccatttgagcgggagccagagggagagatgcttgctcgactgatcgcatccagtacagatgctccattggtgatctcacttcagtctccgtggggaagcgggaagaccgtatttctaagacgtctcgcccttcacatgaagatcgctaaaggaattcccacaattcgcatagatgcgtggaagaccgatgattgcgccgatccacttgtcgccatcattgccgaactttcgctgcatcttgaagatttcaggaagcacaatgaatcccttgcagagaggatcgatggctgtgtatcgcgccttgccaagttcggatccaagatcatgcttcccgcagcttcgatcgtcgccgaccttcatacaccgggaagcggcgacgtccttcgatccgcaggcgcgtttgcagagcgactacttgacatgcagaaggaccgaagctcagcagaaaaggactttagagatgttctagttgaggcaagatgcttggttactcatcaagagcgagaccgtatccctgctccaatactgctgatcattgacgagctcgatcgctgccgtccggatcacgcgatcaggacgcttgagcggatcaaacactactttgatgttcctggaatttccttcctcattgcaacggatcaaggaaatctcccagcggcggttcgatcggtatatggcgcccacgtggatggcgaactctaccttcggaagttcttcgactacgagttccacttgcgacaacctaagccggagatctactccacgcacctggtagccacgtgcatcactcctgaagaaaagcacgtattgcctagcgaaattcatcttccaaatggccgcgactttgagcatgcggtgctagccattcaatccgacgagaagggaaaacgcgtcctcaaaggcgagtacatggatgcatttccgcagttttcgaagacattctcgctgacgcttcgtgaccaagagcaagcaatcacgatgatcacagcattcatccatacgcgcgaatcggtgatggaagctgtaccattagtagactgcttcctggcatgtcttcgcttcgggcatcccgcctctttcaaggcattggtggatggctcgcgaaaaatccttctcatggacgcaaaggatgacgtcagtcaggtcacgaaccaaagattgcgccttcttccccattgggatgccttacagttacttgcaaggaacgcagtaattcccgacatgtcaagcgtcgacgatgaaattgagccccccactctttcagagcagattctagagagctatagaggacctagccgttcaagggagaaacgtttgccactactcttgctcgctgcgaggcttcacggtcgacagtttgatctttaccgatattcgacctccttcctgaggctgggcgccaactga

SEQ ID NO: 509335 - DNA, 852 bp, Stenotrophomonas maltophilia
atgagccgcgcacccgagccccccgcgcgaccgcagccgtcgcaggcgccgtccaccgacgaggtgctcgaccagcatcgcgacgccctgaaggagcgctttccgttgccggacccgcaggtgctccagcgtcgtcgcggcggccgcacggccagggttgtgctgcccacacttggactggtggtcaccgccctgctgctgatcgacccagcctggcaggtgcaggaccatcgcaccgccgtgggtgaacgtcgcgaactggatctggccgacggcagccacctgctgctcgacgccggcacccacctgcaggtccgtcgtcatctgcgttcgcggcaggtggtgctgatgcaggggcgcgcacgattcgaggtgcagcactcggggtggcgacgcttcgaggtggacgccgggccggtgcatgtacgcaactacggcacggtgttcgacgtggatcgccagggtgagctgagcgaagtgacgctctggcgcggcgacgtgggcgtgcgcgttgagggtggcaccagcgagcagcgcctggcacccgggcagcgcctgctggcccagcccgggtcgatctctccaccggaagcgatcgacccggaccaggccgactggacccatggccggctgcagttcgatcaactgccgctggccgaggtgctgcgggtcctgcaacgctaccacgaccgtccgatcgtgctggacgacccgacgctgggcccgctgaaagtctcgggcgtcttcgatgccgaccgcgccgagaccgccgtggcgttgttgccggacatcctgccggtacaggtgcatacggcaggcgatggcagcctgcatctgcgccgacgcgattga

SEQ ID NO: 509336 - DNA, 1188 bp, Stenotrophomonas maltophilia
atgatcctgattagattgtgcttcgtgctgctgatgcttatggtttcaggggacgccttggggcaggtcgccgaggtgaaggtaaccgggctattcaggccgagcgcgctgaatccgggcaacaccgagttcgagaacacaacccccagggacagctattgcagctggagacccgcggaatgtgagaagaagggcgcatatatcttcagcgtaggaggtggtgaactgtggaggaagtctggagatggagataacgactcgcgtcgtgacactacgtacgtccgtttcccaaagccgcgcgtcataacgctgaccgaagagaccagtggccgttcattttccgcgaagatcagcttcgtggccatcgcgctccgacttgactttaccaatggcgtggacccctggtactacggaatcagtggtggttgcacagcaattcgcgggggcggtggactggggtggtctcttgggggatgggctgtgcgtgacccctctgattcgaaggagtgcttcagcaacaggccgcggaactcgcgcaactacagataccgaaatgttggccttggcatcaatgtggagttgccacgcgcgaccacgctgttgaatggacgttacgttgcatccgaaagctggtcgacaggtggttcagaagctgacatcgacctcggtgacaacatcaccggcaccagcagcatccgaatgaacttcgtgttcgacgtgattcatcactttgaggtgaggttctcgagcgagtctcctgctgtgcggcttacgcccgatgggggctggtcgcagtggaccgatcacggtctggcgcccaagagactgcatcaggaactgccttttgtcctcacctcgtcgatggacttcagcatgaagctgcggtgcgagcatgatgcaggtgatcgatgtgggatcagaaaggtcgccgacggcacggtggtgccggtagacgtgggcgtaacgatcccgggcatgagcaacgttcgtgatggacaacccgcgcaggacacccccttgctaccggatgatgtgcgggcgccacgtttcgcgccggatggctatctgatgcaacggcgttcgactctgcaatttaccgctggccgtgacgcggtgacggagatgctgaagtcacctggctcgcattggcaaggcaacatgacggtggtgtttgatgcaaatccgtga

SEQ ID NO: 509337 - DNA, 948 bp, Stenotrophomonas maltophilia
atgcgtaccctctaccccgccatcgagccctaccgcgagttcaccctgccggtgagcgatctgcacaccctgcatatcgaagaatgcggcacgccagagggcatcccggtggtgtacctgcatggcggccccggcgctggcatctcgcccacccaccgccgcttcttcgacccggcacgttaccgcatcgtgctgatcgaccagcgcggcagcggccgctccaccccgtttggcgaactgcgtgacaacaccacgccggacctggtggccgacatcgagaaggtgcgcgagcacctcggcatcgagcgttggctggtctatggcggttcctggggctcgaccttgtcgctggcctacgcgcaggcccatcccgagcgtgccaccggcctgatcgtgcgtggtgtattcctcggccgcgagatggaaaaccgctggttcgccgaggccaacggcggtgcacgctggatcttcccggaacgctgggaccgctacgaggcccatattccggaaggcgaacgcagcgacatgattgcggcctactggacgcgcatggacagcgccgatgaggccacccgcatcgcagccgcgcaggcctggctgggctgggaggacaacgccgccaccctgcagcacgacgtggatgccgtgtccaccgatgatccgctggacacgctggccaaggcccgcatcgaagcgcactacttccgcaacggcatcttcctggagccggaccagctgctgcgcgacatcgaccgcatccgccacctgcccggcgtgatcgtgcagggccgctacgacatcatctgcccgccgcgcagcgcctgggacctggccaaggcctggccggaagccacgctggagatggtgacctccggccacagcgcgaacgagccggccacggtggatgcgctggtacgcgccacggatgcgttcgccgaccgcttctga

SEQ ID NO: 509338 - DNA, 294 bp, Stenotrophomonas maltophilia
gtgcgcggcgcggtgatcggcatcctcccgctgggcgatcgcttcgagttggttggcaagctctatgtgggcaatgagcggagttactggcgcgccggcagcgccaagccgtactgggtgaagacgaacgagatcaacgtgggcgtgggtgtgggtgcccgctattggttcaacgacgccatggccctgcgcctggatctggacaacctgggcaagagtgactaccgcgccgggccgagcaagggggagctgaaggtcagcgcgatcaatctggggcttcagtacaagttctga

SEQ ID NO: 509339 - DNA, 366 bp, Stenotrophomonas maltophilia
atgaacgcatcagatattccccctctgcgcgcccagtacgccccggccaatgccgaagagggcgaggcggcaaagcctgatcccaacaacctgatcaacctgctgcaccagattggccgcggtgccgcggccgacggccagccctggcccgagcgccatcaactgccgggccgctgcctggcgctggccgataccgatggcgccttggccggcctgcgcatcgtgaacgagatcctgctggccgccgagcgcgcccggcagaatggcggtccggagcattacgtgggcgaccgcgtgatggaagggttgaagctggccgcgttggcgttgaccaatcaggctatttatcgcctgcatccggagtaa

SEQ ID NO: 509340 - DNA, 915 bp, Stenotrophomonas maltophilia
atggatcattggaatgaaatccggatgttcctggcggtcgccgaaggcggcacggttcgtgcggcatcccacgcattgggactcaatcacgccacgataatccgaggcattgatcgacttgaaggagccttgaatacaaagctgttcgagcgactggcgtccggttatcgcttgaccgacgcagggaccgacatcctacaactggcaggacagatggccacggcatcttcccgtatcgaggcaagaatcttcgggcgtgaccaggagatctcgggctctttgaggctcacgcttcccgtgtccatcgcaaccggtttgttgatgccgacgctcgctgatttcaggcgcacttatccagacattgcattggagataatcagctccacgtcagtcgtgaatcttggcaaccgagaggcagatatcgccttgcgcgtagtgccggaaggaaagacgccacctggcaatctatatggcgcaaggctgtgcgagtttcatatggggtattacatccatcacgacatcgccagtagcccgtctgataaaatgccagcatggctacttggttatcctgagatggttcccaaggattggcagccagcggacgggatctgcatggccgaaacacctgttcgctttgcagagctgcaatcgaggctcgaggccgcgcgggcgggaatgggcattgctcatcttccatgcttcctgggagacgctgagcccatgctcgttcgggtaccgggaagcgaggcgatcttgtttggtcacgtctggctgctcacacatggcgatacgcggcgtaccacacgcgttcggttgctttgtgatcagatccgcggcgccatgaatgagtattcgacaagactggccggacgactggatccatcctccccttctctgctccggcatatccaatga

SEQ ID NO: 509341 - DNA, 750 bp, Stenotrophomonas maltophilia
gtgggcaagttggattcaaagattgccgttgttaccggagccgccagcggcatcggttttgcaattgcacagcgattcattgaggaaggggcgagagtctacctggccggccggcgagtggcggagcttcaggccgccgcagattctctgggtccaagcgcaacagccgttcaagccgatgtatcagactggaaaagtgtggaggccctgttccagactgtggccagtgaacagggcaagattgatgtcgttgttgcaaatgcgggtgttgttgcggtgagtctgctcaaggatgcgacgcagtcgcacttcgacaggatctttgacatcaacgccaagggaacctacttcaccctgaagaacgcgattccggtcatgcgtgatggtggctcgattatactgctctcgtccgccatggcggtgaaggggattcccggttatggcgtgtacaacgcaagcaaggccgcggtgcgatcgttggcgcgaagcgcagccgcagaactgcgggaaagtggcattcgagtcaacagcctgagcccggggcctatcgatactcccattatcgagtcgctggtgtcctcgctcgaggaggctgaggagtatcgcaagaacagtgcggcgtatgtgccgctcgctcgactggggcggccggaggagctggccgctgcggcgttgttcctggcttcatcggaaagcagctactcgacgggaatcgacctggtggtcgatggtggcttgacgcagatctga

SEQ ID NO: 509342 - DNA, 1500 bp, Stenotrophomonas maltophilia
atgcgcaagttgattgaggttacccttgccagcgccatcggcctggtactgggtagtacatccgccttcggccaatccaccgaccgtgtgtggacgcggggcatgaccaacaacgaacagtacagcagtttcatcgtcaagtatcgcgacggaaccagcaagcgcacctccgccgaagctgcgcgtgcagcgatggagaagcggctgggaatccagcagcgcagcaagcgctcgatcggtgcctcgtcggctgcggcagtgatcctccagcgtcgcatgagtggtggtgccgatgtggtcagtgcggacagggagctggatcgaccggacgccgaactactgatgcagcggatcgctgaagatccggatgtcgaatatgtgcagcccaactacatgatgcgcgcgtccgcgacaccgaacgatccgcgctacgctgagcagtggcactacagcaaccagaccagtggagcacgtctgccggcggcctgggatcgttcgaccggcaggggtgtggtggttgcagttgttgactcgggctacctcaacaacaacgacctgcagggaaacctgattcccggcttcgacatgatttcgtccacacgaccgttcagcaacctgcaatgcagaatgagtcagctcgaaccagggtgtggtggatccgacgatggcgatgggcgggacgcggacgcatttgacgcgtcgaatattgtgcacggcacgcatgtcgcgggaacagtcgccgcgcttaccaacaaccggatcggtgtggccggtgtcgcccacgacgcgaaggtcactccggttcgtgcgctgggcaatcagggggtgggggtttcatccgatatcattgatgccatgctctggagtgcggggattgcggttcccgatgttccatccaacagcaatcctgcggaggtgatcaacctcagccttggggggcgccgcgaatgctcgccggccgagcaggatgccatcgacgagatactggccagaggcacgatcattgtggctgcggccggcaacgagaacagcgatgtatcctcgtttgcgccggcaaactgcaatggcgtaatcgcggttgccgcgaacgatcaaggcggccgtcgggcgttctactccaactatggggcgggcatcgatatcacggcgcccgggggggagacctggtcgtgccgtgagtccgcgggcgagtttctgccgcttgcctcgccgccggacggggccaactgcgcgccgacgcgccagcacccggaacaaggcgtcctatcgacggtgggcaacaacgccttcgacttcatgtccggaacatcgatggccgcgccgcatgtctcgggcatcattgcgctgatgcagtccgtggcgccggtgccgaagacgtctgcgcaagtcagggaaattctccagcgcaccgcgcgtccgattgcaccgggtgattgcccgggaggttgcggtgcaggaatcgtcgacggaggagaggcagtgaaggctgcgggcaactga

SEQ ID NO: 509343 - DNA, 1710 bp, Stenotrophomonas maltophilia
atggacgaagccgaacgactgcttgaactcgaccgcctgcacctgctcgacacgccgccagagcctgttttcgatgcgatcgtcgccgccgcccgtgccgccaccggcatgaccatggggctgatctcggtagtggccgacgagcggcagtggttcaaggccaacatcgggctggaaggcgtcagcgagaccgcacgcgagatttcgttctgcacgcatgccatccagcaggacacgctgttcgagattcccgacgcgcgccaggacccgcgcttcgccagcaatccgctggtcaccggtggcccacgcatccgccattacgccggcatctcactcggctcggcgcacggcgcacgcatcggaacactgtgcctgctcgacccgatgcccggcgtgctgtcgccttcgcaacgcgaactgatggtgcatctggcccgggtcaccacccaggtactggagcagcgcagcacgctgatggcgcaggtcggccaggccaaggccctgcatcgcgaattgaagcgcagcgaggacttcctggagcgcaccaaccgcgcggcgcgggtgggtggctgggaaatggacctggccagcaacgaggtccgctggacccgcgagaccaagcagattcacggcgtgcgcagcaacttcgaaccaacgctcgaaaccgcgctgtcgttctatcgcgaggacagccgcaacatcatccgcacagcggtgcagcgctgcatcgatgaaggcatctcctgggaagtgcagttgccgatgaccaccgccgatgaacgggccatctggacccgtgtggtcggcggccggcagcagatcgatgggcggcctcggctggtcggcgccatccaggacatcaccgaggagcgcgccgcgctggatgcactggaggccagcgaaacccgctaccggcggctgttccactacagccttggcctgatctgcacgcacacgctggatggcgtgctgacctcggtgaacccggcagccgtgcagtcgctgggattcgatgagagctacatgatcgggcgcagcctgtgcgacctgatgccgccggagaagcgggccgcgttcaaggcctatcttgatcgcatcgcagtcaaccacaccgatgccggcgtcatcgagctgatcgccgccgatggtacccggcatttctgggcgtatcacaacgtgctcgacaacgaggccaccccaccctacgtgctcggccatgcgcaggacgtcacggcgctgcggatgcaggaacagcagttgcgcgagatgtccttcaaggatccactcacccagagctacaaccgccgcttcctgccccgcctggacgaactgatcgaccagccctgggcctgcctgatgttcgatctggatcatttcaagcagatcaacgacacccagggccatgcgcggggtgacacggtgctggtcgagttcgccgccttcctgcgctcgccgctgggcgcggcggagaacgtggtgcgcatgggcggcgacgaattcatggtggtgctgaccgcaccggaaccgggtcgattggccgcgctcgagcagtggtatgcgcagcaggctgcacagtcacccacaccgttctcactgggcgcgacccatcacagccccggcgagtcggtggccgataccctgcagcgtgccgacagccgcctgtatcgcgagcgcgcacgcgtgcgccagcatccacggccggcgccctga

SEQ ID NO: 509344 - DNA, 1290 bp, Stenotrophomonas maltophilia
atgccatgggactggcaaaagctggcgatgcacttggcacgtcgtcttcagctggtgcgttccacgcttgatgtggttgcgccggtaccaggtgccggttttgttaagagagcttcgtttgtaaagtttcttgagtcctcagaaaagaccagctgcgcgttcgtactgggaatgctctatgcaaggctagctgcggagcgatggttcacgttcaacggcatgggggacgtcctcaagcatttctggcattactcgattctgcataacccggcggtttccctccaagggctgacgccagcaccaaatacggggaaccctgactttgttttgggcagtaatctgggcaagtggtccacactcgagtcgaagggcaccttcggcacggctgagttcaacaagctgcggaatggtttgaagcaagccaacaaattcacgggcatttccatcgcttggcccggagctgctcctgtcatgcagcccattggtgaacgttcctgcactctgacctgtttctccggggtcgacgagctgcagtcgattcagttgacgcttcccccgctacttcctattccggcggctcccgcagcgctgggagccgcaccggagccggtgatcttcgcacccgcggctgaatttgtgcgttacctcgacgccttggggcagctggactgccatcgaggtgagacctccatagtcgagaccgacggagcaggcatcgactggtatcgctcggtgcatgtgccgggcttccttttcggtgtatcgccagagcatcgcaatgtcgaagagcaactgaaatgggccgtggctgccctgggtttgatcatgccggtggtcgcaaagctgagaagcggcgagatgacaggtcgtgctttgcggaccgtcgtgactaggctactttacgaagttggtcagcgtgctgccaacattgatctgagcgaagccgaatcgttggcgtggagtgggcttgtcgagcacctgcaggaattgatacaggccgatgcgcaggcgccgagttggactatggtcctcgaccatgtctggaacgccccagtgttgagcggcttcaattcaggcatgctcggatcaccgatcaccactctggacggcttgtggaactatctggacaagaaggtgacacctctgcgtctcaaaaaggcaagggaagcaacgcttgagaggagatttgatgcgcccggcgcgggaggaactggagtcacgacgcacggcctgttcgtgaaagagtgcagggaggccgcaccaaaggggtcgcgcgtgccgcgcctttga

SEQ ID NO: 509345 - DNA, 468 bp, Stenotrophomonas maltophilia
atgtacctccgcgggctgagaggtctgcacatcggcacctggtgccagaatcaggtcatgctttggctgcagcggcaaccggcggggcgtatccactccttctggctcgctcctgccgatgcccacgaacagaaccaggcacgacgcagccgcttctatgaacagttcggcagccagatcgactggactgtcccggggatagatgggcgatcccaagtgcagcccacatctgacctccacgcgctggacgaggttcgcggggtcaaggccatggacatcggcaccgcactcgcgaaggcctattcgcgcatcgaacttctggagctgcaactgagcggaaaccgcaggcagttcgcaaaccacgacaaggaagtgcaacaggcttccgctcggggcgctttccgctgctggggcagcattgctttcgcgctgatcctgggggcgatagtctttctgaagttgcggtaa

SEQ ID NO: 509346 - DNA, 198 bp, Stenotrophomonas maltophilia
gtggctatttggggtcgtgagcagcaaatgatcgattacaagggcgggattggtagcgagaaggttggaaacctgattcgaggtgtggcgaaaggcaatccttccgggttgctctatcatgaggcatcgagttcgatgtttggtgagataaactcgtacaccggctaccagttgacaaatttcggcgaatggaaatga

SEQ ID NO: 509347 - DNA, 312 bp, Stenotrophomonas maltophilia
ttggttgcgcacttttctcgcagccccaagctctacgagctagcaagcgatatatccgaggatttgagtgatcttcctgaggatgcgaggcgtattgcaagggagtacctcatctctacttatgggttcagctttgaattctttatggacagggcctcggccaaggctcgtgcaattctgaagcgtggacgagtcaggaataaggcggattttcgcgtattgtctgacttcctgacggataacgtaattgatgagggagtggcgcgggttgcggagaagctgcttgatgactactcgaaagatctgaagtag

SEQ ID NO: 509348 - DNA, 279 bp, Stenotrophomonas maltophilia
atggagcgattgccaacctcaacaagcaggtggcgatggctcgggcttgctggccgatgccacgagctgcgactgaaacggcagtggctggacttggtggctgaccagccgatcgtctatcggcttgacgcgcagggccaattgaacagaagtcaggagaacgatgacgcgttcacgctcagcgagtccggcacgctgttgcggtatcgccacgcatgggagcagcggcgtgagctttacgtggtgtatgcgcgcgggagtgctgggccctgcccctga

SEQ ID NO: 509349 - DNA, 2649 bp, Stenotrophomonas maltophilia
atgaattctgccagggacaggcgggagggaaaggctccccgtagcacttatcgcagcccacgactttgctcgctcatcgtgggcgtagcgcttatgttgggagccggattccacgtgtcggcccaagatggactctttagctaccaagaatatgagaagcggataaagagcgcgcaatctgtcaccgccatctctgcggacgaggtgttcggcgatcgaacctcggggttcgacggcagcactgagtttctcattgaagatgtctccattcctggcaacttcgaccttccggtcagcattgcccgacgcttcggggtggaagcggtcaaccgagggtctcgctacagcgaggccaaaggactgacactctttgatgattgggaaatcgtcgttccctatatgtcaggcgtttggaccaagggtgctgggtggattactggcgatcgaggcgctcagaccacacagcgctgctcggtcaataaagcgcccttcctattggagacttggggctataccgatatcggcttcggcattgacgtgaagtggcatggtggaaatggcgaggagcttctgattgctgatgacccgtcctatgccacagcaccaggcctggaggcgcccaagtggatgactacctccagagcccggttcagttgtttggctgcaacacgcaacggttatccgggcgaggcgtttatcgggcacacccctgatggaaagaagtacttcttcgactggggcgtggaaaggccctatgcgagggctgagttcaataacggtgccggtagtcgttcggtggagcgtaagcgggtttatcttctggcctcgcgtgtggaggatcgctatgggaactgggtatcctacagctacaacggggataagctaaccaagatcgagtccagcgacggtcgccggattgacctgagttacgatggcgacggtcgggtagccactgtgacggccaatgggcgggtttggcgatatgcctatttgggggatgcggacggcaatgacggcggcttgtcccgcgtcacgcttcccgatggctccgcttggacctacagtcatcgcgggcgtcttcagtccagctttccttaccgcaaagccgacgacgatggtggttgtgagattcgcgccggcagagaaccccctcccacgcagatgactgtggtctctccgtcgggggcccggggcgtgttcgacttcgaaatggagctgtttattcgctccgacccctgccaaggactggcgccctcccactaccaggtttggtctttgaagcggcgtaccatcaccgggcccggcctgccaccaatggtgagtacgcgaaactacaacctgcagctgccgggaggcggtcgttggtccagtctgacgaggccggatgggacgcagattcgagagcgctatggcgctgacccaggattggatgagcgaaagctccttcaaaagcaggttttggatgcggcaggccaggtgcaacgcgaagagttttcgacctacctgttcggctctgcaactgggccgtttgctgaacgaattgggcgctcgattagtattcagtcgggccaattccttgcaggtacgctcagtgcgctgagcgaaagccaatcctctcaggatggtgatacctatcgcgtgatcttcagtgacttcaatcgtagtgcacgtccaggacgtgtgacttacaccggtccttctggaactaaggccgaggtgagggagtatctggatacggccagcccttgggtccaggatcaggtgctgagcgtcaaggaggccgcctccgggaagaccaccacccggtacacctacgacgccctggccaagccgaatgccgtctatcgtgctggggcattgctgcagagcgttacttatgcctcggacggcacgatcagcaacgtgcgtgacgggaaagggaacgagacgcacatccaggactggtacagaggagtgccacggttggtcatcaatccggatggcaccaccaaccgcatgacggcagacgggaacgggtggatcacctcgactacggacgaactgcagaggaccacgtcctatctgcacgatccgatggggcgtgtgcgggaagtccaaccaccggtcgatgagaaccagtgggccaagacaaccatctcgttccggcagatctcagctgatgaatacggcctctcggcggggcactggagggtcgataacactcaaggagcgcgccgccaggaaacctatctcgacgcgctttggcagccccgtctggtgcacgaatacgatgcaagcgacatggctggaacccagcggtgggtcaggagcagttacgacagcgaaggtcgccttacgttcacttcctatccctcaagggatagcaatgtggcgactggcacctggaccgagtacgacgcacttggaaggagaacctcttcctctcaggacagtgagcagggcctgctgatcaccaccattgcctacggtatcaatgccacgactacgacgattgacccgctaggccaccagacgatcactcggtttgatgcctttgatggaccggattatgagaagcctgcacagatcatccgggccgatggcagcaaagtcagcattaaacgaaatgcttttggacttacgacggaagtagcccagtccgctaactga

SEQ ID NO: 509350 - DNA, 4023 bp, Stenotrophomonas maltophilia
atggaattcgtgaacactggaaaactgcgcatggccgcggttctgctgggccttcttctttcctttatctgcccgtccgtacgcgcccaggtatggatcgagttggtgggcccagctcagcgatcttatacggcacctgccacgtatcagttgcaaatcaagagcggaaatacaggcagtggcggcaaatatgaatatctttccgagccacagctgacacgaaatggagtcgtgatctcccggctctcggagggtatatacactgagagcggattatcggcaggtacatataactatgtattcagtgcgttcggtgtgcgcaacatcaatggcgatgaagtttccaggcggctgatctcgcccaccattacgattacagtagcggcgccaccaactcctttcgatggggctgagtatgtctcggcaagttggccggggtctggcgacagaggtacgcccttcagcggcacggtcacattccggaatacagggaacacgacgtggcgatcagggggcggctatcgactgggacaggccgaggcctacgttcttgacgctaccctgctgggaattgccgaagtttctgttcctcacgacgtagccccgggtgggacggtgacgttctcattcaatggcaccgccgccaaagagaatggacctaacaccattcagtggcagatgaatcgcaatggtgttcgctttggaagcaccagcaatgagcaaaaatttgagacgacaggaaggctcaatcgtggcgtgatgtatcaacaggaagttccgaccagcatggaggccgggcggacctatcgcgtcaagctgaagttcaccaacacgggtaacacgacgtggtcggcgtcggcgggctatgcattggggtcctggaatcccaatgacaatctccgatggggcagggcgcgggttccaatgccgaatgatgtcattccacagctgcctgcgttctttgaattcgatgtggtagctccttcattgccaggtgtctacagcttccaatggcggttgctggaagagggcaaagagtggtttggtcgggaaagcgacaatgtccaggtcacggtcaacgggccgccgtccaaggtaatcggcaacatcgatggtgtcaccagcgacggtcagattcgaggctgggcatgctcgacgggcattgattcgtcgattgacattcatgtctacaccggtggagccgccggcagtggcgggacgatcttcctgaccggcaaggccgacttggcgagtgagccggctgtggctacgacctgcaaggcgggaggcaatcatcgcttctcgcttccaatgagcaacgagcagcgccgccagcgtgccggacaaccgatctacgtccatggaatatcccccgtcggacaacccaacaacaccattgacggctcgggctcctttgcggttcctgcggccccctctggcactgtgtccgcgtctccggccatgtgccagattgcaacggatgcccagacctgcaacatcaccttggcctggtcggccacggattcacgcgcagagctaaaacgtgatggcggctcgttggtaggcactggagccagcggctccgttgttgtgccaatcggcgccggaacgagccactttacgctctcggttgccggtgatgcggttgccacagcagttgccaccgccaaggctgctcctaccgtgcccgtcaatccagacaatccggccccaacggtggcccggcgatacgtctacgacgacaacctccggctgtgcaaggtcatcgaacctgagaccggggcgaccgtgtttggctacgatgcggccgggaacattgcctggagcgcgatagggctggatttgcccagcctgaccgagtgtaaccgtgacgcgccccaggttgcggctcgccgtgtttcacgccactacgatagcagcaatcgcctacagaccgtggtctaccccgatggactgggtgatcagcagcttgagtacacgcctacaggtcagctgaagaccgaaagggtcttcaatcaggatcgggtaccggtggtgaccacccgtacctataactcaatcgggtcggtgatcagtcagagtcgtgtggtgggcagcgccagcgcccggtccctggcatttggctacgaccctatggggcaacacatccgtacggactatcccgatggctactccgtccggcagtccttgaacgccttgggccagcccgtacagctgcaagatggcaccggcgccgtgctcgccagcaacgtcgcctacgctcccagtggcgaaaccaccgcgctgacctacggcaacggcatcgtacgtagcgtaaccgagaacgcgcgacagttgaccagccgcatcgtcgacggtggtgtgatcgatctgagctacagctatgacgcagcaggaaacatcacccagatccgcgatggcgtgcgcggcgactccgggacgatcagcctgggctacgaccgcctcgaccggctgattcaagccaatgctccggcctatggtggcaatgggcaatacacgttcggctatgacacgctggacaacatcgtctcgatgcgattgccgggaaagcgggagcgtacgttccactacgacgcccgcaatcgcctggagttgctgcgggaccccggtggcaatggcgtctctggattctcctatgacgcggcaggcaatctggcaatccgtaacggccagacgttcacctacgacgtgggtggtcggctccgtgccgcagggaatgtgcagaagtacttctatgacggcgcaggactgcgcgcatccgcatcgggcagttcaggaagttcaggcggcacaccactcatcccggggctggaggaaccgatcacagttccgctggacgggaggccgatccagcttcctgtggaaggaggggcgtccgagcttttcgtagacgcatcagacattccagatcgcacctggcagtacctggtgggcggggagctgatcgaatccacccaaggcggggagacttccgactacatctacctgggcaagcgactgctagcgattcgcaccagctcttcagctggtgcaactctcacctaccttcatcacgacgcgctcaacaccttggcggccaccagtggcgccaatggtgcggctctaactcgtcacttctggtcgccgtatggcgaggcagacgccgcacccgctgcaatgattcctggctactcgggtcaccttgtagacgtagacacgggactggtctacatggggcggcgctactacgacccgcagctggcgaggttcatttctcccgatccgttggcatccagcacctccggggtggcaaacttcaatcggtatcggtacgcgagcaacaacccattccgattctcggatcccacgggcgcgtgcgatcaggcgactgggtcccacatgtgcaatggcaaggggtttgccggagataggctcagcaccacgcagtacacggccggaggcattcccaagtacgaccctggtgcccccgcacctgcggaggcggtcaaggcgacaggactggatgccgtcgcggaatacttcgaggaacggaacttcttcattgggcaggggagcttgaccgatttcggcgccgtgtcggaagcgatcgtcgttcccctgatgaactctccaacgggatcaacggctgcaggcggcctcaagcttgcctccgccatggtggtactgcgcgaagccaatgcagccaagggctttgggaatctttcacgagctgctgaatttggggttatgccctacaatgcactgcgaagggctgttgcgggaacggggctcaagagtcaccatctgcttgagaagaggtttgccgaagtggtggggcagaagcaatctcagatgctctccgtcgcagttacggaagcggagcatcagccgtttacgaatgcgtggcggagagctttcccatatggaactaactacaggcagttgagtgctgatcaggttatgaacaaggcccgcgaaatttatgcaaattacccagctttccttaaggaattaggcctttaa

SEQ ID NO: 509351 - DNA, 168 bp, Stenotrophomonas maltophilia
atgacgcaggccctcaaggattccatcgggtcgaccgccgaatcggtgtccgtctcaattgaagatgtgcagccgtcagcgtggatgggcgagatcttcgagaagaatatcgtcaggaacaagcacttgctatacaagcggccaggttatgccgacatccccgaatga

SEQ ID NO: 509352 - DNA, 495 bp, Stenotrophomonas maltophilia
atgccgacatccccgaatgatctgggcggggtcgttgcaggcaactcgtctggtgacccggtggatgaggtagatgagtatgcccatctctgggatgggtctgatcccggctggacgttgaaccacacccgatggcactccgccgaactggccttggtgttcgcggcgtcgggcccttccatcaaggagattgtcgccttgcggagtgcgctaccgacttacgcggctcgatccgctgccgagatcctgtccgcactcagagggtgtgaacgcgtcgccctcggtactcatcccgcgttcgaagcgaggggaatcgcggaccgctgccgaggcgtgggcctcgctgtcgagtgggtagcgcgggacgtctcccgttacgtgctcagcaacaacgttgccggatcctggctgatcattgaggacgacgaacttgctaggtcggtctatgaccgggcgatgcgtgaaggcatccgagtggttcacaccgacgcgtga

SEQ ID NO: 509353 - DNA, 3732 bp, Stenotrophomonas maltophilia
atgtccaagcgcaagcccaagaagcctcatcgacgcacgtttcaggcgtccaagcacccgctcagcgacatggagaaggcgctcaatcgtagtatcgaggccgttcgcgctcacctgatttcagtgaatgcgatcgacgcgtatctcgccctgctcatttccgaactgtggttgcccaacctttcggcgcaggcccgccaagcggtggcgctgtcggtctttgtctccctcaaggcgcctgcctttggcgaggggagcctgaccacctacgcgcacttcagcggcttcatcagccgcttgtacgagttgttgcccacgcttcccatgtttgacgactacgtgccggagttggactggggccaggtgcgcgttgtctttgaaggcaagacctatcgcctcatgtacggcggtgccttcgagcgcatgcccgatttcatcgagacctttcgcctggctagtaccggaggcggagcggggcgcgtggacatgcatgccgcgctgacggtgcatgagcaattgttggacaacattgcgcagccgaaggcggttagcggcctaggctcgggacaccttgaggtgccgccggaaaccttctgggtacaggcgctgaaggtgttgcgggcgattccagggggcaccgccaatctggccccgagtccagctctcgtcgctcgccccggtgccatcccaccgctggacgcggccacgttcatgaccaaatttatgacgggcaagctgttgcccttcgcttggctggagttggaaggccagcgcttcccgctcagcccgcggaatctttgcgccgtggtgatccagcactgggaagagcgcgacgcccggccaagcgctcagctggaacgcgacacggcgacgcaagccgcccggttcctcgaagcgcgctttcgaccgagggacatcatcccggggccgctgcgtgtgtcgcttcgccacgcaaagctgcccgatctgcaggtcggcgcattgctcagcacgcgagaggcgctttggctggtcgtcttggtcgatgtccggcgtgcgaaagacttgcctgcgtccgagcagcggcttcgcgccttgatagatgaagatgacggattggtggcgcaagaactggctaccggccagatcatgcacatgccgcttcagggacgctcgcccgatacggtgcgcctgctcgcggtcatcgtcgcccccatcgccggcggcgcctccgtcgtgataccacattcgtccgacattcggaccttattcctagtggatttggtgtcgatcgtcgagtcggtcgagcgatcgcaggacttggacgactacttcgccttcgtcgatgccaatgaggagtcggcctcgcccttcaccggtccgatggataaatttgccgcgtatcgacagtcccacggcgtgctcatcagcggcgcgattcgtccgacaatgatcatgctcgatccgcacggcgggtcgaactttcggtatgaggcacttcgaagtttctgggcttcggcaccgcgccggtttccggacgacgcccccaccacgtggaaggtgaagcctgccgacaagactttgcggcagctgacccatcgcggccgcccacagctatcgtggtgcactgacgggaccggtcccaccttgcatttcatgctcgatgtcgatgcacaagacatcgaggttcggaacggcggcttgttggagttgttcatccactgcgtagcggatgcatggaatgaacgggcggagttgtttcccacgaatctgttcgcacagcaacgcatcgtgacccattgtcgcgccaacctggaacgcttgccggcggaaagcggctgcgagccctcgaccgaagcgctgctcaccacttggagaattcgcgagcgcaatgccgattcgctcatcctcgaagtcgaagtcgacctttcccaagtcgcggcggacctggaagatgcctcggatgcccggttcgaggcgttttgcgccggcgaatggctccggggcgcgtgcgtattgttaggaatccccttcgacggacaggtacagcgcgcattggcggcaaccgctgaccgaacgccgcgcttcaccctttctcaccgggagcgcacggtagacgtgcccgattaccccgacccgatattggcggaacccgaacacttcaagctagcccggcgcgacctcgcgatggagttccgggccgaaggcatcgcacctggccgctacgaactcaagccagccaaagcggtgatcgataagattcgcgatcgctatcgggccttggtgcacgatcacattcgccagtttgatcggcaggcattcgtgcacctggcggtcgagcagttcgatcacctggtcgccgagtacgaccgcgagagcacacggcttcgcgtgagcctgacgcacgacgtggactttgatcgaaccgagcaacaagccaaggcgcacgaagaattcatccagatgacgcgaaatgttcgctacctgctggagttggcgtacagtcggggcgaatcggggggcacggtgcccacggtagaagagtggcaacgactggttgcgcaggttgattggctgctggtgctgtatggagccagcgacaccttgcataacgaactggaagtcggcggcgtcgacgtggacagcgacttcatccccgaagtcttctacgacggcaacgatgaccggtcctatcagcaagaagccgcaaacgagctgctggagctcggcgctgacgaagaccgcgtcgcgttgatggacgaggcgcaaaggcaacggctcaatgcggctttcgtgagcagcgtcggtttttccttggccaccctgttgcccgtgttggcggtgctgggtcggtgggcaagcgccaaggagggagcggtgccgctagcgtggtcgtacgaggggtccaaggcagacgtcctggcgaccctcaatgcgcacgttccggtgccggtgccactggccgaggtggaagcggcgttgaactttctgaccctcgacgccagccgcgtctgcttgctcaccggtgtcgataaggaaacagacgatgtgccgatctgggagcaccgcaagcgcgcgcaccgctacggcattcgccccatactgcgggtcgggcaggaccggctattgtggggtgcagccgctgcgcatcgcgccttaggcatctggaatggctcgttctcggatggctacccgccggctgactttgggtatccggagattgaagctgtcgctgaggcaatcaagaagaacatcgaacatgacctggaaatgcgcgctgtcgaagtgtttggccggcatctgacgtacgtcgagcatggcgtcgacttccatcggcggttcaagcgagaaggcttcgaggacgtcggcgatttcgacgtactggcctaccacccggaagacaaccggtggttcatggtcgagtgcaagtacaacaagccggcgttttgcatcaaggatatgcgacgccttcgcgaggaagtcttcggtaagacgccgacgacggggcagctagcgaagatcgcacgtcggcgcgcgttcctggagacccatgcggcacgactgctcgagctattgaagtggcccaaggggcccgttgtcgagcagcggatcgaggacttgtacgtgtgcccgcgaatcttcccatttatgcgccgcacgccgcgtccggtgctcactgagttcgttcgtctgggcaagctcgacgcactggtacgcagtcgcctggatggtggagcggagccctgtgggtag

SEQ ID NO: 509354 - DNA, 180 bp, Stenotrophomonas maltophilia
atgatcgtgaagagcgcggggcaaggggtatgtaagaccactttcggcaagcgcggtttcgacttcatactgatcgcgcagcagggcttacagctggacccgttactgcgcggcctttacgaagagcacgtacacgttcggcagacatcaatcttgcgcagcaagacgaaaccaatctag

SEQ ID NO: 509355 - DNA, 375 bp, Stenotrophomonas maltophilia
atgattgagttcgacccgcaccaccgtattgacctgaccggcccttgggccagtttctctttcctcggtgatcgcctgatcactcctgaaggtcgcgagctgcttcccgaggatctggcctggctgtcgttcaccacctgccaagcggaggaatggcgccggatgatggaagctgcccgctcggcctcatcgatcgacagttccagaaacaggctcaatcggagcgacggcatttgccagcgtcctgcgactgtcgtcaatctgcgggatgttgtgagcccacgcaaacagcgttcggcggtagcgatggctggacccgacgccgagccgccagcagcagtcctgccggtaccggggcccaagcgccgccagtga

SEQ ID NO: 509356 - DNA, 246 bp, Stenotrophomonas maltophilia
atgccctgcatcgcggcctttttcgtttctgcggtccattgccaaggcgcgcgccaggcgggctaccagggattttccgtgattgcccatcaagcccggctggcccccgccgataccttcatcagcgctggctgggcttgcccaaccgccccctccggggtcgccttcacgcccctccagggctggaaaaccccggaaaaacagcctccggcaacgaattacggctccaacggaattcacggctaa

SEQ ID NO: 509357 - DNA, 2379 bp, Stenotrophomonas maltophilia
atgccgtggatcaacaacctgaaactgatgccgaagctgctgctgaccttcggtgtcctcctgctggtgatgctgctgcagggcatcgtcgcctatcgcggcctgcactcgctgaacaacgtcaccaccgagttggccggttcacgcatggagagcatccgcatggcgggcgaaatgcgcggcatgctcggtgagtaccgcaacgccgcgtaccagcagctgatccgcgccagcgacgacgtcaaggccgacgcacgcaagcagaccgttgaactgcgagagagcatggacaagtcgatcaagggctacccggcactggtcgacaatgcacagcagaagaagctgttcgacaccttcgccaaagaatggaaggacgccctggcctcctatgacagcgtcaccgagatgctggaactggacctgccggacgacgccatcgataccttcgtcggcgagacccgcaccaagcaccgtaaggccgcttcggcgctggaagcgttgatcgccgaagacaaccgcctcgcccgcgcctcgcgcgaagaggccgaatccacctactccgcctcggccgtgctgaccgtgatcgccctgctgggcggcgccgcactcggcctggtgctggtgtggctgtttgcccgtgccctggtcggcagcgtgcgcggcgccgtctcggttgccaacgatgtggccggcggcaagctcgatggccacatcgacgtcagccgccaggacgaggtgggcgaactgatgcaggcgatgcagcgcatgcagcgcgacctgcgcgagcgcatcgagaccgaccaggccgtcgcccgcgagaacctgcgcatccgtaccgcgctggattacagctcgaccggcgtgtacctgaccgacaccagcaacaccatcgtctacagcaaccgcgccctgcaacagaccctgagccagtaccaggacgaagtccgccgtgacctgccggacttcgacgcgcaggcctcgctgatcggcaagccggtcaccgtgctggagcatcgcggcgagatggaccagaccctgctgggcaacctgaaagcacacggtgtcgcccgtcgcccgatgcagtacggcgatgcccagttcgcccaggtggtctcgaccatccgcaatgaaggcggcgacaccgtcggctacgtggtggaatggcgcgaccgcacccaggaagcgcaggtcgaagccgaagtggcccgcgtgatcgcccaggccgccgctggcgacctgtccggccgcatcgatgccaccgacaaggaaggcttcttcctgcagctggcccagcagatcaacggcctgctggacgccaacgccggcagcatcgaacagatctccgggctgcttgccgcactgtcgcagggtgacctgaccgtgcgcatgcacggcgactaccagggtgtgttcgcccgcatgcgcgacgacgccaacgcgaccgccgcgcagctgagcgagatcgtcacccgcatcaagcagtccagtcgtgcgatcagctcggccgccggcgagatcgcatcgggcaacagcgacctgtcgcgccgcaccgagcagcaggccgccaacctggaagaaaccgccgcctcgatggaggagctgacctccaccgtgcgccagaacgccgaacatgcccgccaggccaaccagctcgccatcggcgcgcatggcgtcgcctcgcagggcggtgaagtcgtcggccaggtggtcaccaccatgtcggccatcgaagcctcgtcgaagaagatcgccgagatcatcagcgtcatcgacggcatcgccttccagaccaacatcctggcgctgaacgccgcagtggaagccgcccgtgccggtgaacagggccgcggcttcgccgtggtcgccagcgaagtgcgtactctcgcccagcgctcggccgcggccgccaaggagatcaagggcctgatcgacgactccgtcggcaaggtcaacgacggctcggcgctggtgcacaaggccggcgcgaccatgggcgagatcgtcgcctcggtgcagcgcgtgaccgacatcatggccgagatctccgcggcttcgcaggaacagagtgctggcatcgagcaggtcaaccagaccgtggtgcagatggacgaaaccacccagcagaatgctgcgctggtggaagaagccaccgccgccgcacgtgcgatggaagaacaggccggccacctcagcgaagcggtgtcgatcttcgtggtggacgaagccgagaccgtggttgccccgcgcatcaccgctgccccagccccgcgtgctgccgcaccggccgcaccggccccgatcgccccgccggcccgccgcaccgccggtggtcgtccgatggcgaccgaactggccgacggagactggcaggagttctga

SEQ ID NO: 509358 - DNA, 1410 bp, Stenotrophomonas maltophilia
atgaccaccaccacgccggcagacctccccgccatcctgcacaccctgcgcagcgcgtggcaggcccagcggccctcgcttgaccagcgcgagaatgacctgcgccgcctgcgcgaggcgttgaagccgcgtctggacgaaatggcccacgccatcgccgaggacttcggccatcgcgcccacgtcgaatcgaagctggccgatggcatgagcgtgctgtcggccatcgaccacctgcgccgtcacctgcggcgctggtcgaagccgcagcacgtcggcgccggctggcggctgtggccggcgcgcgcgcaactgcggccgacgccgctgggcgtggtcggggtgatctcgccctggaattacccggttacgctggcgctggtgccgctggccaccgcgattgccgccggcaaccatgtgttgttgaagccttcggaacacacgccacgcaccagtgcattcctggccgatctgctggccagtgtgttcccgcccgatcgcgtggcggtggtgcagggtggggcggatgtggcggcggcggtgtcctcgctgccgctggaccatctgctgttcaccggctcgacggcggttggccgcaaggtgatggcggccgcggccaagcatctggtaccggtcacgctggagctgggcggcaagtcgccggccatcgtctgccgcgattttccgctggaaaaggccgctgcgcggctggccaccggcaagtggttcaacgcagggcagacctgcatcgcgccggattacgtgctgatcgacaccgtgcgccagcgtgagttcgtgcaggcgctgcagcagcaggtacgcgagcgctacggcgatttcagcaccgccgatgactacacgcgcatcatcaacgaaggacagtaccggcgcctgcagggttacctggcgcaggcgcgcgaacgcggagtaccggtcattccgctggctcaggtggatgaggcgcgcaccgaccgcgagcgtctgctggtgccgaccgtggtgctggacccgccggacgacctggacctgatgcgcgaggagatcttcgggcctatcctgccggtgcgcgcctacccggacctggagacggcgctggccgacgtgctgtcccgagaccgcccgctggcgctgtatcccttcagccacgacacggcgacggtggagcgcatcctcggccaggtggtggccggtggggtgacggtgaatgacacgctgctgcacttcgccgccgacgggttgccgttcggcggcgtgggcgccagcggcatgggtgcgtaccacgggcgggccgggttcgatgcgatgagcaagcggctgccggtgctgtggcagtcgcgctgggcggccagcgaccggctgcggccgccgtattcgaagattgccgggttgttgaagctgctgcttcggtag

SEQ ID NO: 509359 - DNA, 1815 bp, Stenotrophomonas maltophilia
atgaccaccttcgacagcaccaagctgccactgaaagatctcctcaaggacatcgttgatggcaagatccagctcccggacttccagcgcggctgggtctgggacgatgagcacgtgcgcagcctgctggtcagccttggccgttcattcccggtcggcgcggtcatgctgctagagacgggtggcgcggtgcgcttccaggtgcgtcctgttgagaacgtcccgcatgaagggctgctgcctccggagaagctgattctggacgggcagcagcgcctgacgacgctcacccaggtactcaagctgtccggtccggtgaagaccacgacggacaaaggcaagccggtcgatcgccactactacatccatattcccaccgcattggcggggccagaccgcctggacgaggcgatcattgccaccgacggcacgcgtcaacaacgcagtgacttcggccgcaggctggaccgggatctttccacacgcgaactggagtgccagcaggagtacttcccgtgctcggaaattctggaaggcatggggtggcttcaggatctctatcagtacaacgccgctgcggtaccgcagttcttcgagttcaagaagcaggtgctcgatgcctacaacgagtatcagattccactcatcgtgcttaagaaggaaaccagcaaggaagctgtgtgtctggtcttcgagaaggtcaatacaggcggcgttccgctgtcggtatttgagctggtcaccgctacctatgccgccgatggctacaacctgcgcgacgattggtatggcagccagcaacgcggtgttgtttcccggcagaagcggctggcaagggaaccgctcctgaagagcgtggagaacaccgatttcctgcaggccgtgaccatgctgcatacgctggagaagcgacgcgccgatctggccgccggaaagagcggcaagcaggtgacacccgtgagcgccaaacgcgcctcggtgctggagcttccactggaagcctatcagcgctgggcggacgtggtggagcagggcttcatacgtgccgccaaattcctgcgccatgagtgctttacctccccgcgtgacctgccctaccgcacccagttggcaccgctggctgcggtactggcgctgatcggtgcggatgagcggtggcgcgaaccgcagacccaccagaagttggctcagtggtactggtgcggcgtgctcggtgaactgtatggcggcgcggtggaaacgcgcattgccaatgatgtggaggagttgctgggctggattgagcaggacgggcagcagccacgaaccatctctgatgccgctttccagatcgaccggcttgcttcccttgcatcacgattgagtgccgcctacaagggcatcaacgtgctggtgctgcgcgagggtgcacaggatctgtactggaaggggcgaatccgcgaccttgaggccgacgagatcgcattggacattcaccacatctttccgcgtgactggtgcgaaaaacaggacattccgcgccgtcgctatgactcgatcatcaacaagacgccgatctcctacagggcgaatcgcatgattggtggctcagcaccttctctctatctgtccgcactgcagtcgcacaagcaggtgcagcttgacgacgcggaaatggacgcattgctggcaagccatcgaattcccgctgccgtgctgcgcgctgatgatttcgaggggctttggaaccagcgtcagttggctctgttggctctgattgaaggtgcaatgggcaagaaggcgactgcgcaggtcgaagctgaagccctggcgtga

SEQ ID NO: 509360 - DNA, 1371 bp, Stenotrophomonas maltophilia
gtgagtgaactcccggtcggttgggaagccggaagattcggcgacatcgttagcattatccgcggagtcaccttccccgcatcctcaaaaatatatgagcggtcagatgatgtcatcgcatgccttcgaacctcacacattcaggacaagctgacctgggacaacatctattttattcccaagcatttcgtgcgaaaggaagagcagattacactgcgaaacgacatcttgatgtcgatggcaaatagctcaaacctcgttggcaaggtctgcataaacgaatctgacagcgcagcctgttttggggcattcctcgcagcaattcgctgcaatgagattaacttcaagtacgtctactatttcctgagatccgctgatacacaagcgaaactacgtgcaggcgcaagccaaacggttaacattgcaaacatatctgtcaatgagcttgagaaactagagatcccgcttccgcccctcgcagagcagcagcgcatcgcacagaagctggatgctctgctggagaaggcggacaccctcaaagcaggcatcaacgccatcgcggcacgtctcaagaaactccgccaatctatcgtggctgcggccgtcgccgaccaaatcgccatagagccgcgcggtaaccacgggtatagtgccactgggagtaaacaagcggcggtcattctagaagaactgtgcacattgatcaccagtggctccagaggctggggagccaactatgccgattcaggcgcagtatttattcgatctcaagacataaatagggacatgctggacctttcgggcgttgcatatgtcgccttgccagaatcaagtgaaggaaagcggacgcgggtaaagaatcaagacatccttgtcaccatcacgggcgcaaatgtcggaaaggtggctagagtcactcatgaaattccagaagcttatgtaagtcagcatgtcgcgctgatcagactcaaggatccaacactagccccactcattgagatgtacttgaaggacgtgaaaaccgggcgcgcgtctttgctcgaccttgcatatggcggaggtaagcccggcttaaatctgtccaatctgcgtaatttggctgtgcccgctacgtgtatccgcaatagtgccaagatcatacttcgtgtcgagcagttcttcgcagtagccgatcaactggaagccaaggttgcgacggccagacaacgcatcgacgccctgacccaaagcatcctcgccaaggccttccgcggtgaactggtcccacaggatcccaacgacgaaccagccagcgtactgctcgagcgcatccgcgcccagcgcgctgctgcacctaaacccaagcgtggtcgcaaggccgcaaaaaactga

SEQ ID NO: 509361 - DNA, 1539 bp, Stenotrophomonas maltophilia
atgaaccataacgatatcgtccagaaactctggaacctctgcgacgtcctgcgcgacgatggcatcaactacagtgactacgtcaccgaactggtgctgctgctgttcctgaaaatggaatacgagcaggtgcagaacaacgaagcgttcgaacacaagcttcccgcaggctgccggtggcctgacctcacagccctgtcaggtaccaagctgctgaccggctacaagcgcatgctgctcgatctcagccagagcgatgatctgatgatcgcggccatctacgccgatgcgcagaccagcctgaaggagccgcggcatctggagacgctgatcaaggccctgaatggcctggattggttcagcgcacgcgaggatggcctgggcgacctgtacgaaggtctcctgcagaagaacgcgaatgagaccaagtctggcgcgggacagtacttcaccccgcgcgcgttgatcgactcgatcatccgctgcctgaggccacagccgggtgagaccattcaagaccctgcggcaggtaccgccggcttcctgattgccgcagatgggtacatcaaatcgcagaccgatgatctgtacaccctgacggacaaggagcgccgcttccagcgccgcaaggcctttgtcggcatggagctcgtacccggcacccgtcgcctggcgctgatgaactgcctgctgcatggcatggatggcgagggcgaaggcgtagtgcagctgggcaacagcctgggcaatgcaggcgcaggactggccaaggtggacatcatcctttccaacccgccgttcggtacggccaagggcggtggcggccccacgcgcgacgatctgacctatcgcaccagcaacaagcagctggccttcctgcagcacatctatcgcgggctcaagccgggcggtcgtgcggcggtggtgctgccggacaacgtgctttttgaatccggcgtcggtaccgagatccgccgcgacctgatggagaagtgcaatctgcatacgctgctgcgcctgcccaccggcattttctacgcgcagggcgtaaagaccaatgtgctgttcttccagaagggtacggcagagaatccgcgccaggaaacggggtgcacgaccgctacgtgggtgtatgacctgcgcagcaacatgcccagcttcggcaagcggacgccgtttggtcccgtgcacttgaagccgtttgaagaggcttacggagtagacgcaaatgggcgcagcccgcgagtggatgagggcgaggaaggccggttccgctgcttcacgcgcgatcagatcaaggagcgcggtgattcgttggacatcacgtggctgaaggatgctgacagcgtggatgcgggcaatctgcctgcgccggaagtgctggcggctgaggcgatggcggagctgtcggaggcgctgagggaactggatgcgttgatgcaggcgcttggcgctggggatgaggcgttggagcagaagcggttgttggctgaggtgatgggttttgaaattgcatctagcgaggtgggtggtgagtga

SEQ ID NO: 509362 - DNA, 1194 bp, Stenotrophomonas maltophilia
atgagctccccgcactggatctggcagcatcccgagtggccgcactttcactggaaagcggacgagcttgctgtggaccttcgcgagtgccagcaagcctatggccaagtgctgggcatggcgggagccgttgggggtgacacacaatgcgagcaggcgctgaatgccctcctctccagtattgtcacctcttcagagatcgagggcgagcatctggatgtcggctcggtccggtcatcgctggcgcgtcacctgggcatggtggatgccacaccacgccgcaccactgcccgaagcgagggactggccgagctgatgctggacgccacgggccacgcgcaagagcccttggatcttccgcgcttgatgcgttggcatcactggttgtttcccgacgaggaaggcgccctgctccccaaccgcatccggatagggcagcttcgcggcgaggctcccatgcaggtggtctccggcaggatcgatcgaccacgcgtgcacttcgaggccccgccccgccagggcttggagtcgcagttggatgcgttcctcgactggttcaacagctcacgccaggacgcgacactcgacccgctgctgcgtgctggtatcacccacctctggttcgtcacactgcacccgttcgacgacggaaacggcaggctgaccagggcattgaccgatctggccctggctcagtcacaaccgcaggcaatccgttttcatgcgctctcggccgccattctggccgaccgcaacggctactacctcagcctggagacgacccagaaaggtggattggacatcaccgcctggctgcgctggttcctggagactctccacgccagcctgacccaggcggtgcagcgcatcgacaaggttctggccaaggcacgctactggcaggtgcatcacgagcatccgctgtccggcgaacagaccaaggtactgaatcgtctgctggacggcggagaacgaggattcgcactgggcatcagtgccagccagtaccaggcggtggccaaggtctccaaggcgaccgccacccgccacctggccgatctgctggaaaaaggctgcttgcgccgcctgcccggcggaggccgcagcacccgctacgacatcaactggccgacatcggacgcgtccctgcctgcccttactgcatctacggaagacagcacccatgaaccataa

SEQ ID NO: 509363 - DNA, 3486 bp, Stenotrophomonas maltophilia
atggatacgcgtgtgactgccgacagcaactttcacttcctgcaggaacacgatcccgtcttcctgaagatggcgatgatggccgaacaggtcttcgccagtgatcccaacacgacgctgatcaagctgaggcaacttggcgaggccatcgcacaggaccttgccgcccgtgccgccattcgtcgggattcccagaccagtcaagccagcctgttgtatcagttgggccgtgaactgcaattggatccgaaggtgcaagacctgttccgggtccttcgtgtcgagggcaacaaggcaacgcacgaatttgccacccagcatcgtgaagccatggacggcctcaaagtcgcgcgggaactggcgatctggtaccaccgtgcttttggcaacaacgcggcccagttcaagccgggcccgttcctcccccccaaggatcctgcagcacccctgcgtgagatccagcatcaggtcgtccaactgcaagccgagctggacgccgcgcgtcagcagcacgatcagagcaaggccctgattgacctgaaagagcgcgaggtacaactcaatgcagaattggctgaggctatggatgccgaggcccgggagctcgcggcagcagtcgctcagcgcgaacaggaactacatcagctccgggcagagttcgagcaacgtgtagcggaccttcaagcttccgtcggggtcgcaacaagcgcgacgcagcaggttgcccggagcacacagcggtccagcgccagcttcgagctgagcgaggatctcacccgcatcctgattgaccagcagcttcgcgatgcgggatgggaagccgactcgcttgaactcacctacgcgaaaggcgtccgtccggagaagggccgcaacttggccattgcggaatggccaacctctgtacctcatgccaatgctgactatgtgctcttcatcggtctgacgccggttgccatcgttgaggccaagcgcaaggggatcaatgtcgccgatcgcattcctcaagccgagcgctatgcgcgcgacctgaccgctgagggtggcgtcgaaatggcgtgggccggttcaggctcgcatgctggctgggaggacggccagggtggaacgttccaggtacccttggcattcgcctgcaatggacgcccattcgtcaagcaacttgccgagcagtcgggcgtctggttccgcgatcttcgctcgccctccaatctgcggcgggcgctgcacggtttccatacaccagcggatattcttgaccagctcaagcgtgaccgtgccaaagcagaggcggagctcgaacaagaaggcatgagctaccttcgcctgcgcgactaccagctgcatgcgatccgtgccgtggaggaggccctcgctacaggtgagcgcaactgtctgttggctatggccaccggcaccggcaagacacgcaccatgatcggattgatctaccggttgcttaagagcgagcgattcaatcgcatcctgttcctggtggatcgctcagcactaggcacacaggccagtgaagcaatggccgagatgacgctggaacagaatcagacactggcccagatctacaacctcgacgggttggacgacacgcgaactgccgacgaaacccgggttcaggtcgccactgtgcaggcgatggtaaggcgcatcttccagtcggacacgccgccagccatcggaaccttcgattgcattgtggttgacgaagcccaccgcggctacaccctcgaccaggacatgaccgagggtgagctggccgtgcgcgaccatgtgcagtacctgtcgcagtatcgccgggtcctggactactttgatgcctgccgaattggtctgacagcgaccccggccaagcacaccaccgaaattttcggaaagcccatctacacctacagctatcgggaagctgtagctgacgattggctgatcgaccacgagcccccgatccgtttcgaaacactgctcagccgcaacggcatccatttcgacagtggagatcaggtcagtgtggtcaacatccacacaggcgaagtggataccgcggagctggaggacgagcttgatttcaatatcgagtcgttcaaccgtcatgtcattacacccaattttgatcgggtcgtctgtgagcagcttgccaaggaactggatcctgatggcgaggagaagacgctgatcttctgtgtcagcaagaagcacgcagagcacgtcaagaaccggctggatgaagcactgaaggccatgcatggcgatcagtacaatcaggcgagcgtcgcggtcattgtcggggatagcgacaaggtcgatcagctcattcgttgcttcaagaatgagcgctatcccaatatcgcaattaccgttgatttgctgaccaccggcatcgacgtgcccaccatcagcaatctggtcttcatgcgtcgggtccgctcgcgcatcctctatgaacagatgaaggggcgcgcgacccgtcgctgtgatgagatcggcaagaccgtattccgcatcttcgatccggtggatctgtatgccgcccttgaagacgtggacaccatgaaaccgctcgtgaaggacccgaacgtcagtatcgagcaactgattggtgagctcggccatgaagcgagcttcagcgcacccggcaatgatggcggaagtcacgcggatgatgcgctggcccagctgagccaacgcatcatgcgcgtgctgcgccaggccgagcacaaggctgagcgcaggagagacgtacgcgagaagctcgatgcgctggaggtcgaatggggtgtgccgcctgcacagctgcataagcatctacatggactgggcacacgtgaggcggctgcgttcctgaagcttcattccaaacttccgcaacagctgcaggaagtgaaccagctgttgggaaccgagcgttaccccatcattgccgagcatcaagacgaactgctctcacgcgagcagagctatggcgtgaatgaggctccggaggactatctggacagcttcaacgcgttcattcgggatcagatcaaccaatccgcggccttgagtgtcatcgtcaaccggccgcgagacctgacccgggcacagttgaaggaagttcgcctgctgctggaccagaatggctacagtgaggcgcatctgcggggcgcctggcgtgacagcacccagcatgaaatcgcagccagcatcatcggccacatccggcgcgcggcattgggggaggcgcttgtacccttcgaacagcgcgtggagcgggcaatgcagggcatctacgcccagcgggcgtggactctggtgcagcgcaagtggctggcccggctagcgcagcagttggtgcacgaagtcgtcatgggccgtgaggatgtccagcgggtcttcatcggggatggcggcgcgccgcagcttgatcgcctgctggaaggcaggctggaccatgtgctcgacaccttgggcgaaacagtctgggaacaggcaggttga

SEQ ID NO: 509364 - DNA, 894 bp, Stenotrophomonas maltophilia
atggaccgtttcgaggcgatgcgggcctttgcccgggtggtggaaaccggcagcttcacccgcgccgcgcagaccctgcagatcagccgcaccacggccacccagctggtgcagcagctggaggcgcacctgcggctgcgcctgctcaaccgcaccacgcgccgggtcagcgtcaccgccgatggcgcggcctattacccgcgcatcgcccgcctgctggccgagctggaagaggtggaggccgggctgggcgacgcggccacccagccgcgcggacgcctgcgggtcgatgtgcccgggccgtacgcgcgcttgcggctggtgccggcgttgccggatttccaggcgcgctacccggagatccagctggacatcggcgtgagtgaccgcgaggtcgatgtcatcgccgacaacgtcgactgcgtgatccgcggcggcaccccggccgatccggcactggtggcgcggccgcttggcgcgctgccgatcgccttccatgccagcccgggctatgtgcagcgctttggcctgccgaccgacccgcgcgcgctggaaggaccggaccaccacatggtcggcttcctcagcccgcgcagtggccgggcgcgggtgttcagcgcacagcgcggcgatgagcgcgtcgaggtgcagggccgctacacggtcggcttcgacgacggcaacgcctatctggccgcggcgctggcggggctgggcgtggtcgcgttgcccagctacatggccgaaccgcacgtggcgcgtggcgagctgctgccggtgctgcaggactggcagctgccgccaatgccgatgcatgtgatgttcccgccgaaccggcacatgagccagcggctgcgggtgttcattgattgggtggtggaggcgttggcgtga

SEQ ID NO: 509365 - DNA, 1572 bp, Stenotrophomonas maltophilia
atgaacacaatcgaggaagtgagacaacgactgaaccaagcgctggaagatactcggcttgccgacttctacggtatccgccgacaggtaaggggaagaggtaacaaccacgggggactcttccccaaggtaggcgaggccttgaactatgtattccatcgaggaggccgggaagaacttcagttcaacattggttttgaggaaggtgaccttttccgctacggcgtagcgttcggcttgcagcccggacagagcctaccggatccggtaaagcagctggccagccgcattgatgcgttcaacagcatccttcctgggatgccgtcattgtctgcttacgaaatctggattcatcgtggagacgggagtgagtccagacttcctgctgggccaataccggccagcgaagtgatcaacggcaacttcatattctttggcgttaaagagtatgtgggtccagccggcgtgaacgaatcggcagtgcagcgcgccgtcgccacgctagtgaatatcctgcccctttatgaagaagtcgagcgctacgtttccgatgaggtcccagtgcaggggcggacgaaggctagcagtcgctacgcagcccggattgcctacaacagcatggggtggcgtagaccggcaggcgcagatgatgtggttgagagcggatcaagctaccggagcgagtacggcttcggccatgaagactggctttttcgcgacgaatggcagctcggtggctggcgatacgcgtttgttcaaggtgtgaatcgcagcaggaagcgtctgctcaagcgaggcgaggtatttgaccttgagctcttcgttctttcgtcacacggccggtcaatggtgtgcgagattcgagacgtggaggttctaagcgatcagcaatcagcagatgccgttgacgcctatgtcaaaaatggatggcttgccacaatgaagcaagaggtggaggacgcaaacggcaacgctgccgcgctcgatcctgaccttccggagcagatactcaacatacgtttccggacgacgaacgtaaggcgtatcgacgctcgcgagccaattcccagctggcacccggcgcatagtttgacgcgctattcgctatatggagtggagacaccgctacccgataagcctgcaagatgggcaggacgtaagggtgtacccgaactcccggactccggtgaacggcagcgtaagctccaagcgggaatggtcacctactctccagaacatcagaagatgcaacgactcttggaagatcgcttgaaacttcgctatcccggtgcggatatcgcctttgaggaagacttcattgacgtcaagcttcgaacggatgacaagctcatactctatgaggtcaagtcagacctcagaccattgagcgcgatccgtcaggcgctcggccagctcctcgagtacgcgtatcacccgagacgcacgcacgatctagagccttcattggtcatcgtggggcgtcggccattggtaggagaagacaaggacttctttgagcgcatacgcactcagttcggcctaccaatcagttacgagttcgtggagctctag

SEQ ID NO: 509366 - DNA, 654 bp, Stenotrophomonas maltophilia
atgggaaagggcaagcatgggttgcaggtgttcgatgagagcggaagctctttggtcgaggtcgggccgcatgttgtggtggatcgccccgaatttggcgctgcaataggctccatcgccacagcttgggctcaagccgaggtgaatcttctctgcctactcgccgtacttatcaatacaacgccggagctggtgaagagttctctcaaaaaacatcgttcggcaaagtcggcttccgaagcggcacgaaagattgctacagagacccttgatggcgcagctcttcaagatgtagttgagctgctgagtgcactggataaggttcgggatgctcggaaccgagttcagcacgacgtttgggcgcgaaaggcaaccgatagcgaacggctctatagagtgcattctgaccagtacctcgctttggccctgaagcttctagacgtagaaaggatgaacgcccctgcagcggccgcaattgaagttgccacgagcttcgccgatgcggtttcggagggttactcagtttccgatctcaacgagatcgctgacgacatagattcagtcagcaagcgtctactgacagcgatgttcagtaatcgaatttgccaattgaaggcacttggccaggtagatccttcatcaggatcgatctga

SEQ ID NO: 509367 - DNA, 231 bp, Stenotrophomonas maltophilia
atgtgcgatatctgtgacatcgctgcgagaacggctgcagaaaagcatgcagcgttccggtcggctgaacttaagggacatggcagggcggcgcatggtcgcgatgctggtcggagaaagaagaactctgaagacaatgcagagcgcgatgaggaggccgcctggaatcatatctatgatgaaacctataaccgggtgttcaagcagaaccacccgaaaaaaggttcatga

SEQ ID NO: 509368 - DNA, 450 bp, Stenotrophomonas maltophilia
atgccgatactctttcatgatggaaagaatgaaatctacaaggcctattccggcggcgcggcgtggaattcagatgagatcatcgcgccggggacgccgtataccaaatggataaagagccattgcaacactgaggccttcatcacgggattgttcgaagcggccatggcgatcaagccatacgcagaggcgcaaatgacgctcgctgactacaaaagtagcgatgagatcagcctcatcgttctcaaagggctgcaccaatggcgaaaacatcccaaagggcccggttcgatatttgggatgcatgtgaccttcgggctggatggctacatatggcatgtcaatgcgcttctcgatcggaaccgccaagtcggtaagttcatggggccttgtacgcgcggcgagtcggtcacagccaaggaccacgacggatggacgatcgtcaaatag

SEQ ID NO: 509369 - DNA, 1122 bp, Stenotrophomonas maltophilia
atgcgcttgctgactcttttccctgccctgttgctgctcgccgcgctgcctgccagtgccgatgcgctgcgctgcggcgagtaccgcagcgtcgatgacggcatggccctggtgttcaccacccacagcagcggctaccgcgacaacggcatcggtgagccggagccgctgtgggtcgatcgcagtgcggcacagacgcgcctggtcatgctcgacgatggcgtggcggagccgatccggatcagcgccgatgggcggcgcatcgaggacagcgtgacggtggtctacaccctgcgccagtcccgggcctgcaccgccgaacccggcgcggtggccggcagctgccgcgctgctggcagctactgcatggtgcagctgccaacggcctcgcccagccaggcccggcgcgcctgcgacgagggcgtgggtgcgggctgctcggcgctgctgcggctgatgcgtgagggcagtgcggcggatgctgccgatgacgccggcccggccgtcttcgagcgcccgccgccgtgccgcgaacacaccgccgggcacgatcggcaggcctgtgaagccatgaccgacgatgcactggccactgccatgcggcgggtggcccaacggctggcacaggaagacgaagacacgctggatgcgccgcttccggccgctgcacgcgatcgcctgcagcagctgtgcctgcaacaccgtggtggccgcttctgcatcgaagtagccgcgcaacagttggacgcgctgcaacctgcgttggcggtgcaggccctgcaggtggtctgcgatgctggacgcgtcagtgcctgcgaacgtaccgcaccgctgcgtgaactcggcgccgacctgcacctggtggcgctccaacatgtgccgtgtggccgctaccaggccgacggtggccagttcgacagtttcgacttcggcgacggcacgcaggcccgcctgcacgaaggcgccgtccagctgcaacagaacggcgaaacgttcgtactgcgccagctcggcaacggcgacctgctcggcatggacaaccagacggcctaccagcgttaccagcccgtgccaggcacggcacaatgcatgcccccgcgcgagggccgtggttcgccgtag

SEQ ID NO: 509370 - DNA, 216 bp, Stenotrophomonas maltophilia
gtgagcccatcgactgaccctcgcgatgcggaagagcgcgcgctggcccaggcgttgcgtgagcaggcgcagcaggaagacgcgccggatgtgagcgaggcgctgcagaagcgcattacttctgaatcgcgcgacagtggtgtgtggtacgtggtggtgcaggtggtgctggttggggcgttggtggcggcaggcgtctggtacttccggggctga

SEQ ID NO: 509371 - DNA, 3165 bp, Stenotrophomonas maltophilia
atgacgttcaaccaggaaagccaaccggtctcagcgtcccaggtcgaatgctgggacgatggcatcgtggatatgggctggggtggctggggtggtggcggtggcaacagcaacaacggtgattgggatcgtgggcccggcgctggttcgggcgggtcgatcaccacgccaagcgtcgaagagcagcgcaccgccgacaagctggaaaaggcacgttgtgctggcgaagtgagcggcaaccccgttgtgctttcgacaggcaataaggtcgaacctgaagtcgatttcagcagcgaaggtgcaatgccgcttcgactgtcgcgtacctacaactccttctggagtggccgtggtctttttggccgattctggctgagcaacttcgactactcgattactgtcgccgccgacgggaagacgatctgggcacagaggcccgatggccgtcggatccgcttccagcgtgatgccgccagcggcaacttcgttgaacagaaggcattgccgatcgcctacatcgtgcggaatcaggacggttcgctgaccctgttcaacgacgtcaatgggcatgagacatactcggcagcagggcgaatcaccacccgcgtgaacgaacaaggaataggttggactttcacctatcgcggggactatctcgaccgggtgacccatacgtcgggacgcttcgtggccttcgaatgggccaacggcatggcggcaaaggtcacggatccggcggggaatgtctatcgctactattacgaccacaacatcttcggaagtggggcagggtccggtcgtctgaccaatgctctgttgccgggcagcacgatcacgtacttctacgaagataatcgcttgcccggggcactgaccggtaaggcattcaacgacacgcgctactcgaccttcacctacgacgctgaagggcgagcaacctcgacccagcacagtggtggcgttgaacgctttcagttcgcctacgatgtgaagagcagcaagccggtcattccgccacctgcgccgctaccgcccggcggctacgtattcaacgaagagcggcggatgtgcgagtacggacccaatggtgtgcagaactgccacgggccacgcctggtggatgagcccatgcagcagtttgcgatggctgcttcggccccggtcgcgcaagcgtctgacccggcaaaggcgattccggtacgcatagatgttaccgagacaacgcccctgggccgtaagaccacctatgcgtaccaagacgatcgcttggtctcggtgtccggtgccgccggaagctgccctgcaagtttcaaagagaaggcctacgacgaaaacggctacgagcgacgcaccaccgacttcgcgggcgtcgtgaccgagtacagctacgacggccagggccacatccttcggcgcgtggaagccgcaggtacgcccgtggcgcggacctggacctacgaatgggacatggcgaacaatcgcttgctgtcgcagacgctggcaggccaggccacgacacggtacagctacgacgccagggggcgcatcctcagcatcacgaacaaggacctgactgcggctggtgcgggtcgtgagcagcaggttacctatggttatcgcctgcacggcaatggcctcgtcgccgaaatgacgatcgatggcccactgccgggtacaggagaccgctccacccttcagtactcggtggcgggggacttgatcgcctataccaatggatcgggacacagcatccgcttcgagaatcacaatggccttggaaagccgggtcggataacgactgccaacggcgccatcaatgactatgtgtacgatgcacgtggccgcacgatcaaggaaacaagcacggtcgacgggaagccgttcaccacgacctacagctatacacccgccggcctcgtggatacggttgtccaccccgacggcagccaggtccacaactactatgattccgcgctgcgtcttttggagacgtggtctcccaacaagcgtggtgggtactcgcgaagggcattcggctacaacaatgcatcgcaggtgaccttcgagcaggtaatggaaactgcataccctgtcaccacccaggtgacgggtgcgattgaccgcgtgacccacgacaccaactggaactggtacgttgaaggctgggcgtgttccatgggcatggacggatccatcgacgtccacgtttacgccaatgatgctgcaggcgggtcttccttccttggtggcaacactgccaacctcgtgagcgagccgcaggttgctacgtcctgcaaggcgggtggaagcaactaccggtatcacattggcctgcccgccgatctgcgcctgcagcatggcgggaagacgataacggtctacggtatcgccgttgatggcgggcagaatcgatcgttgggtggaagcggagcttcggtcgtgccagcgcctatggtcgtcgggaacatcgatgaagtcagtcacgattctaactggaactactacgttcgcggatgggcatgcgcgaccggagtcgctcgctccatcgacgttcacctctatgcaggcggggccgcaggagcaggaacgttcgcagtctcgggttcggcgaatcaggcaagcgagcctggagtggcagcggcatgccagattggcggaggggcttatcgattcactctcccgcttgacgcagggatgcgtcgtgcccatggcggcaaaggtattttcatccatggcatttcgccggcaggagggccgaactcgctcgttggaccgcagggcggatttacggttcccgcaatgctgcgtggcgctgatctgatcaatcccgagcgcggcacttcactcagtgatgagcagacgtggagcgttacattcacggtacgaaacacgggtaacaccgtctggaatccgggaagtactgcgatggtgctcaacaccggggagcagatcgcattgggtcacagggtgctccccggcgagctagcgcagttcaactggagctatgaggccactgcagaagcgctgaccagaacacacgtccgctactttcagatgatggacgcgggtatccgcttcggaccgaaccacgagtatcgcatcaccgttggcgggaagggcagcggccccaactgcagcggcgtcaactgctacgaggaagaatga

SEQ ID NO: 509372 - DNA, 2247 bp, Stenotrophomonas maltophilia
atgagttctggattgttgatactggcgtcggcggtgattctcagcaagtcgattgagtacgatgaactgggccgcatgaccgttgagcgtggaaacaacggtcagctgacccgccatgagtacgatgcagaaggccgccgcaccgcgacggtagattctctgggacgcaggctggtcatgacttacgacgcgttggggcggatgtcaaaggtgacgcatcccgatggcggggtgacctcatatacctatgacacggcggatcgcgtggtccagatcagagaccctcgtggcaaggttaccctctatgaatttgacgggctgggcaacctgcttgcgcaggacagccccgattcgggaacgactacgctggcgtacagtccggcgggcctgttgttggcgagcacgcgcggcgatggcataaacacctcgtaccagtacgacggccagggacgcctgctgcaggccagtgccgctgggcaggtgcagacctaccgctatgacaactgtatgaacggcaaaggcaggttgtgctctgtcacagagggtggagcgatcacctcattcagttacacacaggacggacaagttgccgagcgcggtgacgacgtgcgcctgggaaccgtcagccagctgctgacgatgcgctacagctacgacgagatgcgcagaccgagaaccatcacctatcccgatggtatgcaggttcaatacgagtactcggatgggtcgccctacgcgatgaccgtcatccagaacggtcaggcggtgcgcctcgttgacaaggcagagtaccaggcgggcggtgcccgtcgatccatgcagttcgccaacgggctgcaggagcgtcaggaattcgacgtcgacgggcgcttgaaatcgagggttatcgcaggcgcgaattcaacggtgctttcgaaaacctacgcttacagcagtggcaacgaaattacccgaatcgacgatgcagttgaacccggtgcttcccagcagatcggctatgacagtcttggccgtatttccgagcagcagcgaggtgggaaaggccacacgatgcgctacgatgaaaacagcaactggacgattttcggcgaaggtaaccacacccgcaccttcagcatcgatgcaggcagcaatcgtctgcttgggtactcgtccaacaagcctggcgatgaatcacgcagctacagctacgatgcgatggggaaccggaccgcagagcatgcggctggcgacgagcgcacctacggctattcagcgttcaaccggatgacatcctcacaggtcaacggatatggcactcagtatcttctcaatccgcttggccagcgcttggcgaagatcaacccggccggtaccagctattacacgtacgccgggcagaacaggttgatgtcggaacgaggcagtggcatatggagcaattacctttggttcgatggtgagctggttggactgtcgcggcaagggacgatttcccagatccacggcgatcacctcggccgtcctgaggccgccagcaacgcagatcgggcagtggtctggcaagcctacaactatgcatatggacgttctgtgcgaacggactccatcggtggtttgaacatcggtttccccggtcagtacttcgatcaggaaacggggctttggtacaacggattccgggactacgacgcggccataggccggtatgtgcaaagcgatccggtcgggctggccgcgggcagtaatacctacagctacaccggggccaatccaatcagccgtgtggaccctctcggtctggacaccttggtaatcctcgggggtgagacatcaggcaacgccgctggacacgtggccatcgcgttcacgggaaagggtgtttacagcgatggaaccctgacggactacggtagctcacttacagactatctaaacaagcagtccgagtaccgaaccagtacgttgattacgatcaagaccagtccggagcaggaggcgcgaatgatcgcgcagcttgagaccaagaggggaattcgcctgcccaatcccaagtctgaaccggtaaaagcctggggagacacctgcgcgacgcgcacccaggacgctctgacggccggcggaattcgctcgatgctcatgccgttccgcagcccattcccagtatcggtgggcggtattgcagcgatgaacgcggcaagcatttccatgctttggcagggctcaactgcgccctctgcctttgagtcgttcaacccggatcattga

SEQ ID NO: 509373 - DNA, 396 bp, Stenotrophomonas maltophilia
atgcggaaagtctcaacggcggttctcctgtctgcggtcgtgcttggcttcgtctacggctacttccgattcatgcagagcgatgaattgggagcgaagtatgagaactccctgctgcaggcaatgaacgcacgctatgaaaactccgagcatacgaagagcctcatagcagagcgtatggccgatgggaccgattccgatgtgatcgggctgccacgtgctggggttgcgagaggctatgtatggttcatcgccaatccgaaaagtgtccccctcgtcaagaagatgcctgctgactcgaactatcgtttaagtgaggcgcagatcgaggagattgcgttgagggttcgattggaccccgcgatcaggggatacctgctggagaatcgtcaatga

SEQ ID NO: 509374 - DNA, 786 bp, Stenotrophomonas maltophilia
atggcagatcagacatccatcgtattgatcgacccggcactggccaatgccagcgacggaccggcgctgctggcagcccagctacgcctgcgccgtccgcgccggacagcccgtcatcagcacgcccgtggccagctgctgggtgcacaccagggcctgctgcggatcgaagtgggcgatctgcactggctgctgccggcggggcatgtcgcctggattccacccttgctgccccatgcactggccagcaccagtgcgttcgatggctggagcctgtacttcagtgcgcccgcctgtgccgatctgccagcgacccctcgcatcttccaggccgatgcgttgctgcaggcgagcgtcatgcgcgcactgcaatggccacacgcggcactggatgccgcacagacgcggctggcaggagtgatcgccgatgagattgccgccagcacgcctctgccgcttgccctgccgcaaccgcgtgaccggcgactgcagaagattgccgccgcactggcgcgcgcaccgcacgacaaccgcagcatcgaggactgggccacccgcaccggtctgtccagccgcagtctcgcccgccactggctggccgagacccagatgacgctgagccagtggcggcaacgcctgcgggtgctgctggcgctgccacgcctgctgtccggcgagccggtgatcagcgtcgcgctgtcgatgggctacgacacacccagtgccttcatcgccgtgttcaagcgcgagatgggggtgacgcctgcgcggtatgccggcggatga

SEQ ID NO: 509375 - DNA, 1110 bp, Stenotrophomonas maltophilia
atgtctgaaattaatcccaagcagatttcctttgcgaggattaggcggcggctaacaaaagcgcagcttgccaaagagttgggcgtgacaagccgcagcgtgcagaactatgagtccggggcgtctgccccggatttggagattctggcgcggatatcaaaaattttgaacttcccgcaaagcttcttcttcgggaatgacgatatgcccgagattcaggggcatgctgtgagctttcgtaagctttctaagatgacagaggcaatgaaggcgtgtgcttttgcagccgggtcgattgcattcaagttgaatgattggatcgaagatcgatttgatctcccgatggcacaattgcctgatctaagtgaccttgggccggaagaggctgcggcgacgcttcggcgtgtttggggcttgggtaatgccccgatttctaacgtgattcatttgcttgaatccaaggggattcgtgttttttcattggttgaagaaacgcgagaggtggatgccttctgcacctggtatgaagggaagccattcgtttttctgaacaccatgaagtcggcagagcgaagtcgatttgatgctgcgcacgaattgggacatctcgtgagggatgtttacacgatgcagcatggtgaaggtcacgggcctgagatggagcgacaggcagatgcgtttgcttccgcttttctgatgcctgaagagagtgtggtttctaatcagccgccggtctacaccatcaagtatttgatgaaattaaagcactattggggtgtgtcgctggcagctcttgcctatagatttagaactcttgagctggttagtgagtggtcctaccgtagcttgtgtatagatatcgcaaggaacggttacaggaccaatgagccagagccgatggagagagagacttcgcagctgctgggcaaagttatggaaagccttcgtttgcatggcaaggggcgccgtgagattgctgctagtttgaacttgagcgtagaagaaattgacgcacttacgttccagctgactaaattgtcggtcgttgcgggcggagcatcgtcctctactggtcagaaaaatccgcccaagcttcgacttgtcaagtaa

SEQ ID NO: 509376 - DNA, 696 bp, Stenotrophomonas maltophilia
gtgaaaaagcttgagctcgccagcctagcccctcgtagggcgaaactgatcattgatcctgaccaagtcgaggcacgtcttcgggacctgcatccagatctgacatcgcttttgttgcgcaatgcgattgttggaggactcggcgcacgaaatgaagtgacaagggcgtcagctcctactgcggcgggtgtaaagcaatggctgagcacagttgagggcttgcggacgttcctcgcaaagctgcactggaagattcacgaacaccagaattgtcctttcatcagctccccggagagtgaaatctcaatcgtggtgatgactggaaattctgaaacaggaaaggacggttttgatgacccaacaaaccaagctgagaaaggggcggttgccgagagctacgtccagaagaatttcaatcagcttgagttgtttaataacgatgcactgaaggttgcaaagaggaaggcgaaggaaactcaagtttgggcgctcctatatcactatgacaagagcttgaaccagcttcgctttgagctctcgctgcctactggcttcagtaggcgaaagatcacccagtggggggaacgcttgatctttggcattgtttccaatgatccacaggatttcacgatttccaaggacgatccgagcgctccggcgacggttgatgttgtgcccaagaagggtgcattttga

SEQ ID NO: 509377 - DNA, 750 bp, Stenotrophomonas maltophilia
atgattgtcagtgtccaagcaaacttgcgaacggaccctgtgtcccgatctcccgaccagttacttggtttggcggtacaggcaacagaacgtcttgcgtcgctacacccgttgatgaaacgctggtatgcgctgccatcgagcgcaaagggaaagtcaataccgttggaggacaccggtgcgatcctcgccaggatggaacgggatatcgagaaggatcgcggaagatttggggatttcaatgagcttggcgcttcactgttgctggccaacgtagacaatggtcgtgattggcgcatgccaggtctggtcgtgctcggcttggatcccacaatgggctcccataagttccgtcttgttgggatcgaaccatttggtgaagccgtgccagatctgatgctgaatgcaatgataggtctggtggaggaagtcaagcccctctatgcctgtacggatgtcaaagcgcagacgcgcgagaaggggctggtgacgtaccagcttgatcggcgcttgtaccaacaccgtcgctactttggctggatgggcttcgttcctgcgcagatcacccacgcgcagatccccgacgcacatgcggtccacgcggtcgatggccagggcacggtcattgtctcggtgccaggcatgttcgaccccactgacgacgcgcaggtggacaaggtacaccgcgtcgaaatggatctggccagctatgacctgttgccggtaacggacccgagcctcaagggctag

SEQ ID NO: 509378 - DNA, 798 bp, Stenotrophomonas maltophilia
atgggcaccagaatcatcggaccccggccctggctggggccaggcgtgggaggcggtaccggcaccgtcgacgaagacggcaacccggtggatccctacggcgggccgaccaccggcgatgtggtcgatggcatccgcgatgccgtgtacggaatccagcagcgggtgcgtggtgaagccaggcccgatgcgcgcgccgagccgaccgccaaggcgcgggaggttgactgctcgcagatgcctgacgagaccgcgtgcaacgagtgcctgctgaaggaggggttcatcggtccgcctctcaccccgcgctatgtcacccaaagcaacctgatcaattacgaatatcagttgtacatcgccaacctgcgctcggcgccgctgcgctttggtttcatggtcgccgacatggcggatcctgatcggcggctattctcggtggatacgttgtttgactaccttgagcgcgatgggttctcacgcaccgtgcaggaatggcatttcaacgcctgtgagtttgatgggttctggttgaaggactgcacggtggtggaagcgaaggggaggtatgagcatttctttgatgaaagaggacttcccagatatgagtttgtggaacatggagttctcaggccttggggattgcagatgaacaggcagcgcagcgccatcggcgttgcaggtcggcaagcaaagctcctgtggtgcttcatgcaacctcgaacgatggccgcagccattgcagcggagtatgtcgatccaatgctttgcaggcacataccattccgtggagagatttga

SEQ ID NO: 509379 - DNA, 756 bp, Stenotrophomonas maltophilia
atgcaacagctccacgccgccgatgcgagcaacatcgactggccttcactgcaggcggcgtatggcagtgctggtgatgccggcgagctgatggtcgccctgcagaacgcggaacaccaggaggactggggggagctgtggtcacatctgtgccaccagggcacggtgtacccagcgagtcatgcggcgctgcctgtgttgctgggcatcgccctgcaggacgctcgtttggatgcggatgacgccctgttgctggccggagccatcgtggccggttcggtgccggaggatccgggattgcacccgcattcgtcgacgatcggggcattgatcgacgtggtggaggcccggctgactctgccagtgatcgacgcggatgcacagctcttcgcacggcgcgcgttgcgccaggcctggctcgggctgaagggggaaaaggtgtggtccctgcatctggaccggttggaagaaggcgaattggtaggcgagtgcgatcgctgtggtgctgacctgtatgccgagttcgacgaagaagcgccctatctctgccatgaggatccggtgcatggggcgcccacgatccgcactccgttgcaggcaggatcgccgctgaacgcagtagagcagtggttgctgcagcaggccctgcgcgacggtgatcaccaggccgtgcggctgctgggattagcctttggagaagcaccgtgcagcgcgtgcggccgcatgttccctgtgcgcagctgcgcgggaggctga

SEQ ID NO: 509380 - DNA, 768 bp, Stenotrophomonas maltophilia
atgacgaatgtgaccttctacgttgggccgcaccaggatgactggcagctgttccgtggggagcaggcatatctcgatattcaatcgggcgccagagtggtctttatttacctcacggctggcgatgcagggggcggaccggttcctggatggtggagtgcacgagagcagggagcattggagtcttgtcgcttggctactggaccaaatccgctgatttggggggtgaactggttcaatggccgccccattaccggatgcgactgtgggaatacgacaagctacttcttgcggctaccagatggctcgctggatgggctgagaatcaacagcgcaccaatcagcgctattgatggctcgaccagctaccttggctgggaggatgtctgccaaacactcaaagctatcttggacgagcataaggcggcatcaacgaatgcgaggccgtacgtgaacgctccggactatgacgttgcattgaatcccgaacccaacacggatcacaccgccaccggcttcgcggtactggctgccacgccgaacggatacaaccgtgcttggtgggtgggctatgacattggagaacggccagagaatatcgactcgctggcggccgggcgaaaaagggagctgcagcaagcgtacacaggccgaattctcaaggagacaaccgacgcgggttcaccctatgacgattgggcagaggccggcagcatctacgaggcttggataaagcgaagctactcccgctctgattctggtggctga

SEQ ID NO: 509381 - DNA, 243 bp, Stenotrophomonas maltophilia
atgcttcccatgcacggctaccagggtttccgcaccgctcccgtcccctctggctggggccagctgagtgacaactgggtgctgaggtggagcggtcggcagatcgcccaagtttccccagccaaggaacgcggggggcgtgtgcacatcggtgtccagaagatgtggcagaccaaggacgaatgggcggccagccttgtccaaggcaagagcgctggcagcgcgtgttgcccttggcactga

SEQ ID NO: 509382 - DNA, 222 bp, Stenotrophomonas maltophilia
atgaagatccaaaatgtcttgcttggtttgatcgttgctgccgctgcagcggccgggaccgtaggcgttgtgcccaccgccaatgccgcttccttccacacttcgtgcgtccccgccggcggcggcatggctcgctgcacccaaaccttctgtcatgaaggagcgtgcgtagtcactgatacctggacgcaaccgatgcgcgaggtcatcgagttccagtga

SEQ ID NO: 509383 - DNA, 255 bp, Stenotrophomonas maltophilia
atgcggcccatgtcagagagccccaagatctttcaccaccgactgcccctgctgaaggaacccgatcagcagacggccgccggcgacttgccgacccatctgctcattgaggtaattggcctggagccgtcccgccgtcatcaggtcggcgtgcacatgctgggcatcacggccttgagtggatcacctggtgacgcgaactggccgccgatgggcagcactgacgtagcctgccggctgtcgatcttggcgtaa

SEQ ID NO: 509384 - DNA, 717 bp, Stenotrophomonas maltophilia
atgtccctggccgaccaccgacgtacgctggcaccgcacggtttcctgcgcgtggcgatcaacctgggcaacccggtgctggcacagggcgatgcgcgctcaccgcgcggcccctcgctggaactggctaccgcattggcgcaacggatgggggtgcaggcacgcttcacctgccacgatgccgcagcctcggtggtcgccgcagcaggcgaagacggttgggacctggccttcctggccatcgatcctgcacgcgccgaccgcattgccttcagtgccccgtacgtggagatcgaaggtacctatctggttcgcgcggacagccctgcgcagcaggtagccgacctggaccgcgacggactgcgcatcgcggtcggccgcggtgcggcctacgacctgtttctcagccgtgaactgcgccacgccacgatcgagcgggcggagacctcggcggcggccatcacgctgttcgatcagcagcgcctggatgcctccgccggtgtacgccagccgctggaagcatgggcgcaggcgcatcccggccaccgtgtgctggccggccgtttcaccgcgatccagcaggcggtggcggcaccggcctcacgcccggccgatgcattgcgggcgttgttcgaggaagtggaggcgatcaaggccggcccgttgctgggcgaagccttcgcgcgtgccgggcaggcagtcacgctggtgcgatga

SEQ ID NO: 509385 - DNA, 2613 bp, Stenotrophomonas maltophilia
atgtccacactgcccttgcgccacccgcttaccctgggcctgctcgccctgctgcatgccccgctggccgcccaggccgccgcgccggccgcgaccgataccgtgcccgccacctccgccgtcgacctggataccgtcaccgtggtcggcagcatcgtcagtggcgagaaacaggcgctggatgcccagcgtgaggccagtcacctgatgaacgtggtcagcgccgatggcatcggcaagctgcccgaccacaacgcggccgaagccgtgcagcgggttcccggtgtgtcgatcgaacgcgaccagggcgaaggccgcttcgttgccgtgcgtggcctgccggcacagtggaactcgaccaccctcaacggtgaccgtctgccgaccgccgaagaggaaaccaccagccgtgccacggcattcgatttcttcccgaccgagctgatcgagcgcatcgaagtgagcaagacgctgacgcccgatcgcgaaggcgacgccatcggtggccaggtcaacttcgtcacccgcaccgcaccgacacgacgcacctttgccgccagcgtggccggcaactacaacgacaaggcggtcgacaccggcaccagcgccaacgtgctgtacggtgaccgcagtgccgatggccgcttcggcttcctgatcaacggcacctactggaagcgcccgtgggcgaccgacaacttcgagccgcggcgcagtgccgacggcctgggtgtctaccggctcgagctgcgcgactacactggcgagcgcaccacccgcggcgtcaacggcggcttggagttccttccggccgacggccatcgcctgtacgtgcgtggccagtatggcgagttgagcgacgatgagacccactacaagcaccgctaccggttcgacaaggaccgcgtggagctgcagaacatccacaacgagctgatcaccgagttcaagacctttgagttcggtggccagcacactttcggccgcggccaggtggactggaagctggccagcgccgagaacgacttccgctacggctgcattcccacctgtgccgacaacgcctacttcgtggtccagttcaaccagggcaaggtcggctaccagggcctgcaggaccgcggtgtgggccgcaattcgtacaacaccgtcgatggcggcaacgttgccgccgacacccctgatacccatctgccgccgggcttcgcgatggacccgcggaagatgccgttgagcgcggtggaactgtaccgggtggcgatcaacgagaaggacaaggccgtcgcgcagctggacttcagtttcgacgcgagcgacacgctgacctggaagatgggggccaagtaccgcgacaagcagcgccgcgcgcgcttctccgacgagttctatgcctggaacaccgccaccggcggcccggtgccgaccctggccgacttcccgttgatggaccagccggaccgcaggggctacgacgtcggcaatggccgtgactacgcgcgcgatttctcgcaggtggtgccgatgcaggcactggccgagtggtaccggcagaacaagcagcatctggtgctggtaccgggcgattcggcgctggtggccaacggtgcagcgctgggccgcaacttcgacgtggccgagaagcagtacgcgacctatgcgatggccacctggaagccggacgaacgctgggacgtggtgggtggtgtgcgcctggagcggaccgccaccgatgtgcgcgggctggtgctggagcgggatgccgatggcagcagcgcgctggtacccaacctgggccgcaagcgctatacctcggtgctgccgcagctcaacgtgcgcttctcaccacgcagcgatctcaacctgcggctgggcctgacccgcagtttcgcccgcccgaacttcggtgacatcaacccgggtggctcgttcatggaagccgatggcaccttcacctccggcaacgccaacctggacccgacctattcggacaacctggacctgatggccgaatggtatgcgggtccactgggcctgctgtccggcggcgtgttctacaagaacatcagcaatccggtgttccagagcagcagcactggcagcttcaacggcaatcccaacgtcaccttctaccggcccgagaacggcgacgatgccaagctgtggggggccgagttcgccttcgtgcgccgcttcgatttcctgcccggcctatggagcaacttcggcatcaacgccaacctgaccctgatggactcgcgcatgcgcattccgggtcgtaatggcaacgtgccgatcactggccaggccgaccgcctgtacaacgttaccgtgtactacgacgacggcgcgttcgcagcccgcctggccaccaaccacaagggtgcctacatcgaagcgcacggcgacagcagtgtcaccgacgcctggtacggtgccaacacctcggttgacttcagcgcctcctataccttcgatcgctggacggtgttcgccgagctgagcaatctcaccaacgagccgttgaagtactaccaaggcagcccacagcgcccgctgcaggtggagtactacggccgtcgtgcgcagctcggcttgaagtatctgttccagtaa

SEQ ID NO: 509386 - DNA, 1164 bp, Stenotrophomonas maltophilia
atgacacagatggcggaatccatgagcgaacgcatcctcgacaacctgaagctggtgctggccgacgaggtcgtgcacggccatgtagtgctggatggacctggcatccgcgcggtggggcaggggcgggtggccctgccgggtgccgaagactgtggcggcgactggctgatgccggggtttgtcgagctgcacaccgacaatctggagaaacacctggtgccgcgtcctggggtggcgtttccggctggagcggcggtgcaagcgcacgatgcgcagctgctggcggccggcatcaccaccgcctgcgatgccttggcggtgggtgacgtggaagccgacagcgtgcgcgtacggaccttgcaggccgcgcatgccgcgttggtcgaggcgcgccgcgccggcggcctgcgcagcgaccactacctgcacctgcgtgccgagctaccgtatcccgggttgctgccattgctggagccactgctggatgacccggcggtgcgcctgctgtcgctgaccgatcacacaccggggcagcgccagttccgcaacctgcagcgctatgcggcttactacggtttgccgaccgacacgaagaccggttacctggacgacctgctgcaggcacgccgtgcgcagcaggcgcgccatcgccccgcacacctgcaacaggtactgcagtgggtgcgtgggcgcggcctgtgcctggccagccacgacgacacagtggctgcggatgtggatgaagccgtggcctgcggggcgcgcatctgcgagttcccgaccacgctggaggccgctgcggccgcacgcgcggccggcctgacgatcgtcgccggcgcccccaacctggtgctgggcggctcgcattccggcaacgtggcggcgctggaactggcccgcgccggctgcctggatgtgctgtcctccgactatgtgcctgcaagcctgctgccggcgctgggcgtgctgtgcgcgcagctgggctggagcctgccacgtgcggtggccacggtcagccatgcaccggcgcaggtgctgggcctgcaggatcgcggtcgcatcggcgaaggcctgcgcgccgatctgctgcgggtgcgtggatccgcgccggactacgtggccgaggtctgggtggccggccgtcgtctgctggcccagtag

SEQ ID NO: 509387 - DNA, 747 bp, Stenotrophomonas maltophilia
atgaccatgaccgacacggtcctgacgccgcgcgattcggcgctgccgctgtggcagcagatcgagcaggcgctgctgcggcagatccgcgaacgccagctggtggaaggcgaccagctgccctcggcgcaggtgctggccaagcgcttcgcggtcaaccgccacaccgtacggcgtgcgatcgaggcgctggaggagcgcggccatgtgcgcacggagaccggccgcggcagcttcgtgcaggagcatccgtaccactacccgatcagccgacgcacgcgcttcggccgggccatgcatgacctgaacgtggaaagccactacaccctgctcgatacccgggtgcaggtgccgagtcggcaggtcgcgcgcgcactcggcctgatcgccggcgagcgggtgcatcgggtggtgtactccagccaggtggaaggccgcacggtagaccacagcgaagcctatttcccggccacccgctttccggggctgggcgaggtgttcgcgcgcacgccgtcggtgacccgtacgctcgccgcgttcggagtcaccgactacctgcgccggcataccacggtgatggcgcgcctgcccgatgccgaggtcgcgcgcgtgctcgggcaatcgacgcgccggccggtactgtgcgtgcattcgctgaatgtcgatccacaggggcaaccggtgcagttcggcatcacctgcttcgccggtgactgggtgcagctgatggtcagcagcgacctctag

SEQ ID NO: 509388 - DNA, 1155 bp, Stenotrophomonas maltophilia
atgaagaacacaaccgccctcgtggtcggtgccggcatcgtcggcctggccgtggcccgtgcgctggccgtacgtggctgcaaggtcaccgtgctggagcgccatgaacgcgctgtcggcgcttccatccgcaacttcggcatggtctggccgatcggcgtgccgaatggcccgctgtatgagcgcgcgctgcgctcacggcagatctggcaggagctgatcgatgtcgccggcctctggcatgaccccagtggctcattgcacgttgcccacgccgacgacgaatgggccgtgctgcagcagtacgcggcagccaacgcgccgctgcgcccatgccgcctgctggatcgggatgcggcactggcgaagtcaccggcgctggtcgcgcgcgagctgcgcggcgcgctgttcaatgccgatgagctggtggtcgatccgcgccaggcgattcgcgcgctgccggacgtgctgcatgaacagcacggtgtgcagttccattggcgcacgccggtgacggcggtggagagcggtcgggcgtggtccggaagccgcctgttcgaggctgaccaggtgttcgtctgcagtggtccggaattcgaacagctgtatccggagctgtacgcggcggcgccgctgacccgctgcaagctgcagatgctgcggctggccgcacagccctccgggttccgcctgggtgctgccctctgtggcggcctgtcgctggtgcactacgccggattccgcgaggccgccgatgtcgcgccgttgcaggcgcgctaccaggccgagcatgccgacctgatcgagctcggcatccacgtgatggccgcacagaacggcctgggcgaaatcaccattggtgactcgcatgcctacgcacatacgcatgatccgttcgacgagcacaccatcaaccagaaggtgctcgattacctgtcccgtttcatgcaggtacccgacgcgcgcatcgcgcagacctggcacggcatctatcccaagctgctggatggcagcagcgaattcgtcgccgagccggcaccgggcgtgaccatcgtcaacgccatcggcggcggtggcctgggcatgacgctcagctttggcctggccgaggaactggtggacggtcgctacacggcactgcgccgcgcagcgtga

SEQ ID NO: 509389 - DNA, 1296 bp, Stenotrophomonas maltophilia
atgagcaggccctcgctgcgggcgcggctgcacgggcatccgctggcattgacggtgttcgccggcagtgccgcgctgtccacctatgcgtgcatgtatgccttccgcaaaccgtttgccgccgcgtcgttcgatggccagcacctgttcggcgccgactacaaggtgtggctggtggtggcgcaggtgctgggctacatgtgcagcaagttcatcggcgtgcgggtgatcggcgaactgcgcgccgagcgccgcgccagcctgctgctgggcctgatcggcatgtcctggctggccctgcttggcttcgcacttgtgccggcgccctggaacatcccgttcctgttcctcaacggcctgccgctgggcatggtctggggcctggtgttcagctacctggaagggcgacggaccaccgaagcgatgggcgcgatcctcgcctccagcttcatcatggcgtccggcgtggtgaagtcggtcggcaaatggctgctgctgcagggggtgagcgagttctggatgccgttcctgtgcggcttgctgttcctgccgctgctgctggtgtcggtacgcatgctggaacgcattcccgctccggatgccgccgacctgcgcgagcgctcgccgcggttaccgatggaccgcgcgcagcgtcgtgccttcgtgcgccgcttcctgccggggctggcgctgatgatcctgtgctacgtgtgcctgaccgtagtccgcgatttccgcgacagctttgaagccgagctgttccgcgagctgggctacggtggcagtgccggtgtctttgccgccatcgaaacgccggtggcgttcgcggtgctggcgctgaccgccggcctgacctggttccgcaacaacctcaacggcctgatggcgttgcacgcgctgatgttcattggcctggccactgcaggactgagcacgctggcattccgcgaaggcatgctgcatccgctggcgtggctgggcctggtgggcttcggcctgtacctggcctacgtgccgttcaactgcgtgttcttcgaacgcctgatcgccaccttcaagatcgccggcaacgtcggcttcgtgatgtacctggccgatgcgttcggctacctgggcagtgtgctggtcctgcttggccacgaattctccggcctgcagctgtcgtgggtgcgcttcttctccagtgcggtcatccatctgtcgctgctgggcggtgcctgcctgctgttgtccctgctgtacttccaccacaaggccgtgcgcctggcccgcatgccggcactcgcctccgtctga

SEQ ID NO: 509390 - DNA, 690 bp, Stenotrophomonas maltophilia
atgcgctaccgcctcgtcgtccttgatatcgccggaaccaccgttgccgacccggggctggtcgcccatgccttcgccgaagcgatggccgccgccggccgggccatcgaggtggaggacgtgcgcccgttgatgggctaccccaagccgcaggcgatcgcgcggctgttggggaccgcggtggacgacccgcgtgtggcaccgatccacaccgacttcgtggcgcgcatgctcgagtgctatcgccatgcaccgggcattgcgccgctgccgggcgccgaggcgttgttcgacacgctgcgcgtacacgggatccgtattggcctggacaccggcttctcgcgcgacatcgccgaggtgatcatcgagcggctcggttggcaggatcgcatcgatgcgctggtggccagcgacgaggtgccggcgggtcgccccgcaccgcacatgatccaggcgttgatgcagtgcaccggcgtggatgatgccgccgccgtggtgaaggtgggcgataccgaagtcgacatcaacgaaggccgcaatgccggcgtcggcctgaacgtggcggtcaccaccggcgcgttcacccgcgccgagctgttgccgcatggcccggaccacatcatcgaccacctcgaccgcctgccggcactgctcgggctggtaccttccggcacggttgccgctgcatga

SEQ ID NO: 509391 - DNA, 783 bp, Stenotrophomonas maltophilia
atgttcagtggaaaggttgcggtggttaccggttccaccagcggtatcggtcttggcattgccacggcgctggcacggcagggcgccgacatcgtgctgaacggatttggcgatgcagcggatatcgaacgtatccgtaccaacttggaaaccgagttcggcgtacgggtggcgcatgatggcgcagatctgtcccgtggcgaggcagtgcgcggaatgatcgaccacgccgttgcgacgatgggccgcatcgacatcctggtgaacaacgcgggcatccagcacaccgcttcgatcgacgagtttcccgtagagaagtgggatgcgatcctggcgctgaatctctcggcggtgttccatgcaacggcggcggccttgccgcacatgaagcagcagggcgccggccgcatcatcaacatcgcatccgtgcacggcctggtgggctcggtgaacaagtcggcctatgtggcggccaagcacggcgtggtgggattcaccaaggtgaccgcgctggagaacgcgggcaccggcatcaccgccaatgcgatctgtccgggttgggtgcggaccgcgctggtcgagcagcagatcaccgcgttggccgagcgcgaaggcacggatcaagaagccgccgcgcgcgcgctgctggccgaaaagcagccgtcgttgcagttcgtgacgcccgagcagctgggagagatggtggtgttcctggcctcggatgccgcggcccagatcaccggcacggcattgccggtggatggaggctggacggcgcgctaa

SEQ ID NO: 509392 - DNA, 249 bp, Stenotrophomonas maltophilia
atgtgctccatcaggctccaagttgagccagtgaaccttcacgtggtcgacgtgagcctgaccgacgccgggcggctctatctggaacaggtgcgcaccgccttcggcctgctggacgacgccgagcgcgacgtactggcccaggacggcgcgctggccggccgcgtgcgcctgagcgtgctcacccctatggccactaccggctgccgcccgtgctggcgcgctttgcgcagcagtacccgcaggtga

SEQ ID NO: 509393 - DNA, 615 bp, Stenotrophomonas maltophilia
atgaaggacaagatatggttcacctacaaagctagaataaaagctcacgagcgattggagcgaatggatttccattctcaactcctcttggtctggtatgcaatgctgagctcgattctggccattctgagcatcagatatccaaaaatccttggcgataatacagacatattgggggcaatactttcaattggcctgctagccatatcattatctgtaaccaaccgggatttcagaggccgcgccatgctgatgcgagggaactacctgcatctgcagaagctttacaattccattcaggcagccgaactaataggcgcagaaaaagatattcagccaactgggccagtactcgcacagaataacgctctgccaatcgcgctaaaggccgaagagcaagaattgtacgccgaactgctcagagacagcgagaaccatacctcaatggatgatatcttggcgcgaattttctccaccggcctgaaaagcagaaagccttctgtgctcgagtacacaagaggcatcacgtcaattgtactgatgtatttattgatacttgccctctacgccatccccgtactagcagcatactatgcaatggatacccgccaatga

SEQ ID NO: 509394 - DNA, 1365 bp, Stenotrophomonas maltophilia
atgaaggcccctgagagtttcagagtcaggttctcgaaagaccacttgattgagatatacacagagcgcatatcaaaatcttcggcgatagggattgatcgagtaaaaccttcgatacttggagagcgactcgcggatgagatttcattaattcattcaaaaataactcagggcaagtataagtttacagcctacaaagagaagctcatatcgaaaggccacaactcaaaaccgcgtcaaatttcaattccgaccgtccgagaccgcataacgctacgcgcactttgcgaatgcctgggcgatatctatcccgaagccaagctcaaattaccccacatcgcgatcgaaacactcaaggggaaattatcatccggagaattttccgagttcgcaaagatagatcttcaagggttctatccatccatcccgcataagctagttctcggaagcacctggaaaagaatcagaaaaatcgagattcgcgctttaatccggagtgcaatcacaacaccaacagtaccagagtcaaaaacatcaaggggtctaaagcctgtcgcgataggagtaccccagggccttgcagtttccaatttgctggccgagatatcaatgctcgaaatagataaacacttcaatgcaattgaagggatctggtactgcagatacgtcgatgacatactcatcctgacatcagatgacaaggcagcacagactgccagcgaaattatcacaagactaaagaagatgggccttaaagcccatgagccaggaggagactcaaaaacaaagatagataaactaagccaagaatttagcttcctaggataccttatcagcggaaatcgaattcgaattcgacgcgacagcatactgagatttgaatcctcgatcgcgaaaattctcacagcttacaagcacaaggcctcagcggctcgaagcgatgccgagaagtctagagccctcgcgtattgcaagtggaaaataaacctcagaatcacgggatgcacctttaacaacaaaaggctcggctgggtttgctatttctcacaaattacagaaacatcgcagctgcgagcagtaaattggacaatctctaagctaatgaatcgctttgggctaaaggacaaattcaaaccaaagtcgcttatcaagacatactatgaactcagcggaaagagcctggaggctgggagttatatcccaaacttcgacaatctcagcgcagaacagaaacgggagcgcctgtcaatgtggcttggagatcgcgtagccacgatgtcagacgagaaagtggaccgaatcctcaccttgaagattacgaaggcagtgagagacttggagtccgacatcgcgcacgcgtactag

SEQ ID NO: 509395 - DNA, 1116 bp, Stenotrophomonas maltophilia
ttgttgcttagatggcttcatggaattatttcgaaatttcctaaatggaaagaatatcttgggcaaacaatccgaaacctcgggccggtcgttgcgggaagtagggctcgaacacggatgaggaaaaagggatttaggatgcagcatccccacgagctgtcattggcgatcgaaagttccagaggaggcgttcaaaagaaggctcgattgatgatcttccggccggaaggaggggcatatccgttcggtacttttttctgtgaggacggcttctttcatgcagatgaagatatcgccttctctgtcgtaaaatgcgggggatggaagtcggttgccgacgaattgccattttcggaatttgcatgggcatctcccgcgcaagttcgaatattggggtcgttgctattctgtcaggtgattgacgaggcttgggtgcgtctatacccagtaattggtcgtcatttagtcttggagccggactgtctcgatcttgcggacgttaatatcgtccagttgatcagatctcgtattttgaattcttcggatgccctattgaatccgaggggaggtgcaggcgctcccgcatctattagttgtgcgggatatgatctgctcagctcggagtccgtagatatgagtagattctcaagctcatatcagagtatcgatccgagaagtctcgtcctaatgcgcggtattcaggcgctggtaaagtctgacatgctgggttgccatcaggagtttggtgaggagtctgttctctccatctacattgcgatggatgcttcgttctccctaatccagagggagttaattaaggcggggaaccaaaatccttccgcgaacgacgcggccaaatggttgcacagggtctttgatgaaccctatggctttgatgcgcctggtgattttgagaaatatctaggcgagttctatgagagtaggatatctgcaattcatccggccagccgctttggggattgtccattccctccggcgatttggggtgatgcaattcatttaagatctattcttcgtcagatcttttcgtatcttgtgcacgggacgcattttgatgactttgatgctgcagtttcaaggtttcattgtgagtaa

SEQ ID NO: 509396 - DNA, 441 bp, Stenotrophomonas maltophilia
atgctcgagatgttggtcggaggcaccttcgggcccaaggctgaccccgacgctggcgcgcgctatatgtctccgttgcgcgtccaagagattattagcaaccacagcagggccaatgacggatcagcctcgcatccttcctggcccaaacgtgaagtatccgctcaggctctcgatctcttgcgcttcctgggaaagccggcgactacggaaatggtgtttgagtacgtggaccgccgcggcatccctatgaatcgggccgcaattagcaccttcctctacacctaccgaacaaagtacggcttcttggaggtactgccggatggtatgtacctcttgaccccgcgaggcaaagtctacgtgaatgcgccagaacgcgctgacgtgcatttcgtaggccctgaggctcccgcaaccctcaacgatcaaaaggaggactga

SEQ ID NO: 509397 - DNA, 498 bp, Stenotrophomonas maltophilia
atgcattcctcccacggcttccgcactgccccgattccctctggctgggtccagatgggggagggctgggtgttgtggtggagcggtcgacagatcgccaacatcagacgcggcaaggatggcgctgtgcgcgtgcgtctggatgcccggaagatgtggcagatcaaggaagttccggccgccagcatcgcccaaggcaggcgctacgccgagcgctggtgcgcggccaggctctacccagagatgcgtctgcgcgccgccgtggctcggctgctggatgccacgcccgtcgtgccgctcgatctgctgcccggcctgccgcctacccgcgagcagcagcaacaggcccggcgcctggctgaggccgggactgtggaattggcgaggatcaaggaagcgctggaaccgcgccggccgtcgaaggagaccaagcccagggcgaaggatccgatgaaggcttgggtgagggcagggcggcggatgcaggggcagccataa

SEQ ID NO: 509398 - DNA, 573 bp, Stenotrophomonas maltophilia
atggggacggagaagttcaagccatacatggagttcaccgcgcaggggatgtcctttcaggccctgatgctgatgatttctcagctggagaagagggaacactcgctgggcgaactgctgcccgtagtggtgtttatggccttcactttggaggcctatctgaactcgcttgggtccaggcatatcgagttctgggatcagattgagcgtatcccgtggcgcaagaaggtcgaagttctacatcttcatgctggcaaggaactcgattggggtagcaagcccttgcagtacgcagcccagctcttcgcgcttcgcgacaaactggctcacggtaaagctgaggtcatggaggggccaacatgcgtttctctcgaagaggcccaggacaagctcgctggggagatgctcaaccctccgtggttgaacgctgtggcatcagggtggcttggcactgcacgggacagatttcggacacttatgacccatttctcggacctgtatgggcttgcgcctacggatcagcaactccattcacgacagtggatagaagtcatccgctcagatgaaaggtag

SEQ ID NO: 509399 - DNA, 258 bp, Stenotrophomonas maltophilia
atgatggccacggcctacgccaagagcgacagccggcaggctacgtcagtgcagccgatcggcggccagttcgcatcaccaggtgacccgctcaagggcgtggcgccgagcatgctgcaggtcgacctgatggctgccgggcggctccaagcggactacctcaacgagcagatgggccggcaggtcgccggcgggcgtctgctgatcgggttcttgcagcagggccaggctgtggtgaaggatctggggccgatctga

SEQ ID NO: 509400 - DNA, 360 bp, Stenotrophomonas maltophilia
atgagcatcctcaacgttctgatcagccgtgaccagcttgtcgttgcagtggatacgcttgccgaggatgcgctgactggcgcctactctgctggtgccaaggtgctcctgatacctcagcacaacgtgctgctggcgacgaggggcggggcccagttcttcctgaagatctacgagctggctctgcaggcgagcttccgggctgacttctccattgagcagctttcggccgagatggggcctgtaatggaccaactgtggttgaactatgagaaggcggccgcagaggctgacctgcctatcgaacagctggggacgagattgttctgggcggttggtcgcccagaaacggcagaatga

SEQ ID NO: 509401 - DNA, 291 bp, Stenotrophomonas maltophilia
gtgaaagaattgccgaagcggaataagaagccccgccgcaaagacggcttcccttggaagagcaccattgcagtcgtggttatcgtcgtcattgtcctggccgtatttgaaatgggacgtgtcgaccgcgagtatcgcgcgcaagctaaccggcaggcccttgaggcaatgcacgctgtgcttcagcgggaagagaacgtcggccatccggctgcggacacgatcccggctagcgatgcagatcagaacgatcaggaagagggagcacatccctccatcgaagagaagtga

SEQ ID NO: 509402 - DNA, 555 bp, Stenotrophomonas maltophilia
gtgaagaagacgattttgatgtcggccattcttgctggctcgctcgcatggagcgcttccgcgcaggaagtcgattacgtgggagctacgccaagagtcctagccgaggcgaatgcgcaagcggctgatcttccggcaggtgttctgttggtggagctggagcgctggaagaacagggaagacacgttctcggctcggcccattactcacgctggttcgaggcatccaggcacccggcagggagttcttggttttgtgtcgtactacccctttgaaggcagcgttaccatctatgcgtgtttgcagaacaactggttggatagcttctcttcgcgagacccaaactgcgaaggccatatgaagacgaccaacggcatgccaattacgggctatattgccgccacgcagttgccgggaaccgttccgctctatcgctgccaccgtggtgggctaaagcccaacaattgggctgatcttttcgatacgacggacttcaattgcgagaacgtcaagtacccgctgcttgatcaggtattgggttacatctggctctaa

SEQ ID NO: 509403 - DNA, 435 bp, Stenotrophomonas maltophilia
atgcgcgtactgatcaccacagctttcatcgcgacaatgcttgccgcaggctgcacgaccgcaccaggtgtgatccacggccgcacagttgaactgcaccaagaaaccgccaccgatggcgagacgctggatgcgttcgttgtcagaatcgccccgcgtgcactgcaggcgtcgaagaccgcccgtgccacggtttgcggccaggtcgaacaggtcgctggtcggcatacgatccaactgaagactgacggctacgtgagcgattgtgggttgccgcagtccggccttccataccttctggtgaatggcaccgccgtagacgccagagagaaccacttctcgctggccaaccgtgaccgtcccggctatctggtaacgccgtggtcggtcaagtatcaggatgcaaccggggtgcggaccgtcagtagtttctga

SEQ ID NO: 509404 - DNA, 726 bp, Stenotrophomonas maltophilia
atggtgcgaggcgtccgcattcgaagcacggtagattcgctggtccagatcgacccgagctacgagaaccttgcgctgaaaacgtcgggggcggtgaccacggtggttgccggctcgacgccgggactcaatgagtgcgggatagcaactatcaccgtcgcgggttgcaacaatcctgttctggcaatccgctgcgactcgaactttgtgggcctgctgtctagaacgagctcgggcggcacatacacgtggaagatcatagccaacacccccgttgtgacggtcagctactgggtgttcgataccactgacgtggcacagatgcagttcaacaccacacgggggatgcgtgtccggaacccggccaacaaccgggtggtgttcgactcccgctacaaatacctgcgcgtgatcgctatggccaacagcacacaggccagcacccatccaatgccgcaggcagacggcttctgcgtggcgctttcgaacgtgagtgtgtttaccgcagtcacttacatcggtgcgggtggtgggccgcagttctggacgaggtacgtgtttaccaagatggtgggatttcgcaccgtcgctggtgcagtcgaaacccaaggcttcgacatctatcggaacgcctacgaaacacccacgccatccccaatgccgccgcctgcgttctacgggtcctatcaggcaatcggcatggttgcggacgtcagaaactactga

SEQ ID NO: 509405 - DNA, 3486 bp, Stenotrophomonas maltophilia
gtgaacgtagccatcaagtatcagcccacgcagctcgcgctcgcctgctcgccggtggccattgccggcgctggcggcaagggcggtgggaacgctcgcacgccggtcgagaccccagacagcctgcactcgatctcctacgcgaagatcctggacctgatcagcgagggcgagatccggggcttggtggcgggcaatcagtccgtctacctcaaccaggttccgatccagaacagcgacggcaccctgaactttgccggcgtgcgcgtggaaacccgcgcgggaacgcaggaccaggagtacatcgccgggttcccgtcggtcgagaacgaagtcacggtcggcgtcgaactgcgtagcaacgcacctgtggtccgcacgatctcaggagccgatctctcggccgcgcgcatccgcttcggtctacccgcactccagcgccagaacaccgaaaacgccgacatggaaggctacgcgatcgagtatgcgatcgatctgtcggtgaatggtggcgctttcagcaccgtgctgaccaatgcgttccggggcaagacgaccagcgagtaccagcggagccaccgcattgatctaccggccggctcgcagtggcaggcacgcgtccgccgcctgacgccgaacgccaacagctccaccgttgccgatacggtgaacatcctctcgctgacggagatcatcgacgccaagctgcgctatcccaactgcgcgctggcggcggtgcaggtggacgcgagcgccttccagaacgtcccctcgcgcgcctaccagatctggggtcgcatcatccgggtgccgagcaactacgacccgcgcacgcgggcctacagtggcatctgggacggaaccttcaagtcggcatggaccaacaacccggcctgggtgttcttcgacattgtcaccaacgaccgtttcggcctgggcaatcggatcccgctggattgggtggacaagtggcggctgtacgagatcgcgcggtactgcgatcagctggtcagcgacggcatgggcggccaggagccccggttcacctgtagcctgtacctgcaaacccgagcggatgcgtacaaggtcctgcaggacatggccagcatgttccgtggcatcagcttctatgctgccggtcaggtcatggcctcagcggacatgccgaaggacccggtctacacctacagccaggccaatgtggtcgacggccggttcgcctacgagggtagcgcgcgcaaggttcgccataccgttgcgctggtgtcgtggaccgatcctgacgacttcggccggcagaaggtagagccggtgcagctgcacgacggcatcgcccgctatggtgtgaaccagattgaggtcaccgcgctaggctgccattcgaagtcgcaggcgcagcgggtgggcaaccacatcctctacagcgagaacctggagacggagacggtcaccttcgccgtgggtctggacgcgctgaactgcatgccgggcgatgtgattcaggtggctgacgccaaccgcgcagggcgccgcaactctgggcgcatcagcgcggcatccgccaacagcctgacgcttgacgtggtgccgccgacaatggccgtgggtgatcgcctccgggcgacgctgccgagcggtaaggccgaggcgcgcaccatcaacgggatcaacccggccacgcgcgtagtgactgtctcggcgccgtggagtgcggtgccggtggcacagtcgatctgggcgaccgagtcgaccgacctagtgctgcagcagttccgcgtgctgagcatcgccgaggaggagggactcacctaccgcatcacggcgctgcagcaccgaccggacaagttcgcggcgatcgatgacggcacccgcctggagccgccaccgatcagcgtcattccgccgagcgtgcagccgccgccggccaacgtgcgcatgtcgtcccatgtggtgatcgaccagggcatcgccacgccggtgctgacgatcgagtgggatgcggccgataaggctatcgcctacgacgtggagtggcgtcgggacgacctgaactgggtacgtgcgggcagggtagggaccaccagctgcgaggtgcggggcatctatgccggcaagtacctggctagggtgcgcgcggtcaatgcgctcaacgcggtttcgcagccgacgctgagcatgctcacggacatcaagggcaagaccgagccgccgccggcgttgacctcgctaaccgccacgccggtggtgttcggcatccagctggcttggggcttcccgcctggcgctaccgacaccgagcggaccgagatctggcgcagtgccgggccggaccgcgccggcgccacgaagttcgccgacttcgcctacccgcagaaccgctaccagttcgacggactcgcggccggtgccaagttctacttctggggccggctggtggataagagcggaaacatcggcccgtggtatccggccggtgctggcgtcatgggtcaggccagcacggacctgagtcagtacgaggattacttccgcggcaagatcatggagagctcgctggggcaggagctgctggcgaagatcgaaagcaccagtgggttggtgccgttgatctggaccgaaggtgccacctacgagccgggccaaaccgtggtcgacaatgggcgaatctggttgtggaacggtcctggcaacgggaacgagcggccgccaggcacgaaatggacgaacgtgggcgatgcgcttgccgagtcgggggcgctggtcgggcgcatgaaccgggtcgagatggatatcggcgagctggacggcaaggtcactgcgcagggaaagaagatcgacggcattttcgcgcaggtggacgcgcgcggcgccggcgacaccgatggcggtgccggcgacaccacagcgtacgcaggcgtcatgtcggtgcaggccgtggcagcgatggatggctactccatggccaaacgaaccgatacggtcgaggccaaggtcgacgaaacccaggcgttggggcagcagacgttccaggcgctggtcgacatggacggcaagatcagcgtctcgtacagcttgaagatgcagatcgccgccaatggccagtactacgcggccggcatgggcattggcatcgagaaccaaccggacggcagctaccagagccagatcctgttccaggccgaccggttcgcggtgatcaacctggtgaacgggaacgtcacgtcaccctttgtgatccagggcgggcagatcttcatcagccaggcattgatcggcaccggctggatcaccaacgcgatgatcgggaaccagattgcgtcgtcgtcggtgaatggcggcgggcttccgcgctgggagatcaacaaggacggtggtcgcgttgttcggggcgacggtttcaccatcaacgagcacccgacctatggctatcgcatgaccgacaaccagacgggcgtcaacttcatcgagatcggggagctgagctga

SEQ ID NO: 509406 - DNA, 549 bp, Stenotrophomonas maltophilia
atgtcagcgcaactcggaaagaacgcagcaaagaaaataggaaatatggccttcactgtcgcagccgatgaaattcgcatactcaacgcggcatcacatgccaaagtgacatctggcccccttaccgtgtgcacctacggcatatggaaaattgcccctaaaaatggcgccacatcgcactacttatttgctcacttctccaacaacagcacggtgtgggacatgaagcgacggatccaagcagaacttgttcagcggaagttgacggaccacaccatcgaaaccctcgccattcgaactgcccctgacactcaggtgccgaacgcgaccatcaacacgctagacgttgcagtcgagacgtccatgtatttcaccaagggcagccagagcgccgaatataagatggcggaaaaggccgaaggcgccggaagctttgttacagaatgcgtcgtcacattcacacccggtagcgaaccaatagtgccgaagtacaaaggaatgtttgaaagggctcgagagctcatgtttggaccaggacactccgtctga

SEQ ID NO: 509407 - DNA, 1233 bp, Stenotrophomonas maltophilia
atgatcaccgccgatgcccagcagcttgaaccgggtggccgcgtcacggtctacgagctggacgccagcagcttcggcgcagaccagctgttcttccacgcgcacctgcagtccggcgtgatctggtggcaggggcaggagtacggcgcctggccgattgaggccacgggcttcgagcgcaccagcgaccagccgccgaacccgaggctgaaggtcggcaacctggacggccggatctcggccatgtgcatgctctatggcgacatggtcggggccaaggtgatccgccggcagacgctagtgaagtatctggacgggaagaacttccctccattgcgtaatcggctggtgaatagcggttttgggttgcgtcctgccgatgcgaatccaccgacgagctggacttggggagggaacaccccaggtactgttcgcagctacatcccatctgggctgccaggcagcggcacggcagtcaggatgagcggcacagcttcggccgtgaatcagtatctggaactacgcacgcccgacctggtcgttcctgttgaaccgaatatgccgtttgttgccagcgcctacctgcgtggaacgctggggatgccgtccatcatcatctggttccttgattcgacaggagccacggtggggagtgcgcagcagagcggcttcgcgatgcccgcgcagttcgagaggaagtccactgtgccccgcatcgtgccaccgaacgcagcctttgcacgtgtctacttccgtgtgcagtccaccgctgccagccaagcgatccagatggatgtgaccaacgttcagttcgagcaaggaactactgcgaccgagtatcagtttaccggcgctgatctggacgctggtcgtaaccccaccgccgaccccaacgagcacttcctggacgagatctggttcatcgagcgcaaggtctccgagacgaaggaggtggtcgagttcgagctgaccactgcgatcgacctcaacggcgagcagctgcccggccggcagatcatctcgggtgtttgcggttggttgatcaggggcggctaccgcgggccgttctgcggctacaccggcccggccgtggccgacgccaacgacgtgcccaccaccgacccgtcgcgcgaccagtgcagcgggctggtgcggggctgcaagctgcgctttggcgcggacagcccgatcccttatggcggattccccgcggctgggctgttgcgcacgtag

SEQ ID NO: 509408 - DNA, 825 bp, Stenotrophomonas maltophilia
atggcgcagaaactcattgacctgcttacccagcatccaacgtgggtaggcgacctgttcccggtagccttcgggaagtgcaacgacaacttcacagagctgtatgcgcttctggccgcagccataagcaactcgttggacagagggctgatcagtagcaacggcctgctcctgtctttctccggatccaccttgagcttgtcgcctggggtcgctttcattccatccacgggaaagctccttgccgtaaccgccaccctttcgaaggcgctgagcggtatgacccccaatacctggtatcacgtctatctgttcccaaaggcagatgggacgccagacttcgaagtggtcaccacggcaccgtcagctgtctacttcggcacggcacgcaccaagaacgctgacaattcaaggcgctatgtaggcagcgtgcgggtgggggcaacgggggtgctgaagttcgagcaccacggcgaccgggtggtgtacctagaagatacccagggcgcgccgtttcaggtgcttgccgcgggatcgtctaacgtggctgcaactgtgagtgccgcacaggttgcgccggtcaccgcctacgcggtgctgctgaacgcgcttaacgccgctaccaacggtgcatacacccggctttccaacagcaaaggcccatcagctcagagcggatacatggccctggcggcgccaagtagcgcgtcggttgtgcagatgcccgtcgacggtgcccaggcctacacctacgcctacgaccttgcgccatcgccagccggtgcggcgtatcaccgcatcaacggctacttcttcgaacggtga

SEQ ID NO: 509409 - DNA, 225 bp, Stenotrophomonas maltophilia
atggccatgaaactgaaacttgagaagttctcggtatacgaagcaactgcagacgaaggcccatccgtgggtgcgagtttggcgatcgtgttttctgaggagcccgatggagtccttctcgtgtcgggctcgatagggatcacttttgaacacccgaacccgaacgaactgactttcccgcaagtcgaggagctggctagggaacgcatccttgccgcgctgtaa

SEQ ID NO: 509410 - DNA, 537 bp, Stenotrophomonas maltophilia
atgaaagcgatcacagcgttggcagttgtggtggttgcgtgtgcgggatgctccacccttaagaatgagccgatccatgtttctgacggtgccgttcggaagacggttgggacggtgacaacctggagtccggataaggccgccgccgtcgtggtggataacaaggtctgcatgcagctgccgacccggatagtctccctcagcactggtggcaaggggatggtcgcagtcgacgggaatgggatccccatttcgtcaggaggaaagatcaagggtgctgccggaggcgatggcaatttccagtccactgccgcgcccacgttccatgcttccgagcgagtaacgttcctatcgcacagccttttctacctctgccagttggcgatgaacggcgcactggacaagtcccaagtcagccagatgatgcagttcgtggtggttgaagcggcgaaaatcaccccgccgcctgaaccacctttgttgaggacaatgtcggtgccctcaggccaatctacgccgcagtacaaacaagagtga

SEQ ID NO: 509411 - DNA, 192 bp, Stenotrophomonas maltophilia
atggacgagaagaagatcgttcggatctactccgagaacactaggcccggagcaacggatgagctgagggtcgttgtgggtgacgaggtcatcccctacgtgcacaagatcgagctgggcgagaacggtgaactggtgtacggcgatttcatcattgcccgcatcacagttgcggtgaagctcggaaaatga

SEQ ID NO: 509412 - DNA, 351 bp, Stenotrophomonas maltophilia
atgaagatcaagaacaaccacaatggtccgctgggcttgcccgacggcacgattctgccgccgggcgagcagaccccagtcgcgaactgggaggagctgaagaagaactcggtggtgcagggctggatcaaggccgagatcctgagcatcaccggtggcgacgccagcagcagcgggcaggccgccggcagcaatccgggcggcgagggcggcgccgacaaggacgccctgatcgcgcgcgccaaggagctgggcatcgatgcgaagggcaactggggtgtgccgaagctgcaggcggccattgcagaagccgagaaggccgccggcagcaatccgggcggcgagggctga

SEQ ID NO: 509413 - DNA, 933 bp, Stenotrophomonas maltophilia
atgagcgcaattcccctgatcgacgcccaggcagccctgggcttcgtgatcgcccaggcctccatcatcgagccgggcatctaccgcaccatctacccggacgtgcagtaccgcaccctggtgcccgttgacaccaccggcagcgagttcgccacctcggtgacctacatgtcgcaggaccagtatggcaaggccgactggatcaacggcaacgccgatgacatcccgaaggccggcactgttcgctcgaagttcgagacgccggtctacaccgctggtatcggctacggcttcggttgggaagagatcggccgcgcccagatgctgggcatcaacctgtcgaccgaagatgcagccgccgcgcgccgggcgtctgaagagatggtcgatcgcgtcgcgcttctgggcgatgccagcaagggcttcaccggcctgttcaatgccgctggcgtagttccgactgctgccccgactggcaactggacggtttctaccgactccgagctgatcgtgggtgtgctcaaccaggcgctgctcaacgtgttcaacggcacgaacacggcgtcgatcgcgaacacgctgctgctgccctggacgaagttcaacctgctcgccacccgcaagatgagcgagcacagcgacaagaccatcatccagtggtacctggagaacaacctgtacaccgtgcagaccgggcagcagctgaccctgcgcggcgtgcgtggcctggacaccgccggcgtcggcggcaccacgcggctggtggcgtaccgcaacgatccgcaggtgctgaagctgcacatgccgatgccgcaccgcttcctgccggcctggcagagcggcccgctgcgctgggacattcccggcgtgatgcgcctgggtggcctggacgtgcgcctgcccaaggaagtcgtctacctggacggcatctga

SEQ ID NO: 509414 - DNA, 468 bp, Stenotrophomonas maltophilia
atggcactgcagaccaactatccggacatccagcccgccgctatcgctggcgcgccggccaccatgctgccggccaccgagatctcccgcaccgtcgaaggtgccgccatcgcctttggcaaggctgtggagcagggtgccaccgacaagtcggttaaggccttcgccggcggcaagtatgtcggcatcgcccagctggaccgctcggcatccggcttgaccgtggtcgctggccaggtcaccggtcgtgctatcgatgctttcggcgtgggcgagtcggcccgtgtccgcaccaagggcgacctgtgggtgaccgccgcagtggcggtggccgcaggcgacgccgtctacctgaccgccgccggcgcgttcaccaacgtggcaaccgacaacaccgccatccctggcgcccgctgggacaccagcactgccgccgccggtcagctggccgtcgtccgtctcggctaa

SEQ ID NO: 509415 - DNA, 1203 bp, Stenotrophomonas maltophilia
atggagatcttcgacagcctggcgctcgatgcgtccgggcttgctttcacgcgggacggttatctagtcggcgacgccagggtcagtcgcgccggcaatgtgcagcagtacctgggccgcgaactgggcctgaccggtgacgatgccggtcgggtgttcggcgtctaccgcgatccggccacggtgttcgatgaggacagcatgcgctcgctggtcggccggccggtcactcgcggtcatccgccgaagggcgtcaccgccgacaactggaaggagctgacggtcgggcaggtgggcggtcgtgtagtgcgcgacggcgaacacgtagttgctcccatggcgatcatggacgccgcatctgcgaaggaggtggctgccggcgcgcgctcgctgtctgccggctactcggtggagatcgtcgccgacgagggcattgctccggacggcaccccgtaccagtaccggcaggccggcccgctgcgcttcaaccatgtggcctacctgccggacaacaacccgcgcgccggcaacacccgcatcggcgattcgcaatggggtccggccccactcacgcagtacgaactcgcgctagtcgaccgggcgcgtggtcagcagcaccagcacggcgacgaccacaatccatctacgaggaaagaacccatgagcgacaagaccatcttggtcgatgggctgtccgtcgtcaccaacgacgccggcgcccaggccattggcaagctgcagcagcagctgaaggacgcgcaggccgccgctggcaccgccgacgctgcccacaaggccgccatcgacgccaaggacgcggccatcgccaagatcgaggccgagcgcgatgacctgaaggccaaggtgctgagcgacgccgacctggatcagcgcgtgcagcagcgcggcgacctggtggccaaggccaaggccgtgcacgacgctgactacagcggcaagaccgacgccgaggtgcgcaagatcgcagtggtggcgaagctcggcgacgccgcggtggcgggcaaggccgacgcctacatcgaagcccgcttcgacatcctggcagacagcgccaagccgcgcgacccggtggtcgttgccctcggcgaccgcaccacccaccgccagccggtgcaggacaacggctacgccgcgtccgtggccgccctggaccaccgcaccgccggccagaaggaggcctaa

SEQ ID NO: 509416 - DNA, 1347 bp, Stenotrophomonas maltophilia
atgtgccggcacctggaggcggtcaccgaaggccgtatccagtttctgctgatgaccgtgccgcccggcatgatgaagtcgctgctgatggtgttctggaccgcttgggaatggggcccggtcgggcgcccggacctacagacgctggccacctcctacagccagccgaacgtcctgcgcgacaatctgaagctgcggcgcctcatcgagagcgaccagttccaggcggcctggccgatgaagcttcgcggcgaccagaacgccaagggtaagttcgaaaataccgggaacggcttcagcgaggcccgacccttcagctccatgaccggtggccgcggcgaccgggtgaaggtggacgatccgcattcgaccgagacggccgagagcgacgccgaacgcaagactgccgtccgcatcttccgagagggcatcaccgaccgcctcaacgacatcacctcgtcggccatggtcatcatcatgcagcgcctgcaccagcaggacgttgcagcggtggcgatggagctggacctgggcttcgtgcacctcaatctgcctatggagttcgaggcagagcgggtcgacaaggatggcaagaagaccggcggcccttgccgcacctacatcgatggtgagctcttcttcgaagatccacgcaccgaggagggcgagctgctgttccccgagcgcttcccgcgcgccgaggtggagcgcctgaagcgcgccaagggttcatacgcgtgggccggccagtaccagcagcggccgaccccgcgcgatggcggcatgttcaggcgggagtggttcgagatcgtagaggccgcgccggccatctcggcggcgcggaaagtcaggcgttgggacttcgccgccacggacccgaaggaaaagaccagcagcgaccccgactacacagtaggtctgctgctgggcgaggtcggcggcatctactacgtgctggacgtggtgcgtgaccaggtctcacccgccggcgtcgaaaggatgctcaagaacactgcgctgcaggatggcaagggcatcaaggtccgcattccgcaggatccgggggccgccggcaagagcaacgctgctcaccaggtgaagctcctggcgggctgggacgtgaaggcagttcttgaatccggatcaaagcaggtacgcctcacaccggttgaagcgcaagcagaggcgggcaacgtaaagctggtgcgggcgccctggaaccaagcgtttctggatgaaatttgcgacataccaaatggcaagcacgacgatcagggcgacggactgtccggcgccttcgctgaactggtcaccggcagcacctacaaccttgggaacgcgctctga

SEQ ID NO: 509417 - DNA, 207 bp, Stenotrophomonas maltophilia
atgaccaagttcaacaaaatcactgctgaaatcccaggtctttacatcaaggccatgcagatcactgcgcccgaaaccggacaagtcgacttcactccaatccaacatgggatcattgcgcgtgcgctaactgcatgccctgagtacatgcaaccggagctactcaaccgcctcaaggaaatcgagaggcgcaatcggacttggtag

SEQ ID NO: 509418 - DNA, 489 bp, Stenotrophomonas maltophilia
atgaaccggatcgccatctacctgctggctttcgtagcctggtccgctggcatgttcggtgccggctgggcctggcgcggtggccgggccgaaatcggggaagctcggcagcaggccagcaccagcgccgggcaagtccagcagctcaccgagacccgtgccgtcgagcacagccaggccgaggcgctggccaccatcggagccaagcatgaagaagatcgcaccgcggccacggccgtccctgctgctgttgctgctggcgtgcgtgatggcagcctccagctgcgcgacgacctcgccacctgcaataccgctcgcctgtccgaagccgccgccggcgccgtcgaacgtgaccaggaagcccaactacgagcagaggtcgcgggagctcttgttcaaatcgggcgggacgcagacgaccacgtccgggcctgccaggccgtgattgcggtagatcgtggaatggattcggtcgccgacggaggctaa

SEQ ID NO: 509419 - DNA, 318 bp, Stenotrophomonas maltophilia
atgctgcattcattggcacacattggccatggtcatgagaaggggaaggcaattccaatctacttctactgcttccccgaccgggctgaggatctcgaagcgcaactaagagctgacggcctggagcgctttcacgtgatggacatcctgcagctcaagttgattgcagtgcggtgttacaacgaattcacggatcgtttggaagaggacgcggagctttctgcgaaggtcgcggttgtcgcgaagaaccttgggaaggacctactgtttcgacgcttcctcgccgcctttcccgcaaccttgggtactggcgcttga

SEQ ID NO: 509420 - DNA, 510 bp, Stenotrophomonas maltophilia
atggcgacccgccgcctgacctttggcatcgaccccggtctttccggcgcggtggccaccctgatcgacggtgcccctggcccgatcctggacatgcccacccgagaggtggacggctggaaggaggtcgacgcacgcgctgtggccacctttatccgtgcccagcgagaggcccatccgggtgccgagctgcaggcagccttggagaaggtcggtgcacggcccggtgatgggggtaccagcgcatttcgcttcggcgatagctacggccaggcccgcgcagtgctgcaggtgatgggcgtgccctacctgcgcgccatcccggcagtctggaagcgccgctttggcctgatcggccaggacaaggatgcggctcgcttgctggccatccagcgcttgccatccgccgcgtttcagttgcagcggaagaaggacaacggccgggccgacgcgctgctgatcgcgctgtgggccgagcaccagctggccttgggccaggccgccgcatga

SEQ ID NO: 509421 - DNA, 384 bp, Stenotrophomonas maltophilia
atgaggcgcggacgctccaccggcaagccgaccatcgcccagcagcaacgcatgagtaacatcacggagattggctgcatcgtctgcgacgccctcggccacggcttcatggcttgccaggtgcaccacctgttggtcggcggcaatcacggccagccccggcgcggccacgacttcaccatcggcctgtgcccttggcaccacgtcggtgagccgatggcgggcctcagccactccgcctgcgccgatcggtatggccccagctacgcccgcgaaccgcgacggttccggcaagagatcggcaccgacgactacctgctagacctgcaaaacacccttatcgaaaagcacctggagaagacctcatggcgacccgccgcctga

SEQ ID NO: 509422 - DNA, 222 bp, Stenotrophomonas maltophilia
atgattagagaggcagacgcctttgtcgcagcctacgtcgaagagttgaacaaaccttcgccgcatagaggcagcctcgctgatgccgccgagctggctcgctccgctgttaccgaagcccacaaaactgccttcgaggtgtacacccacctgcaggaattgagcatcttcaccaggttgcgtctgaagtggaagttttggcgcgcgaggaaggcccgctag

SEQ ID NO: 509423 - DNA, 876 bp, Stenotrophomonas maltophilia
atgagcgttcagttctcttggcagtccgctgtcacgaggtccgagctcgagggctcaaccaagctggtgctgctggtgatcggcacgtatatgaaccagcacggcgatggcgcattcccgtcgtatcggaccatcgcagctggggcttcgctgaaccgtgcgaccgtgattcgccacgtggatatcgcggtctcgcaggggtggttgaagaagaagagccggatccggattgctggtgcgtctggtcggctggaagcggactcgaacacataccagattgccttcccggtggtcgcggaggacgaccagggtggtcgcacagagcgaccacccctagtcgcacagaacgaccaccctagtcgcacaggacgactaggggtggtcgcacagggcgaccctaacaccccatctttaccaccccaagtaacacaagaaccccccataccccccaaagggggcgacgacgtgggttcgaaacccaagtccggggacaaggccaagcccaagtcgaagcgaccgaagcgcgagctggtggccttcccgcagttcgtggaggcatgccggtctgcgggcgagcgactggtccgtgctgacgacccgatcttccaattcgccaaagacgctggcattccgcgcgagttcgtggcgctggcctggcgcgaatttgctatcaagcacggcgagagcgacaagcagcagaaggactggcgagcctacttccgcgacgccatccgtcggaactggttcaagctctggtggttcccacctgctggcggctgcgagctgacaaccgctggtgtgcaggtcaagcgagaacgtgacgctgagcgcgaacgtgatcggcaggagcagcaccagcaggaaaaagtcgcatga

SEQ ID NO: 509424 - DNA, 222 bp, Stenotrophomonas maltophilia
atgagccaagcacctgtgtcactgggcgctgttggagagaagacggccgagttggaagcacggctgcgtgccatggaggttttgctggagcaggtcatcagcacgatccctccgggcaaacgagagccgctctacgctcaggcgaagcaggctcttctgctatatccccaggcagcgtcggccgtgaaggcgatcgaagccattcggatgcgcgttccctag

SEQ ID NO: 509425 - DNA, 225 bp, Stenotrophomonas maltophilia
atgaacacactaacccaggcagtcgaagcagctggaggcgtcggaaagctcgcggcctctattggcgtcgcccagaacgtggtcagcaattggcgcaagcgcgggaaggtccctgcggagcacgtcctcgccatcgaggcagccacaggcgtatcccgccatctgctgcggccggacgtgttcggaccaccggccgccaacgacgaacacgcggaggcggcctga

SEQ ID NO: 509426 - DNA, 360 bp, Stenotrophomonas maltophilia
atgggattgagcaacgatcgattcggagagctggcacgacgtctggccgctaggactgcagagattgagtcccaacacgcggccaggcctcgcctacagatcgtgaagccccatccgccaccggacttggacgctctaaccagggattcacattgcaagatgatccggcacctgcggcggcgctggggtttccccatgcaggtcatcatcgaccaagcgaccttcggcctttcttccattgatgccttggaggacgacgcactgatgcagctacaccgtgacctggaaagagcacaggactgcatgcgtgagggtatcagcttcgaagacgcgggcctgctacgttcgcagtttggctag

SEQ ID NO: 509427 - DNA, 618 bp, Stenotrophomonas maltophilia
atgaaactcaagcttttgctatgcactgcactactggctggctgcaccggctcgcatgaaccacccgcgccggaagcaatcaacgatagttcagctcacgacatcgtcgggatcaagctcggtgccgatatgcaggccatcgcagagtgcagcaagcatcgcgaaggggaattcaatgtgtactcgataccctacggtccgcgtccatgcatagccaattcacacctatctctgaactcgccgaactcttccgaggctgatcctggtatcaaagcaggcgcatcagagatcgaggtccagatcgctccgccattcggagtgagatcccaggctgaagtcagggtagttgacggccgtgtcgtgcaggtactgattccaacgtcgcctgtcgacgcacagcgtaacgtactcgatgcacttactgaaaagtacgggaagccgacgtccttgcaagtgcggccaatgcagaacgcgttcggcgcgaagctagattccatcgaggcaagctggaacctaccgcgtatggagatctccttcattggcgctgtgagtttggatgaaggcgtgatagtcgccgccgtcccaggtaggccttcttccaagcccgcgaagttctga

SEQ ID NO: 509428 - DNA, 366 bp, Stenotrophomonas maltophilia
atggaccacaccgccctcaattcagcttcccgcaacgcccagcgcagcctggacaaccaggaagacccgcgtttcgaggccgagtacgccgaagagcgcgttgccgaactggccgtcagctaccgcagcaatccggacatgtgccgagaagcggccagctggaccgccggcacgctcggcggccggtactacaccgacctgcagctggtcctgcaccgcctccaccacacccaccccgccgacctcaggggcacggagctgctgacccagctgtaccggctggcgcgtgttgagggtgaagcgctggacgcgcagctggtgctgctggcccgtgttgccgtggccgacctgcaggtggcggcatga

SEQ ID NO: 509429 - DNA, 846 bp, Stenotrophomonas maltophilia
atgaatgcccaagttcagcaggacggcgccctcgttgtgcagccgcgccagcaattcgacctcagcccgcagactttcgagcaggccctgaccttcgccgacatcctcgccgacagcgacctggtcccgaaggacttcaagggcaagcccggcaactgcctcatcgcaatgcagtggggggccgagcttggcctgaagccactccaggcgctgcagaacatcgccatcatcaacggtcgccccgcgctctggggtgatgcggtcatcgccctggtgcgcagctccccgctgtgcgagtacatcaccgaggccgacgacggcggtaccgccgtgtgccgtgtgaagcgccgcggcgagtccgaagaggtccgcaccttcagcatggacgatgccaaggtggccggcttgctgggcaagagcggcccctggacgcagtacccgaagcgcatgcgccagatgcgcgcccgcgcctttgccctgcgcgacgtgttccccgacgtcctgcgcggcatgcccatcgccgaggaagtcatggacatcccccaggcaggtgcgaccagcaacgagcagccgcgcgccgccatcgagggccaggccgacaagcagctgccgctctactccgaagctgacttcgcggccaacctgccgaaatggtgggacatcatcgccagcggcaagaagtcccccgaggatctgatcgccaccctgcagacgaaagttcgcttcaccgctgaccagctgaaggagatccgcaatcctcccaaggatgaggcggatgccaaccaagcgccgaccgacgctgcctccgccgccgacggcgcgacccagacagcggtggagggctga

SEQ ID NO: 509430 - DNA, 1758 bp, Stenotrophomonas maltophilia
atgcgcaccgtgaacctgatccagggcacgccggaatggcatgcccaccgcgccagccacttcaacgccagcgatgcgccggccatgatgggatgcagcccgtacaagacccgcagccagctgctgcgcgagttcgccaccggcgcagccatcgagcacgacgcggccacgctgcagcgcttcgccgatggccaccgcttcgaggaactggcccggccgctggccgaacgcattatcggcgaggagctgtacccctgcgtcggtgtcgacggcaagtactcggccagcttcgacggcctgaccctgctggaggacaaggcgttcgagcacaagtctctcaacgacgacctgcgtctggccatgccggtggacggcggtgacgcctgcctgccgctgcactaccaggtgcagatggaacatcaggcgatggtcagcggcgccgagcgcgtgctgttcatggcatcgaagtggaacggcgacgagctggtcgaggagcgccactgctggtacaccccgaacccagatctgcgcgccaagatcgtggccggctgggcccagttcgatgccgacgtgatggcctacgacccggcgccggcggccgagccggtggccgccggccgcgccccggaccagatgccggccctgcgcatcgaagtgaccggcatggtcaccgcgtcgaatctggccgagtggaaggaacaggccatcgccgtgttccagggcatcagcaccgagctggtcagcgaccaggacttcgcggatgccgagaagacggtgaagtggtgcggcgacatcgaggaccagctgaaggcggcaaagcagcatgccctcagccagacccagagcatcgacctgctgttcaagaccatcgacgccattgccgaggaagcccgctctaagcgcctggcactggagaagcgcgtcaagacccgcaaggacgagcgtcgcaccgagatcggcaacgcggcacgccgcgcggtgcagcagcacgtgctggccatcaacgagacgctgggcgagcacgccatcccgatgccggccacgctgattgccgatatcgccgacgctatgaagggcaagcgctcgttcgccagcatgcaggaagcagtggacacggtggctgccaacgccaaggtcgacgccagccagtcggccgagcggatccgcgccaacatccgcgtcatggagatggaggtgggcacgcacgccgcactgttcccggaccgtgtgcagctgtgctccacgaagtcggcggaggacctgcgcaacctgatggccgcacgcatcagccagcaccagcaggccgagcaggaacgtctggacgcggagcgcgagaagatccgcaaggaggaagaagcccgcgcgcagaaggcctcggccgacgctgcagctgtagcagccgaggcaaagcagaccgcagtggcgaaagctcagcccgaagccgccgcagaagctacacggcatgtggaacgaaacgggcccgactcgcacgcaagcactttccctggccaccccgccttccacggaatcgagacagccaccgggcgcgaagtggtcaagatcaagctgggccaggtagtggacctgattgcgccgctgaagatcgacgccgagggcttgcgccagctgggcttcgagccggtctccaccgagcgcggatcgaagctctacgacgctagccagatcgatgccatgcgcggcgcgatgatccgccacctgcagcagcctctgcccgacacctacgcgcaggcagcgtga

SEQ ID NO: 509431 - DNA, 258 bp, Stenotrophomonas maltophilia
atgagccgccacatcgcccgccgcgcccccaaggaaactgtcggcttcgcctggggccgattcccgaccatggacggcagcgccgtcacctggcgcctgtaccgccgcgaccaccgccgtgcgctgcacatgcacacggagaccttctttgcccatgaagaccgcgccgtgatcgctggctgcctgcgccgcgcgcgccggtccctgcgcgacagggtggacgacatggacctggtggcgatgggggtggcggcgtga

SEQ ID NO: 509432 - DNA, 723 bp, Stenotrophomonas maltophilia
atggctattgagttctgtccgctggcggacgaagtggggaatctggccgattggttcgcggttggcgtcggcttcatcgcggcagtgagcacgacggttgtggcctatttggcttaccgaacttccgagcgagccgcaggcatcgctgaggaggcaaagggaatcgcgctgcagcagcacggtgaggccgttgctctccgagagggaaccgcacggatactgggaagactcttgattaccgagattggttcgcttccagctcgactggatatgattcgacgtctgttggatgagtcgatcgcctttaacggatccattgaggtgaagagccttcccaagctcacagaggccttggaagaggcgcaggccgtgttgacgcctagttccgcagcagtaacagacaggatccacaatcttccggacgcgctcggcgctgatctggcgagtttgattggcaactgcgaagctctgaacaccctcgccgctaggactagagccgggacgagcctcaacttggaaggtgatgtgggcaggcccggacgtctccgttacggaagcgatcttggggagctgaaactggtggttcagcacacttctgcctgcacgctcatggcggcccagtttgcggttcaatttggccaatacacgggggtagataccggggcctacacagacatcgaatccagggcgcgcgaggtcttggagcattggaaggatgcgtaa

SEQ ID NO: 509433 - DNA, 129 bp, Stenotrophomonas maltophilia
atgacctacatccatccgaacgaccgggtctacgcgctggagcgcgctgtggacgccgccatcgcccagggcgagggatacaaatccgacattgccctgatcgacagcaaggcggtgggcaatggctga

SEQ ID NO: 509434 - DNA, 534 bp, Stenotrophomonas maltophilia
atgtacttcgccgagatcatggttccgtgcttcgagtacggcgggaactgcaggatggactgggttgcggtagctgccataggcgggtgggctgccgcgtttgcaaccttcttcgcagtccttcttccgtatcgcgcgggaaaacgcaaagcggaatatgctcagcatctggcggcacttgatttcggcattttcttgagtgacttggaataccgggccgggtttgcttttaacctcatggacgtccggagcggtaatcaaacgtggttctccaaagttgattgggaaacgctccgccttccaccggtcgtccatgggtttgagcctgggaagagaaccctttccctccttatcgagatcaaattgctccagactgaaatttcggagtggaacggctttttgagcattcacacgcaagttgacgatctgagcgaaaaacaccagagggaagtgattgcctctcttgtccgcagcttcaagccagtgcaggagagaatttcggaggtgcgcaaagcctttgactctgccatctag

SEQ ID NO: 509435 - DNA, 675 bp, Stenotrophomonas maltophilia
atgagcatggtcaacgcgcttagccagtgttggtggttggggaagagctgcgttccggactggaacgcatgggctgttgcagcaggggtcgctgctgttgtgaccactgcggttctgggtgtcgtcacgtacaggctcggtaaggccgccaatagtgctagtgccgctgcagtgcaaattgctggatttcaggcagacaaacaggcatatcgcgaagaatccgagcgactgctcgtgctggtccagatcgttgccgaggtgtcgagtaacgccggcctgcttggcaaccttcttggcctcctcagtcaagagaacagcgaagccgtcttcgttacggacagagctttccagaaccgaatcttcggtcgattgaacaaactctcgttcctgtcgctggagcgcgtgcgggatcgactccactatctcgatagaaagacagcagcctgctatgtgcgcgcgatagggatgtttgagctcttgcaaagtggagacaagcacagagatggaaccgaaacccaagatgagttgcgaactggatttagagccctgcgagcaactatcccctggatcattgaggatctgcatgtcgtggaagctgaaggcatcgcagccgtaaatcgactcggcctccacaaggatccggccacattgcaagccgcaaatctcgatagatga

SEQ ID NO: 509436 - DNA, 150 bp, Stenotrophomonas maltophilia
atgactgaccagctgctcaccgctgcaatggtccacgtgttcgccctggccggctttgcggccggcatcgccaccctgtgggcgatcagcagcgcatgccgcgccgcgcgcgccgggctgcgctggtgctggcgaaaggcggtgacctga

SEQ ID NO: 509437 - DNA, 231 bp, Stenotrophomonas maltophilia
atgccgcgccgcgcgcgccgggctgcgctggtgctggcgaaaggcggtgacctgatggacgcatacgcacaggccaagcacaccgcacgcgtgtttctggccgagtgccgcgcccggcggcatggcctcggctactggttctccttcaacgccgcacagcgcgcacgcatgcgcgccactgccccatccccgccgccggcgctgccggcgcaactggacctgttcgcatga

SEQ ID NO: 509438 - DNA, 723 bp, Stenotrophomonas maltophilia
atgacgcgtccattgagtgtcctgctggtggacgacgttgcactggcgcgtggccgcctgcgccagttgctggttgacattccgcaggtccggatcgatgccgaagccgccactctttcgcaggcacgcgagcagctgcgggggcgccgattcgatctgttgctgctggatctggtgctgcccgacggtcgcggctgggagttgccgcagcagcagccggcgctggcggcacacaccatcttcgtcaccgcgctgccacagcacgcgctgcgcgcctttgaactgggcgtagccgactatctgcttaaaccggtggcggcgccgcgcctgcaggaagcgatcgagcgcgtgcgccggttggcggggctggcaccggctacggaccacggtgcgcaggcgctggcagtacctggtaccggtagcgtccagtatgtgccgctggcgcagatcgactatgtcgacatggccggacactacgcctgcgtgcacgtaggacagcaactgcatctgctgcgcgaacctctggcacagctggccgggcgactggcggggggagggctgctgcgcgtgcatcgttcgatactggtgaatccgctgcgggtgcgatcactgatcgagcgtcacaatggcgatgcgctgcttgtgttggccgacgatgtgcagctaccggtcagccgcagctaccggccggcgctggaagcagcactggcgacacgtacctga

SEQ ID NO: 509439 - DNA, 984 bp, Stenotrophomonas maltophilia
atgctggccctgtgggggctgttgatcgccactgcggtgcctgcagtacacctgagccagacacccggtggtctgctgccggcggcgttgttcatcctgggcgccgagctgccctggatgctggcgacgccggcgttgtgggcagcgtgccggcgctggccactgcctggacgccggcatctgattggctggctgggtctgggcctgctgctgacgccattgctgaccgcactgggatggaccttgggccacctgctgctgcaacagtggcaggcgcgaccctggcctgcaccggcgcaggtgatgcgtgcgatcggtatcacggcgttgttcgcattgccgaccttcatcgcggtggcgggcgtgggtcatggcctggccgggttgcagcgcttgaaggcgcagtcggaggtgctgcggcaggcccgtgaagccgccctgcgccaacatctgcagcaccacttcctgttcaatgcactcaacgccattggtggcctggtcctgcagcgccccggcatggcggacatggcgttggcacagctgtcctcgctgcttcgcgataccctgcaatgcccgccgcatcgcgccctggccgatgagctcggagccgcccaggactatgtggccctgcagtcgctgctgcgcgacgaggcgctgcagctgcacctgcaggccagcgcccaggccctggcgtggcaggtgccgggcctgctgctgcagccgttgatcgagaacgcggtcctgcacagcggctggcagcccggtgatgcgcccttgcggatcgagctgcatgcgcaggtggaaggaggcctgcttgaggtgacgctgttcaatccctgcatgcgcccctctacgagcgatggcctgggtactggccacgctgcggtgcagcggcggctggcgttgtcgggaggcaggctgcaggccggcagcgagcacggtggctaccgtgcacggctggtcctgccggaggtcgtcgcatga

SEQ ID NO: 509440 - DNA, 1047 bp, Stenotrophomonas maltophilia
atgagccagttcgccggctggcttacccagcggtatcgcaataatcgtccccttgccgagtacgaaagggctgccgatgtgcgtcatttcgactcatccacgtttgtcccgattgataagggaatcgtcgccattgatgatgattgcatcgaatatgttgatcgtcatttcttgtatcgaggttgggcgctgatgggggcgagcgtcttcatcatgctggggctgttgttcgtcattgcgatcctgcacgcaacttcatcgctggttgatcggactgggccgctcgaatcgaatgaggcgtatgcaatcgcaggcttgatcgccctcgttcttgtattcttggcgttcattctatggaagatgctcttccgggatatcctgcgttataggtactaccccatccgctttgatcgcgctacgcgtcaggtgcacgtcttcacgggtgggcgcaacaaggtggtgtcggcgccctggtcggatgtccacttcatcatcggcagggacaagcctgcgggacctggcgaggactacacctatgatctcaggggcctggtgatgcgcggcgatcaggtggtccacaccttcgtagtcgggtcggattgcggctccaaccccgccgtcgtgcttgcgcactgggaaatgatccggcgcttcatggaagaggggcgttccgcgctcccgttcccgccgttgcagctctacacctcggtagcaccgagcttccgcaatgcattcatcattcatgtgtcttcggccggctcagggctgatgtggatcgcgctgccgctcaccttgccctgggcactgttccgcttcctggcgatgaagctgtgccgcaagccggtctggcccacgtccatcgtcaggcgcacgacggcttctgcgggtacgccgccactccgcgcccccgttgtgtacgggcgggtcgatcatgtgggcggccgtgcggacgaaatggagcgcttctggaaggaatcgatagctgcagcgaaggcccgcaacgatgaggtgcggcagcagctgctgcgggcaaccgacggtacctga

SEQ ID NO: 509441 - DNA, 3378 bp, Stenotrophomonas maltophilia
atggcttcaggtgatagcaatcgatactcaagcaacgccatcagcgcggccaggggaaccaaggcgtgcagcgctggtggttgcccgtcatgcgtcaaatccggattgcccgtgctgcttacccggccggggttggcggaggcacgatacgccgctcgatcaagcgtgcagacacgccaattgatggctgggctttctgcgccggacctgaagttctccgactatgtcatgcgtacgctgaggacggggtacgtctacgtctactatcagacttcagagatgcatgcgctgattggtggggacgggtgggaggcctacgcagttgacgaggcgggctatgtcagcccgattccgttggagaatccgcccctgccagaggaaatgccgcgcttcagttgtgagcgtgcggcaggctatgccgccgccatgctgatcaacatcaaggagccttccaaagcgggcgaggtctgggtaggtttcagcgaagtgccgctgtccctgaaggtaaggcagaactacgctgcaaagccggaactcctgaatcagcgctttacccggctgaacgcgtccaacggtcagagtgaccgtgtgctggcgctttcggatggggcgatccagggggcaatcgtggactacgacgttgagcgtggtcgcatgcttgaaggtctgcgcggaaatcctcatcgtcccgggcaggtagcgctcgacaaggatggcaaggtcccggagaagcctgcttctgaagatgcccagaccgaagagcggcgcgaatccgcaaaggacgttgcagcagcggctgccgcaatcgcggctacctccaaggatccggccgccaagcggccgttgatcctgggtgtcagtgacccggttggcatggcccatgaagccgcgcacctgcgattgaccttgcccagcaaggctgtgaagtggttgatggcgcaaagggacggtgcgcggcgcctgcagacagctgtgacgctggtgggcgtccagcagatgctggtcgagcaggccagagtccgcgaggctgacttccgcgatcgcaatccgccggccatgtccgcgatggaccttcgcgctgagatgatcacaaaggcagaattcgaggcccgccagaaggctggcatcgttccgtcgtctgcgagttggtcgccgatcgctattccgatgagcggtccttggggcagcggcgtggcctcgagcgggcagaacggctacggcaacgtgagcgtgcccggtggtgcgttcgaggccgatgcgcttgagctgatcgagaagatcaagaaaaaggcgtcgggccggacgcgtgacaccgtcaccgggaagtggttgggctgggaggattacctgaaggagttcggcaggttctccaccgaagacaaggcgctgcgcaagcggatccagggggaccatcgcgatcttctgtcgtggaatggtcgcaaactgatcaccgagttcgacttcgatgagaccagcccggccgatggcatctattacagccaggtagttgcgaatctgttgcatggtgggcccatcgacgatgaagcagttgcatggtatgcagacttcgtaaaggatgatccaagcaacaaggacaacctcctggtcagggcaatgctgggcaatcaacaggatagttttgatcagtttgccgcgtggagtgtggaagaggggcaaaggaacaaggcgaccgacattctcaataatctgcttgatctggccgagaagctcagcgagtccaaccagggagggaaagcttccgcgctggccgtgaagcatgtcggtacgctgcgggtgcttgcacgtgcatatgccagcccgttgatcgcgatggtaggcgccgtggcgcttggcgcaggcaaggtgaagaaaacgctttctccggcattgtacgaccgggtgatggccctgatcagcagcatggtcaaacgagccgcgccacagattacgcatctgatcgtggacgcacctttgcgcatggccggtcgtgcatggcgtgaggtttcaagggcattcactgcggcagcggccgacacgccggccggcaagcagagtggcgtgaaaagcctggtggtgggaagcggaagctcgctccagctggccggtgccggtgaggcagccgacacgcgcgtcaaactgcatctctggaccaaccagagcgaagagcagttgcgcgcgcttcaatcgacggcccagcaggggcaatcggtggcaagtgcgcgaccggcaccgggatcgacagcggctgcgggcgccgcggctgcagttgcagcggctcccattaccatggggtccagtggtctgatgagtctggcttcggccactcccaaggtaattgccgatgcacctacggtgatgagtgcaggcgcaggcatcatccaggcaatggaagttgccaaggcgtggaagaagatggaagtaggcacggcgaaagaacgcagggacgccattttcagctttttctcggcgggactgggcgttgtttccgcgtttgttgacgtcgctaaatcgtatgcgcaaaccgttctaagaaagatgctcgccaagcgattggagaccactgttgcgctatttgcagcgatcggttcgttcatcgattcggcccagagctttatttcgactgctgatgatgtaaagaacgggcgtggcggtgccgcatttgctcatgtccttcagggggtttcatttttcgtgggcggatttgcgtttagtatttatgcgttctctttgcttgtccaaggatttggcgtttcgacctcttggctcggatggggcgttgtatttattgttttaggatttgctttgggctttgttgcgtctttgcttatgacgcaccctctcgaggattgggttgctaggacggtttggggcacggggatggcgtcagtctggaagtccaacgaagaagagttgaaggagttgaacaaggttctcttgggcattgagttggatgcgcagtaccgaagttctctgagctggaagaatctcagttctgttgatgatgtcattattggtggtatggtgaaacgaatgacggcgcatgattctgattcggttttcaccagggagtttgttgttaaattgaagctcgttgagcaaatgcgaaaacggctcgggattagtattttggtgaatggtcgaagggcgtccggtgtggaggcgattgctcggtattctactgatgagtcaggccgggcaggcgagaattggggggggggcgtatccggcggaaaaatggatcatacatcgttggatgccctgacgatatctggatacgttgaaagtggtcgattttcggcattggcggtagaactgaccattcgagacgctctcgatggcggggatgtcatcgtttacgaaaggatgatggtcgagtga

SEQ ID NO: 509442 - DNA, 624 bp, Stenotrophomonas maltophilia
atgatcaggaatctctttcttgcctcgcttctcgtccttggcttcggcgcgtgcagcgatgcccagacggcagctcccgcgcgtggcgaggccaatgcagcgccgcatctcacgctcaacgaagactacgtcgagtacaaagggaaacgcctgaccttcaaacaggaccttgccgcatgggaaaaggtacttggacccacgcaccgcaacgcgctttcggaggcatcggacatcgttgtctgggacgatctgggcatccgcgtctatacgaactaccccaaggacctgacggtccgcaccgtcgccgtcaccctgaagggcctgccggaggactcgctggcctacatcgcaccgggggaaggcgttcgtccccgcgccgactacaagggagctgtctcggtcagtgcggtgaaagtggacaagaatacccgggtcggggacatcgcgcgtctgagcaatgatcggctgcgcatcgactgcagccgcggcatcgatctctgcacggcaagccgcaaggatgaccggttcaaggatgtcagcacgtacttcggcgtcgacgatcgtcgatatgacagcatcccttatgagatcgagtttggtccaggacgtgatggcacccgctga

SEQ ID NO: 509443 - DNA, 297 bp, Stenotrophomonas maltophilia
atggttcttcttccggggcagtaccgcatcctggcgtatcgcggattccatgacctgccgcgaatgatgctggtaaccgatagcgcatcaaagcgctgggtgcttgactgtccgttcgaggacgaacgggatggctacgcgccggtatatcgcgttcatgccgtggatgctgatatcgcggggccttcggaggtatgggagcgtcacactcttgggttactgcccgacattggcgtcctttcagtgaatagcctgcagtttgacgagacgcggcgcgcctccttcatcctgatgtga

SEQ ID NO: 509444 - DNA, 192 bp, Stenotrophomonas maltophilia
atgctggcagtgggcactatattcttaaaacaccagatggctggatggatccttgggccaacagcgagaacctgccacgacaagcaaaacttcgcaccaagatccctaataacacaacagtccaagccgcacttataccgcgtgcaggctagcaattcgttcaagcctaacctgctgagcggcttggcttaa

SEQ ID NO: 509445 - DNA, 249 bp, Stenotrophomonas maltophilia
atgacctactgggcacggagcattgcacgcttcctcatcggcatcgtagatgtccagtccgagctcaatgctccgctgccccaagacgggcatgggtgtcgccactacggtggtggcggcagcagtatgtattggttcgaagaagggcagaaccacatgtggccgagcaccaaagacagcgagctgacgggaatgtacctggtggacacgcttgaaccggagagccgatggctaccgctgagccattga

SEQ ID NO: 509446 - DNA, 768 bp, Stenotrophomonas maltophilia
atggctaatgtgcgtcttccggctcgtttagggaaggaacccctgattgatgtggtgttcggaatgtcatttgcatttaattcgatagttgagcacatgctgcctggcgtgttgctgtccgttttttctgcaaacagttctgaagctaagccgactattgaagttcttccaattgcccaattgccatcttccgttcgtggtagcgagcctggcttgaggcgtgcgccgtcattgaagatatctatagataatagttacgctgttcttgtgggctcccgatggctggggatttcctgccttatgccctacagggggtggggggatttcaagtcaatgatagagaaaacaattcaggccctggcttcgtcggcttcggtttctcaaataaatggatattctcttaagtacgctgatttcatggcggatgaagatggtattcctgcgcttgagtcattcaatgcgaaggtgaggattggttgtgaggatttaattaatcagccgcttcagctgaaggttgaaatggagcgggaagggtttgtgagtgtggtgacattgttcagtcgagcggcgcgagcggattctgatggggtgcgtttgcacggtgccttgctcgatgtggacgtccacaaaaatattgatatggatcttgagggttttgtggccggtgcgggaagcctgctggatgagattcactcagcgaacaagcggctcttttttgagcttcttagtgagcaggggttggcgcgcttggagcccgtctatgagtag

SEQ ID NO: 509447 - DNA, 687 bp, Stenotrophomonas maltophilia
atgcaaaggttcaatggagaatcctggcccgcaccagacatgctttttggtttggtcttgagtttgtcttcgcctgagcgtgatcagtttcatgtggcagtgttttttcgcgacgaggtaggcgcagtactgatgtatggggatttgcagtggcatcttcgcgcaaggtgctctgaggcggttgctcgcgatcgatacatttgggtgtgcccacgtctaggcgaattcgatcaaattctccttgcatccaaggcaaaaatatggctggagaataatcctgatacaattccttattcagtatctcaccctatgggtggagtcatgtttaaggatgacaaatgggcaggagaggcgccgggtatgggattgacctgcgcaacctttgttgtcgcgctttttgatgagctgggtattccatttatcgattcttcctcttggcaggaacgcgatggggatgctgagtggaagagcgagattctgatgtacttgcgtaattgcccgggcgttgcgcctgagcatgttgaggctcagatgaactcccttggggctacagtgagaattcggccgagcgacgtattcgcagcgggaaggagcttgacggggtcagagacgcgaccaggcctgtgttttgaattggtttctaggcaggttggtgaagttgaagatctgttgcgctcgtttcaatag

SEQ ID NO: 509448 - DNA, 510 bp, Stenotrophomonas maltophilia
atgtcgtttcattggccacaacgtgccgcgcgcgttctgcccctggtgctgcccgcattgctgctcaccaccggattgccagctgccgagcatccagcgcaggcgctggcggagtgggaagcacacggtcgtactgaaggcctggcccgacctgacacggtctgccaggacttcctgcaggcaatgggacggaaaccagagggactggagtacatcggctgcagtcaggacgatgcgtcctacatcaagccgatggaagcccactaccgggttgcgggtgccggggcagcgaagatcgaagccttcctgcacgcaacgttcggcctgccagcgttgcgttacgtctgctgtggctggagcagcggtgaaccttattactggcgcgaaggtccggacgcggtgaagtaccagattggcatgggtgtggaatcgctgccgcacgcgcggagcgaatggcatcgcatcgaggcattcaacgtaacggttgaggtgttgcggcagagtccctag

SEQ ID NO: 509449 - DNA, 726 bp, Stenotrophomonas maltophilia
atggaggagctgatcgcgggtgtgggtaggagcatcatccaagaaggcgttaaaaacaaccgtggcgagtgcgcatgggatacccgagactactttgaggggcgtcgccgtgagcaggcctactacgagcagttggaagaagaggaggcagcgaaacgagcggagagcgataggagtgaacaagccttcgtatttaaggtcgttgctctcattgaggccggcgactcgaaggcgcttcttgagctggtggaggaccccgacacagcgctggtcagtaggagccgttcttacaacatcgatggtgacgaaggatgggcctacaacgagtatgccggctacagcgtccttcatgaggctgcgagcgttgggaatgcccagctgtgccgcgagttagttttcgctggggccgattggaacaagaagtgctatttggtaggcgaatcgggcttcgatgactacgtcaacggctttcgagacgagggcctgaagcccgtcgactttgcggggaacaaggaaacgcgcaccttcctggaaaatgcggcgcatgaattgcgtgctcataacctttccaagcgattggaggagatttatccctccgccgactcctggaagccacctgcaggaggctttgccgccgaggctcagcggcaagcgactgccgccttgagggcaaatgggcaggacacccaagttcaagaggcaccgcgcatgcgggcccggctctga

SEQ ID NO: 509450 - DNA, 978 bp, Stenotrophomonas maltophilia
atgacgacgatgcagctgagcttcggggacgcggaacacacgggcaagcgcaagaagacgcggcgcgaggtcttcctggcggagatggagcaggtggtgccctggaacgcgctgttggcgttgatcgttccgcactacccgaagatgggccagcgtggccgacagccgtatccgctggcgacgatgctgcgcattcacttcctgcagcagtggtacgcgctgagcgacccgggcatggaagaggcgctgtacgagatgccggtgatgcgccgcttcgcccgcctgggtggactggacaacattcccgacgagaccacgatcctcaatttccgacggctgctggaaacgcatgatctggcgccgcagatcctggagcgggtgaacgggcacctggcacgcaagggccagagcctgaaagcagggacgatcgtggatgccacgatcatcgcggcgcccagctcgacgaagaacaaggacggcgagcgtgacccggagatgcaccagacgaagaagggcaaccagtggcacttcgggatgaaggcgcacattggcgtggacgaagagtcgggcctggtgcaccacgtggaatgcacggcggcgaacgtgaacgacgtgacgcaggtgcacaagctgctgcacggcaaggaagacacgattacaggcgacagcggctacaccggtgcggacaagcgcgaggagttgcaaggcgtggaggctgcgttctggattgccgagaagccgtcgaagctccgttcgatgaagaacacgcgcgagcgcaagtacgccgaacgctgggagcacttcaaggccagcattcgggcgaaggtggagcacccgttccggatggtgaagcgtcagttcggctacaccaaggtgcgttaccgcggcctggcgaagaacacggcgcaggtgctgacgttgttcgcgctgtcgaacctgtggatggcgcggcgacgtttgctgcagccgtcggggtaa

SEQ ID NO: 509451 - DNA, 762 bp, Stenotrophomonas maltophilia
atgacacgaatgttcagagccgtagtagaggccgagattccaactgagacacttgatgccatggccgcctatcaacgcatccaaccattgattgcacggcttcaggagattcagccgagacttcgcgactgggttgagcactccagaggtagcggcccggttccttatgcggataaggagcgcttcattgagatgcttgccttcaatgcagaacaggatcagcaggagtatccaggtagtcccgcacccagcggagcgggcaccagccttacaaccgcactgacgaacagggaatggaaaacgccaggcagaacgtcgatcgactacacaccttggtgcggcaagctgaccttgactgttctcaggcccgttgaggcgttcggttccgaagaggcggcaccgaccatctgcagatgtgtagcagccatcgcggaaacgatcgataccacgttcatggccactgatgtggtctgcccggcggccaccggcaagagatatgaaacctactacctcaaccacaggctcttcccccaccgacgctggctgggctggatgggcttcgtccctgtgctggtgccgcacaggttcattccggaggcggccaagatggaagtggtgaaaggcagaggtacgatcatcgtggccgtggacgaaccgttcgacctgcacaatcccgaccacatcaagcgcgcgcatcaggtggaactgcgcatggccaatgcggggctgctggatgtcaccgacacgtcgctgcttgagtga

SEQ ID NO: 509452 - DNA, 756 bp, Stenotrophomonas maltophilia
atgggtgccattccactacctctaccgctgccaccggtgacgattccgggtggctgggaccctacacaggatgttcccgggcacgcgcctggcggaatcccgggagacacggccggtggccctacgcttggccagatctggcgcggcatcaaggaagccgcaggcgtcggcgccgattccaaggttgaaccgcgcgtggaagccagcgaaacagactgcgcgcagaccagtaaccagaacgactgcaatgcctgcaagctggcgcggggcttcctggtgcccgccaactacacgattccgttcaaacagtaccgcaacttcgactaccagctgcgcattgccaatcacctggcgggcccggaagtgttcgcctacacctatggcggcaccggactggaccgcgctcgcctgagactgacggccggcaagggcaaaaacgagatcaccgttaccgagtggaaccacggcggcatccgctttgatggcttctggcggagccgatgcacggtggtggaagcgaaggggcactacaagcagtttttcgacgaggagggggagctaaaactctgggcaaacctgggcaacagaccaaacatactgcagagctggttgaggcaattcacaactcaacacgctcttgtagagcggctgggtccacccgccaagctggaatggcatttccttgagcgtgagtgctttgaggccgcagtccaactcttcagacccaacgcatctatttgcaggtactcgccatga

SEQ ID NO: 509453 - DNA, 801 bp, Stenotrophomonas maltophilia
atgggcacaagaatcatcggaccccggccctggcttgggcccggcgttggaggtggcgccggtggcgtggatgaagatggccatccggtggatccatacggtgggccgaccaccgctgacgtgatggatggcattcgcgatgtggtggacggcatccatcaacgggtgcgcggcgaagccaaacccgaggcgcgtaccgagccgcagagcaaggctcgggaagtggattgttcggaaatgcccgacgagaccgcatgcaacgagtgcctgctgaagcagggcttcatgggtccacccctcacgccgcgctatgtcacccaacgcaatctggtcaactacgagtaccagctctatatcgccaatctgcgctcggcaccgctgcgttttggcttcctggttgctgacaagacggatcccgcgcggcggttgttctcggtggataccctattcgactatctcaaccgtgatgggttctcacgcaccgtgcaggaatggcatttcaacgcctgcgagtttgatggattctggttgcgggaatgcacggtagtggaggcgaaggggagatatgaccatttcattgatgaagatggcgacgaaaagtatgggttcgtccggcatggtgtgtttggtgcatggagtgaacagatggctaggcagcgcgccgcgattgcgattggtggtgcgccagccaaactcttatggtgcttcatgcaaccgcgggcaatggccgcagcgatagcgatgaattacctcgaccctcttatctgcagatacgagccatttcctggagcaaatgcatga

SEQ ID NO: 509454 - DNA, 750 bp, Stenotrophomonas maltophilia
atgatccttggcgctcaaaccaatctatggacaaggcctgtttcccgcacgcctgaagaggtgttgagcaaggcagtggggctcacccaaagcttggcgcggatgcacccgttgatgaagcgttggtatgcgctgcccagggggcccaaggacaggtacgtatcgctggaagatgcgggtgctttgcttgcctcaatgaagttaggcattgaaaggagtcgagaacggtacggcgactatgaagagcttggagcttccctgatgctggccaacgttgacaatgatcgggattggcgcaggccgggggtggtcgtgctcgacttgaacccaacaacggggcgcaatagcctgagcgtgaaagggatcgccccgtttggcgagacaatttccccggtcatgctcaacgcgatgatcgagtcggtgaaggcaatccagcccgactttgcctgtacagatgtcaaagctagaacgcctggaagtgagttgatttattaccagatcaaccggcgcctataccaacaccggcagttctttggctggatgggcttcgtccccgtgcagataacgcacccgcagttgcgcgatgcgcacgctgtgcacccggtcgatggcttgggcacggtgatcgtttcggtgccgggtgttttcgatccttgcgacgacgcgcaggtagacaaggttcaccgcgttgagatggatctggccagttatgacctgttgccggtgacggacccgaatctcatggggtga

SEQ ID NO: 509455 - DNA, 234 bp, Stenotrophomonas maltophilia
atgaatcgtatccataaggatacatcgttcaattggtatctgcgtcaatgcgtggcgtactgcgctgaacccgctggtcgtatccatggagaacgcgaatcccaagctccccgagggcaggaagcgtccgcctccgccccccagcccgccgcggccgccagcgggagccgggcccaaccggcgctcgccgcgcggctgaccgggcgcattcagccgcgcggtgtaaactattga

SEQ ID NO: 509456 - DNA, 909 bp, Stenotrophomonas maltophilia
atgtccatcgaactccgccatctgcgttacttccttgccgttgccgatacgctgcacttcggacaggcggcggagcggctgggtatgtcgcaaccgccgctcagccagcagatccgccagctggaagatctgatcggtgcgcgcctgttcgtgcgcagccatcgtcgtgtgcagctgacgcctgccggtgagctgctgcaggaacgtgcacgcgccatcgtgcagcaggtggaaacggcggtggacgaggtgcagcgcgcgcagcgcggcgagcagggtgagctgcgcatcgggctgacccgcgccacgccgctgtcgccacagattccgcgttcgatcctgcgctaccgccagcagtacccgcaggtgcggctgcagctgagcgagatgaacaccctgcagcagatcgatgcgctgctcgatggcagcctggacgtgggcatcatccgcaagcgcgcgttgccgccggaactggtggcgcacagcctgttcgtcgatccgttggcgttgatcgtgcatgccgatcaccctgccctgcgcagactgtcgaaacagggcacgctgtcgctgcgcgacttcgcgcaggagccgttcgtagcattccggcgcagtgccggtgcgggcatccatgaccacatgatcgcgttgtgtgcggctgccgggttcactccgcgcatcgtgcaggaagccggtgaggcatcgacattgatcagtcttgcggctgctggcctgggtgcggcgatcctgccgtcgtcctgtgatcacatccgggtggaaggcgcgcgcttcgtcgcgctggccgatgccggtgcgcattcggaagtgcagctggcgtggcaccgtgagggggtgacgccgctgatccgcaatttcgccgggctgttgcgtgaggcgttcgcggaagggtga

SEQ ID NO: 509457 - DNA, 915 bp, Stenotrophomonas maltophilia
atgtttgggattgggatcgatgtcagtggtgagaatctggatgtggccgtccatgaacaggccttccgtcagttcaagaacaacaagcggggctgggccagtctgatcagatggttgcagcggtggccagccaagcaggttgtgctggaggccagcggcggctacgaacagaaggcgctggatgcattgcacgaagccggcctgccgatggttcggatcaaccccggccgtggccgcagcttcgcctcggccacgggaaggcaggccaagaccgatcgcattgatgccatggttctggctcacatggccgacgccctcaagctgacccgttacgtacccccggccgcttggcaacgccgtctgggtgagctctgccagcgccgacgccatctggtccagatgcgggtgagcgagcatcagcgcatgcgtgcgttcagcgaaccctgcctgatttcaatgctgaatcagcacctggacgagatccagaaaagcatcaagcagctcgatgccaccatcgcagcactcctggccgagcaggacgggtggcgtgactttgccaagctcaaaggcgccggtccggtactgatggcgaccttggcctgtgagctaccggagctgggcaagctcagcgggaaagccatctcggccttggtaggggttgcccccatgaaccgcgaaagcggcacctggaaggggcgacggaacatcaccggtggccgcgccgttgtacgcgaagcgctctacatggcggcgctgaccgccaaaagctatgagccccggctcaaggaattctttgaatcgctcgtcaaccagggcaagccgggcaaggtcgctttggtcgcggtaatgcgcaagatgctggtgatcctcaacgcccgcaaacgggaagcggaggcccagatggcctccgcctga

SEQ ID NO: 509458 - DNA, 1587 bp, Stenotrophomonas maltophilia
atggctaacagggcaaatttggtcaacctcgacgcaatgatcatccgcgaagattttgcagtgaaatcttcgcagacgtcggcacactacgataagcaagacaagatttcagtgcgcgacttcgctgcggatggactcttgggatcactgctgcgcaaacccgattttcaacgcgaaactaatcattggacaccggagcaggtagtatcgttgcttgagtgctatgtcgatggcgatctgattccctccgtcatcctgtggcagtcagaaaccgcaacctttgtaattgacggcgggcatcgtcttagcgtgcttcgcgcgtgggttgaagacgactacggcgacggacacctgtccctctcgtacttcggcaccgagctatcgaaagagcaaaagcgcgtagccagccgaacgagacagctagttgaatccaggattgggcgctggtcaaccctacaaaaaaaggccaaagaatcccttgccgaggatgaaaagaagcgcctgaacataatatctactcgcgcgctacccattcagtgggttaatggagatgtcgataaagccgaggcgtccttcttcaagatcaacacaaaggggacacctctagacaatattgaagaacttttgttgaagaaccgccacaagcccatcgccattgccgcgagagcaatcattcgttcaggcaaaggacacaagtactggtctgcgttcgacaatgaggtagccgagaagattgaagaatcggctaagaagatcaacgaactcttatttgatccggagctacagagccccatcaaaacacttgaccttccgctcggtggatcaaggggcatgcgtaccgcgatccaaactctcattgatttatgcattatcgcaaatcgagatcagagcggacagcccagaaccctcagcgacacctctgacgacagcgatggctcaggcactctaaaggccttgcagaaaacgcgcgccttagtcgaaagagtcactggaaattcagcgggaagcctgggcttgcatccggcagtctacttctatggcccgagcggcagacattccagctacatgttcatgggtgccatgcaactagttgcgcagaaggcagttaacaatgatccaagcttcttcaagaagtttacgagcgtccgacaagaactggaaagagtcctagtcgagaagaaggacttgctgtcaacaatcattcagcgccacattagtgttcgtcgcgctagcgtatatgctgaaatcctggattacaccatccaaaaactacgagataaacattcgccaactgactctgacctggtgtcgattgccaaccttgaaggaaagattgttgtcggcactccagtcacgacgtcgatagattttagtgacgatgtaaagagccaaaccttcatcgcttccgccattggctcggcccaatgctgcacaatttgcagcggctacctcgaccctacgaagtcggtatcctatgaccacacgaaggacaagaagtttggaggaaaaggtggcctgagcaactgcggcatgacacacccttactgcaacacggcatacaagaatgggggcggattccccgagtag

SEQ ID NO: 509459 - DNA, 831 bp, Stenotrophomonas maltophilia
atgacactagtagcggcgtgggtgaagcgccaaggaacaaccgcagagctttacgtagccagcgattcccgccttagcggcggtcgagcatgggatattggcacgaagatccttgacctcggccggggcgactcgcttattgcctttgctggccataccgccgatgcctacccgctgatgctccagttgcagtcggccgtcaagatgcacccaaagatcgcgtctcgcgcatacgacttagcgcaccttaaaggccacgtccttcgcatctttaatgcgatgtggaagaacatttctgcgctcccaaaaggacaacagttgcccgatccggcagaagcacgcttcatccttgcagggtactcgtggcggtatgagcgctttaagatatggaccatctacttccacagccccgccaacgagttccgctttagggaggcttccacacatcgaaagaatggaggaggaaacaagtatttcaccttcataggggacgattcaaatattgccactcagcgggtatatgaaatcctcagaagcaggaacagagtaaagagcgcccaactgcaaatggagccctttgaagtcctaacagaattcatccgagatgatagcaagccatatattggaggggcgccccaggtgtacaaagtctacaagcatctgaacacccttccgtacaacgtatactggccgactcgagcagccggcaaaatatcattcggaggtcggcagttgctgcagtacgagaagaacaagtacctagctttggaccctgatacatttgaagtagcagagccagattggccagacgcagcgaacttggacacttaa

SEQ ID NO: 509460 - DNA, 342 bp, Stenotrophomonas maltophilia
atgcaaaccagcgatccagcaactaacctttatcaatgcccggcttgccgtgctgccatcccctcgggtagatcatccgcgaagtgtcctaagtgctatgcggacctgcccaaggcaattgttgaatcgaatcgtgcgagcgcgaatgccagggaagagcgtggctcgacagcggcgtgtgtggcattggggctagtcgcactcggcattgggctctattttctgatcaacccctcggcaagcggctacggcaacattgccaacatgcatgcgctcgcagtggggcaagccctgaccatcgctggggctgtgttcctggggcttggtatccgccctcgttga

SEQ ID NO: 509461 - DNA, 525 bp, Stenotrophomonas maltophilia
atggcggaatggaccggctatcccacgatcatctacaccaaccgccccctccttgatctggccaaggacctcatggcctgtttccgggatacgttcggctatcagatggaggtggaccgcctcgggaacggcctgggcttcctgttctaccgcgacagggacatgctggatcatcacctcgacgtaggattcaacgttgaccgggccggtcgcggatgtgttggcattgaagtggacgaagtcgacttctacgccaggctttccctgttcgagttcgagggcgaatcggacttcgacccctacgacgtcggcatgatgctgagcggggttcttcatgtcaccgtggtgctgcccgcagcaaccgaggagaacacgttctgctcgcaggtgctcagtgacattgaaaagctgacgaaaatgccggtggacacttcccggcacgagcgcctcaaggaacatctttccgggatcaaagcgctttcagccgaagcggatcggctggggggccagctcgatcaggagtga

SEQ ID NO: 509462 - DNA, 627 bp, Stenotrophomonas maltophilia
atgaaaggcgtcgagcgaatggctctgttgaagaaggtgtttgtcaggattgctctgatcgggctggcgctgtttgcgttgacaggtctggtgctcaaattcatggatttcaggatcgggccaacgccgcccgctccgccgaagccgcgcatcattgactacacttctggtcacgacatcactgctgcccccccagagatgcatctgatgattggcatcgctaactattctgacgaagggctaggaaaggtcttcatcaatgatacttgggggggcggtatgcagccacgcgccagcagtaacggacgcatctgctgcgtgacgctcccccgaatttggcatccaggactgaaagtaacggtggcgtatcgtacgagtagcatgttcctcagggatccgcgtagttatattgaaaaggaggtcgttgtgccgcgctacaggcccttcctggatggttttatcttcttcatgtatttccctggtgatcaggtaagggttgtagctaccccatattttccagggtttcccaagtttgcatacgatcttgattttgctgacagcgagcgcgattcagataagattaatgagttccttgaggtgacggcgaggggcggggtggcggaatga

SEQ ID NO: 509463 - DNA, 1983 bp, Stenotrophomonas maltophilia
atgagtgagagtaatgtgtctcgactcttcgacgtctacgatctagagcgagcgaaaggagttggtcgtcggccaaccaactttgctagctacatccaaggcgtaggcaccgaggcgctgaaagaaattggcgacactggcaccggctggcacgcccgtgccggcgcggcagcgggttggggcggcgaggggcgggtgaactggatgctgatgcaggtccaggaccacctcttgacccatttcgcagagacaaccgtcaccaccgcgatgggcttcgattccactgcccctgtcgcgcggaaaatgagcgccgatctccgcctgagccttcaggatgtggagcgtctggcgcaggcagcacgaatgccgctgtccaactatctggctgtcaaccaaggcgagaaagagctcgacctgcgcaactcgctcagtggcggcttctggaacatggtgggggcgttgcagcgggtgcgtggcacccatctcgcgcgcgccgatcacgtggcgcgccgtgcggtgttgcaggagcggcgcgcgtttctggcaaagaaggtggctccgttccagaaacagaatccccgtgtagaccgcatccgcatttcggtgtttggcttctcgcgaggcgccaccgaggcgcgcgtattctgtaactggctcggcgacgcctgtgaccccggtcccggactgctgcggctgtgtggtattccggtgcagatcgatttcatggggctgttcgatacggttgcgtcggtcggtgctgcgcagagcttctttgaatcggtattcgatggccatggtggttgggcggggggcgaagatctgcgcattcccgccgatgtacgccgctgcgtgcatatggtggccgcgcatgaagtacgcggctcgttcccggtggatctggtggatggcgcgaactgcgagcagatcatctaccccggggtgcattcggatgtgggcggcggctacacgcccggtgagcaggggcgttcgccgaaggacgccgacaagctttcacagattccgctgtgcgacatgtatcggcatgcgctggcggcaggcgtgccgctgttgcccatcgagaaggcacgagtggaattgcagagccagttcgagatttccccgaaactgcgccagcactacaacgcctatctgcaggcgatggcgccgttcctgccggctgtgaattccgcatccagagccaatcgcacggcggcgctgatgtatgcgcactaccgccagtatctgttgtggcggcgccagcatctggacgacttcgccgcgctgccgggtttccagcgtgcgtcggcgcaggaccgcgcggacctgcgtggtggcaacaccgagctggcccaggaggtatggggcatgcgctacaacaacgcaacgcggcgggtgcgcagcaccgttgtcacctcgcaccacggcatggctacgccgccgccgtacaacagcattccggcgtttgatttcgtgcaggcaaagctgcgtggccagaaggaacagcagtggctggatgggcatatcgagcagatctgggaatcgcagcaggtgccaccgcgtgctgtcgcaacgtttctggatggctacgtgcacgactcgcgggcctggttcaagccgttcgggttggacgatgacgagtggctgcatgtgcagcagcgcgaacgcgattcctaccggcagcggatgcaggagttggatgcgatcgagcaggcccaccggcaggagcgggagcgcatgcaacgggccgggcagctgttccagccaagggtgccgctggcgatgtcggtgcaggaactggaggaactgacagcctggcgcgagcatccggagaactatgaggaggtactgcagctgactggtcgcgagtattactggcagtggggctatctgcgctggcgcacctgttatctcaatccacccggtgtggcgattgcggaggcgtcggtgcgcagggggcagggtgtagaggatgctgccgcttag

SEQ ID NO: 509464 - DNA, 426 bp, Stenotrophomonas maltophilia
atgaagaaccagaagggcttcacccttatcgaactgatgatcgtcgttgcgatcattgctatcctggccgcaatcgcgctgccggcttaccgtgactatacggttcgtgccaaagtcagcgaatctgtgatggcgctgagtgcgtgcaagacgtcggcgactgaattcttctcctcgaagaacgcactcccgaccaccctggccgaagcaggttgcaacgaagcggcggctaacatcagccagtacgttaacaagctttcgctgggcgacgctggcgctatctctgtagagacgaaggcaaccggtgcgaaggctgccgaatgcaccctgactctgaccccgactgtgaccgccggtgagatcactgcttggactggcagccacagtggttgcgacgcaaagtacgtgccggccaacttccgctaa

SEQ ID NO: 509465 - DNA, 690 bp, Stenotrophomonas maltophilia
atgggccaggcgtcggttgaaggcgcctaccatagcgaattttcaggtttcgttcagttttgttttggggtgcctggagcgtgcggaagccgatcaaaagcatccccgcgtggcgtgggtctactgatcggtctgcgacagcgtcgaagggggaattgtcggccgtgcatccatgcatgtcgcgcatttggaggaacaagcccctctgttgaggggctgcgccgacaggggcggggagaggccggcaaagggaggggcccaaaggttgcgcagcaacgtttggggcgaagcgcgcgcagcgcacttcgcgtcccgcgccagataactgaaaaaggccgccctcaagggcagcctttttcagttatctggcggagagagggggattgtcgggtgcatccatgcacccgatcccgatgcgcgttgcgcctcgggaccagcctgcggctgtccggttctgctcctgcagaaccgtcgaaccccggcggggcttctcaccacccatcccatccgccagacaaacgcaaaagggccaccctgtgggcggcccttttgcgtttgtctggcggagagagggggatccagttgagaccgacccaaccccttgaaccgcttggcattcacaaatcgggagtgtgccctgttttgtgccacgggcattgtagccgttcgctctgccggatggcaccttga

SEQ ID NO: 509466 - DNA, 555 bp, Stenotrophomonas maltophilia
atggcgactgactccccctctccgacactcgacacgctccacggcgccatcgaaagcgccatccgcgcacgctttccggacttcgcaaccgtccagttctatcgcgacgccggcaccgaaggcatgcccacgccggcctgcctgctggaaatgacccgctgtgaccgcgcccgcgaaggcaacgacggcactggtctgctgcaggccgtactgcgtttcgaagcacgcgtcgtcgtagcagcgggcagtaccgctggcgcgctgcaactacgcaatgccgccattgcactggccacctggctgcaccagctcggccgcttccatggtgcctgcagcggcgcaatcgacgtgatcgccgccctgcccgaagacgccgcaaccgcacaggccggcctgcgcagctgggtcgtcgaatggtcactgccggtcgcgctgggcgacaacgcctgggaagaggtgggaggcgtggtgccgcaagcgtcctacagcttcgcgccagagatcggccgtgcccatgaggcacgctaccagccgctgccggagcgcgcgccatga

SEQ ID NO: 509467 - DNA, 312 bp, Stenotrophomonas maltophilia
atgctgagttcgtgcgcatctggcgcgaagccaacgccggccgcgccctgcctcgttgatctcagcatcgcaccggcgcagttgcgtgcgccggacgagctgccagacctgcaggcagctactgatgatgcactgctgcgcaatcacgttgcagtcgcacagcagtaccacgcgctggccgaccagctgcgcgcgctgctgtgcagcctcggcagccaacgcggcatcaccctcaacggctcggcaccggtgacacctccgggttgtgagatcgccaccggcaaccgccacgacgcaacgcctgccttctga

SEQ ID NO: 509468 - DNA, 1983 bp, Stenotrophomonas maltophilia
atgccccagcacctgcgttccacgcccctgttcctggcactcactactgcactccttgccagcaccgcccccgttttcgcgcatgagcctcctgcggcgcatgaaggccatggcgacgaagcagtggaactggacgcggtgacggtgcagtccacacgctcggggcgccgggtatcggacgagcccatgcgcgtggacgtggtatcgcaggaggagatcgaagaaaagcagctgatgtcgcccggcaacgtatcgatgctggtcgccgagaccgccggcgtgcgcgtgcagaacacctcgccaggcatgggcggatcgaacatccgcatccagggacttcgcggacgctacacgcagctgcttgcagacggtctgccgttgtatggagggcaatcgtcttccatcggcctgctgcagatcccgcctacggatctgggaagtgtggagatcatcaagggcagtgcttcggcgctgtatgggccggctgcgctgggcggcgtggtcaacctgatctcgcgccgcccccgcgacatccgcgaggccgaagtactgctcaatgccaccagccgtggcggtcaggaccttaccggctatgtggccggcccgttggacggacactggggcctgtcgatggtgggcggctatcaccgccaggatcggcaggacctggatggcgacgggtgggcggacatgcctggctacgaacgcatgaccctgcgcccgcgcgtgttctgggaatcggaggacggcgcgcgtgcgttgctgaccgcgggtgctacccgggaaaaccgccagggcggcaccctgcccggccgggtggtggctgacgggcagcccttcacattgacccagcacaccgaacgctatgacgctggcgccgtggtcgacctgcccatgcgtgaaagcgatcgcctgcagctgcgcgcttcggcaatgaccacacgccatcggcaccgctacggcgcatcgccggaaaacgacacccatcagaccggcttcgccgagttgagctatggctcaggtttcggcaacacgaattggctggctggcgtggccgcgcagcaggaccgcttccgctcgcgccagttccagtccttcgactaccgctatacggtacccgctgtattcgtacaggcagagcagacgctgctcgatgatctgatcctgtcaggcagcgcacgctgggatgagcacagtgcctatggcaaccacttcagcccgcgcctgtcactgctgttccgccctcgcgactggaccgtgcgtgcatcgctgggcaagggattccatgcacccacgcccttcgtggaagagatcgaggctgcaggattgtcacgactcgaaccaccacaaggcctgcgcgccgagacggcgaccaccggtgccatcgatgtcggctatgcgcagggcgcctgggaagcgaatctgagtctgttcgcatcgaacatcgatcatgcggtccgattggtcgattccacgacgatgcccggcgagcgcgtgcaactggtgaatgtgcagggcatgacccgcacacgtggcagcgaactgttgctgcgctaccgctggcaggacgtcacggtgaccggcagctacgtctacaccaacgcgcgggagcccggcgtggagggagttggccgcaggacggtcgcactgactccacgccatactgccggactggtcgcgatgtgggagcagcatggccggggccgggtcggccttgaagcgtactacaccggaatccaggcactggatgacaacccgtggcgccagcgcggccggccgtatgtagaactgggcgctctgggtgaaatcgtattgggcaaggtcagcctgttcctcaacctggaaaacctgctcaacgtgcgacagagcggctacaacccgatgttgcgcccacgccgcgccgacgacgggcagtggacggtggatgcctgggcgccgttggagggtttcgtggtcaacggcggcatgcgcgtgaagttctag

SEQ ID NO: 509469 - DNA, 369 bp, Stenotrophomonas maltophilia
atggacagttcgttcgacacccagcagcaggccatcgacgccgacatggtgaacaagggatggattcccgattgggtgccccacgaagcgaccaacctgcgtgaagtacacgacctggattcaaacaccagcgcgctggcgttcaccaagccccgtgtggtgctgctgaagttgcctgccgattgccaagcgaccacatccggcgacagcgatcctgttgcgttcgatcgatcctggtggccgggtgagggggcgctcaacgggtcgtacaggatttttcgctgcacgccagagctcgggaaatcggttttcgtggcggtgagcagaaacgaagaccgcgtgcttttctggcgggcgtacccgcgctga

SEQ ID NO: 509470 - DNA, 2544 bp, Stenotrophomonas maltophilia
gtgctggacgtccgcaacagcgcgaacgccaaccgcaagatcacgggcgtggccgatgccacgctaagtgcaacaagcactgaggccgtttcgggcaagcagctcaacgccaccaatagcaatgtcacagccgtacgatccattgctgactccgcgaagaccagcgcggatagtgcgttgtcgaaagcgaacacgctctctggactgctgagccagacgtccgcctcgggtaacgtccgagtaggagcaagtaatagcggtatcgtactggacgtccgcaacagcgcaaacgccagccgcaagatcacgggtgtggcagatgccacgctcagcgccacgagcactgaggcggtgtccggcaagcaattgaacgccaccaacgtcaatgtcacggctgcccgatccgttgctgacactgcgaagaccaatgcagatagtgcgctgaacaaggccaatactctctccgggcttctgagccaaaccgctgcctcgggcaacgtccgcctgggcgcaaccaacagtggcaccttactggacgtgcggaacagcgccaatgcgagccgcaagatcaccggtgtcgcggatgcagcattgtccaccaccagtaccgatgcggtgacgggccggcagctcaacaccaccaacagcaacgtcagcaccgcgctgagtgacgccagcgcggccaagaccagcgcaaacaccgctctgacccaggtgggaacgctaaatgggttgctcagccaggccagtgccagtggcaatgtccgcgtgggtgagaagaacagtggcaccgtgctggatgtacgcaacagcgcgaacgcgaatcggaagctgaccggtgtggctgatggagtagtcagcgccactagctatgactccgtcaacggcaggcagctcaatgcgaccaatgacaaggtggcggtggtggaggccgtcgccaaggctgcaggtgcggaagctgcagtggcgaagacggatgcagccaaggcgctggccgagacagcagcgctgggcgggctggtggcgcaggtctctgcgtctggcaatgtgcgcctgggtgagaagaacagcggtacgacgttggatgtacgtaatagcgccaatgccaatcggaagatcagtggtgtggcggatggtttgttgagcgccagtagtgccgaagctgtgtctggtaggcagctgtactcaaccaattcacgcgtctcagatcttgagggtgtcgcgcagtttgtgagtatcgggtcagctccattcagtgaacgcgcagaagcgggcgtggcgggtactgcggtcggaaattcagcaaagacggggctggagggaggaactgcggtaggcacgtttgcggaggcgatgggaaagaactccacggcaatcggtagaggggcagccgtctctgtggattccgagagtggatttgcaatgggggccggcgcacaggtcggtggagatgctggcggtgcgcgtggtggtgtggcgatgggtgcaggcgcaagggttgcaagcggggctcacggctcgctagcactaggaaatggttcccaagcagatgaagatggggttgcgtcatttggcggtgttggcattcagcgccgccttgtaaacatcgcgcgcggtactgctgaccacaacgccaccaccgttgcccagcttagggattccctcgccacgctcggcggcgccgcaggcatggacggcaacggcaacatcatcgccccgacctacacggtgcagggcggaacgcagaacactgtcgaagatgcgctgacggcactcgatggcgccgtcatcaccgccggccgtcgcgcggacaaggtggaaggccagctcagttcgatcttccaggattcaccttcggcccgcgctgacggcatgagccagatcgcgctgaatggcgtgaatggcatggtgctgaccaatcttgccgacggccgagtggcgccaggcagccgcgacgcagtcaacggtggccagctgcattcgatgcagcagcagctcaacggccgcatggatgggctggagcagcgcatcgacgatgccccggcaccgcgtgcactggcgtcgtcctcggtgccgaagccgcaggctgaggaaactcctgtggtgccggaaggcaaggactcccaacaggtcgcttcagtaggcgagggcgacaagcccacgccgcagccgaaggccaagcaggacgactcgccgaagccgcaggtggacaccgctgagctggagaagatgctggcccgcgccaacgagtacaccgatggtgcgatcagcaatttcgaacgccgcctggacaagatggacaagcgcttcaaccgcatggcggcgatgagcagcgcgcagacggcgatggcgatgaacaccgccggcctggccacctacaaccgccttggtgcgggcgtgggctacagcgagggtgagtcggcgatggcggtgggttaccagcgcgtgctcaacgagaagggctcggccaccttcagcctcaatggggcgttcaccaacagcggtgagcgcagcatgggcgtgggtgtgggcatcggctggtaa

SEQ ID NO: 509471 - DNA, 1521 bp, Stenotrophomonas maltophilia
atgccccgcgtcttccccctcgccgccctgctggtggctgcactggccagcacgccggcctccgcctcgatcacggtggcgccacagaagccgtccgtcaccgccgatgcgatgcaccaggcctatgccacgcgatgggatgaggcgatccaacagtcgcgcagtggcaacacgctgggcgcactgatggcgatggaacggctgatggaagatccgatgctggatgacttcgatgctgaacatcgcggccgcgccgcgcaggtggccggctggaccgcgatggtgcagaagaagccggaccaggcccgtcgctacctgcagcgcgcgcaggaagcgctgccggacgatgcgcagatcctgctgaccctgatgtcgctggagctgtccgagaacaagcccgctcccgccaccaggcttctggtgcaggcactgacgcatgccgacgcgccgctgccactcgagcaccagaccatcaactacctgcaataccgcctgcgcgagcaaccgcagcagcgcatggaactgctgcaggccctgttccacaatggctggaagagcggcggcctggaaccgacggcgatgtggctggtgctggcaacgctgcaggtcgacaacggccgtggcaacgacgtgccggccaccctggcccgcatcgacagcccggccgaaatcatccggctgcgcagtgacaagcgcttcgatccctatgtcgatcgtgccgatccacgctttgatcccgtgcaggctgcgcagaagcatctggacgcactgcgtgtatccggcctgctggatcgcaagctggatgcgcgcatggcgcagttcagcagcacgctgctgatgctggaccgcaacgaggaagtgctggcgttgaccgatggcatggcgcgtgcggccgcagagggcgaatctccttcggcggaggaagccgagtgggtggcatggctgctcaacagccggatcaccgcattgcgccgcctgggccgcatcgacgatgccctggctgcagcgcagcaggccgcccgcatcggtgcgctcggtccggatggcatcgagcaccagctgaatcttggcttcgtgttcacttcactgggccgcatgcaggatgccgcgcaggcggtgaacggcatccagggcctggcgggctacggcagggccgcacaggcgctggtacagttcgccgccgctcgcgagcggggcgacagcaaggcgatggacgtcgcgcgcgacgccatccttgccgagcgcgacaacgcgcgcctgttccatcgcgagatgctgctggacgaaggcaacctggacggcgccgccgcagtgctgatcgaacagctgcgttcaccccttgatcgcgacgacgcgctggccagcctgcaggacatgcgcacctatccgtcgctgccgggtgacgtgaagatcgatgctgcctggcgtgcgctgaagcagcgcgccgacgtacaggccgaggtcgcccgcatgggccgcatcgaacgctacgaactggtcggcagctcgacctcgcgctga

SEQ ID NO: 509472 - DNA, 678 bp, Stenotrophomonas maltophilia
atgatcgagatgctcgacaagcactttgagtacttctactcagacaagggctttggacccgcggttgacacaagacaggtatcgcaatcgaagttggagcactaccggggaaaggtcccagacaagctactggaatactggcgggcgtacggctttgctggttacggagaaggcatcttctggataactgatccagatgactacgccgaagccctcaatgcctggctctatggaactgagttctatgggaaggatcactactacgtcatcggccgcagcgccttcgggaacttgacactgtggggaaccaagaccgggcgtagcctaaccatcaactgcgcatgggcaatgatctttcctaccgacaaatctcgctggatgagggaagggaaggcagattctctgatttcaacgtggctgtctgggatgagtgtcgattatccgaatgagaccgatgacaaaggcattcctctctttgaccgcgccgtgaaactgctaggcccactgaactatgacgagatgtacggcttcgtcccggcacttgcactcggtgggccatgccggctcgatcacctgcagaaggtcaacgccgccgaacacctgttgttcctcgcccagctgggagaacgccgggtcatggccgacatcgtggctgaggccaagaagcgagggctgtga

SEQ ID NO: 509473 - DNA, 1062 bp, Stenotrophomonas maltophilia
atggagctgcaatctgagtacagctcgctggccaccaccgccatgaacgagcgcggccagatcatcaagcaccaacttccctccatccttcgagaagatgctgagccgcttcgcgccgcagcagatatcgcgcaaggtgactttctgcttgaagggggagatggcatcggcagaaaggcgcaggtgccgtgggtccggtttgcatcgcgaagtagatcgcccaaggccaccgagggctggtacgtggtgtggctattccgggaagacggctccggggtttacctagcgctctcgcatgcctccaccaagaacgtggatggcgacttcatcaagcgatctaccgatgaagcccagcgcctgacaacgtgggcgcgtgaggttctggcgaacgatattcccaacgattcgcgcatccatcattccatgacgcttggctttggggacctggcaaaggcttacgagagaaccaccgtagttgcgtacttctacccgaaggcggaggtaccgcccgaagagcaactgcgaactgacatgctctctatggcgcggcgcctgaagagcatctatcgcggtgaacccgcacagaagcgcagcgggcagacctcacccgacgtcattgcggtggtagaggccatcgaggaggccgcttcaggtcgcgagaaaacaggccaaggctttgggcttacgcaaccggaacgccgtgccgtggagctacgcgcgatggcactggccaagagctacttccatggcaaagggtatgcggttgaggacaccagtaaccacgcgccttacgacctgaagatcgtcaaagacagccaaacacactacgtcgaggttaagggcacaacaggtggactgggcgatattgtgcttacgaagaacgaggttcagcatcatctgaaccatcatcccaacaacgccctgttcgttgtgtacggcattcagctacacagacagaacggcacgcccattggaacgggtggcactgaccacgttcaacagccctggctgatctcgaatgatcgcctgcaaccgctggcctatcgctaccgcatccagtga

SEQ ID NO: 509474 - DNA, 990 bp, Stenotrophomonas maltophilia
atggaagtgcagcaccacaagaaggacaacgtaatcgcgctggcgtggcgacatgtcgtctgcccgctggcccgacatgcggacgcgctgagctgggtcttgtttgcggtatttctcgcctcggtcgccgtcaccgtgtacttgcgctacctggggcatggcgaaagcgagagcttctacggacagaattactcgctcttctggtatctgtcctgggggctcttggtcgcctcgaccatcggcccgatgttcaacgtgttccgggcccgtaatgaagttccgctcggcgtgatgattggcgctggcgtcacccacgtgctcgtttttatcctcatgagtgtggtcgtcctggttcaggcagacaaggctgaggcggtgaccggattgttggcagctgtagccggtgccgtgatgattggaatcggctgggtcgtccagaaccagagtagcgctcgtgcatcgaggcgcgcccacaccttttctgttttgacccaatcgcggctcagtgctgaatttcagagtcacgttaagtcgaggattctccactacccggcgggtaaagagatctcagtggaagatgctgcgctcttttacaaggatggcctgatcgatgcggagaagaagctcgagctgaagtatgcagaggatctggcgcgttcgaaggacgagcaccacgagagcctgcgcaaggcgcatgagggtgctttggaggaagtcaggtcgaagtacctggcaatgcagtcggtaaagtacctgctcaacttctacgagttcatctgcgcgggcctccggctaaaagagcttgatgagatgatggtgcgggctaccctctccgacgtggctgtcggcatctataacgacacgatccacgtgcgtcggcatgcgcagaagcggcagccggcagctttcactgagctggacatgcgcatgcctaagggggtttggctggaagccgcagcgcccgagtcgttgaacgagcaaaaggcttaa

SEQ ID NO: 509475 - DNA, 765 bp, Stenotrophomonas maltophilia
atgaaagcgatcaccatcgagacggccgcgccgatggctggccagctgctcaccgctgcaccgtggcaaggccaacctgtcatcgagcaggacctggcattcaaaatcgccgacggcatcgtttcgcggcggctcgccaaggggtggtcgcgtcaaaccatcctatccagcatcgaggcaggccccactccatgcaggcgtgcgttctacctgatgcgcggcggcatcatcgcagtcgccctcttcccgatgacgcagttgagcgacatgaccggtcgcggaaactggtactcaatccgcgacttgttcccgccgcttcctgatcgcactcatgcgggtactgaagatctgcggccgttccaggtcggtgacaaggtatgggcttggtacaaagacgagcccagggctgattacggtcaacccgatcagcggggcgacgacaccaactggagtcgttgctttccgctgtttaccgtcaagagcgtgactggcccacacctcgaatcgggaaggttcgcgggtcggccgcactaccaggtgcagctcaggtatcgcgaagggccgcccgccggtcactacgacgcgggctaccacgacgtttgcccgatcaaagggcgagcctggcagatgcgcggcgacggcgactacctgcagctggtgcagcgtgcaccgcctgcggcaaagcctcgccgcgctccgacggcaccggaatccgccctgacaccgccgccagcattgccggcccagccggacctgttcgcatga

SEQ ID NO: 509476 - DNA, 363 bp, Stenotrophomonas maltophilia
atggctgaccagacgaccacagccgcgctatcggacgccgagctgcagatccttcgacacgccctgggcgtcggcgacggcggcttggagcgtagctatcgcaaccacttcgtgaccggagagggcggagccgaccaccggcactgcatggcgctggtcgagagtggattcatggtacggcgcgcaggcaatgcgatcaccggtagcgacgacctgttcaccgtcaccgctgccggccgcgcagcggtgcaggagcacactccgccgccgccgaaactgacccggtcgcagcagcgctaccagcagttcctgcgctacgacggtggcgtgacgttcggcgagtatctgaggggctggcgatga

SEQ ID NO: 509477 - DNA, 249 bp, Stenotrophomonas maltophilia
atgggtaactacatcggccacatccacctggacgtacgcggcgccctcacgaacatgagcaagcgcgagctggccaacctgttctccaatgccagcaccgggcgcgggctcaccgccgaggaagcgcgcagcgtcctgctcgatcacctggaagccggtcacaaggtcatcccgctcggaaagccctgcgagggcttcgattacgccggcggcggctgcccggggcatgaggtgaccagtaatggctga

SEQ ID NO: 509478 - DNA, 291 bp, Stenotrophomonas maltophilia
atgagcgcccctgtcaatgtgccggcggtgatggatgccatggtgctgtctgctgaacggctggctgctggtgaggccgtcacctcctgcgcagcgaccgtcgaagtggcgcgcacgacccgcgccgcagtcgccgagctgatcgctaagggtgaccgcctgaccgcagcattccgtgcgcttggtcaatccaatggcatgcaggcacagatcaacgcgcgccgcgattgcgaagcctcgatgctggcattcgccgctgccctcgcccgcgccaaaggtggtgccgcatga

SEQ ID NO: 509479 - DNA, 354 bp, Stenotrophomonas maltophilia
atgaaggaagcggcagcactggaagctctcgcgcaggcactcgctagcaaagttcggcagcaggcacggccgcccgacgtaaggtgcccacgacagtgccacgcgacagcgtcaaatgacgccatcgccttcgcgtacatccgcaggattcgcctgctatgtgaagccttccagctgagctggctagtcgaccagcacctggttctgaggcaacgcctaaccgaccttacagcgcaagagcttggtgcgttgctctacgagatggaagaagcaagggaagccatcatggagggcttcccgcttgagcagactgggctcatcaagaacatggctgaagtgctgccgaacccttga

SEQ ID NO: 509480 - DNA, 279 bp, Stenotrophomonas maltophilia
atgccggccggtgccgccctcaaaattccggctatgccagagatcatcagcttccctcagcgcatgcgctttcaggccattcgatcctttgacgttcgcaccgggacaggcggcgttgttgcggtcttgtgggcgcccttgcactccgaacgccagaaggagaatcatcgccagaagcatcaaaaccaccccgcccttgcggagctgctgccgaatgaggtgcaggcggtaatgctggtgcccgcgaacccaaccgaagcgagctatggcgatgcttag

SEQ ID NO: 509481 - DNA, 432 bp, Stenotrophomonas maltophilia
atgagcgccaccagcacgccgcgcggcgtacgcaacaacaatcctggcaacatcgatcgcaccagcacgccgtggcagggcgaggatcgttccgccgctgccatcgcccgcgagggccggttctgcgtgttcctgaccccgcaggccgggttccgcgctctggcaaagaccctgctcacgtaccagcacaagcacggcctgcgcacggtgaaggagatcatcgggcgctgggcaccaccggtggagaacaacaccggcgcatacgtgcagcaggttgcaaccgccgtgggcgtgtctccgtcagaagtgatcaggctggacaactccgtgactttgggtcgactcgcgaccgccattgccaagcacgagaacggcggcatgtactggagcgcggatgtggttgctgccggcatcgctgaggcgctgaagtga

SEQ ID NO: 509482 - DNA, 492 bp, Stenotrophomonas maltophilia
atgaaccgggtgctattggcgctgctgcttggcttgagcgtcctggccatctggcaaaggggttcggttgcccaagcgcaccgggctgccgacatcgcctccgctgcccgagacaaagctcgcgatgagcgtgatgccgccgtgacggcactggccgaggcgcatgacgtgcttgcagcggaacgtgcaagcgctgaagcagcaaatcacctggctgccacatatgaaaaggaaaagaacgatgcacagaaagcgtctgatcgccttgtcgctgatcttcgcgctggcaaccagcgcctgcaccagcgttggcaggcgtccatcgccaccgctgagctgtccgcggccgccgctgccgctagccagtctgatggtcgagccgacgaccgaatcgaaagtgcgggccgagttgttggcgccgccgcccagtgcgacgcccaagtgagggggcttcaggcctatgcgctgctgtgttcgggaggtgctcgatga

SEQ ID NO: 509483 - DNA, 324 bp, Stenotrophomonas maltophilia
atgagcgtgctggatttcctgcgtgaaatggatgcgaccatccacggcgcattttccctcgccggcatggtctcgactgcgagggtgacgtcggagaagagcggagccgtgaccgatggcgtgcgggtctacgtcgaccgcgatgtggagaccatcggtgagctgcgccagttcgtttccgggcgcgtggaagtcgcatacctgcgagccgatgtcgaggttgagccgggcgatcgcatcgaggtcgctggcgaagtcttcgtgaacatgaagaagctcagtgacgacggctcccgcagccggtggctggtgcgtcgtggttga

SEQ ID NO: 509484 - DNA, 483 bp, Stenotrophomonas maltophilia
gtggttgagcggcccgaacccctgtcctggcagctggtcgagttcctccgcgatcgcgtgcggttgattcgtacctctgccggcttccttaccgacatcggcgacgggttaattgtcattgacgatgatgaggtgagcgagcagtactccgatgcagccactctcatctcggttcatcaactctcacgcagtggcggtggtagtgctcaggtcagctcagatgccgcgatcaccgtcgagttcgaagtgccgcgcggcagtggtcgggagaaccctcggcttctggtacatcgcgccaggcacgacctgattcgcgtgttgaccttcaacacaaagctgctgcccaagggcgttaccacattcgaaattctcgcaacgcagatggaagccctggaagacgacgcagggcattccgccgtcgtcgctcagatcaccgcgcgggctggtctgaccgagacctttgagcccgtccccaacccgtag

SEQ ID NO: 509485 - DNA, 801 bp, Stenotrophomonas maltophilia
atggcacagcccaaagtccgcaaattcgcaggcgacctgcgcttctgggagcacggcgcgaacggcgcgcggattcccgtcatcccagaaccagccgacaagttcggtaaccagccgctggaacagtcctcgctgacgttcggctacgaggctggcgacaaggtggagatcaagagcaagcgccgagatgcacgctatcagcagatcatccacgttgattccaatcccggtgtgaccaacgtgtccatcacggccttggaagtgccgccggccatccttgctcgcatgatgtacggcactctggtcgttaccaatgtgtccgctggtacggccacagacgtctctgttgatgtgaaaagcgcggatgtgccggtcaagctgccccacaacttcctgttggctgacaccgctccggtattcaggaagggtgcgaccgaactggtgaagggaacggattacgacctcgatccgaagtacggcctgctgattccgaaggctggaggtgcgctgcaggctggcgacacggttctgggaacgtatcagtacgacgcctatctggagaccgccatcagtggcggcaccacgccgagcaagtccttcctgatcttgggcgatgtacaggaccgcatcagcggcgatgaaggcctgctcaccatccccaatgtcgatcttaccgtggacggcgacgttgactggttcagcgacgagccggtccaggtggcgctcaccggaccgatgatcttccaggctggcgagagcgacttgtacacgttcaagctcgcagagcagtcggcgggctag

SEQ ID NO: 509486 - DNA, 1011 bp, Stenotrophomonas maltophilia
gtgtcaattttacctgtggtttacaagagtactgacgcgagcgcgccccagctgagcggacaggttggtagcctcactgcgttgttggacgcagtgctcgttgatggttatggagttggcgcagcagcaaagccgggtgcgggatggacgcgtgagctggtggctgtgaaccggcgagcttataggaacgatcctgctgccggtacaggcttctacttggatgtggatgactcggcgcaggtaggtactgcgcggtttgccatagtgcgcggttacgacgttctccgctcatttggtgatggagacagccccactccccatccgagtcaagctgctaatgggagtgtggtagcaaagtcgagagaattgtctggctcctctgtacgctgggtcatcattgccgactcgcgatccttttaccttttcatcaatccgggcccagcgaacccagtcgatcagcgtgcgccgtacttctttggcgacttcaaatcgtacaagcctggcgattcgcaggcgtggtgtgtctgtattaacggcttggcgacatacactggtaccgagaactttgatggatggatcttctcctcgggcaatactctgacatcggttgattcaactcgtccggcgctctatttgccgagttcattcgattcctcgttccagtctgcgcctgcattcttgtttggcggtgaccgtgcctcagtgaaccgcccttggaacacggttgcgtccagggtgtccgtatatccgaacccagtcacgcagggcctgttgtacatgccggttgtggttatggagggaaatgcacgtcctcgtggtgagttgccgggcttgcttcttccggtgcatgtgaggccttttgccgatcttgtccctgaggtcgctcccccggaccttgccgctgcaggcagtttgctgccggtgaactatgcgagtgcattcgcatctggttctctcagcggtgaatacatcggccagcttctgtttctggaagggggtgggtggtggtga

SEQ ID NO: 509487 - DNA, 1758 bp, Stenotrophomonas maltophilia
atgatcaagtctgtcaagcaggcctgccggttcaatcctgtcatccgtgactatcgaatggctcagggaatcgagagcctcgcagacctcatcaatgacgcgggcgatggcagcgagttcttctcgcgcaacttcgtcacccacggcatggaccagctcttccgcgaagctctgctgcgtctgtccggcaagtccgaccaggccgtcttcgagctgacccaagcgatgggtggcggtaaaacgcacatgatgatcgcgctgggcttgctcgcccgccattcgcatctgcgcaaggatgttctgcctgcggatctggccttgcgcatcgagtttggccaagcgcgtattgctgccttcaacggtcgcaacaaccccgacaacttcatctggggcgagatcgccacccagcttggagctgcagaagctatcaaaccctattgggcgaatggccccaaggccgtcgatcagcgtcagtggaaagaaatcatcggcgacaagccaacgctgatcttgctcgatgaactgccgccctatctggacaacgccagcacacaggtgtttggccaaggcacgcttgccaacatggcggtctacagcctctccagcctgatgagtgctgcgctagaactgcctaactgcgccatcgtggttgccaacctctcgggcagttacaaagctcagaccaaggccctggctgatgccatctccaacctgcagcaggaaacccgccgccaggcgatgaccatcacgcctgtgcaactggcgggcaatgaaatctacgagatcctgaagaagcgtctcatcgacgaactgccggacgaacgcgtcatctccgacatcgcggaggagtacgcgcagcagatcaagaaggccgaggatggcggctatatcgtcgccagcagcatcgagcaaatcgccgagcaggtcagggaaacctatcccttccacccgtccttcaagcaccttgtcgcgctgttcaaagagaacgaaggctttcgccagacccgtggcctgatgcagttcactgcacgcttgctcaagagtgtgagtgagcgcgaagccgacgacgtcttcctgatcggcacacagcacctgaacttgaacgacgagcaggtcaaggacgagatcgagcgtattgcgcccaagctgatgccggctgtgacgcgcgatatcgcagacgcgggcaacgccatcgccgagcatatcgatatcgaactggcagacgatgccgcgcagcaggtcatgaccttgctgctgtcatccagcctgtcgcgtgctgtcggtggccgtatcggcctctccgaaagcgagttgatcgagttcctggctgcgccgcaacgcaagcccgacgagttcctgcaggcattgcagcgcctacgcgaatcggcgtggtacctccaccgtgaagagcaacgcttcttcatcaaggaaaccgagaatctctcgcgccagatcgagcgcaacgccaaggaagttgcgcaacccaaagtcgatcaggcgctcatcaatcgcctctcgggcatccttgctccggtcagcaagatcgcctatcaggccgtgcaggtactgccccggctggatgagctcaagctcggtggcccgcgcactctgatcgtcatcaagccggatggcaaggtgccgcccagcgaattgcaaaacttcttcgattaccagcaggagaagaataacctgctggtgctgagtggccaggacagcctgttagccgacgcagttgaggaacggctgcgcgagttgtag

SEQ ID NO: 509488 - DNA, 1224 bp, Stenotrophomonas maltophilia
gtggatgggcgcgacgtcttggctggagtcactattgatcagggcctcaagctcggccagggcgatcagtccgccgaggcgcagatcgaaaaactgctggccagcccgcgcgccgactacaaactcgtggccgagctgggcaaggacaacttcgacgaatgcttcgcgcaggctgaggaatatctgtggccgtcaggcaaggacaaccgccgcactccttggaaggatgtcgccacccgcgccaagtgctctcccatctggccgtggatgccgggtgccagcggcctcgacacgctcaagaccgaagccttgaaacaaggccgttggcgcttgggcgaggatggctacatcgagaaaggcccgttccccaaggacaaggccaccgtcaacgtctccgtcatcaatgtcaagccggacactggcgaaacggtgctcagcctcactccgcgccatgcgggtgacagccccatcgtctattggtcgaacaagcccgacgtttccgacaaagacaccaaggttgaagaccttgacaacttcgccaccggcgagggcacggtctacttcatggtgaaggaacccaccgggcgctacgaaagcggcccagttactcgctggctcgccgacctcaaaattcgccatcagatcgagcctgcggcggacaagcgccgcgtcaccctggcagctacaccgcacgccgacatcttctataccctggacggctccaaccccaaggacggcacccgctacgacgtgccgttcgagatcggttccggcagctgtcgcctgctggtgtttgcccgcgcgggcgaggccaacaaaaccgcggacttccagatccccgctagcggcgacaagaccgttcagatcgtcgacagcaagcctgcacgcctgcaaagcaagcgcgttgcgctcgacaccaccgaccgagtcttcagcgtcatcaaccgctttcgcgaccagccgggcacgcgcttcaaaggcgtgcgcgtcgagattggtgaaggcgagaacaccgtgactgtgcgcttccaggagcgcgaagtctccgccgccatcatcgaaggcgtggtcaacagcctgcgcgatgtgctcaaggaacctgacgccccgctcaacatcgccattgccgatggcatcgccttcgatactggctttgcactcaaagagttcgccaagcttgccggaatcgagctaaagccgggcgatatcaatcaggaggaatga

SEQ ID NO: 509489 - DNA, 627 bp, Stenotrophomonas maltophilia
atggctaaagccgcgggtaacacaccatcgctcaagacgcgtgcaccagtgctgcgcacgctgggttttggcgtgcctgcgacttctgatccgcatcacttcaaggtcatcattcccaagaccagcgccggcaaggtgcagatcagcgaatacctcggtttgcaggccgcaagcaacgacaacgcggtgatcgaccgcgtgttgctggatcgcccgcgctggacggccatccgcgccgaggtgcagcgcgccttcaatgcacgtctggccgcgcatggcatcaagcccggtgcttggaagattggtgacaacccggtggatcgtctgctcggcaaggaattgtgtgtactggcctgggccgtcgaacagatggagatggaaaagatcccggtcgccgtgcgcaactggctggcgctgcgcccggaagagcgctggtggctgtttggcatgaccgcgatgagcaccggcggggagatggatgcgggcaagggctggcgcatggcgctcaagcatgccttgggcgatgtggcgcagagcgagctgctggcaccgcgtgcgcggcgtggcaagtcggaacaagacgttgtccagacctcgttgggtctgttcggggaagacgcgacatga

SEQ ID NO: 509490 - DNA, 756 bp, Stenotrophomonas maltophilia
atgaacgccgtgcccgtgccaccgcagccgaagatttatcacattgcccatgtggatcgactgtcttccatcgtggcgacgggctggcttctgtcggacgcgctggttcaagcgcaggcgctgggcggaacgatggtgggcatgaaccacatcaaacggcgccgactgaccgagcttcaatttgccagcccccccggcttgttcgtcggtgcctgcgtgccgttttacttctgtccgcgctccgtgatgctgtatttgatccaccggcgcaatgcagaactggcctataaatgtggccaggaacccatcatccacttgcaagcggatttgggtgcagttgtggcttgggctaacccgcaacccgctcgctgggcgttcaccctatccaacgccggatcgacttattttgaaggctgcaatgatctggtgcgccttggtgaaatcaactgggcggcggtgcagtcaagcaactggagtggcggcctgaaagaagggaagcaagcagaatttctgctggaacatcgcttcccgtggcacttgatcgagcgcatcggcgtgcaatccctcaacgtctatcgccaagtcgtcaacactcttccggcacaaggataccgctcaacggtcgaagtcctggagcgtcaggtctatagctggaacgcacgcaagcagcagtttaccccgcgccagcttgccattgccgaagagcgtttgcgctcccacggctggctatcacatgacgtggcttcggcccattaa

SEQ ID NO: 509491 - DNA, 2964 bp, Stenotrophomonas maltophilia
atgcaaaaaacaacagccactctcacgcccttggccttgaaagatgcgcccgcgctgatcgagacagtgctccccgcccagaaagtgtcgtttgaggcacaaacagaacgcaaggccggcgcagggcaaacactcacggcactaggttcctactggaagggccgcaagccgctgattctggtgcgtgccatcgtgctggccagcctgctgcccgccaccgacgatgccgaggccgatctggccattttcgaaagattgatggccttcgacgacgagagcttggcgcgacgcgcactggccgccaatgcgttttcagtgaccaaattgcaggagatgattccggtagccgacccggagcgctatttcggcgcgcgcagttggcggcgtgacatagctgatgacgacaagctgatgctgtaccggcaggcgctggccacgctcaccagctacgaagccaaggccagcatcggcaagcgcccagaagaagtggatcaggaatggctgtatgccccggtgtgggcagcggtcaatcgccactacgcccattggggtgtgaatgcaaactcgttccctgagctggtggagcagctgggcatcctgcgctacggccatcgtccgcgcgtgggcgacgctttcagcggcggcggttccatcccgttcgaggccgcgcgtattggctgcgatgcctacgcctccgatctcaaccccatcgcctgcatgctgagctggggagcgttcaatatcattggcgcttcatctgagcagcgccaagagatcgaacaggctcagcgttctgtagcaacggcggtggataaggaaatcaccgcattggccatagagcacgacgaggcaggaaaccgcgccaaggtatatctgtactgccttgaagcccgttgcccagaaactggctggatggttccgatatcgccaacgtgggtgatctctaaaatgcgcaatgtcattgcgcgccttgcccctgattatttaaataaacgctttgattttgaagtgttgagtggcgtttccgaacaggagatggcggctgcggcgcaaggcaccgaacaaaatggcgaaatggtctacacgctggacggtaaaacctatcgaacgcccatcaagaccttgcgtggcgattaccgaaacgccgacagaactactggcaatcgcctgcgccactgggaaaaatccgatttcaaaccgcgccctgacgacatttttcaggagcgcctgtacgccatccagtggatcaccaaggctacgctgaacgcggggcgtcaggagacctactttgctgcgccgaccgacgccgatctgaagcgcgagcagcgcgtggaggccatcgtcagcgagaatctgagccactggcaggacgaaggcttggtaccggacatggccatcgagcctggctacaacactgagcaaccaattcgtgaacgtggctggacgcactggcaccatttgttcaatgcgcggcagctaatgctttttcgtacttacagaaagagtttggaggtaatagagaaggcgagcattgcgtcggcgttatttgttgttcagtcgaagtcgtatgaatggaattcacgtctgtgcagatgggcgacgtcttcaaggcatgaaaaccaagtcaatacgttttcgaatcaagccttgaatacgcttttcaactacgcagcacgggctgtacccaatttggaaaatcacacaattattggatttggtgaagcatcgggtatcgctcaggtcaccacagatgtggtttcaaatcccgcagcaaacatttcaacttgcgccgaactttacattaccgaccctccctacgccgacgcggtgaactacgaggaaattaccgagtttttcatcgcctggctgcgcaagaacccgcccaagcccttcgatgagtgggtgtgggattcgcgccgtgcattggcggtcaaaggctctggcgagaacttccggcgcggcatggtcgccgcttacaccgcgatggccgagcacatgccggataacggcatgcagtgcgtgatgttcacgcatcaggatactgccgtctggggcgacctgatcggcatcttctgggctgcagggctgcaagtgatcgctgcctggtacatcgccaccgaaaccacatccgagctgaagaaaggcggctacgtccagggcaccgtcatcctgatgctcaagaaacgcgctgcgggtgagcgcaccggcttcaagcagcgcctactgcccgcagtacgtcaggaagtggcacggcagatcgaaaccatgatgcacctgaacgacgccgtggaagcgcatcatggtgagccggtatggggcgactccgacttgcagatggcaggctacgccgccgcgctcaaggtgctgaccgcctacacccgcatcggcgacgaggacgtcaccagcttcgccctgcgcccgcgtgcgcgtggtgaagtcacggtggtggacgaaatcgtccagcaggcagcggaaaccgcatccagcctgctcgttcccgaagatctcaccgccgacgcctggggccggctcactggcatcgagcgatttgtactgcggatgatggacatggaaaccgcaggcgcgggcaaactggacaactaccagaacttcgccaaggccttccgcgtaacagactacacacgtgtgatgggcgacatgcgccccaacaacgcacgcctcaaacgcgtcagcgaatacgcttcgcgcgatctgacagatgccactgagatcggcgtgacgcggctgggtcagctcatcatcgccttgcaacagctgctcaaggacactgaggcacaggttatcgtcgagcaactgcgcgcccagatggcggatttcctggaagtccgctccctgctggtggacatgctggcttttattgagcgcaaagcgcctgaatctgaggtgcgctctgccgccgaggttctgggtgcgcgtctcaagaatctgcgtttcggcgagtaa

SEQ ID NO: 509492 - DNA, 417 bp, Stenotrophomonas maltophilia
atgcaggcggattttctcgatgcacacgagcgccactgggatgatgcggaacgcctgcttcaggcgcagcgctgggccaatgccgatcatctgtacggcatagcggcggagtgtggcttgaagcggttgatgcgtgcgtttggcatgccggtcaatccctcgactggaagccctacggatagtaaggactggaaacatgccaacaacatctgggcacgtttcgaaagctaccgcagcggccatgcgcaaggggcgggttatgcgatggcagccggcaatccgtttgatagctgggatgtgtccgatcgctatgcccatcaatccaacttcaaccaagcgcgagtgcaaggacatcaagccggcgctcaggcagtgcgtaacctgatcgctaaggcgcaacgcgagggcttgctatga

SEQ ID NO: 509493 - DNA, 1350 bp, Stenotrophomonas maltophilia
atgaccaccttcgatcaaattctgccgatcaccaccgaggtgctggccgcccacagcgatctgattgcgcaactggaatggttgatcatcaatcgggatctcaatgggcgcttgcgtttcattgcaccagagcaaacccgtgacgacgacgcacagcgcgcagccatcgaggccatttaccaagcgcttgccgagcgcttggcgccgcatgcttactccgtggatatgggcattctgtatgaagccgatcaagcgcaggccaggcacggcgcatccagctatgcgttgggcggcttcgaccaggtgtgggtcgtggatcgcctggccaccgaggccaactgggcgcgcattacgccggaagcgcaaggtgcgccgcgcattgtgttcttttccatcaagggcggcgttggccgctctacggcactggctgccacggcgtggcaacttgcgcaggctggcaagcgggtgttggtgctggaccttgacctggagtcgcccggactgtcctccgcgttattgccggtggaacggcagccgatgtacggcatcactgactggctggttgaagacctgctggataacggtgaggccgtactcgacagcatggtggccaccagcaacctgtcccatgacggtgaaatccatgtggtgcctgcacatggtgccgagcacggcgagtacatcgccaagctggggcgtgtctggatgccgaaggtgcaggtagacggatcgcgcgaaacctggtctgcccggcttaggcgtttgctgcatacgctggaggcgcgtatccagcccgatgtgctactgatcgactcgcgctccggcatcgacgagattgcctctgcttgcattaccgacatgggcgcgaacctgattctgctattttccctggagggcgagcaaacctggaacggctaccggatgctgttcgagcaatggcagtgcgcccaggtggccgaagaaatccgtgagcgcctgagggttgtaggcgccatcgtgcccgaactggatcgggtgacttatctggagggcttgcgcgagagcgcatatggcatttttgccgacagcctctacgacgagattgcgccggccaatccagccgccatcgggccgagcgcgagcggtgacgggaagtggcgggttgatgaactggtagaaggctggaactttgacgaggcggatgaaggcgcgccccattacccgtgggcagtgaactggcaccgcagttttgccggtttgcgctcattgcagggtcggctcgctagcattgatgcgcaggaggtgcagaccgttttcggcccgctgatcggcggtgtgcgcgacgccattgaatcaaggagcttgtcatga

SEQ ID NO: 509494 - DNA, 1395 bp, Stenotrophomonas maltophilia
atgaagtcagctcagcagttgcgcgaagccattctggctgcgccactggaaaccagcaatttcgcggaaaccccggaagccggaaccttgtatctacccccttcgcacctcaaggcattgaggttggatgcgcacgttgttgtaggggggcgtggcgtcggcaaatcattctggacggcagccctgcaatcgaacccgcttcgccagcagctgggcgctgcggtcactgagttgcagggcattgaggttttcgtcggcttcagcaatgccgaggccatcgacgactatccgaatgccgacgtttttgccgcttttcttgaccaggatggcgacccctatgatttgtggcgggccgtgattgtgcgcagggttgcgcagaaggccggcgagctgattccgcttaccagctggcaagcaacggtcaattggttgaagcaacagccggaagatgcggcgcgattgatgcaacgtccacgtaactggaaaggcttggtgctctttgatgcgctggatcgcaccagcaccgactggcggcgcatggacggcatcgtgcgcggcctactgcgggcaacgctttggctgaaggcttttgccggtctgtacgccaaggtgttcttgcgtgaggaccaggctgagcgcaccgtgttcaatttcccggatgcctccaagctcaccgccaccaaggctgaactgacttgggccaggcatgacctgcatggcctgctctggcagcgtctgatcaatgcgcccgatccaagtggcgtgtgtctgcgagatgtttgtccgcatgaacagcaaaatggcgtgtggcgtgtcgcgcagccgatgaaatcggagtcagaggcgcaaaagcaggcgtttgcaaccctggccgggccgtggatgggacgtgaccggcgtcggggtgtgccctacacatggtcggtgggtcatttggccgatgggcgcggccagacctcgccacgctccttcctcgcggccattaggcgcgcggcggaagattctagcgagcgctatccgcaacatgaccatgccttgcactttgagagcatcaagcgcggcattcaaaaggcatcggaaatccgtgtgcaggaaatggccgaagactacccgtgggtgcctgaggtcctcgccgctctgagcggtatgaatgtgccaattgatttcgaactggtaatagctaagtggcaagaggcgtttcctgacggcgcacaaggcattagcactacccagctgcccgcacagcacgttgatcgtggctggagcggtgtacgtgaggatctgcagcgcttgggattgctggaagtcagaaaggatggtcgcatcgacatgcccgacctgtaccgcgtcggtttcggcttaggtcgccgcggcggcgtgaaacccaagaattaa

SEQ ID NO: 509495 - DNA, 2682 bp, Stenotrophomonas maltophilia
atgcagcatctggcgggtgcgcggagctacaagcgcattgcaggctacttcaccagctcgttgttcgaggtggctggcgaggcgctggagcacattcccgaggtcaaaatcgtctgcaatgtggatatccacccggacgacctgaaagtggcgcaactgcgcgagagcaagatgctcggccgctggaacgagcgcgccctggaggccgaggctctgctgaaccgcgaacgctatcggcggctagacgcgtttcttgccaagcatgggcaggcggtgcgcatagcaccggacgatatctgcggtttcgtgcatggcaaggccggtgtgattaccctggctgatggccgtaggctgggattcatagggtcgatgaacgagacgcgaaacggctggcagcgccactacgaaatcctgtgggaggacgagtcgccagaaggcgtggagtggatcgaggaagaattcgatttcctctggaacgccgccaagccccttccgcaggccgtgatccgcgaggtacatcgacgcggctatcggcgagagattgagttcatcgaaatcgatgatgacgagaatcttgcccctgctgcgctgatcgaatcgccgctgtaccgcgaaggccagcagttacagccgtggcagcaagggtttctgaccgaatgtctacgccatcagcggctatacggtacggtgcgcctgctgctggccgacgaagtcggactgggcaaaacgctgtcgctggccacggccgccctgacgctctgcctgttatccgataaagacaatgggccacgccgcccggtcgttatctttgccccggccacactgaccgaacaatggcagaccgagatgctggacaagctgggcatcccgaccgcacggtgggataccgtgagcaaggtctggctggatgctgacgagcgagcgctgtcgcctgccgggcgcgagcagattgcccattgcccgttgcgcatcggcattgtctccaccggtttgatgatgcgcgactcactggagaagcagcacctgcttggtatgcgcttcggtgtcgtgatcttggacgaagcgcacaaagccagaacgcgccagggcttcggcaaggaagccggaacgccgaacgagctgctggcttttatgcgtgagatagccgcgcgtgccgatcacgtgctgctgggcacagccacgccgatccagaccaaccctgctgatctatgggatttgctgggcatcttgcaccaaggcccaggccgcttcgtgctcggccacgacctggcgccgtggcaccgccccgacgaagtgctcgacattctagcgggtcgcgtggacgtcgaatcgctcactcatgcttgggaactgttgcgctcgccgcttccgcgtacggaatcaaccagtgagcctcgcgcccgtcgtttgttctcagctatccggcaagacttgggtttgcagaatggcgagtggcaaaccaaccgttcgctggccgatctgacggaggaagcgcgggagattctggaagaggagttggagcgccgcatatcaggtgcaacgctttttcagcgcgaaaacccgttggtacgccatgtcgctcttcgcaaacgccagcagcttgaagacgccgggttactggctcgcgtcggcgtggacgtgcatccggaacgagggcgagtatcggagcagcgcgctttcgatgccttgttcgagggcaaggcactccgcacttcggaagacttcaggcaggcgtacggcgaggcacgtgcgttcggcaaggcacttgccaaacgcggtaaaggcagcggtttcatgaagaacctgatggagcagcgcatctgctccagcgtccacgcgggcttagcgacggctaggcgcttactgcaaggcgatgccgagcacgaggaagacgaagaactagaagctgatctcatagtcgagacagaggaggagcgcgaagttctgcagcgcctgattacccgactcgagcggttggaggtcgatcctaagatggaggccgtcgtccactttctcgataaggagaaatggctggaattgggcgtcattatcttcagtcagtattacgacacagcgaagtggttggcggacttgctggcggcgcgctactcggaagaagctgtcggcctttatgcgggtgcgggccggagccgtctgtaccagcgtggtgacagcgtgagtgtcgagcgtgaaaccttgaagcggatggtcgccgagcaccagattcgcatcatggtggctaccgatgccgcctgcgaaggcttgaacctgcaaacgttgggaacgctaattaacgtcgatttgccttggaacccaacgcgcctcgaacagaggatcggtcgcatcaaacgcttcggacagcggcgtgaaaccgttgacatgctgaacctcgtgttcgagcagaccgtggacgaaaagatttacgagcgcctgtccgagcgcatgaagaaccgctacgacctcttcgggtcgctgccagacaccatcaaggatgagtggatcgaggacatcgaaacattgggtgagcagcttgacgactacatcaacgcgcagaaagccgcgaccggctttgacctacgctacaccggcacaatgatgccaccggacaaggattggcgtgagttcacggaggttctatcaaggcgcgatctggctactctgatgagtacagcttggggttag

SEQ ID NO: 509496 - DNA, 699 bp, Stenotrophomonas maltophilia
atgcgcatcctgctgagcctgctggcactgctgctggcactgcccgcggcggcgctggacctggtgccgaccaccctgcagctgcccgccgaaggcggtcacggcgaactgtggctgtacaaccctggcccccaccgctggcagggccaggtacggatcctggcctgggaacagcagaccgacgcggaagagctgcgtgccagcgaccaggtcctggccagccccacccggctcgatatcccgcccggcacccgccagcgcatctggctgctgccacgccaacccacacccgtggccgccgaacaggcctaccgggtcgtgctcgcccccagcatccccggcctgccgcgctactcgctgcccctgtttcggggcaagcccgggccgttggcccagccacggctgcgcgcctggactgagttcaaaccgtcgcaaccttcgctgcgactgagcaacacagggacactgcacgctcgcctgcaggacctcaccttcgtcgccaatgatggtcgccgtaccgtgctgctgccgggtctggccggctatgtcctggctggccgggagcgccactgggccctgccggcccgtgccgacggctacatcgatggccatttccaggcccggctgccggacggccgcatgatcgacctgaccgcgccggacccggcaattgcagcaagcgcgccgagcgggctataa

SEQ ID NO: 509497 - DNA, 135 bp, Stenotrophomonas maltophilia
atggatggcgccatcgagcccccatggacgggtttacggcgtgtcccgcctgcccgcaccgccctgcccaccacggattgcctgctgttgctgttgctgttgctgttgctgttgctgttgctgttgctgttgtag

SEQ ID NO: 509498 - DNA, 525 bp, Stenotrophomonas maltophilia
atgagtgctgtgttgacggaaacagagaagaagccacccaccccgttgcaggcctatctgactgggctcaaggcgaagggagggctttcactcgatctcggcgtcatcgccgtgggaaccgatagcagcgagtattccggtgcagatctgttgtgtaagggagtgatgtcgctggtcaaggcgtccacggatgggaaggtggtgcccaattgcctgtcatggggcatggaaggtgagtggaccgaggacaagaacaaggaatggcttggcgctgcgctgaagaatgagagtggtgcactgcttccgacgttctgctatgtcttccacaccaagatcaacaaggctcttgcggctgccgcgaccgacatggtcgtggatgttgcgacgttcgacaccaagttcaaacagctcaatggcaatgagggcccgagctacaaggaggtgaagaagatcctcgaggcaggattcgtcgtcattgttccgaacacgcatggtggtgtgaagctcaaggtgaaagccgcatga

SEQ ID NO: 509499 - DNA, 1461 bp, Stenotrophomonas maltophilia
gtgaacgccgccctgccccgtctcggcctgatcgtcgcgctggccagcctggccgcgtgcaggaccgtcggcccggactatgcattgccggaaggctcggcgttcaagcgcccgcaggccaatgcggccttcatcgatacgcagaacccgcagatcgccgccaaccaggcgctgcccgaccgctggtggtcgctgtacaacgacccggtgctggatgggctgatcacccaggcgctgcgggacaacgtggaactgaaggccgccgatgcgcacctgcgtcgtgcggcggcggtgtacgagcaggcactggacgctggcggcttcgagtatgaggccgaggccggggtcagccgcgcgcagctgtcggccgaatcgttcctgcaggaacacgagctgccggtgatcaacctggccgatggcaagttcgcggtcagctaccagttcgacctgttcggcaagctcaagcgcggcgccgaagcggcgcgtgccgacgagcagtcggtcgccgcagcgcgcgatctggcccaggtcagcgtggtcgcccaggtggccgacagctacctggaaatctgccatgccaaccacgaactgcacgtggccgagcattcgctgcagctgcagcagcgcagccgcacggtcaccgagcgcctgatcgcggccggccgcggcacaccaccggagctggcccgcgccaatgcccaggtggcgctgctggaagctgcattgccgccgctgcaggcgcagcgttcggcggccgcctattcgctggccgccctgctcgggcagaccccgggccagctgccggccggtgtgatcgactgcgcgcacgcccccgccctggcgcagccgctgccggtcggtgatggccgtgcgctgctacagcgtcgcccggacgtgcgccaggccgaacgcaagctggcctcggccacggcacggattggtgtcgccaccgccgagctgtaccccgacatccgcctgggtgcctcgctcggtgccgccggcctgctggaggacttcggcacgccgatgacccagcagtggtcgatcggcccgctgatctcgtggacgttgccgtcgtccggcacccacgcacgcatccacgccgccgaagccggtgccgatgcggccctggccgagttcgaccacaccgtgctgcaggcgctgcgcgagacccagaccgcgttggaccgctatgcgcaggacctgcgccggctacagtcgctgcgcatcgcgcaggagcaggccgcactggccgccgagcagaaccgccggctgtaccagggcggccgcacgccgtacctgtccagcctggatgccgaccgcagcctggcgaccagcgacgccaccctggcggccgccgaggcgcaggtctcgcgcgaccagatccacctgttcctggtgctgggcggcggctggcaggccagcgccgccgcgcccaacgcctcgaccgcagcgaagtaa

SEQ ID NO: 509500 - DNA, 810 bp, Stenotrophomonas maltophilia
atgccgcatcctgtccctccaccactccccagcgaacacccggttgccgccgggccctgcgtcgaacagctcaagcgcgatgtgctgccggtcctgttcgccgggcgcatcgacatcggtcgctatggcccggccgaactggccagcgccagtgcggagcccgcttggcaggacggtagtgccaacgcgttggccaaggcgctggctgaactggtcagccgcctctccgagcatgaccccaatgcactgctggaacgcgctggctggtgggaccggttcactggtgccgacatcgagcagcgcctgcgtcgacgcatcgcgctggggggaaacggtgacgtcctggccgagatcgagcgccaggcgatcgcggtgcgcggcagcgtcgatcggttgaacgcacagctggagctgcatgacgtgcagggcgcccacttgcagatctacatcgatgcgggcgtgcagttcctgcaggaactgcccccgggcagtggtgccagtgacgatccgatggtgctggatcgaccggtggagcgcctgcagcgccgcatcgccaacctcaccgcactgctggccagccattcgatgagccggatccaggtgcagctggcgcgcaaccacgccatcgaactgctggaccgctacagcgagacggtgcagatcctgctgccgatctggcgccagaccatcctcgccctgcacaacaacgacaacgccagcccgcagatggtcgcccgcgcctcgcaggcacaggaccagttgaaacaggccctgcagcagctgctgcgcacttccggagaaccggcatga

SEQ ID NO: 509501 - DNA, 879 bp, Stenotrophomonas maltophilia
atgatcacgtcccggcccgacccactgagggtaccggcggaactgcagccgcgggtcgaagccgttcccgggctgcgcgcgctgtatcgccggggttcgttcgcacgcaccctgggtctggcgtgtctggcggtgctgccggccacggcgctgctgtccatgatattcctgcaggggctgaccggcagtccgccctcggcacacgtgccggccggctacggtactgatcccggcacgtctgccatgctgctgctggccagcctgatcctctttggcgggttgctgttctggatgggattcggcctgcgcagggtgctgctcaaccgcggcgtacgccacttcaccttctcgttcgtgattggtggctcgttgctggtcggcttgctgttcggcaacggaatcgtcagtcccgacttcagccgggctgacgctggcgatggcacgaagctcgacagcagccagctcggcaagctcatcgacagcccgggtttcacgacactcagcccgcaatggcagggctacctgcaggcgcagcgctcgctggcaagacccagcatccccttgaacgatatcggccaggccatcgcccgcggcgaggacatcggtatcgcggtgcccgatgtcatccgtgcgcgctttgaagccaaagccaaggtcccctattcggtgcgcagccaagcgtggctgcgtgaccattggctgcgcatgggcgcgctgcacttcatcggcacagcgatcgcctggtcactgctgctgctggtcatcgctggcatcggcctgaccaccctgggctatcacgtgcgcggccgggcccgggtgatcaacggcctgctgcagcagttgcaggcgccaccggcacaggcgggcgcgcagccctga

SEQ ID NO: 509502 - DNA, 2184 bp, Stenotrophomonas maltophilia
gtggctgccgtgcaatgggatcgcctgaacgcgctgactgttggtgatcgcgacttcttcagctgtgcccaggaccgggtatggggcacggatggcaagcgcatcgatcgcgaagaccggtcgattctggctggcaccaatcttgccggctgcaactctgccaatctgtatgcaaacaccatcatccagctgagcaactcagcaatccgttatgtaccttcgccggatggcagcacggtcggccccttcccgggctatcgtccgcgcccgcgcccgaccccgacctacgccaatggcggcaccgcgtactatcaggacgtgctgaactacccgttcttccatgaccaggaagtgatcaaccagcgtgaacgcgcatcgttctacggggcaaccgacttcagctttgacagtttcaactggaagacccagttcctgtacaaccgtcgcgaaaccaaggcacacagctggcgccagttctatccgaccgtgtacaacgaagcggaggacgactacttccagaccatcatgccgttcccgagcgaccagaaagtcacggtcgactacttctacggcaccaccaagttcgatggccagttcaagtccaccgacagctggtcctgggaagtcaatgcgggctacagccgttcgcgcggcaagtacagcgcgctctcgatcgacgtcgatcgtgccggcgatctgaactacaccgaagatgacatgccggtgaattacttcgaccccggcttcctgagcggcgcccgcatgaacgagctgatcgctgcggtcggccaatggcataccggcaagacgacctatgaacaggccagcgccaacgccatcttcagcggcaacctgttcaaactgcctgctggtgatgttgcttctgcgttcggtgtcgaattccgtcactacaagatcaacgacaccccgtctgactttgcgctggctgaccgctcctggaactcgacctcggccggcgtgacccgtggcacggacaaggtcaaggaagctttcgccgaggtggatgtgccgctgctgaaaggcattcccggcatcgagtcgctctcgctcaacctgtccggtcgcgtattcgagtacgactcggtaccgggttcggaccatgtctggaaaaccggcctgaactggcagatcgtcccgtcactgcgcatgcgaggcaccattggcacctcgttccgcgcccctgggctgtatgagctgtacctgggtgaccagaccggcttcaaggcacagaaccagatcgatccgtgcatccagtgggccgacagcaacaactcctttatccgtgccaattgcgctgccgccggcattcccgaaacgtatgtcggtggcggcaccggcgcgaccatctattcgggtggtggcggcaagaacaacctgaagccggagacctccaaggccaagactctgggcctggtctggagcccgacatttgccaacctcaacgtcgcactggactatttcgattacgacgtccgcggcgaaatcacccagcttgacgaatatgacatcgtcgccggctgctacggctcggcggtcttcccgaacgcgttctgcagccagctggtccgcaacagccccacggatccaacgtcgccgaacaacatcaccacgatctacaacaagtacatcaaccgcgagcgcacccgcggctacgacctgcagatcaattacgacaacgacttcgcgttcggcaagctttccgcggaagcacaggtgacctataccctggaggacacctatcagttgttcgattcggctgctgaaagcggaatcagcacctctgaccaggtcggctacatcggccgtccgaagaccgttggcctggccagcgtcagcctggaacgcggtgattggacgttcaactggcagggaacctacgtcagcagcacgcagaacaaggacctgagcccgaacttcacctactccggctaccagaacgccacccgcgacatcaaggccagctggcagttccgccacagtgtctcggtgggttacgacatggatgactggaacatcatggtcggcgtgcgcaacctgttcgacaaggcaccggacctgatctcggccggtgccggtgatcgctacggcaacgtgccgatctacgcctcgcagtacgactggtacggccggacgttcttcgcgcgcgtgtcctacaagttctga

SEQ ID NO: 509503 - DNA, 648 bp, Stenotrophomonas maltophilia
atgctgaatgggctgttaagggcagcattgcgcaaattggtggttcgctttgcatggacaaggccttggaagaggggctgcgcgatctcttccccgcgtcctttcccctgcattcagctgcaggaaggccatggtcgaggtctgagcggttcgcgctgctgggcgggcattccgagacacgcatccggttcgcgcaggtcgcattgcggtgtcacctggatcttcagagtgttgaagatcggccagcgtcctggaatcacaatggtgccgcgggtggcggtaccgcctccgaagctgatcccgatgatcatgttggccaccttggccgagccaggatggtcgaagcgccttcgcgcagctggcgcgccggctgcggccgcccgagagctcttcgttccgcgccgagccagtgaacaggcccgggttgaagaggtaatgttcaatgaaatcaatgatcagacgcggccagtgggactatccaggggccgtcaggttgtcggcggccgatcatcaggtcgaacgcgcggaaccgaccagcagaaaggctcggggaaccctatgggatcccaggatccagcacgatgctggcgcggcttcgccgacgtggccggcaagctgggtcaggggagacatcatgtcctcccatga

SEQ ID NO: 509504 - DNA, 2790 bp, Stenotrophomonas maltophilia
atggaatggcgcccctcgggctggggccaacgtgtgacacgctcgccacactggcggttgcggctggatggcgaatgcatcgagctgaacatcgcaggccaacagtaccggcagcgcgtggatgacgatcacagcgtgcaggtcattcctgggcttttctgggccagcgtttcattgcagaccgacagcggttccgtgtccgtgggcggcctgcccaacgggcaagcgtcccagcttgcagcggctgtgcggaccctgctcttcgcgcgcagcacgcgtgggcgcaagggcctgttcgaggacatcctcgagcagatccaagcctggttgagcgcggcggacgcactgactgatcgaggtcacgccagccgacgctggatcacccatgagcagcagcaggcgttgctggctgatcggcccgccctgccgctctccccggatgagctggagagtctgttcctcgatgcgaacgtgcacggcgacctgcgctccagccgccatctggttgcgcttgaggcactgaatgactggcatctggattggcccgccatctgggccgacgccaacgcgaccatggcaacgcgtgagcaggtgctggccaaggacttcctcgaccgggtcgagagcaagcccctcaccgaggaacaggcccgcgccgtcatctgcttcgacaaccgcgtgcaggtcgtggccgcggccggctccggcaagacctccacgatggtcgccaaggcggcctatgccatcgaccgcggcttcgtcgaacccgagcggatcgtgatgctcgccttcaacaaggacgctgccaaggagctggaggaacgcgcgcagcgatgcttcgaccggctcggcatgggcgataccgtggtggaggcccggaccttccacgccctgggcctggccatcatcgccaaggcaacgggacgcaaacccgacattccggaatgggccatcgacgcgacgcagggcttcaacaagcttgccgaactggtggacgacctgaaggaccgctcgacccacttccgcacccagtgggatatgttccgcctggtgttcgggcgcgatcttccgccgttcggtgccgaaatgatggccgatggctacgaccgcgatggcacgccctatatccgcacactgcagggtgagcgggtgaaaagcctggaagagtgcgtcatcgccgactggctgttctacaacggcgtgacctacgactacgaacggcgctacgaattcgatacggcgaccgacacccatcgccagtatcgccccgacttctattatccggacgccgggctgtatcacgagcactttgcgttggatgccggtggccagccgccaaagcatttcgccaactacgccgaaggcatgcattggaagcgcgagcagcatgcagcgcgtggcacggctcttgtcgagaccacctcgtatggcctgcgcagcggagacgccctgcgccatctggccgagaggttggacgagtccaacgtcgagctcgacccgaacccggaccgcgagctgcccgaccagggcgccagaccaatgccggacgcagacctgatcggcttgatgcgcaccttcattgcccatgccaagagcaactgcctgacgctggacgatatggccgcacgcctgcggcagatgcccgacgaccagttcaaggaacgctaccggcgcttcctggaaatcgccgggccggttttccaggcctgggacgaggcactggcggacgagcgtggcatcgacttcgaagacatgctcaacatggccgccgggctgctggaacagggtcactatgaatcgccctacgatctggtgatggcggacgagttccaggatgcctcgcggtcccgcgcccgcctctgccgcgccctggtcagccaaccgggccgccacctgtttgcggtgggcgatgactggcagtcgatcaatcgcttcgccggcgccgatgtttcggtgatgaccggattccgcgaatggatggggcacggccaggtgctgaaactggaacagacgttccgctgcccacaggcactgtgcgatgtatccagccgcttcatcagccgcaatcccgcgcagatcaccaaggaagttcgctcagctgcaacggccatgggcccggtgctgcaggcgttccagatgaaccgccgtgaggaggtgcaggatggtgttcgccagtacctcgccaagctgcaccagcagctgctgtccggggccgttccacagggtcgcactggccgcgtgacagtctttgtcctggggcgctaccgcgcggatcggggtgcagtgccttcggattggaagacggccttcggcagtacaatggacgtcgagttcctgaccgcgcatcgatcgaaggggcgcgaggcggactacgtgatcctgccgggcatgatcaaccgcagctttccgagcctgcgcgcggatgacccggtgctttcgctggcgatgccggagggggatacctatccgctgagcgaagagcgacgcttgttctatgtcgcgctgacgcgggcgcgacggtcggtggcgatgttcaccctgcaggggaagcactcgccgttcctggatgagctggtgcgggacggtgcggtggaagtgaccgcgatttcaggcgcggccatcaatgaggagcgctgcccggtgtgcaaggtgggggtgttcgtggagcggaatggaccgcatggcgctttcagatcgtgctccagctatccgttgtgccataacaagccgaacggtgggcgtcgtgagtccgggccatctgacctcgtccgatgggcttcactgagatag

SEQ ID NO: 509505 - DNA, 2826 bp, Stenotrophomonas maltophilia
atgagcctggggcgctatctcgccaccgcgcgacggtcggtgcagcgccacggcggtggcatggctggactgggatcggtgctgctccgcgcactgaaggtagttcatgcaatgggcgtgcgcggtttcattgcgcgcctgcgctcggccagcgtcgtccgcacccgcgccagcgaacccttcgatacgcttgcgctgcctgtgccgatccccctggaacagctgcggttgagtgtgggcgtgatggcgcacgtgttctatccagacctgatcaacgagttcgccaccacgctctcgcgtatgccactgcgctttaccttgctggtctcggtgatggacgctgcagccgaagcgcaggcacgtgaggcattcgggcgccttccgaacgtccagaccctccttgtccgccaagtccagaatcgtggtcgcgacatcgctccactattagtaacgttccgcgaagagatcaaggcactggatctggtgtgccacattcacaccaagaaatcgctctataccggtagcgaacagcagacgtggcgccactacctgttagacagccttttgggctcacgtgagcgcatcgcttggatcttgggcaccttccaggccgacccacagctgggcctggtctatcctgaaagttacgacggtgttccactctgggcgcacacttggctgagcaatggccccgcgtgcgacgcactcgcgcagaaacttggaatcgccctggatgcgcagcgttacatagacttccccgccggctcgatgttctgggcgcgagtcgatgcgctgcgaccgctgtacgatctgaaccttccactggatgccttccccgtggaacagggccaggtggatggaacgctgcagcacgccgtcgagcgcctgtttggcgtcatcgcccgccaccagggtttccgcttgggcatcctgccacccgatggtcgcctggcacttgctgccgaaggtgaacgtaatgtcggcgaggcacttcaaaccggcctgtctgaccgtttgacgctagccgcgctggacgcacgcatggtcacggtcgatattttcgatacgctggtcacccgcgtgttcctgacacccgccgcggcccgcgagcatctcgcttggcgactggagcggcaatggggcatatgcgatttctcccggcatcgcgccgatgcggaaagctgcctgcgtgaaatcttgcagcgggacccctccctctccgagatccacatcgagcttgccgggcgcctcgcgttgcctggcgtggatgcgagcatgcttgccaatgccgagcgaatgcatgagtgcgcgatactccggccgcggcaaggtctgctgacagcgcttgtagatgcaaagctgacttcgctgacggcgttctccgacatgtatctatccagcgacgacatgcggcaggtcctgcccgatcgagtgcagcagctcatctcgcggtggtggatttcctgcgagaccggcctgcgcaaggactctgccgacagttggaagcagctggcgcgtcaggaagggcgcgaagatggccgctggctacatgtgggtgacaacgaacacgccgacatccagatgccgcagctgggcggcctgcttacgcccgtgcacgtgctgcggccggtcaccctgctggacgtcgtaccgggccttcgcccgctccgccatccccagggcacccaggcaccatggtctgagcagctttggcgcggcctgctggcaaacagcttcgctgcgatcgccgacacctctccgcagcggctgctcggtcgtccccagctcgatgcacatacgctgggctatacggtactcggcccgttggtcctggacttcctgctgcatatcatcgacgtagctcgccgccgcgaggtggaccacctgctgttcctgagccgcgaaggctatctgctggagcaggcattcacccggctgcaggccgcacacccgttcgccgccaggatcaagagcacctattttctggcgtcgcgtcgggcgacgctgctgcccgcacagctcgatgcctcagatcttgcactgctcatgcagggtacgttcaacgggtcgctgcgcggcctgctgcaggcacgactcggcgaagatgccgtggcacgggtggcggcattgcagccggcgctgatggagcgcgacgtctttctgccggaaatggccgacgaggtacagcgttggctgcacccggtcagggatgcacttctgtcgctggctgcccgccatcgcaaggtctatcaggcgtactgggcccgtaccgtcggctcatcgacgccaatggtgatcgacgtgggctacgccggcagcatccagcgcaacctcgcgcgcctgctcggcacaccactgggcggctgctacatggccctgcgcgcaggcgccagcgcactggcatcgcagggctgggccgaggcacggtacttcgacggccgcaatggcggcaacgaaacagactcccccatccttgccaacgacctgctgctggagtcactgctggcagctccgcacggccagttcaacggcttcactgaaagcagcgagggcctgaatacgccccgcttcggttccgttgaacttccaacggctgccctggagatcctcgccgaggtccataccgggacgctgaccttcatcgaagaaacctgccatacgctccatgaggacatcgccgagctgaacctggacgccgagggcgtccaggttccactccaatgtctgggcagtgggcgatggaatgccgaccttgtacttgcccaactcgccaccgaagacgcgttcaccggacgcggtacagtcagcgcgagccctcaggactag

SEQ ID NO: 509506 - DNA, 849 bp, Stenotrophomonas maltophilia
atgggcgtgtcgttcgagatgatcctggtcgacgacgccagccctgacggcgcatggccgcgcatcgaggagctggccgccagccggccttggctcaagggcctgaagctctcgcgaaatttcgggcagcactcggccatttcagccggcatcgagcatgcccagggccgttggacggtcgtcatggattgcgacctgcaggatgttcctgcagaaattcccggcctgtaccgcaaggcggtggatgagcagtttgaagccgtgttcgcgcagcggatacagcgcatggacacccccctcaagcgcctctcgtcgtgggggttctttgcggtgctgggctggctgaccggcgtgccgcaggacccttccacggccaatttcggcattttccaccgcaaggtcatcgacgcggtctgtgcaatgccggaacgtgatcgctcgttcccgctgatggtgaaatgggccggcttccgcacgggcaagcttcccgtacgccaccagcagcgcgcagagggtgaatcgtcctacaccctgcggcgcctgttgcggctggccatgaacatcgccctgggttactcggagaagccgctgcgcatggtggccggcactggcatgttctgcgcgctggtcgccttcgtcatggtggccatcagcatctggcgatggtgggacggcgacatccaggttgcgggttacacctcgatcatcgccgcaatctggctgattggcggattgatgatgttctccatgggcgttgtggggctgtacgtcggccaggtcttccgcaatgtgcaacggcgcccctactacatcgtctctgaaacgaccgttcgcggagaagctccatga

SEQ ID NO: 509507 - DNA, 762 bp, Stenotrophomonas maltophilia
atgagccacttgtctctgcaggcaggcggcagcgtggtcgaggcgcgcctgacgccctgggatgagcgcgcgctgggctgcaccactgccgagatcgtccgtttggatgcggccaccacggaccaggcggccgcaatgctggaccaggcccaggcctgggccaggcagcagggtgtccactacctgttcggtcgcatcgatgccaatgcgcatgcgttgcgtgctgcggtgctcggctgtggcttccagttcgttgaaacgtcactgaccgtgtcacgcagcggcatggggcaactgcctgcggtcccgcgcgggatgctgcctacgctgcggccggccattgctgcggacattccgttgctgcggtccatcgccgccgacgacttcgggcatggccgttttctggaagaccctgccatcgaccctgcacacgcacgtcttcgcaccgccaactggatcgaggacctggtcaacgcccagctggtccaaaccgcggaatcacgcggccgtgtcattggcttccatgcagaacgagtcttcgccgacgagcacagggcagagctgctgctgacaggtgcagccgccccgtacgccatgctggccatgccgctatggatcactgccctgcaatcgctggctaccagggatatccagcgctgcacgacgctggtgtccgccgccaataccggcatcatcaatctgtatgcccggcttggcttccaattcaattcatctcttaacgggttccggaaattcctatga

SEQ ID NO: 509508 - DNA, 249 bp, Stenotrophomonas maltophilia
atgagcaactccagcaacgaagaccaggttgtagccgtgttcgcccgcgtgttgggcatcgatgcctcccaggtgactgacgaactgcgctacaacaccattccgcagtgggattcgatcgcgcacatgtccgtggtcgccgcactggaagaagcgttcaacgtcatgatcgacatggacgaagtgatcgacatgagctcggtcggcaaggcgcgcgaaatcctgcgcaagcacggcgctgctgtctga

SEQ ID NO: 509509 - DNA, 747 bp, Stenotrophomonas maltophilia
atgacgggcacccacgctcccgttgtcgtggttaccggggcctcgcgaggcatcggccgggccatctgcgaactgctggcagcacagcacgtccagctggtgatcgtcgcgcgcgatgacgacgcgctgcgcgcgctcgccgccgaggtcaccgcacagggggcaccggaaccgatggtcgcggtcatcgatctggccgacgtcgatgcggtggccgccgtgttcaagcagatattcaaccagttcggccgcctggatgggctggtgaacaacgcaggggtcctgcacgaaggtcttctgggcatgatccgtgccgaagacatcgaccgcgtgctggcggtgaatgtcaaagcgccgttgatgatgatgcagtatgcaagccggttgatggcgcgaacccggaagggcagcatcgtcaacctcgtctcgatcatgggcgtcaatggcgctgcaggattgagcctgtattcggcaagcaaggcggcactggtcggtgcaacccgatccgcgtcgaaggaactggctgccaagggcattcgcgtgaatgcgatttcgccgggtttcatcgataccgacatgacccgcgccatgccgcaggccgcccacgccaagcgggtggaatcgatcggcatgggccgcgcaggaacgccgcgcgaagtggccgagctggtcgcgttcctgctcggcgacagctccgcctacatcacaggccagatcatcggcatcgacggacagatggtggtctga

SEQ ID NO: 509510 - DNA, 1398 bp, Stenotrophomonas maltophilia
atgcagttctggcagttggcgcacggcaaccgcactgcgctcatcgagggaacacggacgctcagttatgacgaactgggcgtgctggccgataccctggccacgcacctgcccgccgggcggggcatgggcgtgctggcgatgcccagcacgatcgacgcggtcgcgctctatctgggcgccctgcgcagtacccgtcaggtacccctgctgatccagcccgatgtcgacccggagctgctggacgcgctgctgacccagtacgcgccggactggcttgccatgccgggcacggcgccggcgggttaccggacggtgcatgtcgcaggcactctgggcatccacctgcgcgaaacccacctcacgctcccatcgccgcatggcgacctggcgctgctgctgagcacatcgggcagtacgggttcatccaagctggtgcggttgtccgcgcagggcctggccgcgaacacggcatcgatcgttgcctatctcggcctgggtcccgaagaccgcgccatcaccacattgccgttggcctattcgtttggcatgtccatcctcaacagccatctgggctgtggtggctgcgtggtgctgagcgaagacagcctgatgacccgcgagttctgggaagccgcacgcggcaatgcggtcacctccctgtccggggttccggccacctacgaaatactgcgccgcatgggccttgcgcgcctgcagctgcccagcctgcgcatgctgacccaggccggtggccgcctgcgcgacgaactggtccagcattttgccgagtctgccaaggaccacggcctgcagttcttcgtcatgtacggccagaccgaagcctcgccccgcatcagctatgttccctccgagcggctgctggacaagatcggcagcatcggcgttgcggtgccgggtggtcgtatgcatgtcgatgcggaaagcagtgaactggtctacgaggggcccaatgtcatgatgggctatgccacctcgcgcgaaggacttgcgcgccccgacgaactgcacggcctgcttcgcacgggcgatctggcccgtgtggatgacgaagggttccattacatcaccgggcgcgccaaacggttcctgaagatctccggcaaccgcgtcaatctcgacgaagtggaagcgatgctgtcgaccgcgctcggccgtcagatcgcctgctcgggcaatgacgacgatctggtcgtattcagccatggcgatgcccccgctgcgcaggacaacgtccgccaactggtgcaggcgcgctacaagctgttcggcggcctggtccgctgcatccatctggattcgctgccgctgctgtccagcggcaagatcgactatctgtcgctgcggcagctcgccgcgcaaggagcacgtcaatga

SEQ ID NO: 509511 - DNA, 1104 bp, Stenotrophomonas maltophilia
atgaacgcaggcacggacagttcgctggcagcggctgcgctggaagcggaggtctatgggctgggccgccaggccaagcgcgaatggctgctggacggcctgcagtcgctcacccggcatcaccacctgtcctgcccgccctaccgcgccatgctcgatgcattgtggcgcggcggccaggcggactcgctggaatcgctgccctggctgccggtccggctgttcaagcagatcgacctgaagagcgtcgccgacgaccaggtactgcgcacgctggtttccagcggcaccacgggcgctgccgtctcgaggatcttcctcgacgcggaaaccgcacgcgcgcagacccgcgccctgacgcggatcttctcccactttgccggcaaccgccggatgcgcatgctggtgatcgacgacgactcgttcctgcgcgatcgcagccgcttcaacgcgcgcgcagccggcatcctgggcttctccaacttcggccgcgaccatctgtacctgctcgacgaacagctgcagcccgactgggcagctctggcgcactggctggccaacgccccggacgaaccggtactgctgttcggcttcaccttcatcgtctggcagtcctttgtccaggctgccgcacgcgacggcgtaacgctgcgcttccccgaaggcagcatgctggtgcatggcggcggctggaagaagatggacgaacagaaggtcgacaatgccgcttacaaggcctcgctctccagcaccttcggtattgatcgcgtccacaattattacggcatggtcgagcaggtcggatcgattttcttcgagtgcgagcacggtcatcttcatgcaccggcttatgccgatgtgatcattcgtgacctgcaggatctcagcccaacagccaatggaaccgcaggtgccgtgcaggtgctgagcctgctgcctggcagttacccggggcacagcctgctcaccgaagacctgggcgtgatccacggcgaggacgattgcccttgcggtcgactcgggaagcatttcagcgtactgggccgcatcaagaacgttgaagtccgcggctgcagcgacacacgaacggtaccccgcgcatga

SEQ ID NO: 509512 - DNA, 1227 bp, Stenotrophomonas maltophilia
atgacacagatcctgttctccattgacgcagacgcggcgctgccggatcagctggcgcgcctggccacgctgccgccgctgtcacccttcagtgcggaggcgcgcgcgttcgttgccgatttcgcacgacgtgtgttcgcgctgccggtgctgcgcgagcatcccgaactggcgacgctggcgcactggttccgtccggcggcgcaggagcagctgtcgcggcgcctgctggcgccgtccaccgaacacctgctggcacgtggcctggtgttccatcttgcgccggccaacgtcgatgtgctgttcgcctatgcctggctgatgtccgtgctggccggcaatcgcaacgtagcccgcctgtcgcagaagcacagtccccaacgcgaggcactggtctcgatcctgcacgccatgcgcgaggaagggctgcatgccgacgtcctgcagcgcagcgtgctgctgacctatccgcatgatgacgcggtgactacgttgatctcccgcagctgccatgcgcggatcatctggggcggcgacgcaacggtcgccaagatccgttccttgccgctggcgccgttggccgttgaactcgccttcccggatcgattcggtgtggcagccatcgatgccgcgcatgtactgcagagcagcgacgcggacctgcagcagcttgcccaccggttcgtcaacgatgttctctggttcggccagcaggcgtgctcttcaccccgcaccctgtactgggttggcgcgcaggaaacagtggaggccgcgcgtgcacggttctggcctgcggtacgctcgcaatccggcgccgtcgcagatgagcccgccgcgatgatggcccgggtgaccgatgcccacctgatggccgcactctcctccgatgggctgcattcgggcacgtcactgggcacctatccccttacgctcgatgctgcccgcgccgatggaaacctgcgcgagctgcagagtggccacgggctggtggtggacgttcagttggacacgctggaagcactggcgccacagctggatgatcgcgaccagacgctcgtcgtgcagggtttcccgcgggaatcgctgatcaagctgcttgaccggctcggtaatcgtgccatcgaccgcatcgtgcctttcggccgcgcactcgacttccacccggtctgggacggcaccgacctgctggacgtgctgacccgcaagatcaccctgccagggaactga

SEQ ID NO: 509513 - DNA, 366 bp, Stenotrophomonas maltophilia
atgagctacctcttcatcgcgttgacgatcatgctgacggtctacggccagctgatcctgaagtggcaggtaggcgtccacggccacctgctttccgcgccgctgcagccgttgaacgtgctgcaactgctgctcaagccatgggtcatttccgcctttgcggcggccttcggcgcgtccctgtgctggatggccgccatcagcaagatgccgatcagccgggcctacccgtacatggcgatcaacttcttcctggtcgcgctgtttgccagcgtgatattccgggagcagctggacggatacaagatcgccggaacgctgatcatcatgctgggtgtggtcgtgctgtcacgatcggtcgcctga

SEQ ID NO: 509514 - DNA, 1134 bp, Stenotrophomonas maltophilia
ttgattcccttcaacaagcccttcatgactggtcgtgagctctggcacattgcgcaggcgcacgccaacggccacctgtccggcgacggtcagttcaccaagcgcagccacgcctggctggagcagcgcaccggggcgcagcgggcgctgctgacccacagttgcacggccgcgctggagatggcggcgctgctgctcgacctgcagcccggtgacgaagtgatcatgccgtcctacaccttcgtttccaccgccaacgcgtttgttctgcggggcgcggtcccggtgttcgtcgacatccgtgaagacacgttgaacctggatgaacgcctggtcgaagcagcgatcaccccgcgcacccgggccatctgcgcagtccactatgcgggcgtcgcatgtgagatggataccctggtcgacatcgctgcacgtcatgggctggcgcttgtcgaagatgctgcccaggccatcatgtccagctacaaggggcggccactgggcaccatcggggagctgggcgccttcagcttccatgagaccaagaacatcatctcgggggaaggcggcgctcttctctgtcgtgacgctgagtttggcgagcgcgccgagatcctgcgcgagaagggcacgaatcgcagccgcttcttccgcggacaggtcgataagtacacctgggtcgatgttggctcatcgttccttcccggtgagatcaccgcggcgttcctctgcgcgcagatagaggaagcagaccagatcaccgcgcgtcgactggcaatctgggagcggtatcagcagtgggcggctccgcatgaggccgccggccacctgcgtcggccggtcgtgccggacgactgccagcacaacgcgcatatgttctacatgctgctcccggacctcgatgcccgcacgcgattcataagcgaaatgaaggcccgcggcgtgcagaccgtgttccattacatcccgctgcattccgccccggctggactgcaggcagggcgtacacacggcgatctgcgcaacaccaacgagctcagcgagcggctggtccgcatgccgttgtggatcggcgttgaggatcatctcgatgcgatcttcgcagccgccgatgaagtcctgggcatggcggaatga

SEQ ID NO: 509515 - DNA, 2082 bp, Stenotrophomonas maltophilia
atgacaagcgcctcccaaccggccgccggattgctccatcagtgttccagctggtggcaggggttggctcggttccgtagaggccaactaatcgttctggtcatcgccgcgttgctggtcgtgctggcgggctcccgccggtacagcaatgccgagctcacgctcgacgtggaactgccggctgccggctcattgcaggtcttcttcgaccagggcaatggtttctccgaggccgggtcagtgacgcgggagctgcccgcaggcagctcgcatctgcagctgcagctcccaccgggacgtacattcacgcttcgcctggatcctcccaccagcgcgtcgaccgtcgctgtacgcgatgtgcggatcgagggctcaatgccctcggctgtggccccgcttgtcccgacccatctgaacgagctcgttcccatcgaagcgctaggccaggatgggcgctaccaggtgctgccagatgctggcgacccgcaactggtgatggcacttcccacgcctgcggaaaatgcgtcgcgcttgcagcatcgacttgcccggctggcctgggtcggcctcggcctttgtcttgcgattgcgatgggcctgcagatggctcataccggtagctatgcatggccatcactgatctgcgcatcgctggtgctcgcgctcgcagggtttgccaccctctctccctcggtcagccctgacgaggatctgcatgaggcgggtgcacgttatttcaacagtcattggctgccgccggcgcttgattcgccggagatgctgccctcgtaccaggcgagtccctacggcgtcagctatctcgccgaatggaacgtgacgtatttgttcgcaggcaaagcgagcaacgtcgcagcgcaggctggtctgaccgaacgtcagggattcaggctctatcaggcatcgatattgctattactgatcgcagccgttttcctgctgcgtctctcgccgttcactctcgtaccggtcctggtcacgccgcaggcgtggtatgtcttttcgtacatgaacggcgatgcgcttcctctggccgccgcaagccttgctgcaggcattgcgttgacacgcgagagtccgctgcgcagctacctgctgggtgagcgccacgccgagcgggtggtgatcgtgcacgccctgctgttcgcgctgtgcctgggcctgcttatcatctccaagcggaactattggccagtcgcggtcttcatcgccaccacgctggcatcagccggattgcgcctgcccgtccgctcgtcgctcgccatggcgatcgtctgcacgtcgggaattctgtgggcggccggaggacacgcacttcatcaagcttacggactcggctggctcctggccgtcctgtccgccacttcggtgatgatcctggcttacgacggctggagacttgcccgcagccggatgctggcgcctgcctaccgcctcggcgcgctgtttgcgctggctctggcgttggcagctccatggatcgcagtggatgtcctgcgcaacggcagtggctcgcagaaggcggagctggtcgatcatctacgtgaagtccatgcagctcccggtttcaagcccagcgacgcggcaccgtcccccggccttcgcatgtacgaacagggctattcgctcccgcagatgctccagcctcccctgctatggcaggtggccacggccaaaagcctgttcggcgtctacggctacatgcagtactacgctccactggcctattaccaggcgatctggggactgactacgctgctggtgcttctggcgctatgcactgcagcgacgtcgcagccgctgcaactgggacgcagccagctcctgctggctgccggcgcggcggtcagcctgctgggcgcgtccctgctgcacagctggacctatgatttccaggcacaaggcaggtacgtgctcggcatctgtgtactgctcggcgcccaactctcacacctgagaccaggctcgcaactcgagcggctggcacatcatgccgtggctgcagccgtggtactgggcgcctgttcgtttctgtggatcgcaatgccgaacctgacgccttga

SEQ ID NO: 509516 - DNA, 1053 bp, Stenotrophomonas maltophilia
atgaaacagcgattcggcacggagcggcgtcctgcgctgcgctcgcagtacgccttgcggattgcagtgatccccgagcgctacggcacggtgatgtcgccgtgcgcgagcatccgtctgcacgcgttcaccgagcgcttcgctgccgatgtccgctacctgatgccggaagagatcgctgcattcaaaccgcacgccatcctgtggaaccggggagcgatcgaggacgccgaccggatcgagcagatggccgtactggccagaaggatcggcgcgcggctgatctatgacatcgacgacaacctgttggcgatggatgagcaccccgagcgcgatgcatacgcaaagctgatcagcgccgtgcgtgcgtcgatcgacgtggctgatgaagtctggtgctcgacggagatactggcatctgaaatccggtctgccggcggtaacgccgttctcatgccaaacgccctggatccggacctatggggtgccccgcgcacgccagtgcaaccaatgccgaagttgaaactggtgtacatgggtacaaggacccacgacgaggactacgcattcctgcagagggtgctgggtcgtctgcaggcatcgcgccctggcagcttttcgttgaccctgatcggggtgaatgcggcgtcggtagcactgcctgactgggtcgatgtgcagtcgccgccagctcatgtaggagcatcttatcccgcgttcgtgcgctggttcgtcggccaaggcccatttgacctcggcctggcaccgttgatggccaccacgttcaatcgggcaaagagcggcatcaaggtgcttgattacgccgcgatcggcgtgcctacgcttgcgtcggacgtccctgcatacagtgccggggcagtcggtgactgcttgctggtcgagaacgacgaaggggcatggctggatgtcctgcagcaggtggtcgacagcagggccatcctggagccgatccggcaacgtatccagcattgcgttggtgaagggcattttgccgaggcggttgaacggcgttggttgcgcatcactgcctga

SEQ ID NO: 509517 - DNA, 2751 bp, Stenotrophomonas maltophilia
atgtccatcgacaagaccctactcaagcgtggcctcaagcgggtggcggcaaaggtgctgtccatcaactggttcgcaccggttcccgatcgcctgaagctgctggttgcccgtcgggcggggtgctgtgactggcactggtacgcgcgcttcatcctgcgttcgcccggggcggccgccgaaggccccagccacttcctgtcctttggcaatgccgaagggaagtcgccgagcccgctgttcgaccctgcgtggtactgcgcgcgtttcggcctcaaggcgtccccgcttgatgccctgatgcagtacctgttcatcggcgaccgcctcggcctggcacccagcccgtggttcgatccgcgctactgccggcgcaccgcaccgtcgtccagcggcctgcggccggtgctcggccagtacctggtggattaccacaactcgggaacgccacacccattgttcgaccaggactggtacctcaaccagtacccggacgtgcgcgacagcggcgccaatccgttggtgcatttcctctatgacggcattcccgaaggacgcctgcccaatccgtacttcgcgccggcgtggtatctggaaacctatccggatgtgggaggcaacgacccgttcgcacatttcttcgcgcatggcgcggcggaaggacgcagcccggggccagaattcaacgcgcgacagtatctggaccagaatccggatgttgcgctgaccggcatgaacgcgctggcgcactacctggcggtgggtcgccgcggtggtcgcgagctgggcaagcgtcccttctcgctgtgcgatcttgccgcgcccgtggcgcctgccgacgcgccgctccaggacggcgtggtcgacatcgtcctgccggtctaccgcggcctggaagagacgcgcaactgcatcgattcggtgctgcgctcgcacaaccgcagccgtacccggctgcacatctacaacgactgctcgcccgagccggaagtgaccgcctacctgcgtgagctggccagccgcgagcagtcggtacgcctggtcgagaacccgcagaacctgggcttcgtgctgaccgtcaatgccggcatggcgcacgccctgcagcaggccgacagcatcggtgctctcctgctcaacagtgacacgatcgtgaccggtgactgggtcgaccgcatggttgcccacctgggggccaatgtcggctcggtcacggcgctttccaacaacgctacgatctgcagctatccccagctgggcgccaacgcgctgccgaaggagatggatgcgtcggcgctggaccacctgacccgccgcatcaatgccggtgtggccgtggatgttcccaccggcgtcggcttctgcatgctgatctcccgcgccgcgctggaaaaggccggcctgttcgatgccgaggctttcggcaagggctacggcgaggagaacgacttctgcatgcgctcgggtcgtctcggtttccgccatcgcttggccatggacgtgttcgtcgaacacgtgggtgaagtgagcttcgccgacgacagcaagcccggcaagatcatcgcgcagaagatcatcgacgagcgctaccccgattacggttcgcaagttgcccggttctgttcgatggatccgggcttctcggcgcgcgtgcggctgaccctggaggtctggaaggcgagggcgcgtccggtctcggtgctgttgacccacacctggggcggaggcaccgagcgtgccgtgcaggccatgcgtgcctcgctggccgaaaccggcgaagtggtgatcgtacggccgatggaggacaacaacgggtcggggctggtcagcgtcagccatgcatcggacttcgatggcttcgagttcctgttccgctaccgcacgcccgacgagctggccgcgatgctgcaggcactgggcaccgggacgctgcagatccaccatctggtcgggtttggcccgtcggtgcgtcgcgcggtggcgctgaccgggctgccctacagcttccacgtgcatgacaactatgcgatctgcccgcagatcaccctgaccgatgctaccggcaactactgcggcgagcctggtgaaaacggctgtgacagttgcatcgccgagcgcccgtccaacggcgcggcggacatccgcaactggcgcgccaacaaccagtggccgctgctgggtgcacaggcagtgttcgcaccgagccgggatgcggcgcagcgcatgcagcgctacaccggcatttccgtgcagaccgtttaccacgagtcgagcatcgacacgaatccgggccggcttgggcgaggcgcgcggccgtaccgggtgctgctgctgggtgtgatggccgcgcacaagggcttgaatcacctgctggccattgccgaggaagcgcgacgtatgcgtgcaccgctcgcgttccacgtgatcggctatccacagacggacgtacccaagaacccgggattcagctggagcggtccctatgcggagcaggacctggacgagctgatcgaggcgcacgaccccgatgcgttcctgtttctttcccaggccccggaaacctattcctacaccctgtcgcacgccctgcgcgatggccggccgattgccgccaaccgcctcggtgcgttcaccgagcggctggaaggcgtccccaatgcactgatgctggcccatgacgcgactgcggccgatgcggtacaggcgctggtgacgtggctggaaggtctgtacgaaaaggaaaccgcatga

SEQ ID NO: 509518 - DNA, 1038 bp, Stenotrophomonas maltophilia
atgatcgatttcccgttgtcgccgaacatgctgatgatgccccgcaagctcccgcacagcgcgtggcttgggcacattccgttcgccagctggctggtggaagtggtgcggccaaagagcatcgtggagctgggtacgcacaacggcgcctcgttccttgccttctgccaagcggtggaaacccagcaggtcagtgcgcgggtgttcgcggtggatacctgggaaggcgacgagcatgccggtttctacggcaatgagatctatgccgagctccgcgattaccagcagcgccactacgctggcatttccgagatgatgcggatgcgcttcaaccaggcgctggagtacttcgcggatggatcggtcgatgtcctgcatgtggacggtctgcacacctacgaagccgtccgcgaagacttcgagacgtggcgcagaaagctgtcgccgcgcgcggtggtgttgttccacgacagctgcgtgcgcgagcgcggatttggcgtgtggcagtactggagcgagatatcctcgcagttcccgtcgtttgaattcacccacacccatgggctcggcgtgctgctggtgggcgaggagcagccgcaggcactgctgcaactcgcccaggctgcgcgtgatggcctgttcgctaccatcaaccagttcttcgatgccttgggtcgcaacatcaagaacgtggaagagatcgaacgggtgaaccacggcctggccgccgcccatggcgagatcgggcggctcaacgccgaggaagcacgcctgcgcgcactgctggaaaagagcagctacgccaccgaggagcattacgcgatagtggagtcgcagttgccgagcctggcccagggcctgtcactgctggagcgtcgcgttatcgaagggatgagcgagacgcgccaggcactggaccattcccgtgaagcctcggtcgccaatgtggtggcgtcggtgatcccgcgcctggacgagcaggaccggaaactcaatctcctcgtgcgcccgtggtggcgccgtgcccttggccgctga

SEQ ID NO: 509519 - DNA, 582 bp, Stenotrophomonas maltophilia
atgaaccatggctttatcccgccgctgaccaccgacgatccgcgcgtcagcattggtcgcttcacctacggtggtgccaccttcaagctgtggagcgccggcgagcgcatcgaagtgggggcgttctgttccttcgccgaagacgtgctgatctttggtggcggcgagcatcgcatggattgggtcactactcatccgttgcgcattgcgttcaattcgccaggtgcgggccaggacgggcatccgcacagcaaaggcgtgacccgcatcggcaacgatgtgtggatcggccatggcgcgctggttctctccggagtgactgtgggccacggcgcctgcatcggcgccggtgctgtggtcagcagggacgtcccgccctacgctatcgtcgcgggcaaccccggccgtgttgtgcgcatgcgcttcagtgaggcgcagatcgagcagttgctgcagatagcctggtggacctggccggtggagcggatcaagcagtttgaatccctgctgtgcagcccaagcatcgacgcattcattacggccgcactggccgacccggacgctgcggcgtcgctcacgtga

SEQ ID NO: 509520 - DNA, 1359 bp, Stenotrophomonas maltophilia
atgtcctctgatccctccagtgatgtcgcgatccgggtcagcggcgtcaccaagtgcttccagatctatgaccagccgcaccagcggctgaagcaagctgtgctgccgcgcctgcgtcgtgccgcaggcctggcgccgcgccgctactacgacgagttctgggcgctgaagggcgttgatttcgaagtgaggcgcggcgacacggtcggcatcatcggccgcaacgggtcgggcaagtcgacgttgctgcagatcatctgcggcaccctgcaggccacctccggaacggtcgaggtcaaggggcgcgtggcggccctgctggaacttggcgcgggtttcaacccggaattcagcggacgcgagaacgtctacctgagcgcctcgatcctcggattgacccgcgagcagatcgacgcccggttcgacgacatcattgccttcgccgacatcggcagcttcgtcgaccggccggtgaagacgtactccagcggcatgtacgtgagactggcgttcgcggtcatcgcgcacgtcgatgcggacatcctggtcatcgacgaagcgctggccgtgggcgacgccatcttcgtgcagaagtgcatgcgcttcctgcgcaagttccgcgaaaccggcacgctgctgttcgtcagccatgacacctcctcggtgctcaatttctgccagagcgcggtgtggctcaaccgtggcgacatggtcatgcacggtactgccgaagacacctgcaacgcctacatcgagtactgctcgcaggaggtgtacggcgacacggtgaagctgacctcgcgccaggcctcgcgtgatgcggcgccggcaaagccgcggtccaaggcccaggtggagcaggacacgcgtctggaaatgttcgataacgttgccaattcggctggctggcagtccggtgtcgccagcattgattcggtgctgctcagcgatccccagggcgaaaccctcacctcgttcgccggtggcgaggatgtgctgctgcgcgtgcgggccactgcacaccaggcgctgtccagcccgttgattggtttcttcgtgaaggaccggctgggtcagtcgctgttcggcgagcacaccttcacctacatccagccgccgatgcaggtcgaggccgggacgacgcttgaggccagtttccgcttcacgttgccgatgctgcccaacggcgattactcgatgaccgtttccattgccgacggtgatccgttcgccaacacccagcatgcgtggctgcatgacgcggtgctgatcaaggtcgcctcgcccaagttgcgttatggcctggtgggcatccccttcgatgaggtcaccatgaagcgggtagggggagcggaatga

SEQ ID NO: 509521 - DNA, 831 bp, Stenotrophomonas maltophilia
atgagcggcatccaagccgagttcggcagttcgccgggtgcgctcgtccgcagcttggtctccaatcgcatgctgatctggcagttgacccagcgtgaggtcatcagccggtatcgaggttcggtcttcgggctggcgtggtccttcttcaatccattgttgatgctggcggtctacaccttcgttttctcggtggtgttcaaggcgcgctggggcgtggaaaccagcaaccatggtgatttcgccgtaatcctgttcgtcggcatcatcgtccacggcgtgttcgccgagtgcatcaaccgtgccccggggctgatactcaacagtgccagctacgtgaagcgcgtcgtgttcccgctggagaccctgccgtgggtcgcgatgggtgccaccctgttccattcgatggtttcggtggtggtcctgctgatcgcccagctgctcctgcgcggctcgatcccgctgaccgcactgtggctgccggtggtgatcctcccgttggtggtcggcaccatgggtgtgtcctggctgctggcggcactgggtgtctacctgcgtgacatcggccaggtcaccggcatcgtcaccacggtgatgctgttcatggcaccggtgctttatccggtgcaggccctgccggagacgctgcagccgtacatctatctcaacccgctcacgttcatcatcgaacaggcacgtgaggtcctgctgtggggtcatgtcccggacttcatcgggctgggcaagtacgcagtaggcgctgcgcttgtcgcgtggttcggttttgcgacgttccagaaaatgcgccgggggtttgccgatgtcctctga

SEQ ID NO: 509522 - DNA, 345 bp, Stenotrophomonas maltophilia
atgttgaagttctacaccaaggatccagcaggccttctccagaagttcaaggcgaagctcaaggccaaacaaggccaggacagcattcagacgtgggagcaggtgggggagaactttgggcacacttccgaacgctggaaaggcaagctggcgttaaaggcaaccatcaatgcggacgctacggaacccaatctgacctttacggtggcatcaatggcaaaaggcacccaggaagaacagcagatcttctacgcctactaccacggccacctgctgcaaacgtttgtagaccacttgggcgagcacttctccgcggctcggtatgccgacacgcgcggcaagtga

SEQ ID NO: 509523 - DNA, 171 bp, Stenotrophomonas maltophilia
atgaccactgtgggcgcggtgctggcagccgtcctgggcctagccggtatccattgggtcaacgcccggcacgccagcggggcgcttcgtgtgcgttaccgcatgcgtgcccaaatcctggccggtttggcgttggcgtgggtgctcaccttggcgaggctgtccacgtga

SEQ ID NO: 509524 - DNA, 300 bp, Stenotrophomonas maltophilia
atgcaccagacccgcaaatgcaaccaatggtacttcggcatgaaggcacacatcggcgtatatgagttttccggcctggtacaccacgtgaagtgcactgctgccaatgtgggcgacgtgaccgtcatccatgagctgctgcacggcaaggaagactgcgtattcggcgacagcggctataccagtgtagacaggcgagcggagttgaccgactgcaaagcggcgttcttcatcgctgccaagcgatcgaaggttaaagcaattggcaacgctggtgatcgcaaacaggtggggcgctag

SEQ ID NO: 509525 - DNA, 876 bp, Stenotrophomonas maltophilia
gtgaggaacgcgaccaatggctcccccacgtcgcaagcctgcccgtcaggccaaaccggcacgcatacgtgggagcggcagcaggtcagatcgcgggacgtgttcacccattgcccgtttggcaccaccgccctgcccggccccacttacggcggctggtccaactgggcggataccggggctcgtcgcaacgaggtcaacacatgcaagcccacggccgctcgctgcagcgatggcagcttgcaggttgtggcgtggcactcggccgatgggcaggacgtgccgccgccctcgggttcaagtggcatttcttactggtatcccgacaccgtggtgcgcctgacgccagcggaaaaagccaagctggactgggccatcaacaacgtgcccatccaccgggtggagacgcctgcaccgatgcccggcaactggcccgccaatgtgagcaaatcggcgttctacgaagagcaatgcaacgcgctttcggacgcggggaacatccgttacgcctactcctacgattttgagtacgtctccaacatgggcatgcactactgcgactacaactggaccagcggcggcacctccttggccgtgtgccggcaagcgtgcgcgtccgatttggtgggcaagaccaacaatccgtatcgctgggagtggcccgaatcgtcggtggtggcatcgactccccaccccacttgcaccggccaaccaggatgcacgcccaacggcgggtttggcacccaacaaggcctgccggcgtgcaacgagcacagcgtgggccagaccgttgtcttcaactggtatcgccagttctacaaccccgtgcgggtggagtaccaggcgttgaagctgacatgtaagggccccatctga

SEQ ID NO: 509526 - DNA, 759 bp, Stenotrophomonas maltophilia
atgaagcgtctggtgttgctaaccctgcttgtaccatcaatggctttcgctggcgaaaacagtcttggcaaattgttaagcgacgcgtccaagcatcttcgcccgggtgctgtggcgccatccgttgaatcgctgaggaagcctggcccggatgtccttaacggctacactaggcttgaatatagggacggaagttgggatacctatttgttaggcgctgccctgctgcccgaacggcctgttctggctaaagagtgggacatgtatgtaagccgtgctcgccgggatgatcccagggcaaccgtagagacggtcaagtcccgtattgccaaactcgccgctactcgtcgtttctacttcgatggcctagtcgcggttgcatggagtgaggacatgcaacttgcagtgcttacgatgtcgaacccgccggcagatttgcctaaagctggtgacgtgaaatatgtgtttgtctttgaagggccgcactggacgaatacgccgctcggcgcgcatcgcccagatcgcgctgaagaggttggacagcgcggaacttggggcaggagctggcaagcctcggtcaagcatgctcgtagcgacgtgctttggaacaaccagaagctaagtcgaacattcttcaccgttggcgagcctcaattcatgcaagtagacttatccggccagcgaatttatcgcctaccggtcaagctggaccgggtcgaatacagcgaccaagtccgtcacttcgcctttactgagtag

SEQ ID NO: 509527 - DNA, 759 bp, Stenotrophomonas maltophilia
atgacttcccgacgctggagggctacagcgtcgggcggggggcggttgtgggagcgcgtcagtcaggccttgggggtcgtcaatcgccggtattccaaggaaacggagcccgaaccgctccaggtcatcatggagcgcatcacccctgccgtggacgctgcttgttggacccagttgatgaccctctccgggctctggtccttcatcgacagcaagcggcggccggaatggaacggagcgattcgcctgggggctggtttgctcgacacgggcaaggcgaccacgccacccccaacgctcacggcagataacgtggcggccacgtttcagtccatccacgccgagcgggggcagatgctcaacgagggattgctggcgctgttccggggggtgtcgtgggactacaagtccaacctccccgtgtgcctgggccagaagctggttctgaaagggcactttgaggcctggagcattccagagaagggttggtatacctacagcagcagtgccgacaagctggatgatctggttcgggccctttgccgggccgacggcaagcccgatcaccggaacggcgcaagccggtttgcatgcgccgatggcatgacggacgccccttgggatccatatttcgagttccgccgcttcaagaacggcaacgcccacgtcgtcttccacaagcacgccttgcacctggttgaccggctgaatgcccggatcgtggaactggtgccgggggcattgccggcgcgccggtag

SEQ ID NO: 509528 - DNA, 354 bp, Stenotrophomonas maltophilia
atggagccggctcactggggatatcaagatgatgattcgaaacgggcttgtggctatcccgccgccttcgtgctcactgcttgtggcggcaaaccatccgacagcgattccaaagaagcggttactgagttgcttaagcaaagtggcgtcggtgaggtgaccgacgtgaaggacttcggcatatccggctgcacaaaagcggaaggaatggacggctaccggtgcgacacacgaggcacgtttacgatcagcgtcatgggacgaacggtccctattccagtcaacaaaaatttccgctacgccaagggcggatggcacctggcacgcctacgcccagtaagcccacagctctaa

SEQ ID NO: 509529 - DNA, 804 bp, Stenotrophomonas maltophilia
gtgaaaaaactcaaactggcggccgttatgggcgccgtgcttctgacagccgctgcatgcagcaaatccgattccaccgacgctgccgctgagggcgctgcggctggctccactccggcgaaggtcgccgaagaagcccaagcagcaccgttcaacattcccgaaaatgagcttgtttcggtctccgacctcaacagttgtatgaagatcgcggcaggtctactgccagcagccagcgatgcgagcgcagcggagactcgggaaaagattgctcgcttcatcgcacctgagaagttcaagggcgtcaatgacgtgtttgccatcaaagatgtggtcgcttcgatggaaagcgacatccaagggtttgcagtgccacccggcggtgcgaagttcatgacgttcaccgtgacgcctgactcgcaccacaacagggacacgatggtcaacgcttacaacccacaaggcccaggattcgtcgacatgacggggcagcttcgcgaagaagccggcatgaatttctccgagtggggtggccgtggcaatttcaattgctccttccattccacgatggataaggattggaaagcctggtatgtggttcaagacgaagcccaagcccgagcggtggagagcgcgcgctcaaacaaagtattgcgggttcgctttgactacatcgtggatgggctggacctcgccgctcacactcccacgatccgggcaagggttgcggcggtccatctgacagacctggacggcgacgtgctggcctccccgacctactacctgcccgaatacctgcgttga

SEQ ID NO: 509530 - DNA, 1182 bp, Stenotrophomonas maltophilia
gtgggccaagtccaagtggacgagaacggcaagggcaacgtcaccgtgggttccacctgggccccgggcacctggggcgtgctcgacggcgaggtggggcgctcaagcgacggcgggacgcgctgggctgctgcctacgactacagggggcgcacgtttggcgtgcgcctggaacaagaggaaaacgatgggttctggcgactgcagagcgagacggcgctgcccatcgcgtcgcgcacccaagccagcgtttcctatcgcccagttcgccgctttaccgtccgttgcgcctacagcgccatcgacactgggcgctccagcctcgcctttgcctctctgagcgtgagcgcgaacctgggcgaagcgggccaagtgtccgccaacgtgctcctagacctccaaggcgacgatcttcaagtgtccgccagttacacctaccgcttcggcggcaaggccagccctggcgtgcgtgcgcgtcgggccccaggccaagacgccctgacaacccgggccacctaccgcaccgagggcggccttcgcttggctgcggagcacaccgagggcgatatgggcagcccccgggccacggaggacgccatgacccgttacggagacgcccggatcatgctggaccgctacgacgggcaaacccaggtggcggccaacttctccggctccgtgttcttggaccaccgcggcgtggccttcgggcgtccggcctacgccagctatgcggccgtggacgtgccgggccaagcgggcttgccggtgcgggtcaacggcagcccggcgggcgtgaccaacaagcggggcagggcgctggtcaccaacctccccgcgctcatgaccacgaccgtgagcctgaaggacaaggacctgcccgtgggcgtggagatcggggagaccgaaaagcaatccgtgcccccccgccaaggcggcgtgcgggcgaccttccccgtgctgacgcagaacgcccgggccttcaccctgacaggggtcagcatcgcgccgggcaccctggcatctacgccgaacgaacaagccatggtgggctacgacggggccctttacctggagcatcccgaggtggggatgaccgttgacgtggcaggggtgtgcaaagccgtgatgccctcgcccttgccaagcgtggacgaggtggccaccgtggcgtgtcgttga

SEQ ID NO: 509531 - DNA, 3375 bp, Stenotrophomonas maltophilia
atggaatgggccccgtcttgggtgggccagcgcgtaacgggatcatcggagtggcgcttgcgcttggacggcctggagctcgccctggcgctggacgggcgcacccaccgggtcaacgtcgaagacgaggcggcttaccgcgtcaacgccggcaccttctggaccgacatcacgctccacccgggccagcatcgggaagtgaaggccgacgggttgcccaacgcccaaggcgccgatttgattcaagcgttgaacgtcgcattgaaggagaagcgcctgcgcgaggaggtggcgttcctcaaggaccagcagggcacgatcggcgcatggctggaccacaaggcagaacaagagcggacctgcttcgcacagcgccgctggttcacccacgagcagcaggaagatgtcctggcggcccgccccacggttgatccggccgtcctccgatcgcgcctgaagaagcccggcgtggcggtccggttgggaccggctgcccatgcgatcgagcgctcgctggccgcttgggaagccgaccaccgccctgcttgggccgcgctcaacgctgcccacgtggaacgcgagctggtggcctgcaaagacttgctggaccgggtggagagcaaaccgctcaccccggaacaggcaagggccgtggtgtgcttcgacaaccgcgtgcaggtggtggcctcggccggctcgggcaagacttccacgatggtggccaaggcggcctacgccatccaacgcgggttcgtggatcccaaacggatcgtcctgctggcgttcaacaagcaggccgccgaagaactcaaggaacgcgcgggcttggcgtttgagcgcttgggtatggcggaggtgaccgtggaggcgtctaccttccacgcgctgggtttgcgcctcatcggcaaggccaccggggaaaaacccgacattcccgactgggccaccgacgcggccggaggggtgcgaaagctcaccgacatcgtggaccagctcaaagaccggtcgcccgcgttccgccgccaatgggacctgttccgcttcgtctttggcaaggaccttccggcgtttggtgcaccggagccgtcggacgtgtgggacgcccaaggcaagggcgcgctggtcaccaaccgcggcgagcgggtgaagagcgtggaagaggtgatgatcgccaacttgctcttcttgaacggggtcaactaccgctacgaggccccctacccccaccgaaccgccgacgaaacgcaccggcaatacaaacccgatttctactaccccgacttgaacctgttccacgagcacttcgcacttgacgccaacggcgtgccaccagcgcacttcgaaggctacttggaaggagtgatttggaagcgacagcttcacgctgagaaaggcactgagctgtttgaaaccaccagccacgggctgcgccaccgcgacgatctggaccggctggagcgcgaactgaccgcccgtgggttggtgctcgatcccaacccattccgagagattcccgagaaaggtcagcagcccatggcatcggtcgagctcattgggctggtgcgcacgttcatgagccactccaagagcaacggcctgagcccttcggatttgcagggacggctggacgcgatgcccaccgacaccttcaagctgcgctaccagatgttcctggacatcgcggctccggtgatggcggcgtgggacgaagccttggcagcagaggatggcatcgactttgaggacatgctcaacctcgccgctggccacctggaaagcggacgcgtggaatcgccttacaacctagtgatggccgacgagttccaggacgcctcgcgcgcccgggcacggttgtgccgcgcactggtccaagaaaagggccgcttcttcttcgccgtgggcgacgactggcaatcgatcaaccgttttgccggcgcggacgtgtccgtgatgaccggttttcgccagtggtttggccacggccaagtgctcaagctggagcaaacgttccgctgcccccaggcgctgtgcgacgtctcaagtgcgtttgtctccaagaacccggggcagatcgccaagcgcgtgcattcggccacccccaccaatggcccagtgctccaagcgttccaggtggacagcaaggacaaactggccgatgcaatcgatcaattcgtggtgaagctggccgagggcgtgcgcgatggcaatatcccaccggggcgcaacggcaaggtgtcggtttacgtcttgggccgctacaacgctgatcggcagtatgtgccgatgaggcaaggccggtttgaccgctgggtggacgtgtcgtttttgaccatccaccgctccaaaggcagcgaagcggactacgtcatcctcccggaaatgatcagcgccccgcgtcggcgcagtttccccaacacccgcaccgatgatccagtgttggccttggccatgcccgaaggagacacgttcccgctgggtgaagagcgccggctgttctacgtggccctgacccgggctcggcgcaccgtggcgatgtttaccgccctggggcaatgctcgacgttccttcgcgaactggaagaagacggggcggtggtgctcaccgacaccgatggcgtggccgtccaagaaatgccctgccctgcctgcaagcaaggcgcgttggtgctgcgcagggggccttacggggagtttcgctcctgttccaacttccccgtttgcagctacaagccgaggcgacgcggagtagccccttcccggctcgccaccccaccgtcgccccccaaacgcgcgtcggtggtgcctccgagccggccagtccgccccgcctccgttccccagcctgcatatcccaggcgaacgcttttctccatgctcgaatccttcaacaatgggctggcagagatcaaccgcaacgtttcccgcgccagcgctgtgcaaagcgcgacgtccgacttgaagcaccggatcttcgttgaaagaagcacgatagaaagtgcattggaactggcgagatccgaaatctcgttggaagaaaaactgaaagaccttcgcttcaaggaagcctacgaatcgctgtccgaagcactggaagcaaaccgccacgagcccgaggacgcgcagccgcgggtggaaaccccgctgccaacgttctcgcgcagccagcagcatccagaagaagactttgaagccgcgatccagcgggcgttcgatgggctgagggaagatcgggaagcattcttgtcggtcactcacgggcaactggcaagcgaccccgtcttgcgtcgccacttctttgcgtccttgggaacactcgacggaagccattaccgagcgtccgtggatccgaatgacacttttggagaaaggagctaa

SEQ ID NO: 509532 - DNA, 858 bp, Stenotrophomonas maltophilia
atggcccaaccacgcaccaagcgcgatggggtgaagtattggcgcgcggccgaggcgatcgccgaattgggcactgcatccttggcagaggtggaatcgtgggaccgcgagcgctttcccaacgatccactgagcaatgcccgggccgacctggagttgttcacggtgaacagtgccagccgggttcactacaactacgcccgcgagaactggcgaagcgaccaaggccacccccacgacttattgttcaagcgggtggacgctggcccaccgcggcgcacccgctacgtgctgtttaatccggccgagcacgggcattgggatttgctgccaatcggcgaacggaaatggcaagccgttccgttggcgatggacgagcaagccagagcagaggcagaggcgcaagccgatgcgttcaacgcccctttggacagcactcacgacgcccgggtatgggcgatgcgagcggtggcccagcgcaggggccagccgctgttccgcaacaggctgctcgatgcctacggaagccgttgcgccatcactggctgctcagccgtggaagtgttggaagcggcgcacgtgctgccctacaggggcgagcacaccaaccgcttggacaacggcctgttgttgcgggctgatctccacacgctcttcgattgcgggttgctctgggtcacgcccgagaacaccgtggcgcttgccccgtcgttgctcgccaccgactacgccacgttccaggggaagcccttggacctgcccacctctgcgatccatcgccccaatccggcgtatctggcagagcacgccaggcgctgcatgaagcaccaggtggcgtcgcgcaaaaaaccgtactga

SEQ ID NO: 509533 - DNA, 354 bp, Stenotrophomonas maltophilia
atgatcagcagctttgttcttaaaatgcagtccctgagcgatggtgggcgcgtttgtgtctggcgcaccacgttcaagggcaaggtcttctacaccgcatgcggggtcggaacccctgcaatggagcatgtctctgagcggacggcggtggctaagcgtgcgcttcaggatcaggctgaccaagcgggcatgcagcaccagcacgacgtgtttgtgagaaccccctacgccgcaggaatcagcatccactccacgctcacgggggcctaccaccacgaggccgtgtttttcctgtgcgctgatccagcggtcgagcaagagctcattgcatttttgaacgttgtggcgtcgtaa

SEQ ID NO: 509534 - DNA, 723 bp, Stenotrophomonas maltophilia
atgcccgcctcgatcggcggagcgggcatcggaacgggagttgccttgcatttctccgggggaagcggggccatgtccaccgtcatctgggtcgcggtggtcttgaaggggctgcttcgcatcggacgattgattctgcgcactcggtttggcaggcaaggtctgctgaggcgaaacctaatcacggttttttttactgtcaacaacccccgcaaaaaattttcacatccgcgccatccacggtgccgcctccacggtcaccacgccgcgcctgcaacgaccatcaacgcgccacgcacgcacgttgaccgcaaccacggcaacgcagatgttgaacaaaaagcacttgaaataagcactccgcgcagacgcacacgcgttgggcactgttgcacgcatgcagcgccggcagccgtcgccgccagcaccaacgccagcacaacggcaccgcaacggggggcgaaaagttttcacatccggacgcgtcggcgcggggtggaaacgcggatttgcgcaaaactgcgcgcacccctcggtgccgttcgcgggtctgctgatgccgcatcgagggtgcggagcgaaccccgcgtcatgagtccgatgcactcgccaaaacaaaaacggccacccgaaggtggccgtgtccgaaccaggaagcggcgactcagtggtcgtcgttctccagggcttcggcgtacgcgtccgggtccagcagttcgttga

SEQ ID NO: 509535 - DNA, 228 bp, Stenotrophomonas maltophilia
atgcaggcgttcgtcgccgagcacggctatgccggcttcaccagccatgtggcgaagatggggcggatgcgcttcatcgagatccacgtgctggccgacccggccacgccgctgggctcagtgggcgaggtcgatgcgatgcgtgacgagatcgcggtgcggctggacgcccgtggcagtacgttctggctgaccatcgatttcacggcagacccagcatggacgtaa

SEQ ID NO: 509536 - DNA, 672 bp, Stenotrophomonas maltophilia
atgatcgaactgctcgacctgcaacagaccctgcacgcgttcgctgcctgcaatgatgactacgacgtatccctgtccttcggctgggtgtacgccaccgacggcgagccgatgcaggcgcgcttctggttgccgcccgatgaggaagccgcctttgatgacgacgacgaggtgccggccgaggcgcgcgcgcttgggctgcgcgagtatctcgaacctggcaactttgcgggtgtgctttttgtacagaagcgccagcgtccgctatccactgtggaggagtacgcaaaggctctagagcactactgcgagcacgacgcgttcctggaagtagaaggtgtcgacgaagcgctgggggaagctacggaggctgaccgactggccgcgcgctatgccggtgttgggacggacatctttacgtcgttcgatctgtggttgctggcgtgcggggatgaacagctgaaggccacggcgcaggccgtggcgcaccagcacgaggtgccggtgggtgaagcgctggcacgctgccgtgcgttgcccctgctgctggggcaagccctggatcgcaaccgtgcgcaggccatcaaggatgaattcgaagccatcggcgcgaccgtgcaggtgtacggattcaagccgttcccgtggatggacgcgcccgtattgcgttga

SEQ ID NO: 509537 - DNA, 489 bp, Stenotrophomonas maltophilia
atgatccgccgccttcccattctggcgttgcttgccatcccggcactggcaaccgccgcaagcaatccgcacgaggttgccacccgcttctacgccgccctgcaggccagtgggccagaccagtccgcgattgcgccgctgctgggcgatgccctgcgctcagccgtcgatgcgcagcgcgtttacgagcggacctgtgcggcgctggctgcgcctgacgaaaagccgcacatgctggaccagagcccgtatctcatggcgccggatcggccggaagcggtaatggtggggctgcccgcgacgagcggcgatgccagctgggtgcccgtcgaaatggcggtgggcgactatcgctggaccgaccgggtcctgctgcagcggcagggcccggactggaaggtcatggatatccgctgggggcagggcggcaacctgatcgggcgactgaagcagttctcggccttccgctgcaccgcttctggcggctag

SEQ ID NO: 509538 - DNA, 2427 bp, Stenotrophomonas maltophilia
atggcccagcgccatcgtgtccgttcgtccctgtcccgtaccctgctgaccagcgccgtgctggcagccatgaccgcccctgccttcgcccacggtgacgcttccggcgcgccacagacgctggacaaggtggtggtcaccgcctccggctttgagcagaaaattactgacgcgccggccagcatttcagtcatcacccaggaagagctgaccaagcgcccatacatgaccctgttggatgcagtccgcgatctggaaggcgtggacgttggcgagacccgcgacaagacgggccaaggcaccatttccatgcgcggcatgggctcggactacacgctgatcctgatcaatggccgccgccagaacaatcacggcgacatctacccgaacaacttcggcggcaaccagttcaaccacatcccaccgctggacgcgatcgagcgcatcgaagtcatccgcggcccggcttccacactgtacggcgccgacgccatgggtggcgtcatcaacatcattaccaagcgatcgctggaccgctggagtggctcggccacccttgcaggcaccttcgagaccgatgacgatttcggtgacgaccgcactgcagacctgtatgtgaccggcccaatcgttcccggtgtactgaacctcagcgcacgcgccagttggtatgaccgcgatgcttccaatcccgtctactcgccggcgatcgaccccaacggcaccccccatgcgcgcacgctgggctttggcggcggtggtaaaacagtcgacaacacgaataaagcaggtggtctgagccttgaatggaacatcaacgaagatcaacgcctgacgcttgactacgacacctcgcgccaggaatacgacaactcgatcaagatcaatgatgccggtgtcgaggagtacccggttggtacggtagacaacatcaacagcatctggcgcacggccaatttctgccgcaacggcagcggtgccaatgccaacgcgtgccggaccagtggcggtacgtgggcacgccgggccgacccgcgcgtgggctatggaccgacccaggaattcacccgcgatgcatgggcgttgacccacgagggcaagtggggctttggtaacagcctggtgtccctctcgcacgtatcaaccaacaacgatggccggacgatgccattcactgtcgcggaacgcgagttgctgctgcagatgatcgacggcaccggtgcctatagtggccgctcaacggctgaacgccgcgcgctggctgaatcgaccttcctgccacggcctcgacgcacgctcgaaagcgcccagtacaccttcgatgcaaagttggacattcccttccaggccgcaggccagcatgtcgctgttgtcggtgcgcaggtcatccgtggtgaactgaccgacggcgtgttcggcaccgagcgcggaatgcccggccagaagcaggagcacaacatgtactcgctgttcgctgaggacacctggaccgtcatcgcgccgctgggaatcacctatggcctgcgctacgacgaccacgaggtattcggcgaccacttgagcccgcgcctgtacggtgtgtacaccgtcaatgaacagtggacggtgaagggtggtgtcagcacgggcttcaagacacccaagaccactcagctgtacgacggcgtcaccggcttcggcgcgcaaggcacgctaccgatgttcggcaatccgaacctgaagcccgaaaccagcaccagcaccgaactggcggtctactggcagcatccagacgggcacaacttcaatgccacggtgttccacaaccgcttcgacgacaagatcgcctcacaaccctgcggcggccgcttcgctctggcctgcacctcaacgggcgactacgccgagctgggctacgccaacagcagcaaaacggtgaacatcgatgaagtgatcattcagggcgccgaagtagctggtcgatggaacatcggcgagcgtttcggcctgcgtgcgaactacacctacacggacagtgagcagaagagcggcgcggagaagggcctcccgctgggcaacagcgcgcggcacatggccaatgcgaccttcgactggcaggtcagcgagcgcttcaatatgtttctgactgcagaggcgcgctccaagcgcttccgtgggctcaacgccactacgcgcgagaagctctactacaaggactacaccactctgcatctgggtgcttcgttcgaagcgacgcagtggctgacggtcaatgcacgtatcaacaacctgctggaccgcgatttcaccacttaccaagccagcttcaccgacctggacggcagtggggtatatggcgattcgagcaatgaagtgctgttcgaagacgactacaacaacaaggacaaggcccgcagcgtctgggtgagcctgaacttcaagttctga

SEQ ID NO: 509539 - DNA, 915 bp, Stenotrophomonas maltophilia
atgaacgggatcgggattgatgtcagcaagcgccaactggatgtcggcacgacgaacggcgagatcctgcaggtcagcaatagcgcttcgggttttgctgaattggatctctggttgaggaaacatccggcgagccagattgtgctggaagccaccggtggctacgaacagtcagtactgaacttcctgcacaacgccggtcatccggtggtccgcgccaatgccctgcgggcccgtaggctggcccaggggttgggtcagatggccaagaccgaccggttggatgcctgtgcattggcgcagatggcggccctggtcaaactgcccacctaccaaccgctggagccttggcagcagaaaatgcgggaattcgtacgggcacgtcgacagacgatggaagccctgaccgtagcgcggcagcagcaggagatggtgaccgatcgcgagttgcgccgactgctgcaagccaacatcagccgcctgcaggggatagttgggcgcctgggaaagcagattgccgagcaggttgcccagcagcctcaattggctgtcctgaaatcgatggagggcgttggcccgggcttgcaagcggtactggccagctatctgccagagcttggcaggatcagtggcaagcgcatcgccagcttggtcggggtggccccgatgtcccacgacagcggaaccatgcgtggcaaacgaagcatccatggcggcagggccgagatccgtcaggtgctttacatggccagtatgtcggccatgcggcatgaacctcgactgcgcgatttctaccagtcgctgcgagcccgaggcaaggaaggaaaagtagccatcgtggcggtgatgcggaagatgctggtgattctcaacgcccgggtgcgcgacgctcaaggcggatcgatccccgcctga

SEQ ID NO: 509540 - DNA, 1026 bp, Stenotrophomonas maltophilia
gtgaccgaggatgtgcttgagaaggccatcgtggaggtcatcaatacctacaacaaattcgacctgcctggctattggggcagcggcaagagcgcatcagctgatggcacgaagtggagcgtctacgaggacaacctgctgtcggagtatcacatccgctacggcggctacggtggcatcggctactaccacgtgtccgacaaatacgtagcgctgttcagccacttcattccctgtggcgtgcacgagggcatctacatcctcgacggtctgttggccaacacttccgacatccagcctgagatcgtccatggcgacacgcaggcccaaagctatccggtcttcggcctggcccacatgctgggcatccagctgatgccccggatccggaacatcaaggacctgacattctttcggcccgaaccgggtagggcttataagaacatccaggcactgttcggggacagcatcgactggcaactgatcgccacccatctccacgacatgctgcgggtggtgatctcaatccgattgggcaagatcaccgcgtcctcgatcctgcgccggctgggcacctacagccggaagaacaagctgtacttcgccttccgggaacttggcaaggccgtccgaccgctgttcttgctgcgctacattgatgacaatgagatccgcaaaacgatccatgctgccaccaacaagagcgaggaatacaacggcttcgtgaaatgggtgttctttggcagccaggggatcattgctgagaacgtccaacacgagcagcgcaagatcatcaagtacagccagctggtggccaacatgatcatcctcgacaacgtggaaggcatgagccggaccttggccgagatgaggaaggaggggattgaactgacgcccgagatcctggccggcctgtcgccttatcggaccagccacatcaatcgcttcggcgactaccacctggatcttgaaagggaagtggcgccgctgagctacacagccaaggtgcttgaacagaccccatag

SEQ ID NO: 509541 - DNA, 1320 bp, Stenotrophomonas maltophilia
atgcagagtagctacccattttcggggcggagctatgacaatatagcaagcgcgggatttccctgggacacagtggatgacccggaaaaccaagctcccaccgtctttgttcttgaaattgggagcgcatccgaaactctatcctggcttcgcgttttcgctcgcgacacatttccgctaagccagtttgggcgggtactttcctccgacgactgggagacaatttctattgaggataatccgacccactcttttagagatgaccgctgggctagcgttgtgctcggggagctccttgcgcagagcgaacaagacatcagcctagaaaacatttcgctatcgagagtgcaagcttgcttttctatagcaattgcacgagcgcataagctctatgattcatacaaagtcacgcgtacatccaccgaacgactaagagcaatcgaatctgacccgcgctttctgaggcggagcatcaacgtcgacgcactggtgccgatttggtcaatagcgtctacgaacatggggcgcgcgtctgaaatctgggagctggcggagttcattgcaactgctgcgcacgcctatcaggctccaaatgaaccagcgccacgcgaaaacaacccactaccgctagcacttcgtagcgaatcaatcgaagagcgcgtggtagcgtttcagcaagttgcttcgtccgcctccgcggcgatcgtgagctcgcccaaccacgcgtcgcggcacgctgccacgatcgcagctgccgcgttccttgtaggccgagggacaagtcacgcctttctaatcaagaagtacagcaagctagcttctctagcccatgtatggttcggccttatcgccggattggctggacgaaaatactgggatcccacctggaccaaggctttgaaaggggtcgagaagcacgtcaaggcttcgctttcatggtcttccccccctctttccgacatttcctggattgagtacaactgggtcacgaatgccatccgagggcctcaggcacttcaagggataccaagacaggtgcaaacctcgctttcaatcgagatatttcctggggtctcgtgccagatgcgacttcacgcggatgataacctcaggcaggctaggctcccatcttcctcgatatcaccgcaacctaccgatgccggaatctcaatggagctggcctcagtaattgaacagctgcatagatacgccgagaaggccagaaagattcttcacgcacagcgcccatcaactgatgacatgtttactgactcagccccctcaaagggaaggaaaaccagcaaaaagacaaagagctaa

SEQ ID NO: 509542 - DNA, 1155 bp, Stenotrophomonas maltophilia
atgattacaagctggtggatatccaaggacgagctagacccgacgcaattagatttcatcaatctcccggctaaaggccgctaccagcttgaagggccggccggctccggaaaaacaaatctccttcttctccgcgcacagtttgtcgcagggcaaggggacaagaatgtactggtagtgacttacacgaaatcactaagtcgcttcctgcgaagcggcctggtggcgactgggctaattgagcccgatcaggtgcgcacatttcattcatgggcacgaaaacacgtcaaactttacctcaacaaggacattgttgatggcggagagtttaatgaagctgcccgaaagacaaccatcgagcttctgagagaagcaaacaagaagattccaaccaacaagctaattagctccgtttttattgatgaggcgcaagacctaacgaccggggagattgaatgcctcgcagaaatttctgaaaacatatgcgtttgcggcgacatgaagcaaagcatctaccatcaaaccggcctgaatggagcagaggcactagacctcaaaaagtactcactctccagccactacagaattgggcatcgaatagcacgagttgctgacagactcatcgtaccaccttcgcccgcggagtctctcgaggcgacctccaactatgacgaaagaaaaatgggaaagtcatctgcggagctccatcgcctgcccgatagagacgcgcagtttgaaacgatgctggaaatattaaatgtgcaggtatcagcttatgctggcgaccgaattggcatcttgtgcggaaagagagacacggctgaggaagtcttcgggcgacttatggcctctgatttgagtgcaacttcctgcagccatttgatagacggaacggacttctcgactgacgcacaaatacatgtgatgaccatgcactcctcgaagggcgtcgaattcagggcggttcatatgttcgggattgaagagctgagacatgggcatatgaacaacccaacgctctcctacaccgctgtcacccgcgccaaaaccgccctaaacgcgtacacctcaggaaaaacaaaccctgaacttgaacaggccttcgcggagaacaagccttttgacattgacgcactattcccgggcgcgcactga

SEQ ID NO: 509543 - DNA, 1434 bp, Stenotrophomonas maltophilia
gtgccggacttgtctacagaggtatgccaggacattgagcaaaggctggagcgccacatcgccttacgagagggatatcactcgattgcctatgtagctgccggaggctctgcggcgccatattctgtgattacaccagagggaaaacgggccattaagggctatgacccaaagttcctaacggggagcatcgcaaattcaacaagaaggcgtctagacctccaacgcagccttataggtcattcgtgtgagcagcttgttacagtttatgcggtagacgaaagtgaagggactgcctttgtagagatggagtttgtggagtggccgaggcttaaagatgtcgtcgccaacgtcccggacagctctgtatccctgctcatacagcaactggtttccgcagtaacctatctcgagaagctagagattgttcacagggacataaagcctgagaacattcatgtctcaagtgatttcctcaagctctctctgttggatttaggggtggccaggagaatcggaaatgacgggggcgattcggggcaggggaccgaccacggcgacacgcgcccttttatatcgactgcgcagtacagctcaccggaatacctattcaggctggacgaaccatcgccagctctatggaaggcactcaacgtgtatcaagtcggcgcggttctgcacgacctcataaacaagagacccctgtttcaagatgaggttgataaaggtaaccgttggctactggcccgagcggttttagagaagaccccatcgtttcctgattcggaccccactaggcttgcgcggcaaaaagcactcgcggcacgttgccttgcaaaggacggcaacgtccgacttcagattgcaagctggagcgactttaacctcgacgcgcccgccgacggcgtgtcggcactacaggctcgcctgaccaaggtaaagagctcggcgggcgcgacatccctcgcagccgcaaagaggaggctcgagttcgagcgtcaagaattcatgaagcgtctgtgcgacgcagcgagactggaacttattgcgaacggcaataggcagattcgcgtaaacatgcatccacttagcgacaggtgttcagatgtgtacatatatgaaattacatgcacttcgggacccagtatcgcgtgcaatgtttcatttacatggaatacagggatactagcatcaagctccaccgtagctctcgaggcaacgctgcggcccgtcaaaaagccggaagcgctcccaagaagaatccttttgactgaagcaaaaattggggcttcagaggaaatcaccgtcaacatcatcgcaaacaaaattgctgaattaataataagtgccatagatatctgggaagcaaatcatggcgctgaagaagttcacggaatggacttactgtccttagggcctaaaggagaaatttaa

SEQ ID NO: 509544 - DNA, 315 bp, Stenotrophomonas maltophilia
atggcagaccagaacaacgcccgaagcgagcgcctgttgaagtggctgcaggacgcctacgccatggaacaggaggcggagaccatgatgaaggccatggcttcgcggatccagaactatccccacctcgctgcacggatcgcccagcacgtccaggagacgcaggggcaggccgcctcgctgcgccagtgcattgaagcgcttggaggaagcgtgccgaccgccaagggactgttcgccagcatgactgcggctctccacgcggccggcacaagcctgatggaagacgaggtggtcaagagcgtagggctctag

SEQ ID NO: 509545 - DNA, 861 bp, Stenotrophomonas maltophilia
atgaaaacgtcgacccagcatcttcctgaggggatatccctgacggttcgcgagcccgaaaacggcccatcaaggcccgtcatcatcttgtgccatggattctgcggcatcaaggagctgctgcttccagattttgccgatgcctttgcgaaggcgggctttgtggccgttacgttcgactatcggggttttggagacagtgacggtgagcgaggtcggctcgtgcctgcgatgcagatcgaggacatccggtctgtcatcaagtgggttcgcgcacgctcggatgtggacagtacgcggatcgcgctatggggaacgtcgctgggtgcagggcatgtctttggcgcggctgcgcaggacggcggaattcgctgcgtgatcagtcagctgggcttcgcggacggcgaggaggtggtgaccggacacatgagcgaagttgagaaggcagccttcgtggccacgctggacaaaatggctgaaaggcaagccacgacgggcaaggaaatgctcgtaggcatcaccaaggtgctgaacgatgccgaatcgaaggcattttttgaagagaacagggagaagcatccaaagatggacgtcaagattccattcttgacggtccgcgagacccttaactacaagccagccctggcggctgcacgggttacctgtccaacgctggtggtgattgccggccaggatcgtgtgaatccccctgcgcaggggcgcgccctgttcgatgcagtcgccgcagacgagaagacgctctatcaagagccggatgcgcgccactacgatgtctacagtggcgagtacttccagagaatcatcaagatccagatcgattggctcagggcacagctctag

SEQ ID NO: 509546 - DNA, 411 bp, Stenotrophomonas maltophilia
gtgattcagggcatgggcggcgacgtcgttgtaatgtttgacgaggtccgttccgcatatggtgcccccaacgccgaacccaacgtcagcactgacggtgtcatgtcaataaagcgtgactactatccgtggctgagtgaacatttcatcggcggacatcgaaagatcatcaccctgaccacggacgagcccacattcataagatatcgcgcgcttgacgcgcgcgtcatccacttcgaacccgcctatcatcccggattcctgactcactcagtgagccccaaagtaaagcgcgaaggcaacaagaccatcttttactatcccgatggcagcagcaggccagagagtcgcaccatgccccggttcaagacgcttcaggaaatccgtatggccactgaagcgagtcaatga

SEQ ID NO: 509547 - DNA, 1101 bp, Stenotrophomonas maltophilia
atggcaacgctacaaccgcgcaacggccgctggcgcgccattgtgcgccgcaagggtcacgcaacacagagcaagaccttcccgaccaagacagccgccaagacctgggccgaccggatcgaacgcgaactggcagactacgaggcccgtggcggtacacccggcgaggatctgaccatcgatcagttgatcgattggcgtatcgatgacctggccgctgtgaaggcggctggcacgacccagacgggcaacctcagccgcttacgcgaaagcctgggcagcatcgtggccacaagcctcaccgcaaacgacgtgatcgaccacgcccgccggcgggtccacggcgaccacatgaacgccaagggccacattatccccccttgctcggccgccaccatgaacgtcgagctgggcttcctgtccgagctgctgaaactggctggaccaatgaagggagtgaagcttgccagtgacccagttgccgacgctcggcctgtactgcggctgttgaagctggtagccaaatccaagaagcgcgaccgacgcccgaccgacgaagaactgcagcgcctgcatgcgtactacgcagccgcggcctggcgctcaacaatccctatgagcgatatcgtcaccttcgccatcctcacggccaagcgggaaagcgaaatcacccggctgctgtggtcagatctggacagcgtgaagcggacggcgatgctcagggacgcaaagcccccccgcgccaagatcggcaaccataggacgttccctctgctgggcgaagcctgggacttggtgcagcgacaaccgcagatcgccggcgagaaccggatcttcccctacaactcgaaatccgtaggcacgtcctttacccgcgcctgcagcgcgctcgggattgaggatctgtgtttccacgacctgcggcacgaagccacgtcgcggctgttcgagcagggctacgatatccccgaggtcgctgccgtgacccttcacacgtcatggaacgagttgaagcgctacacgcagctccgtcccgaatcgttgcatcgcaatcaaatggatcaggcagatgaaactctatcgcggaatgagcagccctga

SEQ ID NO: 509548 - DNA, 345 bp, Stenotrophomonas maltophilia
atgccgctgccccccgacttctactggacgacacgctcagccagctggccaagcgaaccgctgaccgtgatcgcttgcgacggggtgtgggtggtgtccatgacgcagcgcgttgacgacgacacctggatcgccagccttgatcggcaccggcatgggcccggtgggccatcccgccgctgcagtagctacgagcagggccgcgccggcgccgagatgtgggtggccaggcatgaggcccgcctgcgcgaggacgtggccaagatcaacgcgtatcaggaggcggtgcgcgcgaacaggcttgccaagctgcacaccccgccacccttcagctgggaagcttag

SEQ ID NO: 509549 - DNA, 609 bp, Stenotrophomonas maltophilia
atgatatctcaactagggaaccgactcgatcccggttgcggcgcccggcacaggggtgcaagacagattcagcgcggccgacgcccggccggggctgccggcccaagggcgcagcaagacagattcagcgcggccgatgcccggccggggcgcccggcccaaggccagcaagacagattcagcgcgaccgaggcccagcggggccgccaggggcagcagcgtaagacagattcagcgcgacgggcgaggatcggccccgaccatacccgattggccgtgtgcgtaggttcatgccgtctgtaccccggcgcgcgcactcgtctccccgccacgcctgcgcacttcatagggtgtttttcctgcaccccctacagcagccacccggcgaggccctgtatggctttctccggggtgtgcgggtcaccgccgaccctgcggttccctgcgcgcaagggggcctctctacgtgccctgagtggcgaacgccgtcggcgtgtccgtttaggggggaggggggtgtccggaaagaggcaacatctgcaatcggccatcgtttatccctgtaagtcattgatagatatggctatggaagattgcaaaagatgttaa

SEQ ID NO: 509550 - DNA, 462 bp, Stenotrophomonas maltophilia
atgagcgaggatctgcagcggctggaagcctgggtggcgccgctgctgcagcgcctcaaacccgccgagcgcaaccgcctcgctcgcaaggttgggacggccctacgtcgcgcgcaacaacgccggatcgcgtcacaacacaaccctgatggctcgccattcgccccacgtcgcgccgctcccccgcgccgggccaaggccggccgcatcaagcgcggcgccatgttcgtgaagatccgacaggcccggcatctgcgtgttcgcgtcacccccaacgaggttgccgtgggctttaccgggcgcgtttcccgtatcgccctggtgcatcaggaagggcggtcagacaccgtcgccaaaggtggcctcaaacacacctatgcccgccgaaagctgctgggcttctcgcccgccgacgaacagctggtgcgtgatctgatcctcgaccatctgcgggagccatag

SEQ ID NO: 509551 - DNA, 195 bp, Stenotrophomonas maltophilia
atggctgacctggacaaggcgcgtcagttcctagctgccgagtttgagagtgccggcctgcctcacgtcgccggcggcatcctggcaggcaccagccccttgggccagggcgcgtacatcgcagccgttgctgcagcgctagcggcgccgtgcgccgcctgcagcaacgtcaatgaggcgagcgaccatgactaa

SEQ ID NO: 509552 - DNA, 192 bp, Stenotrophomonas maltophilia
atgactaaagttgctgcaccggcatttcgatatcacggtggaatgttcagggtttcgccatgggtgaaccagcatctgcccgcacatcgcatctatgtggagcccttcggcggcgctgcgggcgtcttgcttaccaaaccgcgcagcggcgtggagatctacaacgaccttgacggcgaggtggtcgcatga

SEQ ID NO: 509553 - DNA, 990 bp, Stenotrophomonas maltophilia
atggtcgctgttccctgggggagcggccctgcatctcacgtcgcagtcggtttcgttgagattggtggtccgatccatgcaacgccgcgggatgaagcgggcgagcacaccgacattgagtgcgagtgctttgccgtcgcttctgatctgaggcgagagcacatcaatgaaattctcgcggcatctcgtaaaagttggtccacttcggacaaatcctgcgtccttcaaggatgcgtagacgatgctcagggcgcgctttgtgatagcggtcatgaggcgagcatcaggagggaggatgattgcaggcgaggcctctcagactgggtaagccggtgcgaggcaatgagtgtatcgacttggctgggagcggtaactggcattgacgtcagtagctgtcgctatcaacaaaagttgttgtttggccgtcgttccctggttcgcaaaatcccgaaagacgtcggatcgcatgatgcagattgcagcttttctcattgccaatcttctgagtatggaagcaggctggagacacgcgattctgtgttcaaggaagcagcatccatgaaatcgaatttttcggcgtcattcaaatgtctgttggcttttgcgcttgcgcttggttcgacgacatggccgggagtgatggcgttggaccgccttgcggttgccgtcgatcggaccacgcgctacagcgccggaactgacgaagcgaacgaagtcgctcgatggctggacgcacgcaaagatgtccaccagcggacgcttgcacttgggacactgaccattcgccatcgctgtaggggggagcgggattcacctcggacgccagccatccgcgcccttttccatcatggtgcttccggagagaagatcactattaccaacgatcttccaggatgcgcacgcgagacgtggacgttcgcatggaccggagatggccaggacgcctattggaagcagaccgcctatggatggcgggtactgaccacttag

SEQ ID NO: 509554 - DNA, 450 bp, Stenotrophomonas maltophilia
atgcatcgatatcccgccctccccacccgtcgcgccaccgtcctcggcagtgcccttgttgcacttctcggcatcgctgccgcgccgcaggcccatgccagtgccttccatgtgaatggagacacgctctactacaccggcaacgtgctggcgaccgatccgcagacgctggaggcctacatcctggccgcgcaggcccgtggtacgccgctgcgccaggtggtgttccgcaactcgccgggcggggccgcctccggtggcgtgggcatgggcgccatcatccgccagcatgggctggataccgtgctggacggcggctgctactcggcctgcgccgacgccttcgttgccggcgtgaagcgcaaggtcacgcagttcggcctgctgccagcgcacggcaactacacggagacggtgctgggcatccatggcgaatctgttcaggggtga

SEQ ID NO: 509555 - DNA, 207 bp, Stenotrophomonas maltophilia
atggatgaggccgtgtacgacgacgcagggcgtgcctataagcaactgcatctcggcggcgtcgatgacgacgaccagcgctgcctgcgttgcggatcgcccggcctggacacgggctgggagtgcaacgactgcggctacgacaacatgccgcactacgttgagccaaagaaggacctgaacgacagccaagaaaggggccgctga

SEQ ID NO: 509556 - DNA, 228 bp, Stenotrophomonas maltophilia
atggctgagcgcggccagttcctggtggtccctgctgagtgggtgggtggcgacaccttcaccgactcggacagggcgatcgaagacgcccaggcccgcagcaaggtcgacggcaagcatcgcgcggtggtttgcgtggtcgctcgcaccacgcccagccctgcaccggtcatcgtgctgacgcgtacggaagccggcatcactcaaccgcaggtcgttcagccatga

SEQ ID NO: 509557 - DNA, 276 bp, Stenotrophomonas maltophilia
atgaaccatgaacgtaactccgatgtgctgtatgccgccgcgaacactgcccgcgagctggagaacagcggcatcgagatcttgggcctgcacagcaatggccgtcgcgcggtgctgattctggaccgccctcccacgatggtgggtggccacctcaagcgccgccagcccaacggcagcggcggccaggaccgcgtgatggccgccgagtaccagggcgtgcagctggagtggacccagcgtcctccggtgctgcgggaggtggctcatggctga

SEQ ID NO: 509558 - DNA, 390 bp, Stenotrophomonas maltophilia
atgcagctagccctgctaccgcaagagctgtccccacagacggtgcttttgcagttgcagggccgtcgcggcgccgtcaacggcatcaccgcccgcgacctggtgcagcagatcacctcacgtaccagcaccgccgacgagcgccgcctgcgccagatcatcgagcagctgcggcgcgaggggcacccgatctgcgcccacccggctcacggctaccaccttgccgccagtgcggccgaactggaccgcgcctgcaccttcctggtcgggcgcgccatgacctccctggagcaggtcagcgcgatgaagcgcgttgcgctcccggatctgtacggacaactcgggctggacaagcccgctaccgacgaggaatccaaccatgaaccatga

SEQ ID NO: 509559 - DNA, 309 bp, Stenotrophomonas maltophilia
atggccgttccgaccctccagcgttgccttggccaggtgcgcaaccgcaacggacacagcgcccagcacccacagcggaagaagtccatcggggtgctggtgcaggactgccacatgttccccacagcgtcgcgagtgggggctatccaggtacaggaccctgactccaggcgtgagtacctggtcgaggtatggatccacagcggcgtgctggtgatctcgcagagcaccgacaagcgctggctactggaactggacgagattctggacctggcgattgccgccggcattgatcggggggccatctga

SEQ ID NO: 509560 - DNA, 240 bp, Stenotrophomonas maltophilia
atggctgatttcaacacttctgggtcgcagtacctgcgcagcttcgctttctacttgatgcgcgatgccgagctgcccgaccggcaggtaacggtgatgcaccgcgatctgttccgccgtgccggcatcgagtggcgcgacggccagagcatggcctcgctgctggacaacctcaacctgcagcagctgcgagcgctggtcgaccagctgcgcgacggcgatgacgacgaggaggagtga

SEQ ID NO: 509561 - DNA, 399 bp, Stenotrophomonas maltophilia
atgcgctcggatctgaccatttcgctcaaaaccgcccttgaccttgtcgctgatgaacgtcaccggcaggtcaatgagaagggctattccgccgagcacgacgacgagcacgcgcaggaggaacttgcagcagctgcggccttctatctgctcccgtcgtggatgaaccaggacgttgtcagtgtcgatgcgaacggtgcgatggaaatcgccccacttcagcagttggttgccggcagcgcattcaaccccagcgcctgggagggcctcagtcgactggaggacgatccagaaggcgacgttgatatccgtatccagaacgtcgttcgtggcttggcccttggcacggctgagctggagcgactgctgcgccttcgcgacgaacaggagggctgctga

SEQ ID NO: 509562 - DNA, 975 bp, Stenotrophomonas maltophilia
atggcctacgccgaattcagcaacgtccccaatgtgcagaccctgatcgaccttgtagtgcaatttgcgcaggccaatggctggaccgttgaacgcaacaatgtgaccggggcaaatcgtactgccaccgttcgcatccctggcgtgtccgactacgttcacctgttcaacaccgatcagctcagcctgcagtcgcgcctgtccgtcgggtacaacggcgcgctcgatcctgcgtcgcagcctctgccgtctccacgtggcgtgtcgaccctcgggctggtcggtccgttcccgcgtgtgaagctgttcgccaatggcaccgcgatccacgtcgccatcgcccaggccaccgccggcgagtatcggcatcatgcatttggggttcttgccaaggctggagcctacgaaggtggtacctatgtcgatggcacatactggccactgaacaccagctccagtggtgtgatcggtaccaacgccccaacggtggtgctgtttggatacaccaccgggttgggttgcggacaggtgcgggccgactctatcgaggacgggcgtagcaatagctaccacatgatctgcaacaactatgctgggtcacttggcacggagggtcaggctggcagtggcgttggcccgagctaccaggggtcatacaacgacataacgattgatcacctctggctaggccgagcgttaggcaacgccgatgagaacaccttttccggtcgcagcatctttcacccgatccagttgtgggtcaggcgagctggaaccacccccaacctgtcgccgatcggcgaggtgatcgggctgcgggcctgctacctggaaaaattggaacccgagcaggagatcgcgatcggtgctgagacttgggttgtgttcccgtgggtacgcaagctaacgatggccagcggttcgaaccagcctccggcaagcaacgcctatggctgggcagtccggaagtcctga

SEQ ID NO: 509563 - DNA, 762 bp, Stenotrophomonas maltophilia
atgaagacgaccacgctgttcccctggccgggcgggaagacccgcctgctgccccacctgctgcccctggtggccgatgccccccaccgaacctacgtcgaggcctttgccggcggagctgctctcctgttcgcgagagagccggccaaggcagaagtgctgaatgactgccacggcgagctggtacgcctgtaccgagtggtggccaaccaccttgaagagttcgtccggcagttcaaatgggccctgacgagccgggaaatgttccgttggtgccagctccagcatccggacaccctcaccgatatccagcgagctgcacgcttctactaccttcagcgactggcttgggggggcaaggcgaccggccagaccccaggtttcggacggggcggcaagggcctcaatctattgcgtattgaggaggatctgagcgccgcacacctccggcttcacaaggtcaccgtcgagcacctggcctggcagcagtgcatggccaagtacgatgccaccgataccctgttcttcctcgacccgccgtactgggagactgaggggtatggcactccctttgggatggagcagtatcaggagctggtccggcagatggttgggctgcggggcgcggccatcctgacgatcaacgaccacccgaccatgcgggaggtgttcagccagttcgggtgccgagtggtgccgattcgctacacgatcggccggcaggcagtgcagcggcgggagttgatctacacgacctggtag

SEQ ID NO: 509564 - DNA, 2637 bp, Stenotrophomonas maltophilia
ttgacgccccaccgtttatctcacctgtggcgggcgatttatcgcgcgccgttacacgaatccggcccgaacggccctaccccgtacccggggcaggacaagtacatcaagtactaccgggacatgttcggcccgaccgacttcgcggtcatcgaagcgcgcatcgtccaggcgcactatgaactgacccagcagtcgggcttcctgcgctacttcgacccgaacgtggcggccgtggccacgcgcttctgcccgacccgcgaccagagcgcggcaggcaactgcaccgcgtatcccggtgtcaccttctacagtgatcgcgtcgttaccgaagccggttacgtccagcctggcgacgtgctttccatcgacaaggacgtgagcggagacctcaatccgaacctggccgtgcgcgggcgctacaccaatgcgctggccaacctgcgctacttccagcaatcgaccccggacatccggctggacgacgccttcggtgtgatccgcatcggcaagggcggtgtctggtcactggataccgcctccgccgcccagtatgtggtggccgatggcggcaccctgcgcctgcagcagaatggctggatccaccacgccgaagccatcggcgcccgcaatggcgggcgcatcgagctgcagcagggcgcactgcgcagcctgaccgtggtcgaacgcggcggcgtgctgaccggacacggttcattgaatgccacgatcgacatcaacgagggcggaacgctcgcgccctccggcatcgtcatgcgcccctactcgctggaagcactcgcgccgggtggcgacgacgtgttcaccagcgaacgcttccggatcggcaaggggcgctacatcaacctcaacgatggcgcgaacctggccttccaggtcgacagccagcgcaccgcaccggcactgacgctggaagaagcccgctacttcctggtcgaagaggaccggcggtccggtgactacaacctgtacggcaacatcaaccgcgccgtgctgagcattgcccccagcgccaggctgacgctggacatcaagcaggcgttcttcccggcaggccagcagaaccatctggtcggaacccaggtggatgccagcgccctgcagctgcccgtcgccccctgcggcccgtcgaacggtgagtacgccggcttgtggtgccgcaccgctacgcccgataccctgacccgcgcagcaccggtgtcggacttcatcgaagggcgcttccagtacgtcgagcgcagtggcgaggccggcagcgcggtggacctcaccgctcccggcgccgtattccgccctcgccacaattcactgctcagcttcaccgtcaaccagaccggcagtggcctgtggctgaccgccaatccctccttcgacgacacacgcttgttcggcaatgccccgtccggcgacggcctgggcatcgcactgcaacaggcggctgcacagcgcacttcctcgatgagcggactgctgggtgccctgcagttcgctgaccgcgatgacatcgcgcgccaggcgggagcattgcgcggcgacgcgcatgccagcctgcgcctggccgataccgcactggtcggcagcatcggcaacgtcgtgcagcagcaccaggcagcatcgcgcagcggtggcgatgcggacggcctggcagcacaggccgcgcagaccgcctcggcgcaatcggcaacgaccggcagtcgcctgttcaaccagctggcgatgcacctggtcgcaccggcagatgcaggcagtgatgcgggcgacgccggacacaaccgcagcttctgggcgcgcgggttcggcagccatggccgtatcgagggtggtgcgggcgtcgccggcctgaaccacaccatcggcggcatcgcgcttggtgccgatacccgtctggcagacgaccgcgtgacactgggcgtgagccttgccgcggccgacatgtcgacccggtccagcgaaggtgcaggattcagcggcgatgtccgcgcgctggatatcggcggctacgtggacgcgctctattcgcgtggctacctgtccgccgccgtccgctacaccgatcttcgccacgacacccgtcgcagcatcgaggggatcgagggcctgcaggcaccgctgcgcgcgaagtacagcaacgacgcgatttccgcgcgcgtggagcatgcgttctcgttcaccaccggcaacggcgtggtgatacagccgctgctgccggtgatcgactacatgcgcacctcggccacgcacttcaacgaaggccaggacgcagccgcactcatcggccgcagtggcagcctggaaagcatccgcgtaggcgccggcctgcagttgttcaagaccttcgacggcaacaacggcgagcgcatcaccccgcgggcccgcgtggtctggcagaaggagctgggcgatacccaggcccgctacagcaacggcttcgccgccgccccggacctgctgttcagtgccagcagccagcccgtcggtgagcaggtcctggcctggaacctgggcgtgaccagccgtgccagcaagcgcctgtcggtgatggttgattacgtgggcgagcggcgcgacggccagacccagaacggcatacagctggggctgggctacacgttctga

SEQ ID NO: 509565 - DNA, 372 bp, Stenotrophomonas maltophilia
atgcacccagcggccaacgagcggcgcaacgtgtggggcgacgcgcgaaacgcgcgtcgcgtcccgcgccagataaaagaagagggctgcctttcggcagccctcttctattcccgcagagacaaggaagtcatcaatgccgcatccacccccggaaccatctggagaagcaagctggagaagcaagcccctctgttgaggggctgccccgacaggggcggggagaggcaggcaaagggaggggcccacgcgttgccacgcaacgtgtggggcggcgcgcgaaacgcgcgtcgcgtcccgcgccagataaaagaaaagggctgcctttcggcagcccttttcttttatctggcggagagggggggagtctaa

SEQ ID NO: 509566 - DNA, 495 bp, Stenotrophomonas maltophilia
atggaagtcgatgcaccgtggacttgcgatcagtgtggcaatccgatcctcagcgttgatgatggctgggtagagtggctcaacggacgaaacggacccgatgacattcagcgaagtgcccaccatcttcgccttgtccaccaccgacacgcatccccaaatgcggatcggaaaagcgcgtgctaccacgatgaggaccagtggtttgccgccaagagatacaccgttgctgacctgccgctttccagtttcgtgggtcccgatggtctgattacgctactgtcgttcctagcagataagcgcttctcggaagagagcgaggttctggaactgatcaagcgcttgcatgtaccgaactatgaagccgcgcgccatcattttgatgccgcgattgctaacggagtgtttgagccacgttctgcgccttcctactacgaccagagagagatgcgcgcggtcttagattgggtagaggaacaggaagagcaagcataa

SEQ ID NO: 509567 - DNA, 1428 bp, Stenotrophomonas maltophilia
atgaaacagaaatcaccctcagccctacatgcttcaaaccattttcggacggttataccgtccgagaatggggggagtgtggacggggtgaagcgagagcgtaaccccataaggccacacgggggcacagcccccgcgctcgtttcagattatgaaacgggcgaacgtgcgcacgatgttcgcccgtcacccctgtgtgacgggtggacgagtaagcacaaagaaaaattggaacgcgatgaacagtggcaccgcaggcaggccattgccaccggtaagccgtggacattggaggccgacaagtacacgcggaaagttctggccgagtgtccggagcgcgcgctaacggcggaaacgtcagacgagtaccggcgcgtatacacgagattggtacgcgagggagtgacggcatgggagaaggcgaacagtgcgcagcattggaacaagttgcgcacggcgtgccgctgggcaatggccgaggatgtgcgggcatggcgcgcactgtccgaacaggcgcgcaaatccggcgacttggctcatgcccaacaatgcaccgcagaagcatggaaattggcggttgcacttgatgcccaattcttggcggccggtcgagaagcctgggcggcgaaggccctcaaaatagaaacggagggccgcaagccggtggacaagtccaagcgcctcagcggtgcgccgacagccgacaccgctgcttgtgcgctgctggacagcaggcaccgtggaacgaggctcctagagcggcacagcgagcgtctggcgctgttggcgctgacgggatgccgcccggcagagttgatggccggggttagtgtgaaattgttgagggacaagcatggagagcccagcggcatcggcatagaaataattggagcgaaggtggacgcactacggggccacgaaaagcgccgcttggccttccctctgtcggggggcggcaaggctgttcaaggacttactctgttgtgcgccgagcgtggcgggcactacacgcttgcgacgacagacgccgactatagaagtctcaaccgagcgcttcaggtgcaaggcatgagttgttacaccttccgccatgccgtcggcagcgatctgaaagcagatatttcagaaggcaaggctacgccggagacggctgcgaaaattatgggccaccgatcaaccgcgtccctcatgtcctacggtacaaagcggcgcggccggggtggtcagcggcctcgcgcgagtgtgtccggaccgataagaaacgtggcggtaaccaaggccgcacgtaccaaagcaagaaagcataaaaaggcgaagaaattaaaggcagaagcggctttggtgggggcttcgcccgtccaggtgcctgcatctgcgcgggcaccacaaacgccacttgccgccggtcttcggccacgctacaaatag

SEQ ID NO: 509568 - DNA, 1452 bp, Stenotrophomonas maltophilia
atgcgattgccgaactaccttgttctatcccccactggggtctatcacttccgctggaaggttcctaagcgcttccaaggcccattgggcctcaaggtggtcaagcgctcgctcggtacgcgtgatgcccgtgtggcgcatctgcaagcccttgtgctcgcctcccgctatgctgtggcccttcaaggaggggatatggcaaagagcgtggatgaactgctccgcagcgcgcagaaggggcaggctgactttgaagtagtagccggtcctcacggctacacagtcaaaacggacggttcggcgcaggacaacgctgcggctttggaaaccgtccggttgctgaacgcgcaaggggtggcctctgttggcggtgcgccgctgtccgcgtccactcgcatcgcattggagatggctgtcgaaaaatggtccaagaccttgaccagtggggcccgtaagactccaggtcagaagttggaggccgtgaaagcttttgtagcgtggaagaactccacgcgtaagcgctcaccggcgcgggtggcaatgggcgatctgtccaagactgattgcgcggaatgggtcatcagtctgaagcaaactcccgcagcgcggaccggcaagccgttgacggatagttatattgaaacaaagacgcgttggctgtcgctgttctttgactgggccatggcggcaggctactaccccaagggtgacaacattgcccgaggccatatcaaggtcagcaagaaagcaaagcgactccagtccaaaaagaccggttggcagccttttgaagtcgcccaactaaaaatgattttcgctttcccagcactgaaggctatgcgccgacagtcatcccgttgggttgccatgatcgcgctgtacacgggcgctcgttccaatgaaatcgcgcaattggaattggccgacttcaaggttgtggatggggtcaagtgcatccatattacgaccgaaggcgcggataagagtctcaaaacggaggccagtgaaaggacgatcccaatacacccggacttgctcgcgctggggctgtggaagttggtcgaaaggttgcaagatgatggtgagagcaagttgtttcccaatctgacgttcgacgccaagaacggcccggccaatggccctcaaaaggcgttcagtcatctgctgagcgatacgctgaaaatctccgctcgtggcgatgggcgtattggactgcacagtttccgcaagacagtcattcagcggatgcaagatggcttggtgggcaaggagtttcgtgtcgcctacgtcggacacgaaggaggccgtgaccttgatgacgatcattcggcggtctatgggaagaaggtgtccccgaccgtcttggctgcgcagtgttttccagcactggactgggcaaatttgggtgtggtaaaagtggcggcgctgacgcctctgtttgctcctgcctaa

SEQ ID NO: 509569 - DNA, 363 bp, Stenotrophomonas maltophilia
atgcaaaccgaacccgccttcaccgaaaccgagcttgctcggcggtggaacgtcagcatcaagaccctacaacgctggcgcagcgaagaacgaggcccgccgtatatcaagctctcaaaggccgtccgctatccagtggatgagatcgtcacctatgagcaggtgaaccgccagggcatgtccaacgaagtgccgctgccatccttgaacgacgcgcagcccgttgtcgaatctcccgcgcccgccgcccctgagccaaagcggtactacttgagcgaggccttcgcactcatcgcgcagtacggcagtcttgaagcggccgaggccgcgctgacggaggcgcgcgatgaagcccaaggttga

SEQ ID NO: 509570 - DNA, 549 bp, Stenotrophomonas maltophilia
atgaagcccaaggttgatgccgatagacagggtgttgtggtcagcccggatgagccagtcatcacgtatccggtcctcgatgaaaaccagttgtcctcgaggtggaatctctcacccaagacgctgcaaaagtggcgctcggaaggaatcggcccacccgcctggcacctcaacagatctgttcgttaccttctgatggaggtcgagaccttcgagcgcaaggctcgggtcacttggaaatcccctagcggacgcccgttgtccgaatcatctcccacagcacgtgaagacgccatcgagcagatgatgcagaagcggcctgaacgccgtgatcgggttttctactccgccaaagatgtagtcgacatcactggcttgcccggttactggattcaccagaatcaggaacgcctgcggctgggcattccgttctatcggatcgcaaacggtgacgtcatccgcttcagcatcgaggagatctttctctgggagatgcaccacctgcgcccatgccggtacccggcgagagggaatgctgatgccccgtag

SEQ ID NO: 509571 - DNA, 630 bp, Stenotrophomonas maltophilia
atggaacacactccatcaatgctctccgagacccacacccagcgcatccttgatctggctagccagagagggctgctgcgcgccagcgatttggacgccatcggcacgccccgggtcatcctgacgcgcatgactgccgcaggactgctggaacgggtcgggcgtggtctttaccgtctgccaggcacacaggtaacggaattcgagagtcttgcccttgtcgccaccagggtgccacaagccgtgttctgcctgctctccgcactccagtttcacgggctgaccacccaactacctcgtcaagtctggatcgccatgccacgcggtagccactcaccccggatcgactatccgccgatccggatggttcagatggccggtagcgctcatctggcaggcatcgaggagcacttgtgcaatggggtgaaggtgcggatctacaacccggccaagaccgtggtcgattgcttcaaacatcgcaacaagatcgggctagatgtggctctggaggcattgaaagacgcctggaggacgcgcaaggcgtccgcagacgatctgtggcgctacgctcaggactgccgcgtcgccactgtgattcgaccctacatggaggcagtcgcccacgagtga

SEQ ID NO: 509572 - DNA, 1080 bp, Stenotrophomonas maltophilia
atgattgcagatcgcattcgtcaagcacgattggcggcaggtctgaccctgggtgcgttgggtgaacaggtgggtgtttctcacaccgccatccagaagtacgagaagggtctgctgacgccctcgtcgtctcaactgctcaagctggcccgcgcctgcggcatccggaccgagtacttctttcgaacgcatacggttgcactgctgcagcccgaattccgcaagctctcgacctttggcaagacggcgcaggatgcgctgaagatcaaggtcgtcgaactggtggaaaagcgcgtggagttgctcggcgcatttcccgaattgccgttcccggcgtttgcaccgcccgcgaatctgcctgagcagatcacctcgctcgatgagatcgacgccttctcggatacggtccgcaacgcttggcagttggggctgaatccgattgctgacctaaccgacaccctcgaaggccttggcttgctggtcatcgtggtcgatgaagagaatccgggcttctctggcttgacggccaaggcacgaaccgaagatggccgggagtatccggtcgtggctgtctccaagcgctggcccggtgatcggcagcggttcacgctggcgcatgagctggggcacctgctgctcgaaggacggctggctgacggcatcaatgaagagaaagcctgcgaccggttcgccggtgccttcctggctccgcgtgtcgcggtgttgcagttgcttggcgcacaacgccatgccttggaatggcaagagttgtatgtgctcaagcacgagttcggtctgtcgatgaccggatggctgcagcgcgccaaacagtgtggcgtgatcaccgaggccgctcacgtctctatgttcaagcggttttcggccaagggctggcgcaagactgagcctggcgagccactgccgcaagagcatccacgactgtttgatcagttggtgtaccgcgccttggccgagcaatacatttccgaaggcaaggcggcggaactgctgggcatcccgatgatgcgcttccacaaagaacgccagctggagtcatcggatgcggttgctcatcagtga

SEQ ID NO: 509573 - DNA, 510 bp, Stenotrophomonas maltophilia
atgcggttgctcatcagtgatgcgaacatcttgatcgatatggaagcgggagcgttgatggagacgctctttcagcttccgatgcagtttggcatccctgatctgctgtactacgaagaaattgaaccgggcagtccgggccttgaagacttgggcttgcaggtcatggaggtcagcggcgacttcgtagcctatgcccagcagttgccaggccagcacaatcacctacttcccgcgaaaaacggccccaagcccagtcacaacgactacttggcactggcgcttgcgaagcaagaggcctgcaccctactcacgggcgacaccaatttgcgaattgttgccaacaaggaacaggtcaacgtcatgggcaccattgggttgctgtgcgccatgatcgagaaccagctgctgactgtcgacgacgccttcaaggcactcgaccgaatgaagtcgggcaagcgacggctgccctggccagaagccgaaaaagtgttgaacgcgctgcgctga

SEQ ID NO: 509574 - DNA, 723 bp, Stenotrophomonas maltophilia
atgctggattggattgcgagccatccgaactccaacctgtatccccgccagctgccggtatcaggactggacagcaaatggcttgatgggcgcaaagggctgctgacggatctggtggccgcaatacaggaggactcatccagcgacgtggatttttaccagcggtgtggcctgaaggctccaccactccttgtgcgcatgagggtgctggatcagtcgttgcgagctcatgtcggcggcgtgggtgacatcactgcgccggttgacgacctcgcgggtatcagttggcctgtctcgcatgtgttcattgtcgagaaccttcaaacgggactggcaatgtccgacatgccgggcgctgtcgtgttcatgcgccttggctataacgtcgacgtgttggcccggctaccttggcttgcccgcgcgaagtgcatctactggggtgacttggacacccatggatttgccattctgcatcgcgcccgttcatacattccagagttgcaatccgtgctcatggacgaagagactttgcttcgacacaaggcactgtgggtggacgaggcggcgcagcattcagcagcggaactgacgctcctgaccaaggatgagcagcaactttatcgggatctcaagcagcagcgctgggggcaaaacgttcgcttggaacaggagcggatcgactggactgccgcatggaacgtgttgcaacggtcatttgcctag

SEQ ID NO: 509575 - DNA, 3375 bp, Stenotrophomonas maltophilia
atgatctcggaaccccaaaccgtctccttgtttgcccgcgagcagttccgcatgacccgcctgcaggtatacaactggggtactttctccggcctgcacgacgtgccgatcagcgagcgaggctttttgtttgtgggtcgatccggcgcagggaagtcgacactgctcgatgcattttcggcgttgctgacgccacctcgctggatcgatttcaacgctgctgcgcgcgaggcagaccgcagtggccgagaccggaacctcgtcacctacatacgtggtgcgtgggcagaacagaaggatggggagtcgggtgagatcgcgacgcgctacctgcgctcggggacaacgtggtcagccttggcactgagctaccagaacgccttgggccagtctgtggtgttggttcaggtgttctggctgcgcggtaatgcaaacggtagcgccgacgtcaaacgccactaccttgtgatggagcgggcctttgacctgcgcgagctggaggactttggtcagtcaaacttcgacatccgaaagctcaagcagtccttcccggaggcattcgcccgcgacgaatttcgtccctattgcgaacggttctgccgtctgctcggcatcgagagcgaaatggcgctgcgtttgctgcacaaaacccagtcggctaaaaacctcggcgacctcaatacctttctgcgcgacttcatgctcgacaagcccgagaccttcgaggtagcggatcgcttggttagtgaatttggcgaactcaatgctgcccaccaggcggtagtcacggcccgcgaacaggttcaaacgctcgcgccagcacgggagcagcatcagcgtagggactcgttgatgctgcaacgtaatggactggaggagcttcggctgggcgttgatggctaccgggaaacccgacgcattgagcttctcaaggagcacgtggcagccctggaggtgcaagccaacggctcagaaggtgaagtggggcgacgtcaaagcactctggataaccacgccgcaaccttgcgcgatctggagcgacagcaccgtgaggcaggcggtgatcagatcgagcaatgggaggctgagaaatcggggctggagggccagcgcacagatcgcctgcgcaaacgtggtcaggctgaagaggcttgcaagaagctgggctggagcctccctgattcgcctcaagccttcgcggaactgttgggcaacgcgcggcaggaggttgaaaactgggagcagcgaagcaacgcgaaccgcgaagaacagttccgcctggcaggagaaaaaagggacgctgaggcagcattttcgcaagcagtgaaagaggtgcaggcactccagcgccagccatcgaacattccagccgacatgctggaaatgcgccgaaatatcgccaccgccatcgggatcgcggagtcggcacttccctttgttggcgaactcgtcgaagtgaaacctgacgaggccgaatggcagggggccattgagcgcgtcctgcacggctttgcgctctcactccttgtggacgagcgccagtattccgcgctggccaatcacatcaacaccacccaccttgggcagcgcttggtgtattaccggactggccgtccggagacgtggcaggccaagccaatcggggctaactcgctcgtactcaagctgaacgtcaaagagggagcctacgctgattggctccaggcagaactgcggcaacgcttcgattacgcgtgcgtcgattccattcagtcgttcaggagcgcagatcgcgccatcacccgcgagggccaggtcaagcacagcaaaactcggcacgagaaagacgaccgcagaagtgtcggcgaccgacgaaactgggtgctcggattcgataaccgggagaagctcgggctgtttcaagctcaggcgcaggagcaggctgacgcgattgcgcgcctcggcggggagatcgacaaactctccgaccaagacaagaaccgtgcaacccgagcgatgcagtgccaaacgctggtgaatctccagtggcaggaaatagatctgctcccattgctggatcgcatctccaccattgagcggcaaatccgcgaagcgcgggaaggcaacaccaccctactgcagctcagtgagcagatcgagaagcaaaagaagctcgtcgaggatgctgataaggagcttcgccaggcaacgcgcgcgcacgactcgattcttgaccaaatcaagaccagtacgcagaaactggaatcgctcctacaggacgcgtctctcgttcctttgacgccccaccaggtttcgggactcgacgagcgcttcgccaagcagtcagatgcagtccggctcgacaacctcgacaaggtgacaacctctgtagaacgcgcactcaatgcggagatcgaagaggtcaaccgtgggattggtgcctgcgagaaggaaatagaagcgcgcttcgccgatttcaaacgtcagtggcccatggacgcgggcgacatggacacgagcctcgccagcgcgccagacttcttcgccaaattggttcgactggaaacggatggcttgcctgcctatgagcagcggttcttcgagctgcttcaaaaccaaagccaccagaatctggcggcactttccacttacctgaacgatgcgcgcaaagccatccttgagcggatggatctcgtcaacgacagtcttggccaggtgcctttcaatcagagcgccaatcaacgcacctatctccacatcgatgccagcgaccggcagcttgtcgacgtcaaggagttcaagcaggaaatccagcaggctctgagccatgcgtggacggaggaccgcgagtttgccgaggcacggttcctggccctacgccgacttgttgatcgactcgccagtcaggaccccgagcaaaaacgttggcgtgaaaccgtgctcgacgttcgacaacatgtggagttcatcggaagggaaatcgatgaaagcggcgtcgaggtcgagatctaccgcagcggagcaggcaagtctggcggtcaacgacagaagctggccaccacgtgcttggccgctgcattgcggtatcagctgggcgggaacgaccacggcgtgccgatgtacgcgcccgtcgtgcttgatgaagccttcgacaaggctgataacgagttcaccgctttggcgatgaacatctttaccaatttcggattccagatggtggtcgctacaccgttgaagtccgtcatgacccttgagccattcatcggtggcgcctgcttcgtcgatatcagcgatcggagagtatcaggcgttctgctgatcgagtacgacggtgaccgtcagcggttgaagctgccggagcacgctcgagaggaggctaacgttgaagctccctga

SEQ ID NO: 509576 - DNA, 708 bp, Stenotrophomonas maltophilia
atgaactggtctgagaacgacgaatcggcaatgccagccgaagcacaagaacccgatgctgctcaggcacctgccaacaccctgttcctgggcgacagcggcgagttggcactggacacccggcgcgccttggtgcagctgctggcagggccgtcgctcgatggacgtcggcatccaaaactctggccgatcttggtgcgagacgaagcggtgatccgtcggcgtcttgccgaactgtttctcgaactggttatcgaccgggatgtacaagtggctttcacgcgccaggcagataccggtgacctcgaagtgcccctcctgctgcgtcgcgcccagctgacgttcattgattccattctgctgctccacctacggcagcgattgacccaagccgattcgcagggtgaccgcgccgtggtttcgacagacgagatcacggagtttctctccctctatgagcgcgccgccaacaccgaccgtgcagggttcgtgaaacgggttcacgcctccatcgagaagatcaagaagcacagcatcctgcagaaaattcgctcaagcgaggatcgcttcgagatttcgccgacgctgaagctcctattctcagccgaggaaatacaagcgctgacgcacctgtatcagcgtatggccgccggagagacgccagcgcaactgactcagaccgacgctgacgaggaggccgaccaatga

SEQ ID NO: 509577 - DNA, 1461 bp, Stenotrophomonas maltophilia
gtgaaagcagacaaagccatcgcgacctaccggcgcatgcgggcgcagccgctgtggcgtctgcttgcctcgactaccgggcctaccgtcattggcctgcttcaatctcatctgtatgagagcgagcgaagcctgcctgcctccatttttcacgaacgcatcgcaagggatctcgaagagctgcgcgcccaaggcgaagactttccccaaacggcacaggcgtatgtcgccagctggctcgccgatggctacttggaacgacgcttcccggctggggcttcagaagaagaatatgaactatccacagcggctgtcgaagccattcgatttgtctctggactggcgcagccgcattcagctgcgaccgaaagccgcctgaccctcgttatcgaggccttggcccgactggccgaggacaccgacaccgacaagttccgccgcatcgaccggctaatggccgagcaagcccgcatcgacaaagagatagacgccatccagaaggggcagatgcgcgtgctgccccatacaacggcgcttgaacgaacgcgggagatcatcacgctggccgacgatctggccggtgatttccgtcgcgtccgcgatcagttcgaccaattgaatcgcgatctccgtgaacgcatcatggacaacgatggcaatcgtggggatgtgctggattcgctgttcgccggaatcgacctgatttcagagagcgacgcaggcaggactttctccgctttctggcgtttgcttacggaccccgaacaggcggccacgctcgatcaggcgctcgatagtgtcatgtcgcgggagttcgtggggcagctcgaagccaaggagcgacgattccttctgcggctaacgcgcacccttcttgagcagggcggcatggttcacgaggtgctccagaccttcgcgcgcagcctgaagcactttgtccagagtcgtgaatacctcgagcaacgtcgactcaatcacctgctgaaagacgctcagcgcgcagcactgagcctgaaagatgaagtcagggccactgaaacgctccagtacacattggagctcacgagcagtcggttgcgatccttgtctcaatgggttctgcacgacccatccctgcaagcattgcctgggcagatggcagaaggggatgcgccgccaatcgaccttgagtctgtgagcgaactggtcgcacagtccgagatcgacttccgaacactgaaggccaatgtgctggctgtcctggagcaacgctcccatgcatccattgccgacgtgctggagcagttccccgctgcacaggggctgggcagcgtcgtcggcctgctggcgctgggcagtcggcatgggttcaaggccgaccatagtgaaaccgtaggctgggttggaggcgacgacgagcgtcgtagcgcccgaattccaaagatcttctttttgaaggagcgggccgatgaactggtctga

SEQ ID NO: 509578 - DNA, 915 bp, Stenotrophomonas maltophilia
atgcccaaagaccaactagcagaactgacccagcctcagcgcgaccggctcgcgttcattgagctgcgtgtgcgcttcgtgggggagatccgtcggcaggacttggtcgcccggtttggcatccaatccgcagcggcaacccgggatttggcgctctataaggagttgtctccgggcaacatcgactacgaccccaaaggcaaggcctacgtcctggggccggactttcgctccatcttcgactttcctcctgagcgtgtgctgtcatggctgacgcagggctttggagacggcgagccgatgcggctcaaggcgtgggtggccagcgaaagcccgtcaaggcttacgcaccccgatctggatgtgctggccagcgtgacccgtgcgatccatcaggggtgtccgctccgtgttgagtactactcgatatctagcggctgtactgagcggcaagtcgtcccctttgcgttgatcgacaacggtctgcgctggcatgttcgcgccttcgaccggaagtctcaggagttccgggatttcgtcattacccggatcaagaaccctgtcgtgctcaaggggcagccagttgcagcccatgagatgagcgatcaagacattcagtggacgcggatcgtcgaactggagttggtgccgcacccggatcagccccggccggagatcaccgaaatggattacggcatgcgcgacggcgtgctgcggatgaagctgcgcgccgccacggctggatacatcctgcgcaaatggagtgtcgactgctctcctgaccacagcctgcgcgggcatgagtaccggctttggctgagagaccaccttgccatctacggtgtgcgcaatgctgttctggccccgggatatgcaacacctgaaggctctggcgcaggagctgcaaatgactga

SEQ ID NO: 509579 - DNA, 714 bp, Stenotrophomonas maltophilia
atgagcagcgatgcgccgaacagtattgaaacgatcgtttgcctggccaactcaaggaagatttcagggcgctgtgttgctggcaagcgtacgggcgataactcctggctccgcccaatcagcaatcgagcagggcacgaaatctctgagtttgatcgtcgttattcggacggcaaaacggcacagttactggatgtcattgagattccgtgtatcgaggaacgcccccacggccaccagagcgagaatgttctgatcgacgacagattctattgggagaagaaagggagcgcatcatgggacgacgtccttgaattggttgaccctgctgcggacctttgggcgaacggattcagtgcctactacaaccggaacaatcgcgttccagaaggactcatcgacgaagatggcggctccttgcgcttgatcgaacttgacgagatggttcttcatgcgggccctaaggccccggatttcggcgacatgaaaccgatcgtgcgggccagtttcaattaccgtgggcagcactacaaactggacgtcaccgatccagagtatgagcgcgcatgcttggaaaaaggagctggagagtatcgtattccttcagtcgttgcatgcatcagcctgtctgagccccacaccaaccagaatggggagacgttcgcgtacaagctcgtggcttctatcatcaccaaagagagagcgggcggatga

SEQ ID NO: 509580 - DNA, 618 bp, Stenotrophomonas maltophilia
atgagcgaacttttgaccatcgggcactccacgcacccaatcgatgcgtttattgccctattgaagcagcatggcgttaccgcactggctgatgtccgttcgcatccctacagtcggcattttccgcagtattccaaggatgcgcttaagaatgcgcttgctcaggcgcagatagcctatgtgttcctcggcaaggagctaggggctcgaagtgaaaaccctgcttgctatcgccaaggaaaggtgcagtacgacctgttggccaaggaacccttgtttgcacaaggtctagaacgtctgcgccagggcttggaaaagtatcaaatcgcgctgatgtgcgcggaaaaagacccgcttgattgtcatcgtgcagtacttgtcgcgcggcgcatgttcgaatccggaacgccagtgcagcacatacatgccgacgggcatttggaagagcatcgcgcaatggaggcgcgaatgctccagctccataagatgtccgaaaacgacatgttccacacgcgcgaagaaattctcatcgatgcatatcggattcacggtgagcagatcgcttatcaggatgaggcaatgctgcaggaagaactgcgagaaggggccaaacaatga

SEQ ID NO: 509581 - DNA, 435 bp, Stenotrophomonas maltophilia
atgaaggtatttaccatcggattcacaaagaagaacgccgaacagttcttcacgcgcctcaaacagccaggcctggtaaggctggttgatgctcgcctgaacaatgtgtcccaactcgcggggtttacgaagaaagatgatctgcgcttcttccttcgcgagatcaaccgcattgactatgttcatcggccggacctcgcgccaaccaaagagatcctcgacgaatacaagaaaaacgggggggactgggctagctatgaaaagcaattcatggacttgatggctcggagaaaagttgaggaaaaggtccctaaagatctcattgatggcggatgccttctctgcagtgagtcgactcctgaacactgccaccggcggttggttgctgaatacctgaagtcccgctggggtgacctggagatcgtgcatctatga

SEQ ID NO: 509582 - DNA, 198 bp, Stenotrophomonas maltophilia
atgaatgccgagcagctgggccagttgctgccgctcgatctgtccgtcggcatccagaaaggcttgcgcttgggggagtgtgtagcccatcaagtcaccgaggcggtgaccggcgcggatcaggcgggcgacggcagcgtcccacccgagttcgtcagtgagcgcagcgtcggcgcgagtcgctgggctgcgccctga

SEQ ID NO: 509583 - DNA, 213 bp, Stenotrophomonas maltophilia
atgcaaaccctctccatcgaactactgaaaccccacacccacgcaggcaagcgcctcgccgtgggtgaacgccttgatctgaatgacgccagcgcccgttggctgatcgcgcaaggcacggccaaagcggccatccccgccaccgattccaaacccacccgccgtgatgctacgtccggtgtttccacaactgcagccacccaaggagactga

SEQ ID NO: 509584 - DNA, 378 bp, Stenotrophomonas maltophilia
atgcccactgtctctcaacccaagaacctcggtgacctgttgaagtacgaagcgccgaatctctactcgcgtgaccaggacaccgtcgctgccgcgcagaacctgtcgctgggcaccgtggtgggccgcgaaacggccacggccaagctcaaggccctcgacccgagcgccacggacggtacggaaatcgccgttggcgtgctcggcaacgacgtcgatgcgatgctgatcgaccgcgaggacgcgatcttgatcgcccgccacgccatcgtcgcgcgcggcgcattggtctggccgaccggtctcacggttgcgcagaaggcaactgccgttgcccaactcaccgcccttggggtgctggtgcgcgatagcgcctga

SEQ ID NO: 509585 - DNA, 240 bp, Stenotrophomonas maltophilia
atgaaagcgctcgccaccgaacgcgagcaggcgctgcgttggctgattgccaaccggcgtccagacatctccatcgagcaggctgtgcgcgtcatgtgcatggcactgccgcgcgatctcaccaccctgcaaatcctacggcgtatcgccgaggaagaagaggccaagcagcccggccagccattcaactggcgcacacttcctggtctgctgcctcgcggatggccgtctgaccggtga

SEQ ID NO: 509586 - DNA, 204 bp, Stenotrophomonas maltophilia
atgaaggtgccgataccccaataccgctgccccctgggtcgtctgcagcctcaggccacggatctggatgcgatcaaggaacgtggctggcgtgaccaacacatcctggtggttaacgcatccgacgaacgtctggacttcatcgaacgcgagatcgtgcgacgcatcggtgaccggctctacggagggcaacgcaatgactaa

SEQ ID NO: 509587 - DNA, 465 bp, Stenotrophomonas maltophilia
atgaacacgacaatcttggcccttgatctgggcacacacaccgggtgggctttgcagcacctggacggcacgatcaccagcggcacggagcacttcaagccgcagcgatttgaagggggcggaatgcgtttcctccgtttcaagcgctggctcaacgaattgctctcggccagcaaccacatcaacgcggtgttcttcgaggaagttcgacggcacgctggcgttgatgcggcgcacgcctacggtggcttcatgggacacctgaccgcgtggtgtgagcatcacaacatcccttaccagggtgttccggtcggcacgatcaagaagcacgcgaccggcaggggcaatgcgggcaaggacgacatgatcgcgtccgtccgccagcgtggtcacaccccagtcgacgacaacgaagccgacgcccttgccttgctgcactgggctgtcgagacgcaggaggtgtga

SEQ ID NO: 509588 - DNA, 2292 bp, Stenotrophomonas maltophilia
atgcttgatttcaatgacacatcaccaccgggagaaacgggtcggcgaaacatcaatgacagcgagcgggacgagattcgcactgaactgatcgcacgcatggaatcagtcctgaccacgatgttcccggcgggaaagaagcgtcgtggcaagtttttgatcggggacatcctgggcagcccgggcgacagcctcgaggtggtactcgaaggcgacaaggcaggtctctggacggatcgtgccacgggtgatggcggtgacatctttgctttgatcgccgcctacctcggggctaacgtccacaccgactttccccgggtgctcgacgaggctgctgatctgctcggtcgttcgcgatcagtgccggttcgccgcgtcaagaaggaagctccggttgatgatctcggcccggccacggccaagtgggactacttcgatgccaccggcaaactgattgcggtcgtgtaccgctacgacccacccgggcgcaagaaggaattccggccgtgggatgccaagcggcgcaagatgactccgcccgatccgcgcccgctgtacaaccagccggggctggctgccgctggtcacgttgtgctggtcgagggcgagaagtgtgcgcaggccctgatcgccatcggcgtggtggcaaccacggccatgcatggcgcaaatgctcccgtcgataagaccgactggtcgccgctggcgggcaaatccgtgctgatctggcctgaccgggacgcgccgggctgggattacgctgaccgtgcatcgcaagcaatcctgaacgcgggtgcgaccacggtcgccatcctggtgccacccgatgacaagccggaaggctgggatgcggctgacgccattccggatggcttcgatgtggggggcttccttgccgtcggcgagcggatgccggtgatgcgctcggtagaggaagcaccttcgccagacttgctgacgggcatcgattggacgaccgaggatggcttgtccagcgctttcacccgccgctatggcgaggactggcgctactgcgcgctttggggcaaatggctggtctggaccggcgtgcgctggaatccggatcaggtgctctatgtgtctcatctggcgcgcggtatctgccggatggcgtcactcaaggcggacagccctcggctcacaggcaagctggccagctccgccacgatctcgtccgtcgagaaaatcgcacgctccgatcccaagcacgcgtccaccgccgaggagtgggatgccgacgtctgggcgctcaacacaccaggcggtgtggttgatctgcgcacgggccgcatgcgaccgcaccggcgcgatgatcggatgaccaaggtgaccacggccacaccgcagggcgacagtccgacgtggcgcgcattcctggccgacgtcacaggcggcgacgctgaactgatggcctacctgcaactgatggttggctactgtctgacgggcgtgaccagtgagcacgcgctgttctttctgtacgggacaggcgcgaacggcaagtcggtgttcgtcaacgtcctgaccaccatcttgggcgactacgcggccaacgcgccgatggacacgttcatggaggcgcgcaccgaccggcatccgaccgatctggcgggcctgcgcggcgcacgctttgtgtcatccatcgaaaccgaacagggtcggcgctggaacgaatccaaggtcaaggccatcaccggtggcgacaaggtttccgcacgtttcatgcgacaggacttcttcgagtacgtgccacagttcaagttggtgatcgcgggcaaccacaaaccatcgatccgcaacgtggatgaggcgatgaagcggcgactgcacctgatcccgttcacggtgacgatcccgcccgaacggcgcgacggcaggctgaccgaaaagctgctcaaggagcgcgacgggattctggcgtgggctgtcgagggctgcagtctttggcaacggcagggcctgaagccgcccgccagcgtggtgtcggcgaccgaagagtatttcgaggccgaggacgcgctcgggcagtggatcgaagagcgctgcctgctggccaagacccaccgcgaaggcgtgtccgaactattcgccgactggcgcgaatgggcagagcgcgcgggtgaatacgtgggctcggtcaagcgcttctccgaactgatggcggcccgcaagttcgagaagtgtcggttgaccgggggcgcacgtggcatcacgggcattgccctcaggcccaagccgtacagccacggctacccctaccgcgatgactga

SEQ ID NO: 509589 - DNA, 228 bp, Stenotrophomonas maltophilia
atgaatacctcgaatttgaatcacgtactgggcgagcagctgatcgacgtgcgccaggctgcactgatgttcaacctgccgtcgtattggctctcacaagccaaggagcgacaggagcgtcgcattccgcattaccgcgtcggcaaactggttcgcttcaaacccaacgagctggaagcctggatcgctgcgcagcagacgtcacacgagggtggtgccgatgcttga

SEQ ID NO: 509590 - DNA, 738 bp, Stenotrophomonas maltophilia
atgatcgacttcaactcctcatcgagcatatcgggtcaggtcaccaccctggtggacacgggcctgcaacaggctcgcgcccgccagtccgagcgccagtacctcggggcctcacgtctcggcgtggcctgcgagcgagcgctgcagttcgagtacgccaaggcacccatcgaccacgggcgtgacaccccgggccgaatgctgcggatcttcgaacgcggtcacgtcatggaggactgcatggtcgcgtggctgcgggacgcgggcttcgacctgcgcacccgcaaggccgacggcgagcagttcggtttctcggtggccaacggtcgcctgcagggccacatcgacggcgtcatcgtcggcggccccgatggcttcgcctatcccgcgctctgggaatgtaagtgtctcggcaacaagtcctggagcgatctggacaagaagggcctgactctatccaagcccgtctatgccgcgcaagtggcgatctaccaagcctatctcgaactgcacgagcacccggcgatcttcacggcactcaacgccgacacgatggagatctacaccgagctcgtgccctttgacgcagcactggcccaacgcatgtcggatcggggggtcaaggtcatcacggcgaccgaggcgggagagctcctgccgcgcgccttccatgactcgacccactttgaatgccggatgtgcgcgtggcaagaccgctgctggaggacacaagcatga

SEQ ID NO: 509591 - DNA, 489 bp, Stenotrophomonas maltophilia
atgaaatgctgggtctgcaaacgacaggcccggggattcggccataccgacaaccgtcacggtgtcggccatccccggcgctatcccatcgactgggtgttctgctcacaacgctgccaaaacgcgtttcatgcgctgtacggcaactggctgcgggtcaaggaaggtcgcgtcgacagtacggaggtcgccatgatcgatccatctgatgtcgaactagcagcgatgaagaagtgcctcaaggccttcggcgaggctgcgggcgagattggcttcaccaagccgctgggcgactactccgaagccgaggcgcagcaagtgatcgacgccatcgtcacttgctacaccgaggcaatggtcgcgcaccacgaggcgagcaagtacccaccggtacgcggcatgacgcctgcgcccgaccctctggccaacccgttcgcggatctggaggacgacctgccctgggaagagccgaaggggaagaagccatga

SEQ ID NO: 509592 - DNA, 759 bp, Stenotrophomonas maltophilia
atgagcgcgatcattcccttccagttcgaagcgcacgccgtgcgcgtccaggtcgatgaactcgggctgccgtggttcaacgccaccgatgtctgcgacgcactggagatgggcaatccgtctcaggcgatcaagtcccacgtcgatgccgaggatctccagaaattggagacccttacggcgggtggccgtcaacgccagaaccacgtcaatgaatcgggcctttacgccctgatcctcggtagcaccaaggatgccgccaagcgtttcaagcgctggatcaccagcgaagtgttgcctgcgatccgcaagacaggcgggtattcggccgccaccacgatggcagccttgcccgcgccgacccacgaccgtgtcacggccatcctgttgatcggcgaagctgtcgccaaagtgccgggcgtcaagactggcattgcgatggctgccacgttgacctgcattcaggaaaacaccggcctgaccacggaagtgctgcgccgcgctttgcctgccgccaacgaaccgatctgctcgctcaacgccacccagctcggcaaattgctgagtcgctcagccaaagccacgaaccagttgctggcatctggcggccttcagttccgcaacgaccgggacgagtgggagctgaccgaggccggtgaagcatgggccgaagccatgccgtactcgcgcaacggccacagcggctaccagatcctctggaatccggcggtcgcggaacaactgaaggaggtggcgtga

SEQ ID NO: 509593 - DNA, 477 bp, Stenotrophomonas maltophilia
atgaatgacatcaccatcttccctgccgacatcgccgagatgtcggtcagccaactggccgcattgccgcccgcgcagaaacacgagatcgacaagaacctcgatgcagccatcgactggctgaagaaggcgcgcaccaagttcgatgcggcactggatcagtgctacggcgagcaggcacgcaccgcgctgcgcgagtccggccgtgacttcggcaccgcacacatcagcgttggcccgctgcacctgaagttcgagctgcccaagaaggtcagctgggatcagaagcaactggctgagatcgctgaacgcatcgtcgcctcaggcgagaaggtcgagtgttacctcgacatcaagttgtccgtctccgaatcccgcttcacgaactggccgcctgctttgcaacagcagttcgccgccgctcgcactgtggattccggcaagccgtctttcaccctttccattgattcggagtaa

SEQ ID NO: 509594 - DNA, 264 bp, Stenotrophomonas maltophilia
atgcagacaccaaccagcggtatcccccggtcgccacagcaggcgatcaacaccatgtcacccggtgatcgccgcgtgctcaacgaaaacgagctcgcgcaacgctggggcgttagccccaagactttgcagcgctggcgcagtgagggtcgcggtccacgctacctgaagctgtccaagcgtgtcggctacccggtcgacgcgatcctcgagtttgagcgcgaagcgctgcacgactcgacatccgaacgcgcggcggtttga

SEQ ID NO: 509595 - DNA, 465 bp, Stenotrophomonas maltophilia
atgaatgccacgacccaccagcgccagcgcgccgtccgcatcgagataggagccgaggcgcgcagttatgtcagcgaggggcagcgggtcaccttggtgcccctgacgatcaagcgccgccagaaccggaagctgctgataccgccagcccccgagatcgcggaccgaatcggtggcttcgatgtgccgatgatcaaaacgctgggcaaggccttctactggaagcgcttgatcgacgatggcacctactccacgacaacggacttggcgcacgccttcaaagtggaaccgggctgggctgccgaggtcttgcgcatgaccatgttggcccccgatatcgtggaggcggtattcgaaggacgtcagccacgccacctgaatctgcacaccttgcgtggccgccaagagcaactgccgcgcgattgggctgcgcagcgtcgattgctcggtttctccgacgcctga

SEQ ID NO: 509596 - DNA, 1413 bp, Stenotrophomonas maltophilia
atgagctcagtgcgtcgaaaccagattcccgcagtcacgccaaagaagcgatgcgccgtctacacacgcaagtccactgacgaaggcctcgaccaggaatacaacagcctcgaggcacagcgtgatgcgggcttggccttcattgcaagccaacgacatgaaggctggattgccgtcgacgacggatacgacgacggcggctactcgggcggcaacatggaacggcccgggttgcgccgcctgatgatcgacatcgaggcggggaagatcgataccgtggtcgtctacaaaatcgaccgcctcacgcgcagcctgccggacttcgcaaagctggtcgaggttttcgaccgcaacggcgtctcctttgtcgcggtcacgcagcagttcaacaccaccacatcgatggggcgattgacgctcaacatccttttgtcattcgcgcagttcgaacgcgaggtcaccggcgaacgaatccgcgacaagatcgccgccagcaaggccaagggcatgtggatgggcggagtcccgcctcttggatacgacgtggtcgaacgcaagctcgtcatcaatgaacgtgaagccgcgctggtgcgtgacatcttccgccgctatgccgagcacggctcggctgcgcgactcgtccgcgaattggaaatcgaggggcataccaccaaggcatgggtcacccagtccggtcgggagcgattgggacgcagcatcgatcagcagtacatctttaccttgctgcgtaaccgcatttacctcggtgaaatctgcaatcacgagacgtggtactcgggccagcacgaccccatcatttctcaagaattgtgggacgcggcacacgccttcattgagaggcgaaagcaggcaccgcgcgaacaccgagccaagcatccggcactgctggcgggacttctgtttgcaccggatggccaacggatgttgcactccttcgtcaagaagaaaaatggtcggcagtaccgctactacgtgccttacctgcacaagcggcgcaacgccggtgccagcctggctccacatactccggacgtgggccacctgccagccgccgagatcgaagatgccgtgttggcgcaaatccatgctgcgctctcatcgccgcaaatgctgatcgcagtgtggagatcctgccagcagcatccggcggggtcgacgttggacgaggcacaggtggtggtcgccatgcagcgcatcggtgacgtttggtcgcaactgttccccgccgagcagcaacggatcacacggctgttgatcgaacgcgtgcaactacacgggcacggcctggatatcgtttggcgagaggacggttggatcggattcggtgcggacatcagcacgcatcccttgatcgaagagtcccaagagcgtgtcgaggaggctttggcatga

SEQ ID NO: 509597 - DNA, 474 bp, Stenotrophomonas maltophilia
atgacagcacacgcaacctcaccaacgcccgcctcagtcgccgcccgcgtcgcggctattccccatctttcgatggatgatctttgggctctctgggacgaccatttcgatgaacggccgaatcaccaccatcgggtctggctggaaagtcgcctggcctaccggatgcaagagcgcgcgtttggcggtttgaaaccgtcactgcgcaagaagctcgaggatgttggcgaaaccggcatcttgcccaagcaactgcgcggcgatagccaacgcctactgcccggtaccgtcctgacacgcatctacgacgacattgaacatcgtgtgctggtgcgcggatcgaatgatttcgagtaccaggggcaacgcttcaagagcctgtccgctgtagccaaacgcatcacaggcagccattggtcaggcccggtgttctttggtttgaaggcacctgcttcgaagaagggggcagcatga

SEQ ID NO: 509598 - DNA, 795 bp, Stenotrophomonas maltophilia
atgctgggccgttgtctcttgcgtctgcagcagtacgaacagttgatgaaggccatcgtggcccaccacgaaatctccgcgtcaggatcacccctcgaatcgaaccaggcggagcgcattgcggatgccgcaaacaagactctgggtacgttggttggcacgctgctcggaacgtatgtcaccagcggcgaccaagacgaggtcgccgaaccagatgcgcccgacaacatcatctcgttcaagatgaagatgagcttgcggatgtctgccgaggatttcgatacgacgcaaaacgatctgaaggaactggttctgctgcgaaacaacctggtgcaccactttatcgaccagcacgacctttggagtctggacggatgccgtggtgcgcaagagtccttggtcgcggcctacagtcgcgtcgatcaacactttgagcaactgcgaggctgggcggagcacatggatcaggcccgtcgtctggcggcggagtttgcccagtccgatgccttccgcgatctggtgatcaacggcatagcgccggatggctcggtggattggcccgcagccggaattgttcgcgcattgcgtgaagcggcagatcagttggctgtcgacgagtggacgccggtcgctactgctggacgatggattgcagaaaggtatcccgatcaactgccggccaagtatgggtgcagcagttggcggcaggtcgtgcacgaatcccgccttttcgagcttcggtatcgggaagtgaatggccagcgcgcggcttggtataggcccaaagagacatag

SEQ ID NO: 509599 - DNA, 849 bp, Stenotrophomonas maltophilia
atgccggatgccgtggatctggaagtcgtccggcaaatgcttccagagacgccttacggcaaaggggtgcgggagatcaaggccccgatggtgctggacatcaatagctgcgaaggcatgttggtgcgcaacccacaggacaccgcagagtggggcatcttctataacggcaaggcaaaccccgaacgccagcgtttcaccatcgctcacgaactgggccacttcatccttcaccgcgatcagcggcaaagtttcaactgcgacaaggaaagcgtgtactccggcgctgacactatccgtgtcatcgaacgtgaggcggacgactttgccagcaacctgctgatgcctggcgacttgctgcgcgagtggatctcgaaccagcgcatcgacttgcatgtcctgagcgcccttgccaaacggttccaggtgtcgttcgaggcgctatgcattcggttcatcaaattcaccacgcagcgggcaatccttgtctattgggacaacggcttcgtgaagtacgaatggcgcagcagcagcgcggtcaagacgcgcgcccgcattcggcgcactgacgatccgcaggaaccattacccggcaccctggctgctgattccaccgttgagcaggagtgggatggcacggagatgtctgccgcgatctggtgcccggaggaggcaccacacatgaagttgcgcgagttcaagcacagctacaccacaggagatcgcgtcctgacccttttgctactggaaagtgctgaaccacggtcatgggatcggtcttggcaagacggcgagagctttgacagcttcgatcagttcgtctcgaacgggcaattgccagtacggtga

SEQ ID NO: 509600 - DNA, 330 bp, Stenotrophomonas maltophilia
atggcttcagcgttcggagcacgcctgcgacgcttacgcgaggcgaagaaattgaccttgcaacaggtcgccgacgaagtcggctgtaccaaggcgtatatatgggaactggagatgaaggacggccagcgtccctccgctgaacgggtccaggccttggccagggtgctgggcgtgacgatggaggacatcatgggcgagcccattgaacaggttcctcaggccagtccagaagatgtggccttcttccgcgagtacgctggaatgacggacgaggagaaggatcgttaccgtcaggcactcaaaatcatgttccccgacaagaactaa

SEQ ID NO: 509601 - DNA, 1236 bp, Stenotrophomonas maltophilia
atgaagaagacctttgtcgacgtgatgctcgagctgccggtggacgccacgctgcgcgacttcctgaccacccacagcctgccagtgcccgatggctttgcctgggatgacacaccggagaccagtcagtttttggtcgaagcggtcaaagtctggcccgacattgctgcccgcgaccggatgacggccaacctcatggccagcgttcagttgggcgatgcggctggtaagcaggcgatgtttgaggcggccgtggccgatggtgctgcgcttgcgggtttggcgctgtgtgcaagcgacatccaccgttccttctggctctacgtccaccacccggcactgttcgagcgtgcctatgacttcagcttttgggaacagcatgggcaacagacacagcaatacgatcttggcctgaaacgccaaccgaacggttcggatgccaatctgaccgcgttgcgtcacgccatctcggccttctacaagcgcgaactccaatgcggagacggcagcgtggcgcacttggtcgagcgcagcccgggcgtgttcctgctgtcggtccatgtcaaggacatggcgatgctgcgtctggagttcgagggagcgaccctgaaacgccgggtcggcaaccccaacatccacatggtgctggagtacgccaagtccaccggtgtggtgcgcacgctggtgcgcggcggcgcaaagtatcagcaaatgctggtcgaggcctttgcggaacatgtgctgggcgtgaaagcaagcgctcacaagatcaagtcgccgactctggatctgtcgatgctgcgcaccgggttcgatgtgccggatgcgttcgaggacggcttctcgatggttcagttgaaggcactcaccctgctcagccctgacacggcgctgaagatcgaatgcacggcgatgcaatccagccagcaacgctcggtgcacgatttgctgaaggaaaagctgccgggcccgctggaggggcagtgggcggtgacggcggcgcaggtaaatctctactacccacccgagccgggcaggactcgccccaaggtggtcaccatcgaagtgaccagcaaagggcggctgaacctgcacaagttcgacgccaagatgcaggcgcagctggaaggctacttggttgcggtgggcatcttgcagaagggccagaccctcagcgcccaggagttgccgccggagaccgacccagtcagttcttcatccgctttcgaggactga

SEQ ID NO: 509602 - DNA, 951 bp, Stenotrophomonas maltophilia
atgacgacgcacgatgcctgggccctggtttgccgactgttcgcaggcggcacgccggtgctgcgggccacgctgtcgccacgcgaggtatctgctttgtctatgctcggcaaaaccgtcaggccaacagtggtggatcagttttttgtgctctgtccccactgtcagcagcatcgggcgcaggtctggggcgatggacggggcggtcgaatctgccggtgcccggagtgtggccaggttcctgtcgaggcaatcgacggtgcggcgttggccctggacgaagactggctgcggcagaaaatgcgcctcgcgctcgacatcgagagccgcgacgacatcgatgacttgggcgacggtgcttggcggctcggcaatgcccgcagctcgccggtcgtgctggcccgagagctgacgagagtgctgcatgagccgtccttgctggatcgtgttcgggtggcgggaagcaacatccgggtaatcacccccaggccgcgcacgacccgtggatcgcccttctgctccggtgtggaatggctggcgctggaagaacgattcacgttctatggcggcgggatcgccttcatcccttcgataccgtctgtagcgccagcagtggccgatccggccgcacctgtgaacgggccattctcggcggacttcaagtgggcgacgctgccggacgtgcaggcaacgccgatccggttcaccgatggtcaggccaaagtgttcgagtcgctgtggtcgttcaaggggggcgaggtggacggcgaaagggtcatgcagcgtgccggccagaagagcgacaagccaattgacctgttcaagatcaagtcgaaggacaagggcaagccggagcacgaggcgaggctggcggcctacggagcactcgtcgtcacgcagcaacgcgcaggcttgtactccatgccttgcgcggcggctgtgttggcgtga

SEQ ID NO: 509603 - DNA, 162 bp, Stenotrophomonas maltophilia
atgtcggtggcattcagcaggaggcttgaaggtgaatcccgtcacccggaacaggcgttcgcgctgcggatcgtccatgtgcagcggaaaggcaagcagcagctcgggccggtaggcgagtgtgccctggccctgtctctacgcctcgattccgggaaatag

SEQ ID NO: 509604 - DNA, 894 bp, Stenotrophomonas maltophilia
atgttcaaccatcagacctcgccggatatcggcaatgccacttcttcgccggcatcgccggttggtcccttgcagctcgacttgctgggtggcccgacgaccgcgagctctggaccggcagcgccccgtgccagccgttctccgtcgcgggcaaaggaaaagcccaggatgacgatcggcacctgtggccccacttccttcgcctcatccgtgcccgacggcccgctgtcgtcatgggagaacaggttgcggcggcggttggcaagaactggctcgacggagtgtctgctgacctggaagcagaggactacgcctgccgggcggtcgttgtcccagcttgtgccgtcgacgcgccccatcgccgggatcgactctggtttgtggcccacgccaatggcgcacgaaccgcggctgggctatcagcgtcggcgtggggacacgaagggctcgcaggaatcgctgaccacggtggtggtgaacgtgtctgcgccgctggacgacccccgtattgcgggcctgtggccgacgccgaccgcctcgctcgccgacaagggcgtgcgatcaacggagggcgcgatcagggaggcagcgcggaaccatgggccggatctggctgcggtgtcgcaggcagcagtcgcgctatacccaacgccacgagcgtcggccaacgagaaccggacgaccaaaatcccgccctcgcagctggacggtcggcacggcctgtacctgtcgagcgtggccattgggatggagcctgctggctcatcggccacgacggaaaattccggcgcgttgaatccagcattcgtctgctggctcatggggttctggcccgagtgggacgcctgcgcgcctacggcaacgccatcgtcccgcaagtcgccgcggaagtga

SEQ ID NO: 509605 - DNA, 228 bp, Stenotrophomonas maltophilia
atgtcgctgaaggaaatgggccgatcgagttcggccgtgtacaaaggaacgacgtacagcgccaagggtcgcttttccgttcaaggcggatacgcggccgagtaccgtattgggcttgctgcgactgacccgtgggttctttgtgatggccgattcgatagctgggaggaagctctcgaacatgctcaggtcaccgcgcgcgctgccatagacaagctgcaggaatag

SEQ ID NO: 509606 - DNA, 702 bp, Stenotrophomonas maltophilia
atggcgatgtgcccgctcgcggtggactgggggaacgtggccgactgggccgcggtaggtgtcggtgtcggagcagcagtggctacgaccgtggtagcgatgctcgcttaccgcacctccaagcgagcggctgagatcgcggaggaagcgacccggatcgcagctcagcagcatcaagaggcggtggacaatcgcgaagcgaacgcgcgaattgtcgtcagactgctgttgcacgaagtctctgagctcccggtccaacttgcgattcaaataaagcgatgcgaaagacgggtgggcatggattctcagggcacagctcccaagtaccgtgtcgactcttttgttcgagcgctgcgggcagcgggtggctcgtttttgcctggcacagagcaggtactcgatcgaattccaaatcttcgagacgaaatcggcgatgacctcgccacattggttggttacaaccgaaccatcaaccagatgagcaaagatctcctgccgatggtggttagttcgccgatcccaaacttgagcggattgccgagtttttcgtataccgggaacgagaaggacatagaacttttccgtaagtacctggctgtattcctcggcttggccatcgactttgcgaaccgctttcgcgcatatggcggtgttgaacagtacgattactccaattacgaggagttggcggacaggacctga

SEQ ID NO: 509607 - DNA, 243 bp, Stenotrophomonas maltophilia
atgcgccacctgcccctgcccttctactgcgccgtcatcgtcggcctactgctggcgctgctcgcgcgcgccatctacaccggtgccgaatcgttcgttctggtcttcctggccggcaccgtccacttcatctggtgcggcatgcgcgacctgtggcgcaactggccggccttccgccacgaaatgcggcggcgcacggcagaacgacagcgcgcgccgatgccggccgacgacacccactga

SEQ ID NO: 509608 - DNA, 216 bp, Stenotrophomonas maltophilia
atgaacgccgtcatcgccaagcactcccaggcacagcgcgccgctgccaccgcaggcatcgtcgcccgcgccggtaagcgctggggccttctcccctatcaggtcgtcgtcgcagcaagcgtcgccgccaatgccgttctgcggcacggccacagcgctgcaggcgccgtcgctgctatccgcagcgcagcgcgcgcccaagacggagcagcctga

SEQ ID NO: 509609 - DNA, 201 bp, Stenotrophomonas maltophilia
atggccagcctgtccctcggcgcattcaaacaactgcaacccaccgccacgtcgatgccagacgtcagcaccggcatcgtcgccctcagcgttggctgcgtcagcatccacctcggcccggaagaggccgaccagctggccgtagggctccagcgcgcagcgcagcaactgcgctccgaaagccaacgcgccgccgcatga

SEQ ID NO: 509610 - DNA, 246 bp, Stenotrophomonas maltophilia
atgacgaaacgcagtgcaaagaagaagcgcagtaggaaaaatagcaaccgcaccaacttggcccgtccgagccgattctggtcgagcaagaggccaagggcaacgaagcatgcaacccccaaggcctggtggcgttcgctatgggacaagattccctggcgctttgctggcttcaggctagcggagtggctgtggagcaatctagccaaggtctgggactggctgagggatctgatttcttcataa

SEQ ID NO: 509611 - DNA, 438 bp, Stenotrophomonas maltophilia
atggactggaaatctcatatcgaagggttattgagcgctggcgccactgttgatcagctggcgcgcgggatgggcgtcacgcccaacgcgatcagggaaatccgtgctggccgaacccgttcgccacgcgcggacgccgcgtttcggctggcagccatgaagccggagcagttcagctacgggtccgggaacgttgtcggcacattcgctgtcaccaaacgcgcgctgctcgaccgcttgggtatgaccagcacggcgcacttggcgaaggtgctggacctgccagccgctcaagtggccgattggggggatgacgcgcctatcccagccttgccgcaggtaatgaagctgcttgggcaccccgaacagcaggagccggccaagccggcaaacgacgatcccgatgcagaccgcatagccccgattgaggtggcgtga

SEQ ID NO: 509612 - DNA, 234 bp, Stenotrophomonas maltophilia
atgggctacagccgaaccaggcgctcgccagtagcaaccacttcaaatccgtctgcgtcggcattgacggcgctgccgtctccgagtgtgtgccttgccatcccctcgacccagcttggcccgtccaagtccgaagtgtcgatgcgagtgaagtgcttgatgacccacaccctgcggccgtccgcgccgcgagtttcgatttgttccgtctccatggagaaccccaatgtctga

SEQ ID NO: 509613 - DNA, 429 bp, Stenotrophomonas maltophilia
atgcaggttgataccttcggggcctacgtgcgggcggaactcgagtattggggggtgcagtttgctctacaccgggactgcgactacctagggcaccagtcgtgcaacgtcctacaggcattgatcgactaccaaggggacctgccgggccaggctcagggattcaaaccgatgaccgtagacactcgagcccagcgcgtcgaggacctagttaccgtgattgcacgagacagcaaggcaatggcctgcgtcctgcgcgcgcggttctgcggaaggggcagggtgaagaacgagcggtacgagacggcccagctgcttctagccaacgcgggggagccaatgatgcacgtgaaggcttacttggagctggcgcggcgcggggaggaccggattcacgggatgcttgcaggcattgctttggctgcctaa

SEQ ID NO: 509614 - DNA, 288 bp, Stenotrophomonas maltophilia
atgccgttgccaaaggaaaagagacaccgttctgcactgcttagccgtatcgaaaaggcttggctgcatggcgtgagccacgtgacctatgaagagctgtacctttggttcgatgtcgagaagattgcgaaggcaccctatcggggcatcgcggaggcttttgaagaagttgccggcgacgacgcgcccgaggtgagaattatcgatggtcgcggcgggattcatttggtggtagagcagacaagagacggttccgagatgaggaccctctccgcgctcgcagagtaa

SEQ ID NO: 509615 - DNA, 372 bp, Stenotrophomonas maltophilia
atggttggcgcgcacaagatcctagaaaactcgtttgacttgacaacggaagagggcttaaggcgtgttgttggcgtcttgggaggtgggatggttcctaccgcagttttggctgcgtacggcctgtactacctcgcaggaaagctaatggcatctcgtggcagccctgtagcggcggaacaagcgcgttgcgcagaggatttgatccgaacatgcgcggagcaaggtgctgaagaagtcgagatcgagatggatgaaagcgccggagtttcgctgaagtccactgcgaaggaatttcccatggattttaccgttggcacaaaggggacggtaaaggtcaaggttaagttcgctagcaagccgacttcgtag

SEQ ID NO: 509616 - DNA, 168 bp, Stenotrophomonas maltophilia
atgtacatcgtgctggccgttcttggaatgttggcagcgatagccggactgctaatgctcacccaggggaccatgggtgtcggtgctattgcattcggcgtcttcttagtcgcactggcccgcgtgattcaggcagaacgccatcattctaagaccatgggtgaatag

SEQ ID NO: 509617 - DNA, 1437 bp, Stenotrophomonas maltophilia
atgctgtcgcgattaatcgcatcaagcgtcacagatccactggtcttgtcgcttcaggctccttggggatctggaaagacaacctttctaaagaggctccaagtacacataaagaacgaattcgccataccatcaatctccatcgacgcgtggaagaatgacgaatcccaagaccctttgttgacgatcatttcagagataaagttatctttggagaggaaggcgacccaagcgaaaagctcggagattaaaggcgccttcggaaaaaccatcactgcaattgccgacaaaggctcaaagttggtcatgcctgctgttgcgattgcagctgagctcatgctccctggagcagggatcggaactgctgcagctggcgtaggagacttgggggaacgcctgcttgatgcgcaagacgaaaggcgtagagcagaaccaaatttccgagaagcgttagctgaagcccgagacctactagcacgacggaaaaagaacggtccggtgctgccgatactcctcatcatcgatgagctagacaggtgtcgtcccgactatgcaattaagatgctcgagagaatcaaacactactttgatattccgggcgtaaccttccttatagcgacagatcgcggaaaccttccttcagctgttcggactgtttacggggcacacgtcgaaggagagctttatctcaggaagttctttgactacgagtttcacttgtcagcgccttgcgtcaacacttatgcgaagcatgtaatcgccaggcacctcatgcccaatgtggaaccactggagcgaagggaatttcgcaaattcccttgctacctctccaacttatccgatttcatgaatgaaatacctagggatgaactcgacaaaggcgaatacctagagcacttcccggccatggtctcagcaatgaaattgagtttgcgagacaccggccaagcattgaccatgcttacggcgttcgttcactctagagacaaaaacggagcaaccatccccgcggtggactgcttcgtatcttgccttcgatttggatatccagagggctttagactgttgattgaagaatctgagctatatattccaacaacctctgacccgcaatggctgcaggagatgtatggccgtctccgcaaaaccgaacagtgggatgcactgaagggattcttcaacaaggccagcctgatgacaggggcatctctctcacagcgcaatcgctacgaagaggagatcaccgagcagtggcatagcgttcttggtggcctgggccgcactttgatctctggcgccgagcaatgctaccgagcgataacggccatcagagtccgagacgcagacaacgtcaatccatgggcatacgcgcgagagttcgttcgattgactccccccatcagcaccatcggcggtacagtgtcccaacagtcctga

SEQ ID NO: 509618 - DNA, 276 bp, Stenotrophomonas maltophilia
atgaccgccgaaatcacggaaatacttgatcgcctccagacctgcgaggccggactcgagatgcaccgcggctacctcaaggcgatggagtacgcgttgcgaatctgcgtactgacccaccccgagcctgagcggctgaccgaaaactggctgcgactactgccgagcatggcggccaagcacagagaggatggaggcgacctattcgctgccgcctttcaacaatcgctcacggttcttaccgagcaaataggcgcagggaacacgcctccttag

SEQ ID NO: 509619 - DNA, 540 bp, Stenotrophomonas maltophilia
atgcaaagcgattgcaggactgcccgctcgacccctcgccgcctgatgctgggcatttcacttgctctgttgtcggtcggctttgcccaaagcgcgtccgccggccaatgggtcccaacgggccgcgtgctatgggtggattccgaaactatccagccttatccggtggcctataccaatttctgccagggcggcgtggacgggccgagcggcgtctacttgtacggcgactggggttcggaagggcttggctcgtgcccgacggacgcatacaccggttttgacaacatgaagtacggtggcggcacctgcaggccagatcctcaaggtgttggcggcggctattcctgccaggagtatcaccacgttttcgcaggccagaagtaccagggtccgataccggcgacctgtagtacaccgggactttacggggtcaccaactactaccgtgcagagcttgtgtacttcggctctggcgataatcccaacgactattacgacaggttcttcgaaagctctacggagtacgtttgccagtag

SEQ ID NO: 509620 - DNA, 2112 bp, Stenotrophomonas maltophilia
atgtccaagctgcgccgtcccaccctggcactggccatcgttgccagcctgtccctggctgcctgcgaccgtccggccgatccggccgctggcaccgccaagcccgccgaggctgcacccgctgccgccaagccgatgctgggcagcttcggcttcgatgccagcggcatggaccgcagcatcgcggccggcgatgacttcttcggcttcgccaacggcacctgggtgaagaacaccgagattccggccgatcgttcgcgcttcggcagcttcaacgtcatcgctgaaaagaccctggccgacacccgcgccatcctcgagggtgcggccggcaatgcgcaggccagcggtgacgacaagctgatcggcgactactacgccgcctacatggacgaagccggcatcgagcagcacggcatcgccccggtgcagccgcagctgaaggccatcgagaccatcgccgacaaggccggcctggcacgtgccctcggcggcgacatgcgcgccgacgtcgacctgctcaatgccaccaacttctacaccgaccgcctgttcggcctgtgggtctcggtcgacatgctgcagccggaccgcaccgcgccgtacctcgtgcagggcggcctgggcatgcccgaccgcgacttctacctgggcggcggccgcatggccgaactgcgcaagcagtaccagggctacatcgcgcagatgctgcagctggccggcgtggccgacccggccggcaaggcacagcgcatccttgcgctggagacgaagatcgcgcaggcgcatgccacccaggaagaaaccaacgacgtgaccaagggtgccaatccgtggacccaggccgatttcaacgccaaggcaccgggcatggactggaacgccttccttgatgcggccgcgctgggcgagcagcaggacttcatcgtgtggcagcccaaggccgtggccggcctgtccaggctggtcgccaccgagccgctggaggtgtggaaggactacctggccttccacgcgctggaccgagccgccgcctacctgccgaagaagttcgccgacgcccgcttcgccttccatggcaccgcgctgagcggcacgccgcaacagagcgaccgctggaagcgcgccgtggatgatgccaaccacgctgtcggcgaggccatcggcaagcgctatgtcgagaagcacttcgacgccaggaccaaggagcgtgcggacgaaatggcgaagaacatcatcgccgccttcgccaagcgcattgacgcactgtcgtggatgtcgccgcagaccaaggcgcatgccaaggccaaggtcgccggcctgaccgtggggatgggctacccggagaagtggcgtgattacaccggcctggagatccgccgcgatgacgcgctcggcaacgcacagcgcgccgagctgttcgaataccagcgcaacatcgccaagctgggcaagccggtcgaccacagtgagtgggcgatgctgccgcagaccatcaatgcgatgaacgtgccgctggaaaaccgcctggtgttcccggccgcgatcctgcagccgccgttcttcgacggtgccgccgacgacgcggtgaactatggtgcgatcggcgcggtgatcggccatgagatcagccacggcttcgacaacgccggcgcgctgttcgacgagtccggcaagctgcacaactggtggaccgccgaggacctgaagcagttcaacgctgccggtgatgcgctggccgcgcagttcagcagctacgagccgttcccgggcgtgcatgtgaacggcaagctgaccttgggcgagaacatcgccgacgtggccggcctgggcactgcctacgatgcctaccagctgtcgctgcagggcaagccgggccagaccctggaaagcttcaccccggaccagcgcttcttcctcggcttcgcccaggcgtggcgcagcaagagccgcgagcaggcgctgcgcaactcgctgctgaccgatgtgcatgcgccaggccagttccgcgcactcaccgtgcgcaacatcgacgcctggtatccggcgttcgaagtaaaggaaggccagaagctgtacctggccccggacaagcgggtcaaggtgtggtga

SEQ ID NO: 509621 - DNA, 1173 bp, Stenotrophomonas maltophilia
gtgagcgcttcatcgcctgcgcatgccgcgcctgtgcatcgccatccgtggtgggcggtttccgcggttggcctcgccatcttctcggtggtcaccaccgaaatgctgccggtgggcctgctgacccctgtcgccgaagatctcggcgcgtccaccggctccgccggcctgatgatctcgctgccggccctgctggcggcagtgttcgcaccgctggtggtgatcgcagccggcggcatcgatcgtcgtcgcatcctgtgcgtgctgctggggctgctgctggtcgccaacgttgcttcggcgctggcaccgggcatcggctggctgctggccgcgcgcgtactggtggggttctgcatgggcgggatctgggccatcgctggtgggctggcagcacgcctggtcccggcgcatcgcatcggcttggccacctcgatcatcttcgggggcgtggccgcagcatcggttctgggggtgccgctgggtgcactgatcggcgacgccctgggctggcgcttcgcgttcgcagcgatggcgctgttcagtgcggcggtgatgctgctgcatctgtgggtggttcccgcgttgccggtggtggcgtcggtgcgcccggcgcagttcgtgcagctgctcggccaccgtggcctgcagcgcggcctatgcctgacgctgctgctggtagcgggtcacttcattgcgttcacctatgtgcgcccgttgctgaccctgcgatcgggcgtggatgccgcttggatcggcgcgctgctgttcgcctatggcatggcgggcatcgcgggcaacttcatcgccggaccactggccgctcgtcatccgcgcggcatgctgctggcgatctcttgcggcctgctgctgacgccgttgttgttcctgtggctgggcggcacaccctccggcggcattgtggtgctgttgctgtggggcctggcctatggcggcgtgtcgatcggcctgatgagctggatgatgaaggcagtgccgcacgcggtggagatcgccaccgcgctgtatgtcggtgtgttcaacatcggcatcgcaatgggcgcgtggggcggtggacggctgctggatggcgtgggcctgcatgcgaatctgtgggtcgcggccgggcttgccatggtcgccacgctggtgattgccacaacgcgccggtag

SEQ ID NO: 509622 - DNA, 441 bp, Stenotrophomonas maltophilia
atgcggatgaatgatctgatccagcgcgtagttcgcgcgtacccggatcgtcggaatcctgattgcgcttcggcggccgaggtcatgcgtcgcttgggcgttgctcctcactgcgatatgtggatgttctacatggcgatcaatggcgcgctgcctgccgtgagcggtaggcttgagttgttgcgtatcgttggccctggaattccgaagattccagaccaggctgagtacgtttgggatcggtacgagctcccagttaattttcttccgctgtcatctgacgagggtgagggaatgtatttgtacgatatgtctactgaagaggtacatgactaccgcctggctcgccacgatcagtttgtgacgggacaagagcagcctcggtgggagagcttccatggcttcatgatgtggtatctcggtgaggcaagcggtacgtag

SEQ ID NO: 509623 - DNA, 1197 bp, Stenotrophomonas maltophilia
atgggcgaggaacacggcgaactcgtcggcacccagccggccgacccagtcaccgtcacgcacggccgccaccagatagtcggcgaaactgcgcagcatctggtcaccggcggcatggccgaagctgtcgttgaccagcttgaagtggtccaggttgatgtagcacagcgcatgcgtaccgccatcactgcgtacctgcagcagcgcacgctccagcagccgctcgatctcgcggcggttgatcaggccggtcagcggatcgtggctggcgtgatgctcgatctcacgtaccaatgcatggttctggctgacatcctcgatgatcgcaaacaccgacaggccgcctcccgcgctgcgcacgccggtgccactccagcgcccccacaccaggctgccatcgcggcggcagaagcgcagttcactcggccgcagctgccggtcccagtcgatgcggccgacgccatcgatgaccagttcgccttccatcaacagatcgccgagcgacatctgcagcagcacgtcgcgtcggtagtcgaggatgtcggccatcgcctggttggcttcgatcaccttgccgtcggtgtcgagcttgagcatgccgacattggcctggtagaaggccgcacggaagcggctttcatgctcggtcaggtccttgccgacgcggcgcgcgagggccaccgccatcaggctgatcgccagcaccgacaacccgccgaccacaagcgtggcgatccgtaccatcgtggccatgcgcagcaacgcttgcgaaaatgcctgcgcctggacctgcagccgccggtccagatcacgcagttgttgcaggtaccggtcgcgctccgccactggcagcacaccttgcgcatgccccgactgcagctcggcaaccagccgttgcacggccaacagatcattatcggtctggcgccacagcgtggttgcttcccggaatgcaccgatgtcgcgtgcatagcggaacgagaacaccaggcgcgggatatcggcacgcgcgttgccaccctgcaggaagccctgccgggccttctcctcgtccggtaccgcctgttccagcgccagccgggcctgcagatcccccaacggaatccgcagggcttggcgagcgtcatccaggtcctgggcatggccgcgcgccaggtagcggctcagcgcagcggttgcatcctgctgcccccgtga

SEQ ID NO: 509624 - DNA, 735 bp, Stenotrophomonas maltophilia
atggacgctctcgaactggaaggagagcacaaaccggaacccgcacgtcgcggcgtagagcttgatgaagcggcagatttccccccaggcgctttcaaacccgctcgcacggaaatgaaacgagccgagcaggcccacctgccactcggcttcaatcccttccgctacgacagcttccggtgggtcgacgatgctgaatccgaagccggtgttggatgctggaagagatccacgcaggccgtcggcaccgtcggagtacggcctggatcgagtccagagcgcgcagcacaaaacccagatcggcaccggcttcgactcaagcaagcttcatcaaagctcggtgtcgttacaagccctgacccattcgtcaggatcatcgggcgccaccgacatgaatcggactactacgtccactgttcacggccatctgcgccgatccaaaccagacccgccggagcatcggtcaagaaccagaggccgaatccatcgatatcatcttcgccaggattttcgggccaagcgtttgagattagcgtcagctgctccctccagtcgccttgcaagaacaccccgtccgttgcaagcctcactttcccttccctcaacaaacgacccatcaactcgaagaacgcgtcttttctttcggagatcccaacacctcccatttccatcgtcatgtgctgccagacggcacccattgataacccaaacgaagaagtcaccactgcacaatga

SEQ ID NO: 509625 - DNA, 516 bp, Stenotrophomonas maltophilia
atgccgtccctgcgggtcggagaacacggcctcgcggaaccggcctggcaccaccgacaacgtcagcgtgccctggttgaggtcctgcggtgccgacagcacccgcgtggtgacatagccgcgggcgatgatcgcgttctgcacgcgcttcatcaccacgttgatgccttcggtccccaggcaacggcctgtggccggatcgtcgaccgggtcggcagccgccagtgcccagccgaagcgctggctgtcctcgccttccagcacgatgcgatcgatgcgcacgcaggggcgctcctgcgccggcaggcggtcgccctccttctgcgcgttctgctccaggcggacgtcggggcgttgttcctgctgctcgcgcagcacgcgttcgcgttccttttgcctcagcagttcctgcgcggctggatcaccggtctgctgggcggcaacaccgaaggtcatgccaagcaacaccacccacccaccaccacggcacgcctgtcgtgcctgcttcttccctga

SEQ ID NO: 509626 - DNA, 783 bp, Stenotrophomonas maltophilia
atgtttcaacgcttgttgctcgcgctcgcattggtcagcgcccccatcttggtccacgctcacgtgccagccaccgattccgttgaggtccacgggaagaagccagggtttttcaaacgcctgttccaccgccacaaggacgccccgcagtgggacggtgtccagcccgagcttcgctcaacactggaacggatcgctttgcaaatgaagggcgagggctacgacctgcgcctgatggagggttaccgctctgaacagcgccaggctgcgttgctcgccagccagaagggcgtgacccaagtagggcctggcagcagctgccacaaccacggctgggcggcggatatggtcatctacaagcgcgggcgcccttcttgggacctgagggacgagcaggtgcggcagggctaccagcgcttcggtgagctggcccagcaggcgggtttgaggtggggtggcgcttggaagagattccaggacatgccccacgtcgagatgcgcagcgagtgcctggtggcgatccggtcctaccgcgccggccagcccatgttggtggccgaggtggtgcccgaaccggtggtccccttggcgccgatgtggcccgggctgatgccgctggcgatcacgccggccacgccctgcgagggctggatgtgcgcccggcggtgggactggagcctgtccgtggcgagcgccccgatggggggattggtgggcgtgcaaagcacgcggtcggaagcgtcgtttcagtgcccggcaagcgacgttttttggccgtcatag

SEQ ID NO: 509627 - DNA, 600 bp, Stenotrophomonas maltophilia
gtgacgcatcgggccagcgccaacacgctgatcaccaccactacccatggccaccaccccacgcgttcggagggggctttcaccggtgttcccagctgccaccgccgttggtgggccaacccgcgcacgtgggccgtggcccgccggtgcgggttggcccaccaacggcggtggcttggcgtagatgcgccatccctcccgggaggccttcacccgccacgcctgctcatacgcctcggtttccgcccgggtggctgtcaccacctccagcgcatggaaccggaagggacggtgccagccgcctttgggggagcggtgctgcttctcccgctgctgcgggttcgagctttggccgatgtaacagcccccgtcgtcgaacagcagggcgtaaagggtgcggggcagggcgtgatacttctcgctgcgtcccaggttgtggcgatgggtcatggtctctccgtgagtaaaacgacccactcacgaatagatcagaatttgaagttggcaagcctgctgcgaaggacgttagaggccacgcgtcgcttgcgtgtaatctcttcgcagttcatggcaagcatggggctggcaagtgacctttaa

SEQ ID NO: 509628 - DNA, 2835 bp, Stenotrophomonas maltophilia
atgatcaattgcacccgcatcgatgcccgcggccacaacaagaacaacggaaacatgttcgactacatgctggccaccgagcgcctggccatcgacagcgccgtggcctattacgccggcagcggtcccgatccgcggcagacgctcaattggggcggcaagctcgccgccgaactcgacctggaagatcaaccggtcacccgaagggtgatggagttgctgggcaagggcttttcacccaccggaaggccgttgtgcaaaaacgcgggagaggagccccaattggtcatcaagacggatcgcatgggcaacgtgcgactggacgacgatggcaagccaatggagaagtgggagggcggccatcgggtcgggtttgatctgaccatctccgccccgggggacgtgagcgtggcgtttgcgctggcggatgatcgcgagaagctggccatcctggaggcccaccgccaggcctgcgccgtggccatgcgctacatcgaaagcaaagtggagacccggcgcggacaaggaggcgtagacgttataggcacggcgggattggtatggacagccgccgatcatgtcagcaaccggaacgtggaacccgacctgcacacccatcacctggtctacgggatctcgatgggcgaggacggtcagtggggcaccttcgacgccatcgaaatctaccgtcaccggcacgccgcggatcacctttacaaagtcgagctctacgccgcgatgaaagcgctgggctatgggattcagcgggaacgcgaggtggacgtgatggggcacgaaacgggccagactctcaccacgattgccggcatcgaccgggagctggtgcttcagacgaagacccgccgccaagaaatcctggactacgtcaaggaacaccccaacgccagccacgacgaggcctgcaaggccacccgcaaaaaaaaggaagaaccgcccttcgagcaggtcgtcaaggactggcagcaaaccttcgccaacatcgctaaagagcacccggagctggttcccaccacccagtcgctcaagcagacgaaaggccaacacctggacccgcatacgtttgacgaggttttgcagcgcatgcacgaaaacgaggcgatgttctgcgagcatgacctggtccgggagttggggatggagttcgcaggacaaaaaaattcagaagaaatcctcaggatggtgaatgagttcaccgagcaggacgatctggtgcgcgtgaaagccgaatacctccacgaagacgaccggggcgttcggttggcgcgcaagcaccgggaggatcgcttctgcgccacctggatggtcgaatgggaggccgagatcatccgccgctcgaaagagcgggagaacgagacggacctcaagctgttccgctccaccgtggatcgggagatcgccgcttacgagaagcgcaagggctttaccctcacagaggagcagaaagccgccatcggtcacctcacctacggcacggccggtgtgggggtcatgtcggggttggccggcaccggcaagaccaccgtggccgaggtctacaaacagtgcttcgaagccgaaggaaagcagttgatgggcttggccgtgtcgggtaaagccgcggccaagctagaagaagagtccggaatgccctgcatgtcggttgcaaagttcttttcccagctccggcagggcaaggttgctctgacgaagaacgttgtggtggtgctcgatgaagccggcatggtggccaccgatgacaccttgaagctcatgacctactgccagggggtgggcgccaagcttgtcatgcagggagacagtgaccagcttcagcccatcgctgcgggcaacggctttgagctggcgaagatggccttgggggacaagaaactgaccgaaatccgccggcagaggaacgctgatgacctggtcaccgccaacagcttctacgagcgggatgacgagggagaggtcaaggacatgcgccgcggacaccgcagccgcaaaggcacattcgatatgggcgaagatatcctgaacaacctcaagcaacgcaactgcatcgacgactttggcacggaaagccaggccatcaaagcgttggtggaggattacttgaaagacaggacgcccatggacgagaagctggtcttggcccacacgcgctctgaagtcaaagcgcttaccacgggcatccgaacggggctccaggagcaaggcgtgctggacaaagaggagttcaccttccgatcgatcgtgaaaggccaatgggaagacctgacgctctcccgccgcgaccgtgtgatgttcacggcgaccaacaacgacttgggtgtcatcaacggcaccgagggcacggtggagagtattcggaaggacaaatccggtggctacgacctggtggtgcgcatcgactcttcgaacccgaatgaagaaggacgcatcctggagttcaacaccagcgagcacaacgccttggcccaccggtatgccatgaccgttcacaaggcgcaggggcaggggaaatccgaggtttaccacttggccacgaacatgggaatgctcgaccagcagtcggcgttggtggcgttcactcgcctcaccaaaggcagctaccgcatgtttacgaccgacgagatgatggatcgcatggccgagcggctgggcaccgaacggcacaaggaaatggcgctgagcgtgggactgtccagcaagcaggcggacccggtgcgcaacctggtccaagaagtggaagcgctgctggccgggttgaaatccgaaaccgaggtgccaatctcgaacgcggaacggcgcgagatgaggcttacccggtga

SEQ ID NO: 509629 - DNA, 1872 bp, Stenotrophomonas maltophilia
atgagcaaacccaagccctttgatgccctgggcgacgtgcccggcagcgttgcgccttcccagccggtccgatactggcaccgcgccgttcttgccggtgcattcgtttttggcttggcctacgtggggagcatgggcgttgcctggctcttgccgaatcccgatggctcgctcatccgttttgccgatgccttaaaaggcggactggtgaccgcctaccacttcctgaccgtcggcatctcggctcgggctccggcacgggagttcatcgaactggtgtcctaccaccacccagtggcgacgtggtcccggatcggggtgtcgcttctgctggcggtgggccttggccttcgcatgttcctcaaggcagctgagccggtgagcaacacttggcacctgtccggaccgcggctattggaaggaaaggaggccgtggacgaagcccggcaccgctcgatagcccctaaagacgccgaggcggatcccttcgccctgtccctccaccccgatctgttgctgtcaaaaaagcactgggcgcgccacgtcttgatcaccggttcggtggggtcgggcaagagtgtcatcctcaagcacatcctggaacagctaacgcgactgaagagcgcaaagttgttcctttacgacatcaaaggcgacttcacgtcgatctttaaaaggcccatcatcgtgtcgcccttcgatgcgcgctcccacgtgtgggacgtcgccgccgacgtgcggaccccgacccaggcggcggcgtttgctgcctcgatcatcccggagggcgacgggaacgccaagttctggacgatggccgcgcaagacctgttgatcgggtgcgtgcgcgaactccagaacacccggcctggccagtgggggtggcccgatctggcggccttggtgcgccgcccggctgcagagatggccgcaggcatgcgcccgcattacccccgcggcgccgcactggtgcgtgatccggagagccaaaccacgtccagcgtgctgtcttccctcgggggcttcacccgcctcatcgacgacctggccaccgcatggcccaaggttggcaagcgccgtttctcgatgaccgagtggatacgggacgactacaccgggcgcaagcaggtcatcgttcaatccggacccgacccaaccctgacgaaggcctacatcgccgccatgatcaacgtggccgtgccagatctcattgggccaggtttgccggacaacgagggcgggcgtgggctctacttcgtgttcgacgagctgaccagcgccgggcgcttgaacatcgatcccttgttggcgttgggacgcagcaaaggcgtggtggccatcatggcggtccaggatcactcccagattgagttggtttatggggacaagaccgcccaggccttctcatcgctggtgggcacccacgtggtgtgccaagtgcagatgggggcgacccgggacaagctggccagccagctcggcaagcggagaatcgcctggcgtgggcacgaagacaaggcccagattcacgaagagagccgcgcgttggtttccagcggtgagctcaccgaccggttgggtttccgcaaaggcaatcgctacggttccgagaagtggggcatcgaggcgatcgtccaaatgggcggggacgtgctgttgctgacgtggcccggcaggagccatccaacggttcgcgaagggcaggtggccgccgcgtggaccaccaagccggccggtgtggtgggagaagctgaattgccccctttgaccggtgacgcgttggccttcccaaccaccgcagaaggcatcgacacggtccagcgggtgctgaccatgacacccgaggaaatcgacgcgcttttcaagcggtga

SEQ ID NO: 509630 - DNA, 402 bp, Stenotrophomonas maltophilia
atggcgttcgttcgtcaaaacgtaaacctcgaccctcggcaactgaaacttgctcagcggcttgcccgtgaatcgggcagtgggttcagcgcttacatgcgagaggcgctggagcgacacaacaccgccacgtcagtggtgagcgtgttggagaacgccaacgctcagctggagcgcctcatcgacgatctgcgggaagagaacgcgctgtttcgcagtgcgctccaggaagacctgcggcggctgcgagacgaaacgaaggcggatcaggacagcgccattcagcgctacgaagaagcgcttcgcaaggtcgtgacggcggccctctcgcaaccctctcccaaaggctctggtgcggccaaggtgcccgcaaccggacccatgactgctccacgcacctaa

SEQ ID NO: 509631 - DNA, 399 bp, Stenotrophomonas maltophilia; identical to SEQ ID NO: 350297

SEQ ID NO: 509632 - DNA, 348 bp, Stenotrophomonas maltophilia; identical to SEQ ID NO: 337128

SEQ ID NO: 509633 - DNA, 276 bp, Stenotrophomonas maltophilia; identical to SEQ ID NO: 337127

SEQ ID NO: 509634 - DNA, 228 bp, Stenotrophomonas maltophilia
atgagcatcagcagcgccaagggcatgctcgcccgcctcaagcacttggagcgctcgcaaggtgcgaccgacgagatgcgaggctgggtcagtgacatgctcggcgctgccattgctgacggtcgcatgtgcccggtcgatggccctgtggtgctgcactgcgtgatgaactggatcgacgacggcaccgcacgcgccgggactgctggctgggggttgctgcgatga

SEQ ID NO: 509635 - DNA, 183 bp, Stenotrophomonas maltophilia
atgaagaacctgcacaccgacccgcgcgagaacgcgcccgtcaagcacacggtaacgcccgacgacctgcaacagattcagcagcgccgcatcgaggcgcatgcagcccgcgagactagcgacgcgctgaacctgctccgcgctttcaagctgggcgaggcgctgcgcgaggcacgggagtaa

SEQ ID NO: 509636 - DNA, 213 bp, Stenotrophomonas maltophilia
atgagcatctatgacaccgacagcattccgctgaatggctgggcgcggccaaagatcgagcgcccgatcgacacgccgcaggggcaagccgatctcaagctgattgtcgagacctgctacgccgcgatcctcaactgcgacgaccctgccgtgcgctggcaggccgcgcgcctgttgcaagcaatcggcccattgaaaggaaccctgcaatga

SEQ ID NO: 509637 - DNA, 474 bp, Stenotrophomonas maltophilia
gtgtccgaatcccaaacgcctgaatggctcaagacatggcaggactcccctgctgcgcaggagccgccgcaccgtggcgggttcttgcccggagtgagcggaaatcctcggggcaggccggtcgggtcgcggaacaagaagaacgtcatcgctgacgagcttgccaaggaaggtagcgcggtggcccgtgtggtcatggacgctgcgcttgccggtgatatgcaggccgccaacatggtgctgcaacgtctgtcgcctccgctccgtgcccgcgctgaaaaggtgacgtttgaactgaccccggacgcgcccctgcacgagcaggccaatcaggtgctcgcgtcggtggcggaaggcgcgattgacccggagaccggaaagctgcttatcgactgtatccagtcggtggcgggcatccgtgccgttgatgaactggaagcgcgccttatcgcgctggaggagaaacaagcatga

SEQ ID NO: 509638 - DNA, 717 bp, Stenotrophomonas maltophilia
atgcctaccgaaattgatgcccgtatcacgcccacgctgcaccccgacaacgtcgcaagcattgacggctttgacgagcagaccgcgccgtatctcgcgcccaccatgaccgcgttcagcaccgcctatgaaggcattcgtgctgtccatgaggcgcgggagaaagccaaaaccaatccgacttggaatgaagcgcatcagatcattcacacggacgacttcgcgcaaaagcacctcgctcgtatcaccaaaagtttcgacgtaacccgctcgaacttggagaagggtattgcgatgctggagcagcagcttgcaacgccacttgaatccaaggcagcgcagagcgtcagcgctgagattcgcgcctacgccaagaacctgcccagcgaacagcgccacaagttcatccagcaagccattgacgagggtgaccacacttcagtcgcggcgcttctgggtgccccgccatatctgtccggcctcgatgcgaacttccagcagacctatgttcgtttctggaacgagcgcagcgctcccgaagttgcccagcgcctcaaggcgatgaagggtgccaagcagatgatcgaagagcgggccggattggtgttcaaagagcttgagaaggctgttggcgcgcccccgcacaaggccgccgctcttcggaaagccaagacggaagcggagcaagccttcgtcctcaaggacattggccagtga

SEQ ID NO: 509639 - DNA, 483 bp, Stenotrophomonas maltophilia
atggaagccaagacctacacgaaccggaacaacgcccgccgcgctggtgttgccgcaggggtgcccgctgaactggtggaaatcaccgtgcataagaacggcgacgaggtgcgctttggctggaaggcgaagcagccgcccgcaagcgctgcgcagggtgcggccagtaccccagcggcgaccgctaccgaaagcgagcctgtagcgcccgctgtcgccgtgcagggggtgaccacaagcaaggcgaagaaagcagccgccccgaaggtggagcgtgaagaacgcaacggcgtcaagcgcccgcgtgcgggtggcctgtgcgctgcggtctgggcgtggctggacgcgcacccgggcgcaacgatcaaggacgcgaaagctgccgccactgaccacggttggaacgagaacaacgtggcctgcgagttttacgtctggaggcgatttaacgggctgtcacgcgccaccgctgcaattgggtga

SEQ ID NO: 509640 - DNA, 1347 bp, Stenotrophomonas maltophilia
atggacgaacacactgtaggacatgccggttcaggcggctctgatattttgcaggcggcacagccgccgctacagcacggccagcatgcgggccaatggggtaacggcggccaacatgcaaacgtggccccagccgccgcacagccgcccagcagccccgaaagccaagggttcttttggaaagataacgtaggctttgccagtagcttccttgacgaggtggagcgcagggcgcagcgggcacaaacggagctattcaagctcggtgccgcaatatcaaccgaagagtggtggcatgcacgggttgcacagcctgccattgtggaagactggttccacgaggacgttggcgtattcgtcgcaccgggcggcacgggcaagacgacgctgctgctgtttcaggtcatccatatcgtgcttgggcgcgatctgttcggtcaccgagtgctgaatcccggcccggtcatcattctcacagcagaggacagccgtgaaacgctggttgcccgcctgcggcacatgtgccagcaacttcgtctgtcgcaggacgaggaacggcaagtccgtgaagaagtgaatatcacagacgtatcaggcaaagggttcaaactcaccacagtggaaaaggatgtggtggcaccgagcaagctccttgaccgattcgtcgtcaatgcctccgaactgcacccgtcgctaatcatcattgacccaatggtgtcgttcggcgtcggtgaaagccgtatcaacgattctgagcagggtctgattgatgccgcgcggcggatcaagaacgaactgcggtgcgcggtgctctacgttcatcacaccggcaaggcgaacgcgcgggatgcgtcgctagaccagtacagcgggcgcggcggcagcgcgctggcagacggggcgcgcatggtgcatgtgcttcagcggcttgaccacgaagcatggacggaagcaaccggcgacgaactgacggacgacgattcggggttcgtgcttgcgcggccaaagatgacatggtgcgcaccacagccccacgtctatctcaagaggcgcggctatttgtttgagcggtttgacgctgttgcagcgaccgaaggtgctggcgctgtgattgacagagatgcggaaaagattttccagttcgtgcgcgaggaatacctacacggcaagaagtacagccagaacgaccttattcatatgaagctggttggctcacagagcaggctgcgcgccgccgtgtcgcggctgaaggctgacaaccggctgatggacgagaaactaaccacaaccggccaaggcggcgcacggcagttcctacgaccgatggagctaccgcagcaggcctaa

SEQ ID NO: 509641 - DNA, 246 bp, Stenotrophomonas maltophilia
atgaccacaatttccgcgctcgacccgaacctgcgcactaacaaagaagctgccaagcggctcaagatcaagcccaacaccctcgaaatctggcggggcaagggcaaaggcccgaagttcatcaagctgggcgattcaaagcaggctcccatccgctatcgggattccgatattgacgagtggttggagcagcaatccttccgcagtaccagcgcctacgcgccgaacgccaaacaagctgtttga

SEQ ID NO: 509642 - DNA, 1233 bp, Stenotrophomonas maltophilia
atgcctaagctgacgaagaactacatcgacaagatcaccgcgcccgctgacaaagaggcgttccactgggacgactcgctcaaggggttcggccttcgggtcactcctaccggcaagatcacctacatcgtgcaggggcgcgtcaatggcagttcgccccgcatcagtatcggcccgcatggggtcttcaccgtcgatcaagcccgtgatgttgcgcgcgagcacctgcgcagcatgcgcatgggcatcgacccgcgcgccgtcgccaagaaggaagcagcccagcgcgtgaccctccgcgacgtggccgacgcctacaagcgcgaccgccccttgaaggacagcagcaaggccgagattgaacgccatgtgaccacaacctttgaggcatggctcaagaagccgctcagggacatcaaccgcgagatggtcacgaagcggttcaacgacatcaaaaacaacggcacgcgcggcgatgggccagccccagcgcaggcgaaccagtcaatggcggtgcttcgcgccttgttcaactacgccatccgtgaataccgcgagccggacgggtcgccagttctgacggataaccccgtcgatgtgctctataagaagtgggtgccgctcaagccccgcaccagccgcgtgccggatagcaaggtcggcgcggtgtggtcattccttacccatgcccgcgaccaagcctacaaccgcgacacgctggcaagcatcgacctcgtgatgctgctcatactcaccggcctgcggattggcgagtgcagcgaactgacatgggacagggtcaaccttgaggaaggctggattcacatacccgacccgaagaacagcaaccccgtatggctgccgctatccacgcaggcggtgcagttgctgaccacgcgccagcgggtcaaaggtagcccgttcgtgttctcgtcctggggcaaggctggacacatcaaagacccgcgcgacaccatgaagaaggttagcgaggcggcaggtacgaagatcacgccgcacgacctgcgccgcacctttacgaccatcggcatcgccaattgcggcatcgacttgcacaaggtcgaattgctgacgaaccatgtgcccaagggtgtaaccgcacgccactaccttgagacttcgcacctgcaatatctcaagcctgaaacgcaacgcatatccgactggattgagcagcaggcagcggccttaaacgactgttcagaaagctaa

SEQ ID NO: 509643 - DNA, 1167 bp, Stenotrophomonas maltophilia
atgggcgcgctgttggctgccctggctcctgcggcgaccgaggccgccgatgtgtccggcatggctgctgccggggctgcggatgtctccggggtgtcggccgatgcgatcctgcctgcccccacgcccctgaccgccagccagacgctttacctggacgtctcgctcaacagcacgccgcgcggcctgctgccgttcaccgaaaaccgtggccggctgcaggccagcccggaagtgctgcgccagctcggcttcagcgcccgcggcgatgcgccggtctatctggaccagatcagcggggccgtggtgcgctacgacgcgcatatgcagaccctggccctggacgtgccactggacaagctgaccctgccgaccaccgtgctcagccagccgcagacccgcacaccggccggcagcgcctcgcccggcctgctgctgaactacgacgtgtatggcagccgggtcgacacgctcggcaacctcagtctcagctctgaactgcgcctgttcgggatcggcaacggcaccttcgagaacaccgcgatcagccgccgctaccagcaatccggtgaccgccgctggcgtggcgagagcgtgcgcctggacacccggtggagcctggacttccccgacagggcgatgaccctggacgtcggcgacttctacagtggtttcgtcgattggacccggcccgtgcgcatgggtggcctgcagatcggccgcaactacggcctgcagccctaccgcgtgctgacccctacgcccagcttcctcggccaggcggtggtgccgtccacggtcgagctgtacgtcgatggcctgcgccagtacagcgggcaggtgccggtcggtccattccagctggccgcgcagcccggcatcagcggcaccggcaatgcgcaggtggtggtgaccgatgcgttcggccgcatgcagacgctggatttcagtttctatggcacccagcagctgctggccaagggcctgtcggactggtcggtcggcgttggccgcctgcgtgaggatttcggccagcgctccttcgcctacgacgatcgcaccgtggccagtgccagctggcgcggcggcgtcagcgatgccttcaccagcgaagcacatgccgaaggcggcggtggcctggcccaggccggcatcggcggctggtga

SEQ ID NO: 509644 - DNA, 375 bp, Stenotrophomonas maltophilia
atgaagatatggttgcagttgggatcacattccctggtcgccattgcgttctcgcttctgggagcctttcacatcacccatggactacccagtctgaagcagcagtacagcgatgatcttgcgatgtccatccacgtgcttttcgacgaggatggtgaagcaagatcccaggctgaactgcagtccagaatctcatcccacatcgttaacatgctgttgctctcagccagctcatcggcaaaatcggatgcggagaatgagcgtttggcaacaatcagcaaacgcgtactcgcacaggacctcctgcgatacatcgagcgtgacgatgtacgacgcaacgctgtcttcgtggcgggcaacctggctgccgattga

SEQ ID NO: 509645 - DNA, 1968 bp, Stenotrophomonas maltophilia
atgcacaagcgctggctggccgccatcatcgtggcgggattgtggtgtggaaccgctgctgcgatcgatctgggcgcctatgtgcgagcggacaagttcggcgatgtcatgctgtctcccgggggcgattatctggccgcgaccgtgcctgcggacggcttcaccgctgtgatcatccttcgtacggacgacaacacgccggtgggcaacctgcgcccaccactcaattcgcatgtcttcggcctgcactgggtcaacaacgatcaggtgatgttcggtctggcgcagaagttcggtacccgcgatgcgccgtgggccaccggcgagctgctgacactggatgcacgcaccggacgaccggaactactggtgggctaccgcgaccttggcctgcgcgtgcggcccaagtaccggaggtcggccgcggcgttcctcagtgacgccctgcctggcgacgatgcgcacgtggtcatcgcagtaggcggatcgcggctggatgccaacggttatgcggcccagctggaactggcaagcggcaagcagcggctgctggcccgcgcgccgatgccgggtgcctcctatgtggtggatgcccgcggcgacgtacgtttcgtacagggcgccggtactgacaacgtccatcggctctaccaccgcaacggtggcgactgggcgctggtcaacgatgagaaacggagtggtcgcagcgaggcggcgctgggcttttccgccgacggccagctggcctacctgctcagcgagcagcccagcggccccgatgccatcgtcagctggaacccggccacgcaggagcgcaaggtcgtgctgcgcgatgaggttgtcgatccggcacgactgatccgcagcccgggcagcaccgtgccggtcggtgcgctgttcctgggaaacacgccgcatacccggttcttcgacgaaagctcggacgaggcacggttgtaccgcagcctggaggcggccttccccgggcgtgcagtattcatcacctccagtacccgcgacggtcgccggctgctggtggaaaccgggtccggttccaatccgggcgagttctacctctacgaccgcgaccgcaaccaggcacgcttcctgatggcgcgcagcgaatggattgacccggagagcactgcgtcggtgcggccggtcctgctgaaggcgcgtgacgggctggagctccatggattcctgacagtcccgcatggcagcactggccgtgacctgccgatggtggtggtgccgcatggtgggccgatcgggatattcgacaacggcagtttcgatcacgagaaccagttgctggccgctgccggctacgccgtgctgcagatcaatttccgcggctcgggcaactacggccgtgcccacagccgggcagcactggaacagtgggggcgcgcgatgcaggacgacgtgaccgacgccacgcgctgggcgatcagcgaaggcatcgccgatgcccggcgcatctgcatctacggtgccagctacggtgcctactcggcgatgatgggcgccgcgcgcgaaccggggctgtaccagtgcgcggccggctatgtgggcgtctacgacctgccgctgatgtttactggcggcgatatccaggaccgcgattccggaatgagctacctgcgcgagtggctgggtgatccggccacgctgggcgcggtctcgccggtcaacctggccgagcggatcaaggtgccggtgttcctggcggccggtggccaggacaagcgcgccccggtccagcacaccgagcgcatggaagcggcgctcaagcgtgccggtacgccggtggaaagcctgtactacaagaccgaagggcacggcttctatacccaggcccatcgcagcgagtactacggcaagctgctggccttcctgtcgcgcagcctgggtggcaagaccgccacgactgcggctgcggacggcaagggcagggcgccgtaa

SEQ ID NO: 509646 - DNA, 273 bp, Stenotrophomonas maltophilia
gtggcatccgccgcagcaggaggatgcgacggccggggcggccggcgtaccagcctcagaagggagcaccgcagcgatcacatagccttgccgctggatagcctcaaccgcctgttctacggcaagcaggccctcgatcttgaccacgccactgcccagatcgacgtccacctgggcgtgggggtcaagggcctgaatggcttgggtgaccgttcggacacagtgaccacaggtggcacactaagagtgtttgcgatgaacaacaagctctga

SEQ ID NO: 509647 - DNA, 207 bp, Stenotrophomonas maltophilia
atgaaacaacaagagcgtgccggtgaggccctcgcgcgtcagatgtatccggaagtccccatggccgaagtgcgcaacaagcgcgaggccgcagaacgagaagcaaagcccaaggaacttgcgccgggtcatcgctgcatcaacgggcagacgttccggcgcgtggaaaatggatgggtgcaggtttcttcatcctgcaccccgtga

SEQ ID NO: 509648 - DNA, 300 bp, Stenotrophomonas maltophilia
atgattaaggtcaccgtactggattcgcagatcaacgagcgtggcggcagcttcaccaacgaccgcaacgagaacgtcgagttcaccacccgcaagcagcgcggcaagctggaagcggatggctttgcatatccgttcgacgtgcgcctggacaagggccagcccggctatcaggcgggcgaatacgagctggatgttccggccatgctgcaggtcaataagggcgttgcaaccctgagcaagttcaccgtgctgcgcccgctgcagaaggctgcaccgcgcccggcggcgcaggcctaa

SEQ ID NO: 509649 - DNA, 333 bp, Stenotrophomonas maltophilia
atgtttgcgctgtcgaaagtgaccttgctcatgtgtctcacgctatgccttctggcctgcactcaacccggtagcaccaacaacaatgtggttgcagggagcagaagcgaaagctacggccacgagtctgcagcgctgatggaggccaaagcccgctctggcgacgggcacgctcaggcgttggtcgagaatcactatcgcgagataggcaaagcagcaatgtacaggcaatggatggaggagtgggtttccagaggagacctcgcatcgatgcagcgcctcgcttcccatctcattccgttgggcggaatcgagaattggcgccgggcttaa

SEQ ID NO: 509650 - DNA, 165 bp, Stenotrophomonas maltophilia
atgaagtacccggggttcatccgttctgcgacgccgctgcgggctgcaggcgcttggggaaacgccagcaagctggtgggcgaggacaatctggccaccttcaccgtgaccaccggcgacagcagcagtgtgacggcggaccttcatgaccgcccgctagtatga

SEQ ID NO: 509651 - DNA, 1038 bp, Stenotrophomonas maltophilia
atggccgacacaccggttttccagggacaccatctgatcgaacagaatgcgttcgaacaaagccagctgctgaagtcgcttgccaggagtggtcatttcacgctccacggttccgacaacatcctcaacctgcccgcgaaccccgcgctggcaatccggttgggtatatcgccgcactcgggcggcccgttgagtgcgtactcggatcaactgaagttcgttctcgacgacctcgcagaaacctacgatggccgagcgctgttggcgaaggattctgcgccggatgtgcgcgctgccgccgccgagcgtatggctgcccgcatccagaacctggagttcacgcttcgcgccggcatcctcaacggcgacctggtcaccaacacgccggagaacatgaccccggccgaagccaacgccaggatccgcaccttcttcgccgatctggacggctaccagcgcacccacgccgcgcagattgcggaactgaagaccctcaacccgaccgagttgcgctggcgcggcgtcacccgctccgaagccaacgtgacggcggcgctggatgccatcgaccaatccggcaactccaccctgagcgagcgctgggggggccgcgcatcgttgggcaccgcaatccaggaggccaaccagggcggccgcctgccgctgagcgagcacaccgcggcccgcgtgcgtacggcgttcaacccggagatgccactgaccatcgtgcgccctggcccggcaaccaccgctccggaactggccggctctgctgggcgcgctggcgctgcggaaggcgccgccgaagctgccaccgcgcggggacagattaccggcgcacgcgtactcggggccgcgggtgttgccgcactggccgtggacttcgccatcaccggccaccgcgtggctgagttgcacagcgagggcaacaacgccggcgcaaaatctgcggccacccacttcgtggggcgcactgcaggcggcttcggcggcggcttcctgttgggcgcggggtacggattggtcaccggctcgtga

SEQ ID NO: 509652 - DNA, 159 bp, Stenotrophomonas maltophilia
atggcacagcagaacccgaaccagaagcagcagggccagcagaaccagcaggatcagcagcagggtcgtggccgcgaccagcagcagcaacagcagcaggaacagcagcagcgcaaccagcgcaaccagcagcagggtgggcaggacgaggaagagtga

SEQ ID NO: 509653 - DNA, 717 bp, Stenotrophomonas maltophilia
atgcgccgcactctgcttttgcttgccctgctgtctgcccacctgcccgcgccggcagcggagcgtcccgcttctcccgaagaagacgcgacactgatcaatgccggcttcctcgacagccacccagacatcatgtatcggcaatggggagtcgccgcgctgcatcggaatgacgtcaaggcggccatggatcatttccgccgggccgcgcgctatgcggacaagccggctcagggctacctcggcgaaatgtactggttcggggtggaccagccacgcgaccctgtaatggcgttcgcgtggatggatgtggccgcagaacgtggctatccgttgttctccgaactgcgcgacgaatactgggcaaccctgccgctggagcagcaccaggcagcccgcgctcaggcacaggcgctgcgcgccgagtttggtgatgtcgtggcacggccacgcatggcagacgttctcagaaagggccgccgggaaatgactggcagccgtaccggctcgatgagcaacaacgtcgatgtcgtcttcatggacggcggcatcagccgcaccatcaaagccgaccgtctgtacgaccccaagtactgggaccctaagcagtacgagcgctggcaggacgaaacctggatgaagatccgccggggcacggtgcaggtgggcgtaccgacccagaccaacgccaccgagaccaccgagaccaagccctga

SEQ ID NO: 509654 - DNA, 1224 bp, Stenotrophomonas maltophilia
atggcacaggtaatcaacaccaatacgatgtcgctcaacgctcagcgcaacctgagcaccagcggcaactcactggccaccaccatccagcgcctctcgtccggcctgcgcatcaacagcgcgaaggacgacgccgccggcctggcgatctcggagcgcttcagcacccagatccgcggcctggacgtggccatccgcaacgccaacgacggcatctcgctggcccaggtcgccgaaggctcgctgagcgaagtcggcaacaacctccagcgcatccgcgaactggccgtgcaggcctccaatgccaccaactccagcagcgaccgcaaggccctgcaggccgaagtgacccagctgatctcggaagtggaccgcgtcgccaagcagagcgacttcaacggcaccaagctgctggatggctcgttcaccagccagctgttccaggtcggcgccaatgccggccaggccattgcgatcaacagcgtcgtcgatgccaaggcagataccctgggcgcagcgacattcgccaacgtctacaacacccaggccatcgcggccgacaaggccacggccgatacgaccttctccggcctgcagatcgacatcaccccgcccggcgcggctgccgccaccacgatcaaggttcccgacttcaccgtgaaggcaggcgaatccatcaccgccgccacggctgctgcagtcaacagccgcctgggtgaaaccggcgtaatggcgaagctggacgccggcaagctctcgctgcactcggcggcggctggccagaccttcgccttgtcggtcagcgccaccccgaccaccggcgcaactgcagtggacgcaaactttgccaacatcggcctgcagcaggttgcagccggcacaggtggcacgctgaccggcgcaaccgcacgccatgtcgaagacctcaatgtgagcaccgttgagggtgcccagcaggcgctgtcgatcgtcgataaggctcttgagtcggtcaatagcgtccgcgccgacctcggcgcgatccagaaccgcttcacctcggtggtggccaacctgcagacctcctcggagaacctgtcggcatcgcgcagccgcatccgcgataccgacttcgccaaggaaaccgccgaactgacccgcacccagatcctgcagcaggccggtacggccatgctggcccaggccaaccaggtaccgcagaacgtgctcagcctgctgcgctga

SEQ ID NO: 509655 - DNA, 1191 bp, Stenotrophomonas maltophilia
atggccaagggtaagttcgagcgcaccaagccgcacgtcaacgtcggcaccatcggtcacgtcgaccacggcaagaccacgctgaccgccgcactgaccaagatcggtgccgagcgcttcggtggcgagttcaaggactactcctcgatcgacgccgctccggaagaaaaggctcgtggtatcacgatctcgaccgcgcacgtcgaatacgaatccccggtccgtcactacgcccacgtcgattgcccgggccatgctgactacgtcaagaacatgatcaccggtgccgcccagatggatggcgcgatcctggtgtgctcggccgctgacggcccgatgccgcagacccgcgagcacatcctgctgtcgcgtcaggtcggcgtgccgtacatcgtcgtgttcctgaacaaggccgacatggtggacgacgccgagctgctcgagctggtcgagatggaagtgcgcgagctgctgagcaagtacgacttcccgggcgacgacaccccgatcatcgctggttcggcccgtctggcgctggaaggcgaccagagcgacatcggcgtgccggccatcctgaagctggtcgacgccctggacagctggattccggagccggagcgcgcgatcgacaagccgttcctgatgccggtggaagacgtgttctcgatctcgggccgcgtcaccgtggtgaccggtcgtatcgagcgcggcgtgatcaaggttggcgacgaaatcgaaatcgtcggcatccgtccggtgcagaagaccaccgtgaccggcgttgaaatgttccgcaagctgctggaccagggtcaggcaggcgacaacgctggcctgctgctgcgcggcaccaagcgtgacgacgtcgagcgtggccaggtcctggccaagccgggttcgatcaagccgcacaccaagttcgaaggcgaagtctacgtcctgtcgaaggacgagggcggtcgtcacaccccgttcttcaacggctaccgtccgcagttctacttccgcaccaccgacatcaccggcgcagctgctctgccggaaggcgtcgaaatggtgatgccgggtgacaacgtcaagatggtcgtcaccctgatcaacccggtggcaatggacgaaggcctgcgcttcgccatccgcgaaggcggccgtaccgtcggcgccggcgtggtctcgaagatcatcgagtaa

SEQ ID NO: 509656 - DNA, 186 bp, Stenotrophomonas maltophilia
atgggatcgcgtgagtggttgggttcagtcacgctgctcgggtgttctgaaagccctgcctccatctgttttagtcaactttgctcgggggttctggaggacgactgcaggggctattggttttggttcgggtgcctggaaagcgttgaccccatccgttttagtcaagcgagtggcctcggttga

SEQ ID NO: 509657 - DNA, 729 bp, Stenotrophomonas maltophilia
atgatcacggtccgacagcgaaatgccgaaaaggcggggtttggatacgagaaggtccgcctgaaatgcggccccggcccgaaacagtggatgtgcccacaaatgagccagccgctttcggtcgaaaaggcggccctgtcccacttcgcccagcaaggatggcgagggttcagcggcgaaggcggccttttgctgaccctcatcaaagccatgtcgttccagaaccttggatacgacgagcgcacgcgctacgtcgaggcgctctatacgctggccgcagaaccatcctacggacgatcctacaccgttgccgagttgctcacgaatctggcccgcgcaaccgccggtcaagtggcggctaactttgaccaaatggcgtctcggggtccacacatagagcaaacggcgtgggggcattcgtccgacacctcgtcagttctcgatgtgtttcccggcctggagcgctggatgctattggaactgtttgaagttgccggctctgatttgcttcaccgcattgccaccattttcgcctctaacccctacgaataccgccgcggctggccggacatcacgatgtggagggaacggcagctccgcttcgtggaggtcaaagctcctggcgactcgctgggcaagagtcagaaagtcattgcccaaaccttcgccgtcccattgggcctggacttcacgctccttgatgtcgtggtgccaccagcggtgccctag

SEQ ID NO: 509658 - DNA, 729 bp, Stenotrophomonas maltophilia
atgaaccaggttaggaagcgatggaataacgacgaaacgcgtggacaggtcgaacgaatctttggccgcgatcagttagagaaggtgcgttcttgcctacaggcactcaatgagcgcatttacttcagcgaataccactacaggcaagccaactatttcatcaagaagccgatggaaggccgaaccagcgatgaggccatgttggtttttttgggcgtatttgacgaagacgacgagcccggggcctgggaacactttcgcttttcccacgcccatgcatttgcttgcgtccagaaccttcactctctccccgaccacttggcctacttcgcctactgggcattaggaatggacttggatgaaaaaactcgtatccagcgcttgcgagacatcacccgaaaggaggtgaacagacgccttcctgagccactgaaagaggtctacagccaactcgttgcggacgaaagtttcgtctacatcgatgacctcaacaaccattccaagcatcgatccttgatcaaagtttcctatcaaacgaagtttgagatagatcaggtaaaggaacatggcttgcagttcggcgagttcaccttcggagacagatcctatcccgcccgctgggtgctggagacgctgcgaaaagaacataaccgtcaaagcaagttcatcgtggcgttcggcaacgaactgaacgccacgctccaagccatgccggcacgggttggctaa

SEQ ID NO: 509659 - DNA, 1311 bp, Stenotrophomonas maltophilia
atggaggatgcggaagaggatgccagtaaggcaaagaccagtacgacgattggtaagcttttaatagacatggtcgcagctattcaagaaaggcatcaggcggatctatcgccgcaccttttggcaatcgttggaatgctttccgctgagggtgcagaacgatttgaagagctggggaggattgacgcctccatcaatcaaaaaatcgccgatctgttccctggggtgagcatcaagctggatttccccgtccctgtgttgaacgacctcatcaaggcgggaaccgtcaaggtctatgagggagacggaaagggcaggggatttggttcatacgggcatggtgcccagcgcgctattcagatggcaatggtgcgccacctggctgacctcaagcgaggcgttgccatagccggtggagtgacgctgctgctgattgatgagcccgagctgttcatgcatccctttgctgtagagcaggttcgcgaagcactgagggcactttccgcgtcgggctatcaggtggtcttttcgacccactctgctcaaatgatcctcgcgcgcgacgctaaaaatgctttgttgatgacgaagaagcatccgcaggggacccaagcaaggcccaggcttcagtcggtggtcgagcagttggttgccgagcctacgcatcagctccaccagatcttcagtttgaccaactcttcccagatgctcttcgctgacaaggtggtcttgaccgagggaaagacagagctccggttgctccccagcctcttcaatgcagtctccggcaagaccatggggcagtcttcgctcgcgattgtcgcgatgagcggcgtctcggatacccagaagtccatggagatcctggaggcgctgggccttccagcatgcgcgattgtggaccttgattacgcgtttcggcaggccaccaagcacggtttccttgacccgagcgacactgatatcgctacatgccgctcgatgctaagaacgatggcggacgagggtcagatcaccttggacgaagggggactccctaagaagggcccccagggcccggcctcgaaggctttcgagcttctagcggaaagagtagaagcattgccgcacatccaggcactcgtccgaaagcttcgggacaaatcgatctggctatggagccggggtgccatcgagcctcatgttgggctgaccgaaaagaaggagcacgcctggctggcgttccaagtgaaggtcgaaagcgatggggtggatgcagcatgtgcggacgcagcaagcgtgcgagaactcgtggagtggctggctcgctaa

SEQ ID NO: 509660 - DNA, 192 bp, Stenotrophomonas maltophilia
atgggaatgaagcattcaacacgtacgcatggccaggacgcactgtcgctggccatcgcgctggccctggccgccgccgtcgttccggccggcgccgccgcgcagcaggcaaccaccaccggctcgcaggaagccaccaacctggagcgtccaggtcaccggctaccgctacgccatcgaaaagagccttga

SEQ ID NO: 509661 - DNA, 303 bp, Stenotrophomonas maltophilia
atgcacgcacgtacgtccgtccttgaactggcggtgttcaccgtcaagcccgaggcacgcgctgacatgcccaaactgcgcatgcaactgcgcgcggtgatcgcccagttcccagggttgatcgattaccagccgttctcgccgatggacggtgatgatcgcttcgtcgatatcgcgcactggcaggacctggccagcgcacaggcagtggcacaggccttcgctgaaggcgatgcgcgattcgcgccatacatggcggtcatcgaggaactgcagctgatgcagcacttcctgccaggctga

SEQ ID NO: 509662 - DNA, 681 bp, Stenotrophomonas maltophilia
atgcgtaaagctgaccgcctgttccagctggtcaacctgatccgtgtacggcagccggtgaccgccgccgtgctggcggcggagctgggcctgtcggtacgtagcatctatcgctacatcgatgacctgtccgtggccggtattccggtctacggcgaggcgggcatcggctatcggctcgacccgggtttcgaactgcccccgctgagcctggatgcggccgaggcagaggcactgcagctggccgtggaaatgctggcctgtagtggcgctggccacctgcaaccggcggcgcgttcgctgctgcacaagctgcaggcggcgatgcccgagcgtgctgccagcccacgcactgcccgcgcgctgcgtgccatacccgtttcactgcggtgttggcagccactgcatgcggccatcgccgaccgccgcagcgtccaactgcgctaccgcagccggcagggtgacatcagtcaacgtagcgtgttcccgctgggcttattccactgggggcagcactggacgctgggcagctggtgcgcgctgcggcaggactatcgcgacttccgcctcgaccagatcgaggcgatggacgatgccgttgacgtgccgttgcctgcctgggtcacgctcgaagcgtatctgcaacaccagcaacgggcctgggaacagcgcgcgcactga

SEQ ID NO: 509663 - DNA, 495 bp, Stenotrophomonas maltophilia
atggcaaccaagaaagctgcgaagaaaaagcccgccgccaagaaggcggtgaagaaggtcgcgaagaaggccgctgccaagaaggcagtgaagaaggtcgcgaagaaggcgaccgccaagaaggcagtgaagaaggctgcgaagaaggtcgccaagaaggccactgcgaagaaggcagtgaagaaggcggcgaagaaggtagccaagaagtctcctgccaagaagaccgcgaagaaggccgtcaagaaggccaccaagaagactgccaagaaggcaacggcccgcaagccggccaagaaggtcgcgaagaaggcgactgccaagaaggccgtcaagaagaccgccaagaaggcagtgaagaagaccgcgaagaaggccaccaagaaggctgccccgaagaaggcagcgaagaaggttgccaagcgcaagccggccgcccgcaagaagaaggccgctccggtcgctctgccggcaaccccggcgccgctgatctaa

SEQ ID NO: 509664 - DNA, 1524 bp, Stenotrophomonas maltophilia
atgctgtacgacgtcgtcattgccggtgctggcccggttggcctgttcctgtcctgcgaactggccctggccgggtgttcggtgctggtgctggagcaggccgggtccgccggttcgccgttgaagcgcctgccatccgggctgcgcggcctcaacgcccccacgctggaggcacttgatcggcgcggcctgttggacgcggtcgccgcgacgcaggtgctcaagcccgacaagggcgcgccgccgcccggcaccgctcattggctggcgcaaccgcgggcgttgggcggccacttcgccggaataccgtttgcgttggacgacgtcgaccacacgcgctggacctggcgcctgccgacgccggtgggcacccagatggcggtggaattgcaggccctggaaacggtgtttgccgaacgtgcgactgcgctgggcgtgcgcatcgaacgcgggcgtgtggtacagacggtggatgcgcacgaggcgcaggttgccgtgcacaccggctccggcagggtccacggccgctggctggtcggttgtgatggggcccgcagcacggtacgcaagcaatcgggcttcctcttcgctggaaccgggccagagttcaccggttacacgctgctggtcgaactggcagatgggtgtgtactcacaccaggccgacagttcaccgatcacgggatgtgcaatttcaacccgccaggcatgctggcgctggccgatttcgatggtggcgccggccatcgcacgccactggaccggcacaccgcgcaagcgttgctgcggcgggtgtctggccgcgaggcaacgatcaccgcattgcacctggccacgacatggaccgatgctgcgcgccaggcgacggcctatcgcagcggacgtgtgctgttggcaggtgatgccgcgcacatgcattcgccgttgggcggccagggactgaacctcggcatcggcgatgcgatgaacctcggttggaagctggccgccgtggcgcggggcaaggccgatgaggcgctgctggacagctatcaggctgagcgccatccggtgggcgccaaggtgctggactggtcgcgcgcgcaggttgcgctgatgcgacccggggccggttcgcgcgcgctggcagcgatcatggccgacctggccggcacccgcgatggggccacgtatctggccgagcggatctggggtgtttcgcagcagctggatcttgacggagaccacccgctggtcggcaggagcgcgccggacttccggttggtcgatggccgccgcctgggcgaactgctgagagcggggcagggggcgctgcttgttttcgacccggcgtcttcgccaccgcagcatggccaacgctggcagccttccatcgcctgcgccgcagataccggggatgtggcgtcgggcctgggggcggtgctggtgcgcccggatggcatcgttgcctgggcctgtggcacacggggggatatgtccggcctcgattcagcgcttgcttcctggaccggtccgatccggtga

SEQ ID NO: 509665 - DNA, 1728 bp, Stenotrophomonas maltophilia
atggcattccgactgaagctcacccctgaacagctgagacagcttcgcagcaccctgcgcccgaagctagacaagagcggtgcggtcgtcaccaacgccaaggggtatgcggtgctcgaacccaaccccgacggcaagcaatggcggttcctcgatggatccccaggcgcgcccattgggtttggggtgttcgtgggcaagctcaaatccacttatgaagttcagcgcaagatcggtggcaaggtcatgcgaatcagcgtgggggacaccagcgaactggccctcaaggacgcccacgacctggccggggtgaaggtggccggggccaagaaggaggggcagcaccccaaggcactggcggagaaggaactgtcgatccaagccaccaaggcgctgaccgttaaccaagcgatccagctctaccacgacatgctggcccgtcggacccgtccggcgaccgcgggcaccctcaagacgttgaccaattccatggcccgcttggagcggccggaggtgggcatcggccacaccccgatcatggaactggacgaagacaaggtcagtaaagccttcgaggccacccgcctgtcggccgccttgcattccaaccggttgtcccaggccatcaaggacgtcatggcgcggacggggcgggtggagctcaccgacgaagagctggccaaggtgggcgttgacagtgaggccatgcgcacccgcatccgggcggcgggggtgtcggcggccgaacagaccttctccaccgcgtttcgggcgattaactacgcggtggacaaagaggcccgcgctgccaagaaggccgagcgcaaggcggtgctgttcggaaacgactttggcgtgctgtgggaggaggggcggatgcgcgacgccgcgggccttcacgtctactacgagaaggcccgcgtccgaaacccgctggggagcgaagacaacacgctgggtcgggccatcgactacctgtggagccggcgagaagcccagcgggggcagaacgaaagcggggtttactacctgctcaccaccttgttcctgggcgcgcggcgcaacgagacggcaaagctggcgtggttcgaccggctcaccccggtcgagcgggaaacccagtcctgggtgtggctggatgagatggaccccaaggcccggcgagaggggcgcgtgtcggtgaacccgctcaccaagaagcctggcccgcaggtttattttgcaaaaacgaagaacaagcgcgaccacagcatgccgttgggcccgttctcgctccagctcatcaagcgtcggtttgatcaacgcctgccggtggacgaaccccgggggcggtgggtgtatccggcgcgcagctcgcgggcggcagaagggcactacaaagacagcaaggccatcatgaaaggcttgggggaaaagctgtcggtggaatttgggcccaccccgcacgacctgcggcggaccttggggcgctatgcaacgcgcgttgggatctccaaccgcatcaccagccggctgttcaatcaccttccgcaaaagaaggacggcgaggacgagggttccaagtcctcggtgcgctaccaggaaccggaatggtttgaactccaggatgcactgcagcgggtggagcagttgatggcgtcgagttcgcccgcgttctacaacatgctcaaaccggtggactggccgctgctccctccgcgcaacgacacggctactccgcaacaatag

SEQ ID NO: 509666 - DNA, 777 bp, Stenotrophomonas maltophilia
atggatggctctttccccttacaacgtgatcccgatctcgcctcgccggtcaccgacgccaataaatggcgccaggagattgccgaggccaaacaagggttgcgagccaagatcagcaccaaagcggctgcgcactacgtcggcgtgcaccacacaaccttgagggagtgggtgcgcgaaggccaagggccccagcccatgcagaacccggcaaaggccggcacgatggctcgaaaccagcacctgggtttcagcttggacgcgctggacgcgttcttggccagccgcagcggtgaacccatcacgcgcggcaaacgcaccgacgcggacgacgtggtccgcaaagccgaacgcatcgaagccttgatcgcgctgaaagaggctgaggaccggttggccaaggcccgggcccgggcgcggcggttgggcgtggtggcttacgcctcgctggccgacgtgctggagatccagccttgggtcaccctgggtgggcgcatcgcaggccacgcatgggcggtggacgacaccacgttcaacgccgccgatgaggaccagtgggaaggaaccttggaagaagcgttggcccagccttggacaagcacggaggcacgtgaggtttaccagaacgccttcgtggccgtgctcaccagcacacagcacctgatcaatgcggcacggtcgcggcagcttgccagtgatctggaagaacggtgggacagtgccacccacgaggcaaagccagtgcggccgttcgataaaggaagtggaaggctatga

SEQ ID NO: 509667 - DNA, 579 bp, Stenotrophomonas maltophilia
atgagcccgcgtgatccagacattctgggagggcgtcctggccggccatcgaaggatcccaagcccctggcgttgacagcggctgaagaggacgagttttccaaagcaaggtcaggcaagctggaatgggtcggccctggggtggccgcctacgtgttgggcatttcaaaagacgcgctgaagaagcgccggcaacgaaacgaagggctggtcccggagcacaaaccggtcaagagcaatcgtcaaggggcgcaataccggtggtcatcggtggtgcgttgcgccggtgccgaacgcattcaatccgacgtcctggcgcaacgcctcgacgacgtcgtggccgcgctgaagaaacttggccttgaaggcctggaaaaggaccttccctgggcttacaaccgcgccgatcgcctggtggggtttgcttcccttcacccacaactgcccgcgcgtgcgctcacggtgcttgaagccttggatgccccgtgggtgagcagcgaagcacgtcagcccttccacgactgggccatgggcgtgctccattccgcggccgaacgcgccgcgaaagccgccgattga

SEQ ID NO: 509668 - DNA, 234 bp, Stenotrophomonas maltophilia
atgaagaaattcactttcgaggtggtcaaggctgcagaagtcttgatgattggcgagatcagtgtcgagtccgaagacgaagctggtgcgaaggatctcgttcttgagtcggattgggaaaataaggtgttttgggacttcggacccggcatgcatttcgtgggtgatcttgatgaagacgacctcgaactgctgcgcatggaagagatggtggatggggagggggtcgcatga

SEQ ID NO: 509669 - DNA, 639 bp, Stenotrophomonas maltophilia
atgaacagcctgaaatatgaaggtgcattgaaccaggcgccgtcgcgcagccctggccgcccgcgtagtgaagcttcgcgagtcgctgtgctaaacgcgacgagcaaattgctcgaaacgtcgaaggtacgcgacttgagcattgaggcgattgccagtgaagcgggcgtgagcaaggcaaccatctaccgttggtggccgaataagaactcagtggtcatcgactcatttatcggccaaatgcacccaagcactccagagcccagtggccgctcagccatggacactctggctgaacatctgacagtgctagtgaagcagtacgggggggcgttaggtcgattagttgctgagatactggcggaaggccagtcggaccaggtcctttgcaacgcgttccgagagcgctttttcttgctccgccgcgcagccgttcgtgcagtgatagaaagaggtgttgctacgggcgagtttgtggctcgcctcaatattgacgccacattggacgcgctatatggcgcggtctacttccggctgctcatgggtcacgagccacttgatgcaagatttagcaaggcgctgattacgaccgcacgcacactcctgacatgtacactcttcaaaggagagagagcttga

SEQ ID NO: 509670 - DNA, 393 bp, Stenotrophomonas maltophilia
atgaacatgatcaattccgccagccagcccccgttccgctcgctcaagctggcagcatcccaagcgcatgatgaccttgacaccattgccggagcgctgaatggcctgcgcgatgcactggaagtccggggcggcaacgacgccatcaacagggataacctggcgatgctcttccacgccactgaggcacgcaacttgccggagggcgtcagtgatgaggggattggcgaggcccgcgctgcgatcatcgacctgatcagccccgaatccaacttgaacggcatctctcgcgcccgtgtgtggtcgctggtctgcctgctggccaagctgcaagaggttgccgtccaccggctcggcgagatcgtgcacggccatccagctctggatgcttga

SEQ ID NO: 509671 - DNA, 1176 bp, Stenotrophomonas maltophilia
atggaagtgctggacgttactagtgattggtttgatgatgatcaagattcggacatcgatgggcgtatcgatgagtatgagataagttcgtcgccaaacgattttaacgtcgctacgatctttagttttattaagtcgggcgccgttaagatccccggatttcagcgtcatttcgtttgggacatcaagcggtcgtctaagctaattgagtcgcttatacttggtcttcctgtcccccaggtgtttttatacgaagattcacgtaatagttttcttgtgatcgatggtcagcagcgcttaatgtccatttattactttgtgctgcagcgctttcctcggcaggataagcgtgcggagttgagggcaatatttgaccgatattctggtgaaataccggcatctatcattgatgatgatgactatttcgttccatttaagctgaaattgcctgagcagttgccagggcatccgagtcgatttaatggacttaattattcaaccctgggtgattacagggttgcatttgatcttcgtactgttcgaaacataattgttaagcagactacgtcaactggtaacgattccgctgtttttgagatttttaatcgtctcaattcggggggcgttaatttaactccccaggaaattcgggcgagcatgtatcactctgatttctacgctgttctccagcgaatgaactcaaagcctggttggaggcagatagttggtcgtgaggagctggatcttcacatgaaggacgtggagattcttcttagggcatttgcactgctgatcgattcagattcatatgctccgtcaatgacaaagttcttgaatctgttctctaaaaaatccaagagtaatagtcctgagcataatctctacttagaaagaatatttgatgaatttttgacggcgactagtcgcttgtcaagcaaggctttctttactcctgcaaataatcgattcaatatttctctgtttgagtccgtattctatgctgcctgcaagcctgtcttcgatctgagaggcatgcatattccggaggtgtcagaggcgctgctcaataaacttcgctccgagcctggttttgtatctgcatcctcagaaggtacaagtaagtcggagaacgtttcccgaaggctgggcttggcctccaccataatggcggggtga

SEQ ID NO: 509672 - DNA, 162 bp, Stenotrophomonas maltophilia
atgaaaaaagatacggaagcaagtttcaccagcgagcgcctcgcttttcattcaacgctgttgagaaaaatcctaactttggactcagagggaaacccttcaaattctgacaaggatagtggcccgagcaagagaatcggcaaacacatcgctcacaattga

SEQ ID NO: 509673 - DNA, 357 bp, Stenotrophomonas maltophilia
atgaagtctctgacgtacgcagtactgtgcttagcagcgctgattggttcagcgctcgcccacttccacttgccaaaaggcgatttggagctgaagacttaccccaaggtctcggctaccgaatttgctgtcatgcgcgaggaagccctaagcctagcggctgaagatgcaacgcttggtgccggacgctttgaagcaaggtacttcgaactcacttgcctaggtgagcccgctctgctggtggacaactcgtcatcacagttgctcatcctaggcttcataggccgagccagtgagacggcttgcgttcaacctctactccagcgctggagtagccgactacttccggccgattag

SEQ ID NO: 509674 - DNA, 789 bp, Stenotrophomonas maltophilia
atggaaattcttgcgcgcactgttgatcgcctcagagcgctgaatatggagaaaaaattctacctgctcggagcatcactgctggcggtgtggattttcgaggtggtaagaaccgggaatcagtacagcttccaggctgctcttgtcctaggctatacattgatggcgctggggttgatgacctggcttatcccagtccttcagggggcatggaggtatggctatgtgcgcaggctgatgctgatgctgcacttgggggttattcttgtggcggccatgatcgcgcgaaacatcatgactagcgcaaccggtctcccggggcaggatttcgtcatggctaccggagcgctagcgcttccgctttacatatttgtttggctgacgctggcaatgttgcttgtaggcttggcgaccgttgtctggcaaatcacgttgggattggtggcgctcggagtgccacttctggcgatgctgatcccttctgtcggccggcgtgtaaagagtagattggaagggaagaagaacatcgcactggcacggcttctgggcgtagttggattgttcggcgggcttcttgtctcaagtcaacagttgagggattttcaacccgagcttgagcgggtagggctttggattgcgtactatggcgattatcaagcagccgacaagtatccgggcttgcccgccgacgatcgcacgctgatgcacgccaacggtgtttactctgtggcgagacgtcagccgggcggcgttatctctattgaggtccattactggaaaatgccgtaa

SEQ ID NO: 509675 - DNA, 5043 bp, Stenotrophomonas maltophilia
atgaatcacgtctatcgtcgtatctggagtcacgccaagcagtgctgggtggtcggcagtgaattgaccgcgcgccgccgcatggcctcgtcggcatcggccacaagcgtgggcggcgtctgtgcgcttgcgcttgccatcggtctgctgctgccagaaagcgctcgagccgatgcggattacttcgcccgctgcgaggtggggagctacaaccttcattcctgcctgccaatgattggcgccgccgattcctatgtggcagcctcgggagtgtggggaaaaaagcgctatatcgcgatgggtaatggtgcctacgttggcggctcggaaagcacggtgtttggcattgaagccaagtcctacggcgatcgctcagcgtcatttggctaccgtgcaatcaacaacaagggctacagcgtcgcgctgggcgcgttcgcgacgactaatggcattggcggaatggcgatcggaaacgacgcaacgtccacctataacgacgccatagccattggcagtggtgcctccgcgggacgcaccggctattcgggagcgattgcgctgggtggaagtgcgcatgcggattaccacggcgtggcaatcggccacagggcggtggtctctgccgcagactccgtcgcgctcggccccaactcggaagcaaccgaacaaggggtcgttgcggttggaagcagcaggaacaggcgccgcatcgtcaatgtggctgacgggcgcttgaatgccacgagcacggatgccgttactgggaaacagttgttcgcgactcatacactggctgaatccgccagcaatcgggtggatgcggcggcgctggcgcttggcaaaggggcagtggcagagtcggatgtttcctatggggcgaatacatcgctgggcaatagcgccaagagctacaacggggcgagcgttgcgctcggcgacgacgcacgcgcaggcgtagatgtatcaggaaacaaggtcaatggcaggacaggaggggtctcggtcgggtccggtacccggagtgcgcatggcgccgtggccatgggacacaaggcagttgcagggggaaacttctccgttgcaatcggctccgatgccgtcgccaatgaggaattgagcaccgccttcggaaagagcagtatcgcgggcgcccagcagaccacggccttgggacgaggcacgcaggccacggcgaagttcgctaccgcagtgggtaatctagccagggcaacgggcatcagttcgctggcccttggaaacagcgcacatgctgggcatgaggacgccgtcgcgattggcgccggttcggtaaccgcttcgaccagctccgtatcggtcggtagcgccagcaggaagcggaagatccagtacgttgctgatggtgtagtggcttcaggcagcgccgatgccgtcaccggcaaccagttgttccagaccaatacccggctctcggccgtggagaagaccgcaggcgatgtcacgggcgaactggccgcggtcaagtcaatcgctcaggctgcgacgagccgcatcgatgcgacgaccttggcgttgggcagaggtgccaccgcagagaacggcagcttcggcatcagcaccgcactcggcaacaacgccaaagcgtacaacggtcgcagcgtagcgctgggcgacgacgcgcgcgctggtgtggatgcggacggtaacaaggcggccaaccagaatgcgggcgtctcggtcggcgccggaacccgtagcgccaacggggccgttgcaaccggcttccgtgcaaacgcaagcggcaacttctctattgctgtgggcggcgacgccaaggccgaggccgagcacggtacggcggttggttatctgagcaaagccagcgccagccaagccaccgcactggggcgtggcagcgaggcgacggcgcagttcgccagcgcgttgggcaatctggccaaggctacgaacaccagctccgtggcattgggtgaccgcgcccaggcctctcatgagaacgctgttgcgctgggtgcaggtgcagtgaccgcctcggccaattcagtatcggttggcagcgccagccggaagcggaagatccagtatatcgccgatggcgcggtgggagccggcagtaccgatgccgtcaccggcaaccagcttcatgccaccaaccaagcggttaccaaggcccagacagccgctgacgcagcgacgacgactgccaacgccgcaaaggcggaatcgggcaaggcgctggccgaggcggtggcgctggggggcctggttaaccagaccgctgtcaatggcaacgttcgcattggcgagaagaacagcggcaccgtgctcgatgtgcgtaacagcgcgaacgcgaatcggaagctgaccggcgtggccgatggtgcggttggcaccagcagctatgacgccgtcaacggcaggcagctcaacgccaccaatgacacggtggcggcggtggagggtgtggccaggtctgcgggcgcagatgctgccgtggcgaagacggatgcggccaaggcgttggtcgaaacagcggcgctgggcgggcttgtggcccaggtgtctgcgtctggtgatgtgcgtttgggggggaagaacagcggttcgacgttggacgtgcgcaacagcgccaatgccaatcggaagatcagtggtgtggcggatggattggtgagcgccagcagtgctgaggctgtgtccggaaaacaactgtattcaaccaatacacggatttcagttctggaagatgcaagtcagttcctaagcattggcgtcgcacccactagcgaacgcgccgatgctggaatggcgggggttgctgtaggcaactcagccaaaaccggcagcgatgggggaactgcggtgggaactctggcaaaggccctcggtagaaactctgtggccattggtcgcgcttcagttgtgcatgagaattccgatagtggatttgcactaggtgctggagcggaggttggcattgctagtggcggcgcgcggggaggtgttgctatcggtgccggagcaaaggtaggcagcggagcgaatggttcgcttgcgattggcgaaggctctcaggcgaatgaggctggagttgcatcatttggaagtgcaactgcttatcgccggctggtgaacgtcgcccgagggaccgccgaccacaacgccaccaccgtctcccagctcaaggattccctcgctaccctcgggggcggagcaagcatggacgcaagcggcaacatcaccgccccgacctacacggtgcagggtggatcgcagaacaccgtcgaggatgcactgatggcactcgatggcgctgtcatcaccgcagtccaccgtgcggacaaggtggaaggccagctgagttcgatcttccaggattcaccttccgcccgtgccgatggcatgaaccagatcgcgctgaatggcgtgaatggcatggtgctgaccaacctggccgacggacgcgtggcgccaggaagccgtgaagccgtaactggcagtcagttgcacgccgccgagcagaagatctcgcagaatcggaatgatctggaggcgatgcgcaaggagcgggagatgggcgagcaggcaatgcgtggattggaagggagcggtccgatcgacttcggcggtgcgcgtttgactggtgtggccgacggttcagtttctgcggatagtcacgatgtggttaccggtcgccagttgtttggcgtcagtgatcgggtatccaagattgagcatcagggccgcttcctcaagatcgacacggatcagctgagcgaagatgccttcgcaggcttcttgggcgttgcaattggtgactcggctcgcacgcaggaagagggagggattgcgctgggcgcatactcctcggcattaggtatgaattcagtcgcgcttggtcgtggggctggagtctcgagtaaggcatcgaatgcgtttgcgatgggtgccggctcccaagtgtatgcggccagtggaatagcgcttggagcagcggcaatagtcgaagcatcggcgaagggttcgctggcactaggggttggctcagctgcaaatgaggtcaataccgcgtcctttgggaacgctacgaccaagcgccgtctcgtaaacatcgccaacggcaccgccaaccacaacgctgccaccgtcggccagctgcgcggcgcgctctccgctctgggaagcgaagtcgatgccaacggcaacatcgtcggcccccgcttcaacgtacagggccagtcccaatccacactcaatggcgcattggaagcgctcgacggtggagtcgtcagcaccacctcgcgggtgaaccaggtcgaatcccagctccgctccgtgttccaggagaccccctcggtccgcgcagacggcgcccagcagctcaccctggccggcgccaacggcatggtcatctccaacgtggccaacggcctgatcgcggccggcagccgcgatgccgtcaacggtggccagctgcattcgatgcagcagcagctcaatggccgcatggatgggctggagcagcgcattgacgatcagccgcaggcccgcgccatggccgcagcgtccacgccttcgccatccaccgaagagatcgcgccgacgccggaaaccagcggttctccgcagattgcctcaaccggtgaaggtgacaagcccacgccgcagccgaagtcgaagcaggacgacacccccaagccgcaggttgataccgccgacctggaaaagatgctggcccgtgccaacgagtacaccgatggtgcaatcagcaccttcgagcgtcgcctggacaagatggacaagcgcttcaaccgcatggcggcgatgagcagcgcgcagagtgcgatggcgatgaacaccgccggcctggccacctacaaccgcctgggtgcgggcgtgggctacagcgagggtgagtcggcgatggcggtgggttaccagcgtgtgctgaacgagaagggttcggccaccttcagcctcaatggtgcgttcaccaacagcggtgagcgcagcatgggcgtcggtgtgggcatcggctggtaa

SEQ ID NO: 509676 - DNA, 708 bp, Stenotrophomonas maltophilia
atggtcgaacccttgcagatcgccggtcgacggacttggctgaagcagcatgatggcgagcggcgctggttggcgttggccgcgctggacctcggcgtgcgcctgctcggtctgcgctgcctgcggcccccgccgcgattgaaggccgaacaggcctgccagctggagcgccggcggctgcgcgagctggccgcacatggggtgccggtgccctgcgtgctgggccatggtgaaaccgccctgctgctggaggatggtggtccgagtctggcgcagcgcctgcgctgttgcgggcccggagaagccgagcacctgatgcggcttgccgccaacgagctgctgcgcgtgcactgggccggctgctgtgtcggccagcctgtggcgcgcaacatcgcggtggatgaggcgggttgcgtacgcttcctcgacctcgaagaagatcccctgcaggtgatggtgctggccgaagcgcaggcgcgcgactggctgctgttcatcagtgggagtgtccgccatgcggggctgcccgccggcgcgctggtcgccgtgatcggccactgcctgcggcagaccggacctgacgtccagcagctgctacgtggtgcggtgtgccgcctgtggttcctgccggcgctgtgccgcttcgctggctgccgcgcaagggggctgggcgacagcgtgctcatcctgcgccgcgcgctggcctga

SEQ ID NO: 509677 - DNA, 561 bp, Stenotrophomonas maltophilia
gtgattctgcctgtcttccccgttccccgagccgtcctgcggcggcggcgccgcctgtcctggattgccacgctggccctgttgccggtcctgccggcggcggcagaaaccagcccttcgataggcctgcagctgggccatggccgtggtgactaccagcgggcaggcgtgatctgggacagtggcccactttggcaacgtgagctggcatcggggcggcaactggagctggcgatggagctgggctttgcgcggtggcaggccagcgatccgcagcgtcagcacgcctggcaggccagtgccatcccgatgctgcgctggtggccgaacgcacatctgttcatcgaagctggggtcggcccgaccgtgttcgataccacccgtgttggcggtcgtcgcatcagtaccgccttccagttcggtgaccacctggggatcggactgcaagtagccgaacgccacagcgtctcgctgcgctactcgcattactccaacgcaagcatcaagaagcccaacccggggctggacctgctgcagctcagctggcgcgtggagtactga

SEQ ID NO: 509678 - DNA, 1305 bp, Stenotrophomonas maltophilia
gtgctgcgcttcttcctgcggctgctggtgctcgcgagcattggattcggcgtggcgctttggacagtgccactgctgctgcaggagcgtttcagcgacgatgctgacgtctactaccgcgatgcggtgcgcggccccctgtttaccctgggcgaactgctgcaggaccgcagcgctgtcgatcgcgcggccgaactgcaacgtctggcgccgcactatgggccggcgctggaactgctggcgtccgacgctgtgcagccgcgcgcggaggagcagcaggtgctgctcgagtacggcatcctcgcccgcaatgaccagcaggatttctatcggctgctccccgggcacgccgctgcgccagcgcagtggctgcatctgaggctgccgagttcaccgccgctggacccgaccaccatcgcgctggcggtgctgctcatggtctcggtgtcggctgcgttcctgatggcgtgggcatggccaacctggcgcgatctgcagcggctggcagcggccagcaagcgtatgggcgagggcgacctcgatgcccgtgcgccgatctcacctcgctccagcgtggcgccgttggcccgtcagttcaaccagatgggcgaacgcatcgctggtctggtcgcacgtcagcgcgagttgaccaacgatgtctcgcatgaactgcggacaccgatcgcgcgcctgcagttcgagctgggcctgctggccgtggaggaagatgcgcaggcgcgcaggcagctgcagcaggagatgcgcgaggacctgcaagggctcgatgagctggtcggcgagctgctgttcgaggcgcggctggagcacataggcagccggctgcagcaggagccggtcgatgcccgcgactggctgcatgaccaattgcgtgcgatcagtcgcgatgcgcagggcagtggcatccaatgcgaagtagcagatggcgcgccggcacaggtgcagctgcacccgcattacatggggcgggccacgctcaacctgctgcgcaacgcactgggccatgcgcattcgcggatccgcctgcagctgcagcagcaggacgaccactggcagctacgtgtctgcgacgacggtcccggcattgccgcggccgatcgcgagcgggtgttccagcccttcacccggcttgatctcagccgccagcgcaataccggtggcgtgggccttgggcttgcgatggtcgcccgcatcgtggcctgccatcgcggcagtgtgcgggtggaggacagcgccttgggcggcgcgtcgttcgtggttcgctggccgatttcggcgctgcgctga

SEQ ID NO: 509679 - DNA, 687 bp, Stenotrophomonas maltophilia
atgacccgattgctgcttgtggaagacgatctgaagttggccggcctgattggccgctatctgcaaccccacggctatcacgtgcactgcgtgcacgacggcagccaggcctgcgcggccgtgcaggcgttccaaccgaaggtggtggtgctggacctgatgttgccgggccgggatggcctccaggtctgccgcgatcttcgcgacttctgcaatgtaccggtgctgatgctgaccgcgcgcgacaacgcgctggaccatgtgctgggtctggagtccggcgccgatgattatgtgatcaaaccggtggagccgccggtgctgctggcacgcctgcgcgcgctgctgcgccgcccggcgcagccacagcccaacgagcagcggttgcgcttcgatacgctggacatcgaccgtcgtagccgcagggtgcagctgggcgaccgtcgcctggagctgaccaccggcgagttcgagatgctgtggacgctggccagtcgcagcggcgaagtcctcagccgtgacgatctgctcaacagtgtgcgcggcatcgacttcaacgggctggatcgaagcgtcgacatgtgcgtaagcaagctgcggcgcaagctgcaggacgatccacgcgatccggccaggatcaagaccgtgcgcggtcagggctatctgttcctgccggccggggcctga

SEQ ID NO: 509680 - DNA, 612 bp, Stenotrophomonas maltophilia
atggtcgatggtggggtagaagacagcgacgacagcggcctgcgatcgatcgatctggcgacgctgggcggcgtacttcgcgtgtgcgatgtcgaactgctgctgctcgatggcaacgggccgcgggcggccttcgcctcgcgcgtgcatgaggaagccctgttctgcagcatcagttgcggtttccactgccgtggccgcttcatgctgccacccgactgggcgatgctggggtatctgcacgccaccgatgaaacactgagctggtgccacggggtgccgcttgcaccggggatggcgctgacggtgatgcccgaaggcatcagcgagtttacgctcagccccggtacgcacatgaccctgatgctggtgccggtcgcacgggtgcaacgcaagttgaccgaactgagcctgcgcagcacaccgcccgcgggtcaggcactttcactgttcaatctggcgaacgattcggcaccactcgcccatcattatcagcagctgcatcttcagctcggccagggcgctggcctgcagccgcaggaaaccgaacgattgctgcacgagcacgtgcaggccctgctcggtgcaggcgccgccgatcgccccggctga

SEQ ID NO: 509681 - DNA, 1257 bp, Stenotrophomonas maltophilia; identical to SEQ ID NO: 506629

SEQ ID NO: 509682 - DNA, 1074 bp, Stenotrophomonas maltophilia
atggctcggaacaaaaagtcaaaggcgaagggcgcaacggcaaaggctaagcggcctaatcctgcccgaaagaagacgtctacgaagaacatggtggaggcgcagagcagggacgccgcgtatcaacgcgcgctgaagtcgactgatccattggggcgacagatgggagaattggtcttccagcgcacgtacatcgataaaggcctgcttgctaaagaggcattgttgctgcacacccgttgggtcgggaaccgctacatgtccccggtgcaggccacgcaggcgttcacggaagcatacatcgccgcgtaccgtgctgcttgggcgcgtcactttgacctttccgaggggcagcacaagcagccctgtgcgccaagtctcgcattgaacgacaggtcagttattaccagcttgtggcaggcccgtcagaaggctgacgaactggggatgccgtacgacctgttctgcgaaatcgtacttgatcgctggttgtccggccgtaaggccaagcagccaccattaccaaaccagctgctttccgggaagttgttcgacgcatggatgcgaggacacccgacctgggctgaggctagtgaacggttgtacttgcccgtttgggatcggcgcttctttatggagccgtccagcgaagatcctgtgcatgctgcggcaatgcgggcattgcgtgccgatgttctgcatgcaaaggaccgtcccgcccaattggcccgatatctcggggccggtggaccgctgacagaggcacgtgccaaggcgatgtttgaagcagatatggtccgggacgcgctggcgacggtcgctgtgcctgcgacggtcactgacgcgcctgaaggatacgttccggcgtgcctcggcaatcgtaacgacgtgcgggatatgccttgtcacagctgtccattcgtggctcagtgctcgggcgtaaagcgaaaggtgacgcgcgcgctgcatgccgcaggtagctcaggcgatccccgcgctgataggaggcgtgagcagaaccgggacagccagcgcaggcatcgcgagaagaaacagcgacaatcggctgcatag

SEQ ID NO: 509683 - DNA, 2838 bp, Stenotrophomonas maltophilia
gtgaagaaagtctttgtgtcgtacagctgggaggacgacagccacatgaactgggtcaccaaattggccggcgacctggaaaaaaacccagacatacacgttgtccttgatcggtatgacctcagtagcaccatggacaagaacaagttcatggaggacgctatctacgactctgagattgttgtagttatcgccacacacgggtacatgcgcaaagccaatgagcgaattggcggcgtaggaatcgaaagtgcactaaacgcacagaagttttgggaaaccgtggatactcatggcacatccaatacactagtcgtttcccgcgagcccggcagtacccctaggtatctcaagcaacagtttcatatcgactttagcgcagacgacgcatacgagaaaaacctacacaccctcctgcgcgagattcgcggcaagaaaatggtagaacgtccagctaaagtctataaaccagagaagcgtgcctatgagctgacacttgtcagcaagctgattggcctaagctccaaaaaacggaaggagccagtctccatccgaaacggcaccgactattccggagccaataaaatcaaattcgaggtatgggagaccaacacacctgcaccgaaccatataatcgccctccacaataacgtcaacataacgcaatccctaagccgagccgcagagtcgatcctatcccaaggctcaactccaaaatacatcacaatactcagggatcgtccaagatctaagtctgcaagctacccaaccacgcaagcatggaagaacctcacaaaaaatgcccagattaacgacactagttatacagactacacctgggagtactgtattgaggatagctttaagtccgaaccgccaccgcatagtatcgatttctacacagagcaagatatagcctcgggcgaagagctgcacgcgaacgcggcactccatctagctagcattcttacaagtacttcagactgctcgccgattttggttaggggcggaggaggcattggcaagacgtcgctttgcactgccctcgtcagccacctaatgaaacaccataacaaacactttatttgctacctaattagatcagaggatattcggcgacatctagatggcggtcctacgccttcagtcgatggcatctacgatctttaccagttgcaggcaagttatcttggacaaagcaacattcttgaccgggacacatttgagctatccgtcttgagtgggaacctgatcatcgtcattgacggactggatgagttcccttcgatcctcaaagatagcttcaacccccaattgctccttgagtcgataactcatcttcagcaacagctcggcttcggaagaatcctcattacatcccgccccagcgcgagcggattggactccgcatttgcgtcatccgggttcgacataatggatttgctcggcttcgacaccaacagtcgggagcgatacctaagcaaacggttcaggtcatccaatgaaaaagagtcgataattaggaaaataaatgcacatatcgacggaacgcctctatccgacgacaaccgcatcctgccattctttatcgacgtactatcgtgcgtctatgaagaagcaagcgaaagcaaaccatccaatctgaagatcgagttttcaccaaccccatacccatcactcaacgaattaactgaccacataataagtgcaatcattacacgggaatcaaatcgacacaataatctgatttccgaaggaaatttcgtcgagttcttcaaagaaataacacagtcacatgatggagttctgtccaacgcagagctaatggagacgattcaactgctctttgaccaaaaccacgatgagattgtagaactagtaaaaaagaacccactcatccgctgcctacccgacggcataagtctaaagtatgacttcttgacgtcttactttaatactatttttattctcagcggaacggtagaggattttaataggtcgtacgtgatggcgctatcacgagcgaccactgatagcacggagttcaaagagatcgcacgcttcttcaaacgtgaggactttcaatctttctccagaaaatgcgcccattttctacaacaggcactactgtcctcacagtccgatgacagacggtataattcagcacttggagcagcatctgagaacttggcaagccttattgcggcggttaacgcccaaactaaggaacagttcacttccgccatcctagatgcgtactcggatggcgcacaggaccgagttacatgtctttacttgaaaggcgacgttccgccatttgatttccgaaacaagaagattagtaaaagcagattcagatcttacacaagatttttggaatcagacttctcagaatctaagtttagccattgctctttcgagaactgccacaatccgtctataaaaagttcatcattccttactgctgagctggacccacagagctgtaacctcggagatctttcggactcaactgctatgctagacgccgaagcagctaaggacgaagtcctacttaggcgtgaggtcacgcgctttctcagcgccttctataaaggcgccaactttagggagctgcgcacatcgcatatcaagttctccatacatatagacgcgctttcatcgaccaacctctccagagtttgtagcaaaaattacatattcaagaaggcaagcaaagaaatcgatgatttttttgccatatctccttcattccaaggaagcgtccgtcgcctacttaatgacggatacatcgatggacagatgaagggcttcttcgacttcgcgcgaggaacgtag

SEQ ID NO: 509684 - DNA, 981 bp, Stenotrophomonas maltophilia
atgcgcaggttcgggggaactgcaggcggcgtgtttacccgcttcaggagatgtggagatcgaattcgcaagctgggggcatcaggcgcttggctgtgttgtgtgctgctgatcggccttggtctgtcgccatccgcaatcgcccagaccactgtgacgtacatccacactgacgccctgggctcggtcgtggctgagagcgatgccaacggcaatgtgatcaagcgctatgactacgagccctacggggccgtggtcggtggtcaggtcacggacgggccggggtataccgggcacgtgagcgactcggcaacgggcctgatctacatgcagcagcgctacatggatccgcagttgggtgtgttcctgtcggttgatccggtcacggcgtatgagcagccggtggggcagttcaaccggtataggtatgcgaacgggaatccttacaggttcacggatccggatgggcgaatcgtcaagtacgcatttgaaggcggagcgacgctgcgtgatggtgctgccgtgctcaaccattggatgaagtcagaaaccatcagctctgaactgaagcagattctcctatccgatgagacctacaccatacagttcaatcgcaatggtgattttggatatgacgagaacaagagaatcatcagcattgatgtcacctctggacttcgcgtcaaatcctccggggagatccagtctcctgctctggggggcggtcacgaggtgagccatgctgcccagcatgatcgggttggattgtccgctttccaggcttcgcttgttgcgccacagtccaactcggagagcaacggcgtgatgcagatccgagtcggcgtatcttcggaggaggcgcgggctacgggggtggagacccgggccgcgcgtgagctgggggagcctgcccggaagagctacagcgacacgaacggcacggttaatgtctgctcccccaccagcaatcgggagtgttga

SEQ ID NO: 509685 - DNA, 906 bp, Stenotrophomonas maltophilia
atggaccggatcgatcgcttccgcatcttcacccgggtggtggagtgcgccagcttcacccgcgccgccgaccagctcggcctgccccgctccaccgtctcggcagccattgcggagctggagcagcggctcggtacccgcctgctgcagcgttcgacccgcagggtgtcgaccacccacgacggcgacgtgttccatgcccgctgcctgcgcctgatcgccgaggttgaagacgccgaatcgctgttccggcaggacgatgcgcagccggtgggtctgctgaagatcgacgtgccaagtcgcatcggccgccgcatcatcgccccggcgctgcccgacttcttcgcgcgccatccgcaggtggaagtcgacctgggcatgaccgaccgcgcggtgaacctgatcgaagacggctgcgatgcggtgctgcgggtcgggcagctgggcgattccagcctggtggcccgcacgctgggccagctggacttcgtcaacgttgccgcgccggcctacatgcgcgagtacggtgtgccgcagcaacctgccgacctgcagcagcaccgggcggtgaactacgcgtcaccgaccacggcgcgggtggaaccgtgggagtggcaggagggtacgcagctacgcacattgccgatgcccggctgggtgcgggtgaacagtgccgaggcatcgattgcgtgctgcgtggcggggctggggctgctgcagattccgcgctacgacgtacaggccgaactgcagtcaggcgcattggtggaggtgatgccgcagtacgtggcgcagccgttaccggtgaccctgctgcagccgcaccggcaacaccgcgcgcaacgcgtgcaggtattcatcgaatggctgctgccagtgctacggagcggcctgcagctacagtag

SEQ ID NO: 509686 - DNA, 552 bp, Stenotrophomonas maltophilia
atgaccgaccattccctcaagggcaagaccgtgctgatcgccggtggcgccaagaacctgggcggactgatcgcccgcgacttcgccagccagggcgccaaagccatcgtcatccactacaacagcgccgccacccaggccgatgcagaggcgaccgtcgccgccgtgcaggccgctggcagcaaggcggttgccctgcagggcaacctgacgtctgccgcagcgatggagcgcttgttcgccgatgccgtggccgcagtcggccgtcccgacatcgccatcaatacggtcggcaaggtgctgaagaagccgctgctggagatcagcgaagcggagtacgacgagatgagcgcggtcaacgccaaggccgcgttctcttcctcaaggaggctggccgccacgtcaacgacggtggccgcatctgcaccctggtcacctcactgctgggtgcgttcacgccgttctattccagctatgccggcaccaaggcaccggttgagcatttcacccgcgcggcgtccaaggagttcggtgagcgcggcatctcggtga

SEQ ID NO: 509687 - DNA, 333 bp, Stenotrophomonas maltophilia
atgcagcgcctgttcgtgatgttccccgaccgcggtccgggcatcggcctgctgtggctgcggctgtgcctggccgccgcgctgtgcacctctggcccgcatgcgggcgggtggtcggcgctgtgcctgctggcggcggccatgctcatgctgggcgtgttgacgccactggcagtgctgctggcggccgtgggcatgttcgcgcagcaggcaccgtggccgctggtggcgttgccgccggcgctgctaatggtggggccgggggcctattcactggatgcgcgcttgttcgggcgccgcctgcttggccgtcggcctcccccattcgggtag

SEQ ID NO: 509688 - DNA, 483 bp, Stenotrophomonas maltophilia
atgcttactgtgggcgcctgcctggtgtaccagccagaaatatcattttcggcatcgttaaaaccaattagtgataagtcggttgcagaagcgctggcgatcacaggccttactttggagcaggccgagaatataggggtaactccaactgaagccatgacggaattttcatcctggatcaccacaaatacccccaagggcagcattccagtttttgttggattaaatgccccatttgattggggatttgtaaattactatttcctgaaatatcttggatataatccattcggctttacggccctagacatcaaggcgctctttatgggcgctacgggttgctcatggtacgaaaccagatcaagcgctattgataaagttgtgcatcccaagaaaaagggagatcatgatgctcttcacgacgcagaatatcaggccgagctatttagattggttcgctccctgactgaaagcagtgactaa

SEQ ID NO: 509689 - DNA, 897 bp, Stenotrophomonas maltophilia
atgagcagctcatccgtattcgaggtaaagacaaaccttccgacgacgcagcttgatatcctatccaagaaactactaggctttgaagggcgttaccagcgcatacaaaagcgcctccagctaattctgcaatctaatgaacttgagcgatggagtcaaaagcatcatgacaagaagctcgcggtcattgaactactaaatgaacagtatccattagctattttccatggcgatgtgggaacggggaaaactgcaaatgcagaggcgatcgcaaatcgccttgctcgcgacgctaaaattgaagacgcaattctctacaagctgagcaacaaagttcgcggaaccggcaaggtgggtgagatgggaacactcatcacccaagcattcgaagatatttccagatctattgggccgggaaagggtcgagccttcctcattattgacgaaggtgactctttaggggcatcccgcagccaacatcacagtcaccatgaagacaaggtcggcgtgaacaccctgattcaatctatagacggtattcggaagcatggcgggcgcatcttcgccatcctttgcacaaaccgattggcagctcttgatgcagcagtcattcgacgtgcgtcgattgttgaggagtttacacgccccactgatgaagagcgaaatgaactgttcacaagcgatttgggggacatgggtctttcggcaaccgaaataaagaagttggtcgaggcgacatccgcaagtgaaaatcgacccgcttggacttattctgatattcgtacacgcttgtatccggcagctgtatccatggcgtttccaaactccgcactaaaggccgaacacttttatcaggctgctgcagaattggagccaccccctgtcatggccggctga

SEQ ID NO: 509690 - DNA, 435 bp, Stenotrophomonas maltophilia
atgcgcagcgtcaaagccgacttgatcatcattgcaaccaccaccaaggctatgaccgaagatgaggcatcaaactatgctcacgacatagaactattggcgaagaaggattatctcgaatatgctgacgtgacgctcatgaatggcacatcagaagtgcgcgccatcaaatatgaattccagaaagagggcgccacggaaaccgagcggcctggcggcgtaacatggcctctgacaccaaaggacaaaggagggtggattcgaattcatttacgctataccgattcgtcatcctcggacaagcgcgcgagtctccccctaaagatttcatgggtaccttcgtctacggacaccagtcacaaaggcctaacctcttccgcggggcgcggatacagcagcaatggctttggcaccaacaggaaggatttttcatga

SEQ ID NO: 509691 - DNA, 558 bp, Stenotrophomonas maltophilia
atgccgctagcaaattcagatcttgaatacttcgaccacaacgtactgcgtcttccaggcgagaagcgcaaagagtatcacgcccaggtggacaatcttgtttctgagctaaagaaacgcatcaccgacaagtcaaagataaaggtcacaaaggtcgttaaggctggttcgtttgcaaagtacacaattcttcgaagggttgatgactatcctacggatgttgatgttgtcttttatgtcacaggcgtcgatgaagacggaaaatcgtacgaaagcctttgcaataaaatatacgatcttttaatagacatttatccgacaaagaaagttgaggacttcgagattcagcgtcgcgcagcaaaggtgactttcgtcaaaagtggcctagaggtagacgttgtacctgttcttcaagatagttttgatgctgaccacggctggcagttcgacattcagagcggcgcaaaaaatctcacttgtgcgccgtgccacattcagtttgtcaaaaccaggaaggataaggataaacactttaggacgttggtccgtttagcataa

SEQ ID NO: 509692 - DNA, 1530 bp, Stenotrophomonas maltophilia
atgacaaatgccatgatgctggcttcaacctatatcctccttgccggaagcatctcgaacaccaccgagaatgagctcatcgatagagcgcacgcttttgtcgatacccttgttgaggaagtccttaaagctggtggcggctttgtcgtttacgtcgcagccgagccgatcaatggagatgggaaggcgctcttgttcgactggacggtcgctaaagcggtagacagattaacgcccggcaacagctctgacgctcgtctaaaaatcgtggcttcgcaggaacgccttcaagtcaaggcgaatcctgagcaacgtaagttgctcatgggcatggtcgcacgaggagtcgcagaactcgtcccactggaagaggaggtgctgacaggcggcaacgtcggcgatgagcaagttgagcatgctactgcgatggtggccctgggcggtggcaagggtgtactggatcgcgcgcgcaaaatgaccaagaagctcttgcctgttctaccgcttgatttgcagttgggtgcaaatagcgaggacggtctgggtgcgattggtgtccttaagaatttccaagccaaccctctgacatacatgccgaatagtggaaatagggttgtcaaatttcttcccgctctttctttgcaagagcccgtacttacattgtcagaaatatgcactcgtatcgtaagtgttttctatgaggaagaactagccagaattgatgcccttcctcctgatgtattagtgctaactgctctagacgtggagttggccgccgccaagcaagcttttggtattgcggaggatgctgaacacatcactactgagaacggtcttcacgtttggaaagcacctgttgccaagcgtggtggaacgacagcaagctgcgctttagcttgcttcgcgggtgcaggcaacgtagatgcagcgtcagtaactagcatgctgttaagtaatctgcgacctggcagcgtgatcatgctgggcattgcggctggtctgcgagaaaaatgtgcgctgggagaagtggttctggcagaacgtatcgtcgcctatgagggcgcgggacttgttgaaggcggccagagtgaggcacggccagagatcactaggcttacgatgcgtgttcgccaagacgttagctcctatttatccaacagggcaggccttgaaactcgcctcttgaagagttaccaagctctaggcatcgaattccccgaaaaagttgaggctggtcctgtcgccaaaggcgtcatacctaagacggcgacggtcgccagcggcgaaaaactccttcgtgatccagaaaaatttctagggatgcgagagattcacggaaaaatagaggtcgccgaaatggaaggcgcaggcttatttgctgcatgcgctaattttggcaagccggtactgatggtgcgcggcattagtgattttggtgactcaaaaaaagataatagatttcatctactggccgcacaagcagccgccgccgtcactgttgattacattgcaaatggcatgacattatag

SEQ ID NO: 509693 - DNA, 609 bp, Stenotrophomonas maltophilia
atgagatttcgctcaaaacgctcggcgccgagcgtttttcctctatggggatggcaggcaaatcgtgcggcgccgcacgatttggggcgtgagacaggcggcaatgactggcaaaagtgccacagtggcacttttggtgatcggcactgtatcggccaaatcatgcgaattcgcatgatttctgtattgtccaaatgtcgcgacgtcgcgacatttcacgcgattcaatgggccttacgaaaacggccgacgtcggccgttttgccctggtggacggccccgcgcaacgtatggcggcgttcgaaaagcgactctgagtcgcttttggcagtttggcaggcggtgtggcatagcccgggctgggcaagtgtcgccatgcgcgtcgggtgcatccagtcggcgctcgtcgcggcgacggtcgccgacaaaatcatcgccgaacagtacgcgagcactgttgaatcaaaggcttacgtcggggcgccctacgccgacgacagcggcaatccggcgacggtcgccacgatcaaggactggtgtcatctgatgacgaggctcgaaaagcgacacgatgtcgcttttgggtgcttagcaggcggtgtggtatag

SEQ ID NO: 509694 - DNA, 570 bp, Stenotrophomonas maltophilia
atgaatgtcatctggagcaagagcgtgtcggccaacagaaccttttttgatgaggttacggacgtgatccgtcttgtcctcagtagcgcggatgttccgcatgccgacgccctcgcggtatccagccaagtgtgtggtcggatcaagtcccaatttggaggcagcacgatctacctgccgacgaaccggtccaaggcaggaggtcatgccagcaagctggggatggaactcctcgacctggttgaggacgaactctctcatcaactgcgccaggcggccctgctggatgacctggagctcgccgctgcgaccgaagacgttcgccaggagctgctggctcgatgctgctctctttgcatctacgtacccagcgggcaacgggatgccgcattggcaagggcactacaggctcactcccaccttcagaacaacaagagcaggagcgaaatcgcgacgatgctgaatgtatcgacccaagccgtctgcaagatgatcaggcgtgcagagaaacacctccaagcgacgaacaagctaaaggacggtgagcaccacaaggagtgccaggtatga

SEQ ID NO: 509695 - DNA, 465 bp, Stenotrophomonas maltophilia
atggctaagaagattggaaacgtggatgccgagctgggcaccagcgaggcgacgcagatgactaaaaccggcagtgaaggcggtcaggctgaactggagatattgatgggcgaaggccaggttcgggtggccggtcaacagctctctgtacgtgagtacaccttcgccgaggggcttttcatccaggctaccgctcgatccttcctggaagacctgtacggcgtgttcaagccaggcagcaccgttcccagcttcgagcaagtgagtgaaatctgcgctcgcaatgccgatgtgattctggacctgatggcgaagtcagccaatgtcgaacgtagttgggtggagtctctggctgaggccgagggtgaactgctgatgcttgcctggtggagagtgaactccggtttttttatccgtcgggtcctccggcgcgcaatcgcagaggcgccccaaagcaacccgtga

SEQ ID NO: 509696 - DNA, 222 bp, Stenotrophomonas maltophilia
gtgagctgggccaaggtcttcagcgccttgacccaggcgggctatgggccttgccagcaactgaaatcaatgacgggacgtcagttgcagcttctctaccgcgaatcgcagctacagcgccgtcgctttcgcgctgaacgcatcaacgacatgaatgccgccgtgaacggcgcacccaaggaaaccgcagcgctgctcaggcatctgctgtcagaggaatag

SEQ ID NO: 509697 - DNA, 795 bp, Stenotrophomonas maltophilia
atgaacaccatcacggaaatccagtccagcatcgaaagcctgggcgcgatcaaagagaaaatcactgccgccgtttctgagcgctaccagcgcttggaggtgctggccggggaaaggggcaggatcgtctcgcagcccgtgtcgcgcagggactacacgacgctcgtgtggcgcatgctggatctgaaggctgaacattatcgtcagaggctcaccgatgagctcaggaaatccatctttgggaacggtgaccccggtcagatgaaggccactgtagggtcggccatgcggctcaacacgatgaagcccgacgatatgcttggcaccctgccgggacagctgcgcggagcggtctacggcggtgattttgacagggagccgctcacccagcttgccgctacctacttcctcctggatgagatgaagctggcgactgccgacgccctggatggcatcgcaaattggcccaaggccctcccgctcaaggcttcgctggcgaagatcggtgagattgatcgggaaatgctcagcatcgagtccgagctggagttgctgaaaaaggatgcgcaccgcatcggcctggccctgccatcgaagccggtgaaggtggagccgatccagccgggtagctgggagtggttgaaccagctgactgagagcgtggagcgtcgccggcgacaggaggcgattgacgatcccctgcgcgctcggtcaatcgttgtgcgggatggcgtcaggggctggatgcgcatgaacctggaaaccggtcaggaagagtttgttcccgagcgctga

SEQ ID NO: 509698 - DNA, 381 bp, Stenotrophomonas maltophilia
atggatggcgagctctacgcctttgccgatgtggatgacagcctgatcggctcggtgcgaagtggctcctacaagagcgtctcagcctcgatctaccttcccaactcgccaggcaaccccatgccgggtacctactacctccggcatgtcggctttctgggtgcccaagcccccgctgtaaagggaatgcagccgttgagctttgcagaacctgcgcacggcggcactccctctgttgcgaacttctccgcacccatcgggtaccaggttgatcgtgcacagatgcagctgtacgaactggcgcgtgatgtgcaacacgccaacccatctatcggctttatccaagccgcgatcatggcccaaaaggccattcaacgataa

SEQ ID NO: 509699 - DNA, 726 bp, Stenotrophomonas maltophilia
atggtgctgcccggtcatcaatccctgcgccatgaaatgcttctgcaacggcaccaccgagaacttcggcggcagccgctcgctgcccggcgcctcgccgatcaccgtgcgccagtcggccacgatcgaaggacggtacacgccgatgccggcataggtcaggcacggtccttcgcgatcgtggtgcagcaccccctgcgtatcgaggcggtagtcaccgtgcgggtgctgaaccggattgtcgaccagcaccaggtgcgcctggccctgcggctcgcgcggcagcgtggcgaaatcgaaatcggtccagatgtcgccgttcaccaccaggaacggggcatcgcccagcaccggcagggcgttgaggatgccgccgccggtctccagcggggtcgctccttcgtacaggaaatgcaggtgcaggccccattggctgccatcgcccagcgtcgccgggaactgttcggccagccatgcggtgttgaccaccacctcgcgcacgccgagtgcggccaggcgttccaggtgccagacgatcaacggcttgccagctacttccagcagcggcttgggcgtgtgcagggtcagcgggcgcatgcgctcgccgaggccggcggcaaagaccagcgccttcatcgggccacgcgcatcggtgcacccagctcggccagcgccggcttgatgcgctcgtccagcagctgctgcagcggtgccagttcccgatag

SEQ ID NO: 509700 - DNA, 984 bp, Stenotrophomonas maltophilia
atgaacgcaagaatgaagacgctgctgagtcgaaccgtagccggggccgcgctgattctgggtggacttttcaatcaggctgctgcggagacgattacctatatccataccgatgcgttagggtcaccggtcgctgagactgacgcggctggcagcgttattcggcgtaccacctatgagccctatggtgctgcggttggtgagctcgttgcagatgggcctggctataccgggcatgtgactgatgcctcgacaggcttgagctacatgcagcaacggtacatggattcacagttgggtgtgtttctaagtgtggatcctgtatcggctatgcgcgatccggtgggcgcattcgggcgctacaggtacgccaactcgaatccctatcgctactttgatcccgatggccggcgagcgtgtggcaaagacacaggctgccagttggagcagggggcgcttggcggctcctctggagtgagcaggtcatcaacgggagtgaggagtacttctattggtgggcagcgtctcgttgcagacgagacgatcaaccgttccgcaggtgccaatgggacaagcgaacttgtgcggaattggagcctgtctcaggtttcgccaagaggtggtgcgatagtccaagatatttcagttactgttgaggcgtatgacagggcagggcgtcgcatcgtgggtcttccatccactcgttactgggaagcttggacggtgtctccagggagttcggtccctacgccctatggacaggatacattcaaggtcaacaggcttccgagtgaatggcataggggaaaggtgacctggtctggaagtgcgaggttctacgagggtttgagtttgccttcttcctttgttccaggtggagtagggtttgcaggagtacttccttcaacatcagttgatccgaaattgagtacatcctcggcgacgccttcggtagatgttagatttcaagtggaatggccttga

SEQ ID NO: 509701 - DNA, 735 bp, Stenotrophomonas maltophilia
atggctgagtcgctggctaccctgcaacggcgctgggccgatcatgtgcgcgacccagcaatggccgcacccgacagcgtcgaggcgggcaggctggcggtataccgccgcctgtgcatcgacagcctggacgccctgctggccggcagcctgccgcgcctgcaacagcagttgggcacgccacactggcgcgacacagtggagcactactacgcccaccacgcctgccagaccccgttgttcccacagatcgccggcgagttcacggcctggctggcagtgcaggacgcgctggcactcccggcctgggcagcggaacttgcgcactacgagagcacgctgcagtcgctgcgcattgaagcgcgtgacgccgggcagtcgctgcacagcgttcccgagggcagcgatgtgctggcggtttcgccgctggtgcgggtgctgggctaccgatggccggtgcatgaggacgaggccctggagccggtgccgagcgctgcgcccacgctgctgctgatccggcgcctcgccgatttcagcctgcaggtcgagcaactgtcgccgctggcctacgcgctgctatcgatctttggtgacgacggcgcagctgtggaagcagcactccgggcgctgtccgaggcacatggcgtggcaacggacgcattgcgcgcggcctgcgcgcccgtactgggcgagctgtgtgcggcgagcgtgctggttgtgccgaacgactgttga

SEQ ID NO: 509702 - DNA, 210 bp, Stenotrophomonas maltophilia
atgaagcgcacgcttttccgccaggtatcggccgcagtcctgatctatgcaacgctggtgggctcgctgtccgcacagaacatcatcgtctgcggcggcggtgtgtactgcgagcaattccggctggagtgcctggccaagggcaacgccccggccctgtgcgagcgccaatggcgtctgtgcgtgctggacgcctgtccgcagcgctga

SEQ ID NO: 509703 - DNA, 300 bp, Stenotrophomonas maltophilia
atgatccagctcgacgaagcacgccgtcgcgtgcaggctgcacttgccagagacgatgagccggttgccatcacgcacgagcatgagatggtcgaaggctggctgttctgcttccagtcgctgcgctacctgcaatccggcgagatctcggacgcactggccggcaatggcccgatcttcgtcgacaggcatacgggtgagcagcacgcgctgggcacggcgtacgcgccggaggaggctgttcgccggcatttggccctgcggcacccaccatccgatgttgcggcgatggatgcctga

SEQ ID NO: 509704 - DNA, 600 bp, Stenotrophomonas maltophilia
atggatgcgtgggtcgagaaatgcgattcttcatcaaaacgcggacttcggcgccgcctctggatcgcagcgcgtcgtcgcctcgcgatcgttattccggcgctggtgctgacagcatgttcgagcgccgcgacgccgcccccatcagatcatgtgaatcaaagacaggccatcaaatcagggagtgaagctggtatggagcgattcaagaacagcatcgagcgattgtccaatgtgcgttttggcgatatcgatgcgttgaacgaacagcttcacacgcatcttggaaaaccgacccggcagggcctgagagacgagcgaaccgcagaacgtggaatgttgggcggccttgaagttcggaacatctcactgagaagtgctgtcgataatcctgcgcaggcgaagctgaccttcgatgtcgcgccaccgagcgtcgcgctcaaagaagtcatctgggagggaaccgcgcaatatccacctcggcctgatgcccctgactcacgcccttactggaccgcgccagtgaacggtgctgaggttgtactcactctggcccctgacaatgcgacattgacccacgtattgatcagtcagcgttga

SEQ ID NO: 509705 - DNA, 207 bp, Stenotrophomonas maltophilia
atgaatcgattgtgttgttgtgggcaggagcgcgcaagcggcataagcgacgtgcaggacgtggcccgcgttgaccacgccatggcgccgcgcgagctggtgcggctgggcagcgacaccgaatcgctggtgctggcacgcgcggttcgccgccatgtggagcaccgcatcctgctcaatgggcatcgcacggtggtgttccggtaa

SEQ ID NO: 509706 - DNA, 330 bp, Stenotrophomonas maltophilia
atgaagatgaaggcgatcactgctgtggcagcactgctgctgctgggaacggcgcaggcgcgttcgagcgccgagtggaatctgaaaggcgccaaccgttcggaaggccgggttgtgctgaccctggtgagcaagacgcccgaactgacaccagccaaccggcaggcggccgaacagaccgcaacgcgccagtgtgcaacctggggccttcccgctgccgaactgaacggtgagatcgagcgtgcgtgcgatgggcgcagccgtttcggcaagtgcaagcggtggcagttcaccatgcccttgcagtgcagtgccgcggtttcacagtga

SEQ ID NO: 509707 - DNA, 201 bp, Stenotrophomonas maltophilia
atgcgctgcggggtccggggtcggatccctttccgcctggaaagggctctgacccctgccgcaggtcgagcaggctcgaccactaccgggtgcgtggccgattacagcttcatgttcaggccgacgaacacgctgcggcccggcgccggcgagaacatcgggcgggcgctgtcccagaagaagctgtcgtaccaggcgtag

SEQ ID NO: 509708 - DNA, 642 bp, Stenotrophomonas maltophilia
atgcccaacaccgatacaccggtggaagacttcaccaccgaaatcgaagacagccggcacctgttcgcctggtgtctggtccaccatggccaggtgcccgaggcgcaggcgctcgaacaggcacggaagcgctatcccgaccagagccccggccgcgaatacgaatacgcgctgatcttccacgacgagccctggcactgggcgatgctgcacatgaagggcgaaaggtattggcagcagcacccggaactggcgcggccgtcgctggactacgaagccgaatcggacgcactgtgcctggcccgcggtgagcaggtgccactgctggatgaggacgagtacctgggcgcgctcgcgcatgcacgccacatgcgtgcatggacgctggtccatcaggcgggtcgttggccggatgaagcgcgccaggaggcgcttggtcactacgcgtatcatccgcgccatcatcgcgggcgatttcaggttcacgatccgcgtgacggctggtgccatgtgatgagcgcattgcatggcaacgactactgggcgcgacccgagctgcgggaaccgccacaggcctattggagcgagtcccgcgcctttgtttcggcgcagggaatccgcttgccggaccctccgggctga

SEQ ID NO: 509709 - DNA, 783 bp, Stenotrophomonas maltophilia
atgtcagaaagcaaaggagatgaggttcctctcagtgagaaaagcacttcgtcaacggatatcgcatctgaatcaagcattcatcaatccttgcgttcgccacaccaatccatcgaatcaacagtggctttgggtggcaaggcatttctgctcaagatcgaaacacctcactacgaaggcgacgcctcggaatacattgacaggcgcatcgcggctgcacgggccggcgatgcccagtcgagctatgagatccataaccgcattgccagttgcaagcgggcgcttaactcaggtgatgccgatgagtacaaggcctacgcatcagtggaaatcggccaggagattggccactgccaagggctgatagggcgaacggaactcggagatgagaattggctctctcttgctgccgcccaagggtcggtcgaagcgagactgattttcgccaaagacccgaaagccatcattggaaacttgactgaagcgctcaaggatccggaacggatagccaattatcgaagggatgcgattgattatctaaatgagtcggtatcacagggaagcgtcgactcgattgaagcccttgctgacatccatgaccgagggatcattgccgacaaatcccctgaaaagagccttgcatactggctcgcatatcagcgcgcgcaccccaatagccaatcagcggcatccattgcgagactctccaaactgttgcagcccaaccagatagagcgatccaacgagatgtctgaggccatatacagatcctgctgcttgtaa

SEQ ID NO: 509710 - DNA, 600 bp, Stenotrophomonas maltophilia
atggatgcatggctcgacaaatgcgctacttcatcaaggcgcggagatcggagtcacctccggcttgcagcgtatcgctgcctctcaatagccgtttcagcgttgatactgtcagcgtgttcgagcggtgcctcaccaaccccatcgcataaatctaatcaaagacagtccgtcaaatcagggagtgaaattggtatggagcgattcaagaacgacatcgagcgcctgtctagtgtacgttttgatgatgtcgacgcgttaaatgaacagctccacacgcatctgggagagccgacacgccaggacgtgattgacgaacggatcgcagaacacggaatgttgggcgaccttgaggtccggaacatcaggctgagaagtgctgctgacgatcctgcgctcgcgaacctgatctttgagatcgcaccaccaagcattgcgctcgaggaaatcatctgggaaaactcgaccaaacatccatctcggcctgacgcgcctggctctcgcccttactggtctgcgcaggtgaacgatgcaaaggtcgtgctcggactcgattccgataacgtgacgctgacctacatatcgatcagtcagcgctga

SEQ ID NO: 509711 - DNA, 1137 bp, Stenotrophomonas maltophilia
atggagcgtactgaagaatctggactgccggagccgcaggagggaggccgcccaggagccacacggcgtcctgcatcgccattggacgacccctccttagcgccgcttctagcaaaatccccaacacttcaggcgggcctcacccaggcgaggcgtgaaggtatcgttatccaatggggggcagccggtgaaggcacttatcttatacccggcgtcaagatcgttattgacgagaatgcgattgggcaaggctcaaggatcgcaagttctcttgctcacgaagttgggcaccatctcttcaccgaacccgaaaatcgaacttctaagcaagcctatgtgaacagcgagctgcgaggagaagccgccgcgactctcagcaatgtccaggtccagcgtgagatcgttgcagctggcggtccagatattggcgtttccggcacaggtaatcgtccacaacaatacggaaccattgcggcggaactccaggccggacggatcaaccgtaaccaagcacttgggcagatcgctgaggtgttcaagacagaggctccgtctgttggtcctcatgcgacatacgaactctactatggcgactactacgaccgggaaatagcacccacgcaacggcggcgtaggccagatccagaatttgacgccgagcgcattgcggttgcggaaatagtcggttcggacagcgacgactcgccctcacggcagcgagcatcctcctcagcccctgaactcggcgatgctgaccgctctctctacatgcagattagggcaggtgtggaacgcctggacgcagagcatgggaaaccttgggacgagtcgagtcagcgcatgtctgcaagcttgctggtactggcgaaggagcagagcctttcacgggttgaccatgttgtcttgaacaatccgacagagaacctagctcgaggtgagagggtcttcatagtcgagggagcaatggacgatcccgcccatcgtcgaggccatatgagtacgatggatgcgcttcgcgcaccggaggcggaatcgctccatcgcgctgatgcgttgagccaatcacaagcagcgagccttgaacaacaaccggcacagcaggcgcatacgcaagacgggccatcgttctcgagataa

SEQ ID NO: 509712 - DNA, 1011 bp, Stenotrophomonas maltophilia
atgaccgacaccgaccagagcgccatcgccgcgccgccggtgagtatcgaagccttcacctttggcgaggccagccctgtgctggaatcacgcggcttcctcgactacctcgaatgctggcgcaatggccgctacttcgagccaccggtggatctgcaagggctgtcgcgcacaacgcgctccaacccgtacctgcacagcggcctgacattcaaacgcaacatgctggtgcgcacgttccgaccgcaccggctgctgagccgtgaggcgttctcgcagctggcgctggactacaccaccttcggcatggggtatgtcgagcgtcgccgccccatgtcaggagccgcgcacagtctggcggtgccgctggcgcagtacgtgcgccgtggcgtgcagcccggtgagttcttcccggtgcgtgccgcacgggtagagcatgagtttcccgccggtgaggtgttccagctgcgagaggcagatgctgatcaggagatctacggcctgccggagtggatgccagccgtagaggccgcgctgctgaacgagtcggccacgctgttccgccggaagtattacaacaacggttcgcacgccggctacattctctacatgaccgacccccaacccgagggcttggacgtggacgcgttgcgcgacgcgctgcggcagtcgcgcgggccgggcaatttcaagaacctgttcgtgcactcgcccaatgggaagaaggacggcttgcaggtgaccccggtcagtgaggtggcggtccgagatgagttcaccgggatcaagagtgtgacccgcgatgacatgttggcggtgctccgggtgccaccgcagcttctgggtatcgtgccgcagaacagtggcgggtttgggtcgatccgcgacgcggcgggcgtgtgggcggcgatggaactggcgccgctgcagacgcacatggcagctattaacgagtggctgggccaggacgtgatccgcttcgaacccttcgaactggaggcgaccgcatga

SEQ ID NO: 509713 - DNA, 807 bp, Stenotrophomonas maltophilia
gtgttggacgtgagccatgcgcgcctgatgggtggcaggccctgcgaggacgccatctggcgccagatcgtgaccgtgctggacgcggcggaccgtggctgtgacctgttcgatatcgaggaactgcgccgtgactacagcgccgaggagttcgccaacctgctgatgtgcgagttcgtggacgacagcgccagtgtgttcccgctcacgatgctgcagccctgccaggtcgattacaagccgtttgccgtccggccctacggcgaccgcgccgtgtggatcggctacgacccggctgagaccggcgacagcgcgggcatcgtggttgtggccccgccgctggtgcctgggggcaagttccgcgtgctggaacgccaccagttcaagggcatggagttcaaagaccaggcggcgttcatcgagcagatcaccaagcgctattgggtgacctacatcggcgtggatgcgaccggcatgggcacctgcgttgctcagctggtgcgccagttcttacccggcgtgactgtcttcaactattcgcccgaggtgaaaacgcggctggtgctgaaagcctatgacgtaatcaatgacgaacggcaggaatacgacgccggctggatcgacctcacgcagtcactgctggcgatccagaaaaccatcaccccgagcgggcgccaggtgacctacaccgccgggcgctcgcgtaccaccggccatgctgacttggcttgggcactcacgcacgcgctgcagagcgagccgctggaaggcggacgggctgcgcgcggcaccatggagattttctga

SEQ ID NO: 509714 - DNA, 252 bp, Stenotrophomonas maltophilia
atgctgcacgactgcaggatggcctaccttccgtttgccgacgaggccgcaggtgtgggcatggacttggaggtgagcctggagcgtgcactgcgagcgggggctgagctgcgcttcggaccggtcgacgcgggcgactggcgcgtggccgagcccacgctcggctgctgttggcccagccgcccaagctcagccgagcatgggctcggctctacaaggtcgcggcgcgtgagcgctgcagccagtcgttga

SEQ ID NO: 509715 - DNA, 207 bp, Stenotrophomonas maltophilia
atggcacgcgtgctggtagtgggaaccgacatccagggcgagaaggccctgctgcaacggctgcgcctggcgtcggcactgccggacggccaggtccgccgcagccgggacctggacgattgcgacctgctggtcatccgcgataccccggcactgcgcaacgcggcccagcgcatgcgccagcagcgaccgcgcctgcaatgttga

SEQ ID NO: 509716 - DNA, 897 bp, Stenotrophomonas maltophilia
gtggtcagcctcgatcgcttcgatattttccgtgccgtggtcgaagccggcagcctgaccgctgcggccgatcggctcggcctcagccgcgcggtggtcagcttcaacctgaagcggctggagcaggagctgggcgtgaccctgctgttgcgcagtacccgccacctgtccctgaccgaggccggcgagcagttcctgcaacattgcgtgcaggcactggatgctgcgcaggcggcgatcgatgccgcgcgccgcgaccagcaccagctgcagggcgtgctgcgcctgaccaccacaccggagtacgcccagctacgcctgattcccgcgttggaggcgttccgcgcgcagcacccggccctgcagctgcacctttcaacttctccagcgccagcggacctcattcccgaacgcttcgacctggcgatccgcctcggccgcctgccggattcgggccttcacgccagtgaactggagcgccacccactgtgcgcggtggccgccccctcgctgctggcgcgcctgccctctgccgaggctgccgatgacccggcacagctgggcaccctgccccgcctgggctatccgcgcctggccgatgtgccggtgatcgcgcctgatggcagcggcgccctgtttgccaccaacccgggcaacgcggtggtacgcgtggatggtgccagcagcctgcgcgcgttcgccctggccggcgccggggtcaccgtgctgccacgctggctgatcgaggacgacctggctcaggaccggctgcgcccggtgctgcgccagcaccgcttcccgcagcagagtgtctacgcggtctacccgcacagcacgcagccctcaccgaaggtacggcagctgattgatttcctgcgcgaccggttcgccacataa

SEQ ID NO: 509717 - DNA, 1362 bp, Stenotrophomonas maltophilia
atgccgtccccccgcctgcgccatgaggcgattttcctgctggtattcgccctggatctggtcaacatgttcatcgccacggtggcctatccggcattggcagcggagctgcacgccgacgtcagcaccctggcctgggtcggcacggcgtacatgctgggcctgagcgtggtgattccgctggcgccgtggctggccgcgcgctgtggcgagcgtcgcttgctgctggtggcgttgctgttgttcgcggttgccgctgcgctggcaggttccgcatcggggatcggctggctgctcggatggcgcctgctgcaggggttggccggcggtctgctgattcccgtggcgcaagccgcggcgtaccggcaatgcacggccgggcaacgtggcgcgctgacccgtcgcatcctgctggtggcgcttctggtgccggccctggcaccggcactgggcgggctgctggtgcagtggctgtcctggcgcggcgtgctctgggccagcctgccattggcggtggtggccatcggtctggtgctggcctggatgccggccgactgcgcgcgcagtgcgccgcgcctgcaggcctatgccctgtccaccgcgatgctggcgctgggcgcgctgctgctggcgctgacctggctgggcgaatcgggacatcgcggtgcaggtgccgtgttgctgctggccgcgctgttgctggcggcgacgcacctgcggcatgcacgtcggcaggcgcagccactgctgcgctggtcgttgctgtcccatcgcgggctgcggctggcgatgctggtgtatctcgccgtacccggtgtgttcatcggcagccaactggtcagtaccctgcaattgcaccacgccggttacagcgcggcacgcatcggcgcgctgatgctgccctgggcgctggctgcggccatcgcgatcatggccagcaagcgcctgctggctcgcttcggtccggccgcggtactgcgcgccggcatgctcctgcaggccagcggcctgttgttgatggcgctgctgccgcagccggccttcgtgctggccggattgttgttcgcgctgatgggcgccggcggcagcctgtgcagcagcaccgcgcagacgctggccttccatggcgtggaaggtgaggcgttgggcgatgccagtgcactctggaacctcaaccgccagctcagcttctgcctcggcaccgccgccatcgcactgctgctggcattggccatgcaatggctgccggcacgcgccaccagcgtggcgctgggtttggccgctgcaatgacgctgctgccgatggcgctgctgcgccgttcgcaatcgatctctctttcccaacccgagacaatgcaatga

SEQ ID NO: 509718 - DNA, 387 bp, Stenotrophomonas maltophilia
atgacgatgaccgcagagaacgagttccatgatctgatcgccaagctgcaggcctggttccgtgcggaagcagccgccagtacgctggatgcgctgatggatcatttctgcaccgacttcagcatggtcggtattgctgggcagcgcctggaccgcgaagcactggccggcatgttcgctggcggccacggtgcccgcccgggcctgtgtatcgaaatcgatgccctgcagttcattgcggtgccggcaccgttggcaatgctgcgctaccgtgaagggcagggcgttgctgaaggtgggatggcctggcgtgaagcactggccgtgctgcggcaggaagacggccgttggcgttggctggcgttgcatgaagtaacggcagcctga

SEQ ID NO: 509719 - DNA, 954 bp, Stenotrophomonas maltophilia
atgtcccgatatttcacttttgctgattaccgccagttcggcgaacgccatggctacgactaccggatcgaagggagtgaactgcgcgacgaccaatgggcagggcgtggcgacgtccacgaacagtcactgcgcggtggcctgggcctgatcgcctcggacgtgcacaaccggttcacctacacggccaccgctgtgcacggtgccggcctgaccatccgcctgatgcttcagggcgaagtggatgtccagtttcctcgtcgcaaggggttcaccctgcgcgccggcacaggcatgaccaccagccaccatgaacctgtgtcgatggccgggctgcatcccggtggcagccacctgcgcggggtcagcttgagcgtaccggccgatctggacgtggacatgctgcgcctgccggcactgcaacgggtccttcattcccctctgcagtgccgccactgggccattccgcatgccttgctgccgacgctcgcccaattgttcgacagcccctggcaggacgacatcgatgcgctgtggcgcgaaggcgtggccctgcaggtgttggccgtcggcctgcaggccgaggatatgcagaccgagcatatacgcacgctgcgcgccggccagcgcgagcggctggagcgagtgcgcagctatctgcatgacgaccccagccatgcccacagcctgatcgaactggcccagctggcctgcatgagccccagctccttgcgccgccattttgcccagcaatatggaagctcggtgttcgactacctgcatgagcagcgcatgcgccatgccgaacagggcctgcgcgaaaacggatggaccgtcgagcaggctgccgccgccagcggctaccgccaccccagcaacttcgccgccgcgttccgcaagcgcttcggcctggtccccagccgctggcgtacgggcccctcgaaggtcggctga

SEQ ID NO: 509720 - DNA, 759 bp, Stenotrophomonas maltophilia
atgattgattaccagttgaccggcaagaccgcgatcgtgaccggcggcgtgtcgggcatcggcctggccgtggcccagacactggccacatccggtgcccgtatctcggtctgggacctcaagcaggatgcagtggatgccaccgtggcgcagttgcgcagcaccggcacacaggccatcggcatcgcgctggacgtcaccgacgacgcggcggtggaggcagcggtgcagcgcaccatcaaggaactcgacggcctgcacgtggcggtcaacaacgccggcatcagcgggccggcggccagcagcggcgactatccgattgatggctggcagcgcgtgatcgatgtcaacctcaccagcgtgttcctgtgccagcgtgcgcagatccaggccatgcgcgcggccggcacgggcggcagcatcatcaacatggcctcgatcctgggccaggtgggctatgccggttccactgcgtacgtggcggccaagcacggcgtggtcgggctgacccagaccgccgcctgggagcatgcggccgacggcattcgtgtcaacgcggtcggcccgggcttcatcagcacaccgctgctggagaagatggacccgaaggtgcgcgccacgctggaagggcggcacgcgttgaagcggctgggtacgccggaggaagtggccgcattggtagcctggctggccagcgacgatgcctcgttcgcgaccggcacgtactacgccatcgatggtggctacctcgcgcagtga

SEQ ID NO: 509721 - DNA, 453 bp, Stenotrophomonas maltophilia
atggaactcacccaggatgtctcgatcctgctgcgcgtagccgcagcgatgctgttcggcggtgtgctcggtgtcgagcgggaaatgggcaagcacgccgccggcctgcgtacgcacatgctcattgccggagcggcggcattgatcgtcggtctcggcgactcggtggccgagcatttccagcaggagcgttaccgcgatctgctgcaggttgatccggtgcgcctgatcgaagcggtggtggcctgtgtcggcttcgtggccgctggcaccattctgcgcggctcacgcgaggaccaggtcagcggcttgaccacggccagttcgctgatcatggcggcggcgatcgggattgcggtggggatcagcaagtacgtgatcgcgatcggggtcagcgtgctgtgcgtgctggtgctggcggtgatgcggcggttggagaaacggatctcgtag

SEQ ID NO: 509722 - DNA, 1146 bp, Stenotrophomonas maltophilia
atgcagccctggcaacacctgtacgaccccgccggcaacctgtggttgtcgagcctgatcgcgctgctgccgatcgcgttcttcttcgttgccctggcagtgctgcgcatgaagggctggctggccggcacgatcaccgtggccatcgcactcagcgtggccctgttgttctaccgcatgccggtgccccaggcgctgggcgcggccggcttcggtttcgtctacggcctgtggcccatcgcgtggatcatcatcggtgcggtgttcctctacaaagtttcggtcaagaccgggcagttcgacatcatccgggcctcgatcctctcggtgaccgaagatcagcgcctgcagatgctgatggtcggcttcgcttttggcgccttcctggaaggggcagccggtttcggtgcgccggtcgcgatcaccgcagcgttgctggtcgggctgggcttcaagccgctgtatgccgccggcctgtgcctgatcgtcaacaccgcgccggtagcgttcggcgcgatgggcattccgatcatcgtggccgggcaggtcaccggcctggacgcattcgagatcggccagatggccggccgccagttgccgttcctgaccatcatcgtgctgttctggatcatggcgatcatggatggttggcgcggtatcaaggagacctggccggcggtgctggttgcgggtggttcgttcgccatcgcgcagtacctgacctccaatttcatcggcccggaactaccggacatcaccgcgtcgctcgcgtcgctggtgtgcctgaccctgttcctgcgccgctggaagccggtgcggatcttccgtttcgacaccgaaaccagcgccgaggcggccgcacaggcactggaggcaccgcgccacagcgtcggccagatcgccagggcatggtcgccgttcctgatcctcaccgcgatggtcacgctgtggagcatcaagccgttcaagtcgctgttcgcggcgggcggtccgctggaaggctgggtgctgaagatcccagtgccgggcctggaccagctggtgcagaagatgccaccgatcgtggatgcgccgctgagctatgacgccatctacaagtcgactggttctcggccaccggtacctcgatcatcctggccggggtga

SEQ ID NO: 509723 - DNA, 516 bp, Stenotrophomonas maltophilia
gtgattgccatcatcgtgctgcgcatgcctgcacgttcggcgctgcagaccttcggcgagaccgtgcgtgagctgcgcatgccgatctactcgattggcatggtgctggcgttcgccttcatcgccaactactcgggactgtctgccacgttggccctggcactggcgcataccggcgacgcgttcccgttcttctcaccgttcctgggctggctgggcgtgttcctgaccggttcggatacctcgtccaatgccttgttctcggcactgcaggccaccaccgcacagcagatcggcgtgtccgacgtgctgctggtagcggccaacaccaccggcggtgtcaccggcaagatgatctcaccgcagtcgatcgccattgcctgcgcggcggtcggcctggccggcaaggagtcggatctgttccgcttcacggtcaagcacagcctgatcttcaccacgatggtcggcctgatcaccctggcccaggcttactggctgacctggatgattccctga

SEQ ID NO: 509724 - DNA, 765 bp, Stenotrophomonas maltophilia
atgagcacgcaacgtatttcggacaaggtggctgcgcagctgcgcggcctggtgcaggaacaacagctgcggccgggcgaccggctgccggccgagcgcaccctggcggtgcagctgggggtctcgcgcaccgcgctgcgcgaggccatcgcgcagctggccagccagggcctgttgaccgcacgggtcggtggcggcacctacgtggccgagcctgcggcacgcgcgcggcaggcgctggatgaaccgctggcgccgtacctgccgctgttccagggcgacccggaataccgcttcgacgtgctggagatccgccacgcgctggaaggtgccaccgcttggcatgcggcgctgcgtgccaccgacgaggaccgcgcgcgcatcgcacaggccttccagaccatgatggacgcgcacggcaaggacgaccccaccggcgaggcggaggccgacgcggccttccacctgtccatcgccgaggcctcgcacaacctggtgctgctgcaggtgatgcgcgggctgttcgaactgctgcagaccaacatctcgcagagccgcgaaaagctctacacctcggcgaagaccttctcgccgctgtccgaccagcaccgcgagatgatggatgcggtgctggccggcgaccccgaacgcgcgcgcgccgccgcgcatgcccacctcgagttcgtgcacaccacgctgcgcaccctcgatgacaacgaagcccggcgtgcgcgggcctcgcgcctgccttccccccacggttga

SEQ ID NO: 509725 - DNA, 1140 bp, Stenotrophomonas maltophilia
atgatcatctccgcctccaccgattaccgtgctgctgccgaacgccggctgccgccgttcctgttccactacatcgatggcggcgcgtatgccgagcacacgctgaagcgcaacgtttccgacctgtccgacatcgcgctgcgccagcgcatcctgcgcaacatgtccgacctgagcctggaaacccagctgttcggcgaaaaactggcgatgccggtggcgctggcgccggtcggcctgaccggaatgtatgcgcggcgcggcgaggtacaggcggcgcgcgcggccgacagccgcggcatcccgttcaccctgtccacggtgtcggtgtgcccgatcgaggaagtagcaccggccatccagcggccgatgtggttccagctgtacgtgctgcgtgaccgtggcttcatgcgcaacgcgctggagcgggcgcaggccgccggcgtgaccacgctggtgttcaccgtggacatgccggtgccgggcgcgcgctaccgcgatgcacactcgggcatgagcggcccgaatgcctcgctgcgccgtatcggccaggccatcacccatccgcactgggcgtgggacgtgggcctgttcggccgcccgcatgacctcggcaacatctccacctaccgcggcaacccgaccgggctggaggattacatcggttggctgggcagcaacttcgatccctccatttcgtggaaggacctggagtggatccgcgaattctggaagggcccgatggtgatcaagggcatcctcgacccggatgacgcgcgtgatgcggtgaagttcggtgccgatggcatcgtggtctccaatcacggtggccgccagctggacggcgtgctgtccaccgcacgtgcgttgccggccatcgccgatgcggtgcagggcgacctgaagatcctcgccgattccggcatccgcactggcctggacgtggtgcgcatgttggcgctgggggccgataccgtgctgctgggccgcgccttcatctatgcgctggccgcgcagggcgaggccggcgtggccaacctgctggacctgatcgccaaggaaatgcgcgtggcgatgaccctgaccggtgcgcgccgcatcgccgacatcggccgcgactcgctggtcagcctgccatga

SEQ ID NO: 509726 - DNA, 1707 bp, Stenotrophomonas maltophilia
atgagcggccacgccgccgtgctggcacagttgcgcgatgcggtcggcaatcgccatgtaatgaccggcgacaaggctacgcgccgcttccgccgcggctaccgtttcggcgatggcccagtgctggcggtggtgcgcccggggacgctgctggaactgtggcgcgtgctgcaggcagcggtgcagggcggcgcggcgatcatcctgcaggcggccaacaccggcctgaccggcggctcgaccccggacggcgatgactatggccggccgatcgtgctggtcaacacgctgcgcctgaccggcatccagttgttgaacgaaggccgccaggtgctgtgcctgcccggtgccacgctggaccgcctggagcagacgctggctccgctgggtcgcgaaccgcattcggtgatcggctcgtcctgcatcggtgcctcggtgctgggcggcatctgcaacaactccggtggcgcgctggtgcgacgtggcccggcctacaccgagctggcgctgtatgcgcaggtcgatgcgcagggccagttgcagctggtcaaccatctgggcatcgcgctgggtgatacgcccgagcagatcctgcagcgcctgcaggccggtgactacacggccgccgacgtgggcgatggcgacggccgtgcggcttccgatccacgctatgccgaggaagtacgcaaagtcggtgccgatactcccgcacgcttcaatgcggatcccagccgccacttcgaggcagcgggatctgccggcaagctggcagtgttcgcggtgcgcctggacaccttcgagaaggaggctgccgaggtcttctatatcggcagcaatcgcaccgacagcctcaccgcgacccgtcgccagctgctgaccggcttcgagcgcctgccgatcgcgggcgagtacattcaccgcgatgcctatgacatcggcgagcgctacggcaaggacagcttcctgctgatcgatcgcctcggtacctcccgtgtgcccgcggcgttcgcattgaagagccgcgtcgatggctggttcgaacggctgggcctgcgcggggtgaccgaccgggtgatgcaggtgctgaccggcctgctgccctcgcacctgccaaagcgcatgggcgagttccggcaacgctacgagcatcacctgttgctgaaggtctctgcccaggacgctgcggaaaccgaggcctggttgcgcgggttcttcgccgggcacgaaggcggctatttccactgcacggccgaggagggacgcaaggcgttcctgcatcgcttcgcggtggccggtgcggcagtccgctatcgtgaagtgcatcgtgagcaggtgcaggacatcgtcgcgctggatatcgcattgcgccgcgacgatacggattggttcgagcagttgccggccgatatcgacggccgcctgctgcacaagctgtactacggccacttcctgtgccacgtgttccaccaggactacatcgcgcgcaagggcgaagacccggtggcgatcgagcatgcgatgtgggcgctgctggaccagcgtggcgccgagtatccggccgagcacaacgtcggccacctgtacccggccaagccggcgttggcaggtttctaccggcagctggacccgagcaataccttcaacccgggtattggccagacgtcgaaggcgaaggggtggggcagctgcgattgcagtgggcattga

SEQ ID NO: 509727 - DNA, 885 bp, Stenotrophomonas maltophilia
atgccttccattcccgtccgcgccgccctgtgcgctgcattgctggcgaccccgctgctggtgctggcgcagtcttctatcctgccgcagcagcgcgatgccgccggcaacgtgatggaaccgctggggcaggtgctggaacagggcgggcagggcgaagtacgcacgcagtactgcacgcttgatcgtgtctggtgcgtgcgtgtgcaaccggtggccgaggacggtgatcggccaacgacgctggaagtctctgaacgggtggccggcgaaagcgaagcgcatacctaccacgtcagcatcgacgtgccgcaggaaagcgagctgtcgctgtggccgtggatcgtgcgcctggctccgggtatcggcagcgatgagccggtgaccgacccgcagcagcgcgcccaccagaatgtgctggtaggcggcatcgtcaagttcagcaccatgtactccggtggaggtgccgacgcgtccacgctgcagttggcacgcgtgcgccacctgcaggacgacatccaggtggacgacgacgtgctgacggtgccatggctgggcaatgcgatgatccgtgcgtgtttcagcgagcaggacatgaagcagcgcgcaggcgcctgccacgacgaatacgggttctcggccaggctcgggctggatccggtggccgagggcatgccggtgctgcgctaccagacggtggcaacccgctttccggcgggcgtttcgcgtttcgaggattcgctggccaagggcccgctgaagaagaaggacctgcgcaccgagcaggacccggcatgcagctacacgcggctgttccgcttcaatgatggggtgttccaccccgaccaggcgctgccggactgcgcggggtataccgaaccctga

SEQ ID NO: 509728 - DNA, 297 bp, Stenotrophomonas maltophilia
atgtccgccttccgtctgtccctgttactgcctgcgtcggccctgctgctgtcggcctgcgtcagcacccctggcccgcaggtcaagggtaccggccactgcgatgccagccagctgggctgggcaatcggccagccggccaacgaacccaacatccgccgcctgtccagcgagagcggcgccggcctggtcaacccgatcggccccagcaccatcaccacgaaggacatccgccaggatcgcctgcgcgtgtacgtggacaaggacaacatcatcaccgctacccgttgcgagtaa

SEQ ID NO: 509729 - DNA, 660 bp, Stenotrophomonas maltophilia
atgacggcaggcagtttgcgcgacaagcgcagggcgagaagagtactggcagtgtcggtgctgggcgtggcgtttgccgcctctgccatcgagccgacgccggacgccgctgcggaagcgccggtgttcggtgcctggcgcaacctgcagaccgaggcaggctacgcacccgcccagcgcaacctggcgttcgcgatgctgccgcaggccgccacccgcggcgatcgattcgccattgtcgatcgtgagggcaagcgcgcggtgtgctgcctgcaggtggccagcccgtcgctgggcgtggccgcactgcgcgagcaataccacctgccacaggcctgggtgaccgacctcagcaatggccgcagcccggcacgcccctacctgccgcacgtctatgcgatgcagcgcgtggatgaactggctgactatggtttcaccgatgtgccgggggcctacagcgacctgggggggctgctgattcccgaaggtgccgcgctggaggccgatggcagcgccgtgcgcctgggtgatgaccgttatcccctgcatttccagcgccagccgcacgccgaagatgatggcgcactggaccgctacaccctgcaggcgggcgagggcgtggctccgatcgtggttgaagtgccgttcggcacctactga

SEQ ID NO: 509730 - DNA, 780 bp, Stenotrophomonas maltophilia
gtgtccctgcgctcgttgctgctgtcgcccctgctgctgttgtccgcctgtgcgagcgcgccgcctccgccgcccgtccattccgatgcgctgtggcgcctgatcgagcgtgactgccaggcagctgacggcccgcgcggcagctgcctgcgggtggagacggcggccggccgccgtgacgtgctggtcaaggatgcacacggtaactaccagttcctgctgatgccgctggacaaggtaagtggcatcgagaaccgcggtctttaccagcgtggggcgcccaactatttcgcggccgcctggcaggcgcgcgcgcacaccgaacaggccctgggccagccattaccgcgcaacgtagccagcctggcgctgaattcaccgcacggacggtcgcagcaccagttgcatatccatgtcgattgcctgcgcacggacgtgctgcaggccctggatgcacacgccggcgccctggggccacgctggtcaccgttgccggtgcttctgcgcgggcatcagtaccaggcctatctgttgcccggtgcggaaatgaccgccaatccgctcaacctgctggcctatggcctgagcggcgtaggcgatgtgggccagtggagcctggtggtggccggacgcgatgacgtgcagggtggccccggcttcatcctgctggccacccgcgtggatgccgccagtggcaacgatgccagcggcgaagaactgcaggatcacgcctgcacggtgctgaccggcgcgggtgcggcactggagcgggtgcgctag

SEQ ID NO: 509731 - DNA, 600 bp, Stenotrophomonas maltophilia
atgaccaaccgcgccacctacactcacctcgccccgctgcgccccgtcctgcgccgccacctgctgcacctccaggcaacgcccatcaccctgcgttccttccagcgcaccgatctgccgcgctggcgcaccttcgacgaccgtcgccagcgcggccaacggccttcctacggcattgatgaagaggcccgcttcctcgccagcgtccatcgttcacgcctacaggaagacaacgatctgctggtactgggcgtgttcgacgacgcgcagggcatcctgcacgaccaactgcatgtccgcctgcagtcactgcattcgcgctgcgcagaactgcagtcgctgcagcaccgcaacgcccatccacaggccgcactgcgcgcgctgtgcccgttcctgttcgacaatgtcggcctgcatcgcatcttcgtactgctgccaccgggttgcaccacccctttcgcccaggcactgcaggccctgggcttcatgcgtgaaggcatcctgcgcgacttccacctggacgccgagggatggcatgaccgccagttgctggcgcttaccgcgccagcgtggcgcagccacctgcagcggatcggctag

SEQ ID NO: 509732 - DNA, 2727 bp, Stenotrophomonas maltophilia
atgtccgcctcccacaaggcgttgcgcccgcgtccgctggtgctcgcgctgtcgtccctgatgctggtctcgctgccggccttcgcgcaggaaagcgcacccaccacattgcaggaagtgaaggtcaccggctcgcgcattccccgtgccagtgtcgaggggccctcgccagtgacggtgatcagccgcgagcagatcgatgcgcagggctaccgcaatgccttcgacgcgctgagcgcgctgaccgagaacaccggcaacgtgcagggcgaggacttcggcaatacgttcacgccggccgccaacaccatcaacctgcgtggactgggtccgaaccgcacgctggtgctggtcaacggccgccgccaggccgactacccgctggcctacgagggctcggtgaacgtggtcaacctcgccaacattcccagcgccctgatcgagcgcatcgaggtgctcgccgcgggtgcgtcggcggtgtatggctccgatgccatcgccggcgtggtcaacatcatcctcaaggaccgctttgaaggcgtggacgtgaacgtgcgcgccggcggcacccagcagggcgggggtgacaaccagcgcgcgcaggtggtcggtggcagttccggcgagcgttgggatgcgctgttcggcttcgagttcgacgtgcgcaaggcgatccacgcgcgccaacgcgacttcatggattcactggacgatgatccggccggcaaggcaccgcaggcgaccgcgatcgcctatcgccgcaatgctgccaccggccgcaacatcgatccgggcgtgagcggctgcgacgcagcgtcgggcatttatggcggcagcgtgttccgtgccaacaacccgcgccagggctggtactgcggcagcaacgaggccgccgccagctactggaccatgcagacccagaagcgcaacctcaatggctatggcctgttgaccttccacgtcaacgacaccaccgacctgttcgccgatgtcgccgtgggcagcgcgcgcatctacaacaacacgcgcgcgccgacctggacgtcctcacgcaactacttctacaaccagaacagcggaaacctggagagctggtaccgccgcttcgcgccggaagaaatcggtggcctgccgcgcaatgccaatcggttcctggagaactcgtggtcgttcaacgtgggcgcacgcggccagatcggcgacagcggctgggactacgaggcggtctacagccggtcgcgctacgagaaccgaacccgtcgcccggtgctgctggccggcatcaacgagtacctgctgggcccgaagctgggcgtgcgcaatggcgtggaggtctatgcgccggacccggtgcgcctgttcaagcctttgactccgaacgagtatgcgggcctgtccgactatcaggaaagtcgcaacgcggcgtggctgcagaccttcagtgccagtgtcaatggccgcctgttcgcactgccgggcggcgatgctgcgctggccgcagtggtcgaggccggcagccagggctaccgcaaccgcccggacccgcggctgggcaccggcgagttctggaacaccagcgccggtatcggtgccggcggtgatcgcgatcgctatgcggccggcgttgaactgcagttgccgttgctgcaatcgctgaccaccacgctggccggccgctacgaccagtaccgcgcaggcggcgagcacatcggcaaggcgacctggagcttcggcgtcgagttccgcccgatcgagagcctgttgatccgcggctctgccgcgaccagcttccgtgcgccggacatgaactacgtgttcgccaccgagacccgcggctacaacccgggcatgaccgattactggcgctgccgtactgcaggccagtcgtacgacaactgcgactacaacggcctgtcgatcgactacagcaaccgcgccaacgcacagttgcagccggaaaccgcaaagtcttacggcttcggcgtggtctggtcgccgctgtccgggctggatttcagcgccgactactacgacatccgcatcgacaacgaggtgaccagcctcgataccagccgtatcctgcgtgacgaggccgattgccgcctgggccgcacgctgggcggcgaagcgcgcgatatcggttcaccgctgtgccaggacgcactgtcgcgggtgatccgcaatccgtccaacgccacggtgcagccggaccaggtgacccgcgtgctgatcaatccgatcaacgcggcctccgaatcggtgcgcggcctggacctgaagggcaactggcgtttcgatgccggccgctatggccgcttcaccacgcgcctggcctacaccgtggtgctggagcacaagtaccggcagttctccgatgatccggagcgtgacatccgcaattcgctggatgattaccagtggcgcagcaaggccaatggcagcatcacctggaaccagggtgactggaccaccacgctgtacggcaatcgtttcggttcactgccgaagaccgatggcagtggccgcatcgcgccgtacatgacctacaacgccagcgtgttccgccagttcggcgagaacctgtcggtgggcgtgatcgtcaacaacctgcgtgacagccgcccgccggcagacaggaacgggggcggctggccgttctacccggtcggcaactacgacccgtatggccgccaatactggctgcagctggattaccggttccgttga

SEQ ID NO: 509733 - DNA, 627 bp, Stenotrophomonas maltophilia
atggatgccagagtgtggagtgtgattgccgtgctggccattgccggttgcagcagcaagcaggcggccagtgtggacgatgctgcggaggcggccagcgccgcgcccgtgccgtctctttccaatgcagtgaccgatgctggatcagcgcgcgtgccaacggcatcgacgcgtgcgacggccgggcaagggcctgcggatccggagggacacttccttgagggcgagcgcttgctgttgactgaaggagcactgtcggcggaaaagagcgacgtgatcctgggctcggacaacgcctttgcgcaggcgatcagccagttcgagcaggatgcggcgggccacccggaagtgcaggacctgacccggctctacaggacggctgcgacccggctcatcggcagcgacggcacgctggtgtcttttgcctgtggctacagcctgtgtgtcggcgagatccgcagccgcaccgatgaggatttcagcgcctggtccgaggcgatcggcatggacaaggcgagtccggcctacagcctggccacggcaccgatgacgtggggcagggaccagtacggtgggcgtttcgtgttctcggtggacccggccgccaacgccatcacgggtcggtag

SEQ ID NO: 509734 - DNA, 642 bp, Stenotrophomonas maltophilia
atgggcccgtccgaccgccacgatcgtctccgccgctggcaggccgcatccctgcttgccgccgccccgatcgccagcctgtccgccactgatgctgcggccgctgcaccgctgcagtcgccgccgggccagcagcgcatcgcaccggctgcactggtcgagcgcctgcaccagcgcgtgctgtccgggcagagcgccaccgccacgctggaacactggtgcgccgaacatgggctggccgaacaagcccgggtgcgcgcggtgcgcgtgcacggccaggacaagcctgcccccgccgacgttctgcaggcgctgggcgcgacgccgggtaccgaactgcgctatcgccgcgtacagctggtctgcggcagccgcgtgctgtccgaggccgacaactggtacctgcctggccacctcagcccggccatgaaccaggtgctggacagcaccgacgaaccgttcggtcgcgtggtcggcccgctcggtttccagcgccagaccctggctgaccagacgttctggccgccgcggggcgaaggcgatcacggcgtgatcctcgaggtgcgtgccttgttgcgcgaccgccagcagcagcctttcagctacgtcatcgagtcatacctgcagcaggcgctgccgtaa

SEQ ID NO: 509735 - DNA, 438 bp, Stenotrophomonas maltophilia
atgtccgaccaacccccgacccgattcgatcccctgcctgcagccctgcagacgcacctgcagcaccagcgtgcactgatcgccgcgcgcgtggccgccagcttcccgacgttgccggtgcaatggccgctggccgcaagcacattgcagcgcgtggtcgatgccgaactgatcgatcgtgacgactgcggcggctgggaagccctgggcgtggcgttcggtgacactctggcgcaacgcgtgccgggcctggcctggatgcaggtcaccgatgcctggggcatcgacgcggtgctgcgccatgccgacagcaacttgcagatcggcgccggcaccctgctgctcaagcgcgtggagcagggcgaggtcatcgacatcgcccatctgctggcgtggctggaagagttcgtcgccacccgcgcagacgattacgcctga

SEQ ID NO: 509736 - DNA, 216 bp, Stenotrophomonas maltophilia
atgaacagcgtcgccgaacagaacaggaatgaccgctccaacgcttccgctgaagcagaacagcccgtgcagcagaggcaggtcgaggggggcgagcccagcgcggaggagcctggccggcaaggcgaacaacagcagcaggacaagaaggatcgtagcgattcgaatccaacggacgaaaagaaaggcggtcccggcggtgatacgcgccgctga

SEQ ID NO: 509737 - DNA, 603 bp, Stenotrophomonas maltophilia
atgcctggcgcacgtcggtccgcgtatccaaagatatcgagggtgagcaggtcatgcccgttctcgaccaggagtaatggaacctctctgcaccgaagttcgaacacgctcgattgcggggggcctgcttcgatggcaatgcctttcgatgcgttcgcccgagcgaaggcgatcgcatcgtcgcgaagcatcttgaatgtttctggtggaagtgggcggaatgttctgagctcagattcgagagaggttggatacgttatccaaacgattcctgccgcaaccaccaggcccaggaacgtgagggaagagatcagaatcttcatttgggagccttcatttaacctgtctgacccttggactttgcggattcgcaaccttccgccccagccggtggacagcagcttccgtgcgttgccgcgcctacagaacgccctcgtcacgaagccacgaagatcgacgcaatacccgcgagcgatcccacggccacccacgagagcgtggcgaatgcaaccagcaacaccttccggtggacgacctgcgcttcgttccgggactccggccgccgcgcatagggcctggagaaacccagcagttcgccagtga

SEQ ID NO: 509738 - DNA, 609 bp, Stenotrophomonas maltophilia
gtgagagttattgttgttctggcgctggcgttgtccatcagtgggtgcgggatgcttccgaagaaggaaacgcccgagcaggcggtggcggcatcccgcttctatcccgggaaatcgatcgaccaggtcagggctgcttcaatcgaggtcttgaacctgctggcgcccggaaagatggaattcgatgctggcgcgcccggtatcgcggcgaagcgcacctatgggtatgtcgaacgccgcatgggctaccagggcaccatgacgacgttctacaacgtcaacatgacggcggtcagctggtacaccgttgcgctttctgaagaggccggtggtacgcgggcccggtttgcgctgcagacgcgtgccgacgatcaggcttcgtactgggccaaccctgctgtcccggccattcacagcagcttccgtcacgatcttccgctggacggacgccagggcacggccgatctgaagctgttccatgatcgcgtcgagcatgtgctggggctgcgtccgaactgggtgtcatgcggcgaagtgaaggagccaggcaaggttcttgagctctgcgatcgcagcggcatcagcgacgtcggtccgatccggtcctga

SEQ ID NO: 509739 - DNA, 471 bp, Stenotrophomonas maltophilia
ttgaaccgagtgcgatcccaggcccggcaccatcgcctcatcagtgccggcatcgccggcgcggtgacgctggccggcagctgcctgctccccgtcctggtgttgctgctgcctgcgggattctcgccaggcgagttcatcatgcccgtcgccgacggcgccgcgcagttgcagattgccagcctggtcctgctggggtcttgcgcactggccacgtttgccggcctgtgggccagcgcgccgtcgccagaacccgcatcgacggcgcgcaggatggtggcgtcgctgatcctgcttgccacgacgctgctgatcatcctggccagcatggcctacctgatgcgaatgctgtccggcggggcgccaacgacagggcgcgggcttgtcgttgccaccgtcgtcggcgccgcagtgcagttcctgtttgccagagtgctggcgtcacgatggctgcgcgtgcaggcatcgtga

SEQ ID NO: 509740 - DNA, 627 bp, Stenotrophomonas maltophilia
gtgccggactggttgcccgtttccctgcagagcctcccgcgcggcttctaccggcgcccgccaaccgagctcgccccggagctgctcaacaagctgctggtgcgcaacgatggtcgcgtcggccgcatcgtcgaggttgaagcctatgccggcagcgacgatccggccgcgcactcttatcgcggggcaacgccgcgcacggtcagcatgttcggtgaggcgggccatctctatgtctacttcacgtacggtatgcactggggcagcaacgttgtctgcggagagatcggcgaaggcgtcgccgtactgcttcgcgccatcgaacctctcgaggggctggaccagatgcgggcgcggcgtcccgccgcacgccgagaccacgatctggccagcggccccggcaagctctcgcaggccttcgggctggaccgcagtttcgacggcgccgatctggtgacaggcagccacggcattgtcatcgccagcgatggcgtgccgcctccggcagatccggtgatcgggccccgcatcggcatcacccgcgcggtggacttcccctggcgctggcatgttcgccaccaccgtcacgtttcagtgcggccctcgcgcgggccccgcaaactctga

SEQ ID NO: 509741 - DNA, 711 bp, Stenotrophomonas maltophilia
ttgcatggaggcgccgcggccgttcaggcaccagcgccacgcctgaacgcgatagctccgcgtccacgcaatctcgacacaatctcgaccgaatctccatcaacggtcgctagcctcgtcggcctcgccgaccgcctgtttgccgtgtccctttcctacccggacctgccacccatcgatgtgcgccgtgcctacctggcatggtgtgcgccttcgccatggttgatagcactggtgctggcatcgaccagcacgtggatgtgggtcacgccgtatccgggcctgccattgctggccggcttcggggccgccgcactggtggggttcggcagtgatgggcccggccgcacccgccgcaccgggtccctcgcatcgctggccttgatcggcctggcggtctgggcggcaatgcacccggccgccaacgtcaacctgcatctgctgcttgcccttgccaccaccgtggtgtccgccctgctggcagcgcgcctgcacaccatcgcgcgcatggctgcacggctgcaggcccgggtggacgccaccccgatggcctcgcgctggagcaagctaccctcggcggtgtccaccctgatgcagcagcagctgcgcggcgcggctgcggtggaacccagcctgcagcgcacgctggtgctggccacactggcctgggcagccaacgaggaagcacaggccatggagcgccgccgatga

SEQ ID NO: 509742 - DNA, 627 bp, Stenotrophomonas maltophilia
atgcatgccccttcccgcgcgccgttgccccagcgagcgctgctgtggctgaagaaggaggctttgccgctgctgatgctgctgagcctgttcctggctgcacgcgacaccttggcaaatcactacgtggtgccaaccggttcaatgcagccgaccctgcagccgggtgatcgtgtggttgtcgacatgcgggcgcacggcctgcgcctgcctttcaccgggctgaagctgatgggcgacaacgtgccgcaacgcggggaggtggtggtgttcgcttccccggccgatggcgtgcgcatgatcaagcgcgtggtcgcagtagccggggaccgcgtgcgcttgcaggagggacgattgaccatcaatggccagcctttgcagatgactgtcatgactgacgtggaacggttcggcaagcggcaggcccgactggatctaacgcatggcggaggcccggacattgccgatctgcgggtacctgccggcaaggtgctggtgctgggcgatcaccgtggcaacagcctggacggccgcttcttcggctgggtcgatgcggaccggatctacggccgcgccgtggcggtgtactttcgccgcggtgaaggcgtggtctggcagcgcctgtag

SEQ ID NO: 509743 - DNA, 2286 bp, Stenotrophomonas maltophilia
atgtccgagcagaaaccgccgcgttacaagccctacaaccagcctgccggcggctggggtgccgccggtgccaccgccaaggtgctgctgcagcagagtgtgatcggcaaggggtcgaaggcgctgctggcgatgaaccagcccggtggcttcaagtgccccagctgcgcgttccccgatgccgacgaacgcaggaagctggagttctgcgagaacggcgcgaaggcactggcctgggaggctacggagttccgggccggccgcgagttgttcgcccgccacaccgtcacggagctgatggcgcagaccgactactggttggagatgcagggccggctgaccgagccgatgcgctacgacgcagccaccgaccactacgtgccgtgcagctgggacgatgcctttgcactgatcggtcgccacctgcaggcgctggacagcccacaccaggccgagttctacacctccgggcgcacgcccaacgaagcggcgttcctgtattcgatcttcgtgcgcgagtttggtaccaacaacttcccggactgctcgaacatgtgccacgagccgaccagccgcgggctgccgccggccatcggggtgggcaagggcaccatcgtgctgcaggatttcgagcacgccgaggcgatcttcgtgatcggccagaacaccggcaccaattcaccgcggatgatgagcaacctggtcgatgcgcgcaaacgcggcatcccgattgtggcggtcaatccgatgcccgagcgcgcgctgatccgctttgccgagccgcaggacgtggtgcagatggccacgttcggttcgaccgagatcaccagcgagttcgtgcacatccgcatcggcggcgacctggccctgatcaagggcatgatgaaggtgatgttcgagcgcgaggcgcagggcgagcgcgtgctcgaccatgatttcctgtcagaacacacagtgggcctggaggcgctgcgcgaggatgtgttggcgcaggactgggaccagatcgtgcaggtatccggcatctcgcaggcgcagatacaccgctgtgcggagatctacatccgctccaaggccaccgtgatctgctacggcatgggcctgacccagcatcagtacggctcgcgcctgctgcagcaggtcgccaacctgctgatgctgcgtggcaacttcggcaagcccggtgctggcatagggccgatccgtggtcattccaatgtgcagggcgaccgcaccgtcggcatcgacgagaagcccaagccggcctacctggaccgcgtgcagcaggtgttcggcttcgatccgccgcgtgagcatggccaccatgtggtcgagtccatcgaggcgatgctggacggcagcgccaaggtgttcatcggcctggggggcaacttcatccatgcggtgcccgatacgcctcgcgcgtatgaagcgatgcgtgggctggacctgaccgtgggcatcgccaccaagctcaatcgaggtcatctggttcatggccgcgatgcgctgatcctgccggtagtggcgcgctcggagcgcatcgtcacgccggccggcgagcagttcgtcaccatcgaagacgcgatgtcgaacgtgaccgcctcgcgcggcgtgctcgaaccggtcagcacggaggtgctgcccgaggttgagatcgtctgccgcatggcgatggctgcgctgccgcacagcaaggtcgactgggcccgctgcatgcacgactatgcacctattcgcgaactgatcgctgccgtgtacccggagatctacaccggcttcaacgcgcgcatccagcagccgcacggtttccatctggacattccgccgcgccgccgcgtgtggcccacgcccaatggcaaggccaacatcctggtgatgcccggcctggacgtggacgatccggtgcacgatccggacatgttgcggttggccaccgtgcgctcgcatgatcagtacaacaccaccatctacagctacaacgatcgctatcgcggcgtgtacaacgatcgcatggtgctgttcatgaacatcgaggaccggctggcgcgcggtctggagaaggaggcgctggtcagcctggagacgatcagccgcgatggcgtgcagcggcgcgtcgagggcctgaccgtactggactacccgatgccgcgcggcgcgctggccgggtactacccggaactgaacccgttgttgccactggactactacgaccgcatcagcggcacgcccgctgccaagtcgattccggtgcggatgagtgcaatggcggcggcgactgcgtga

SEQ ID NO: 509744 - DNA, 999 bp, Stenotrophomonas maltophilia
atgtcggctgcccggcaaccacgttcactgctgtcggtttcccttgatgtttccgtgcaccgtacgttggcaggtgcgccggcttccggaagccgcggaaccaaggtaacggatgccctgcctccccccacgatccgtgcagaaggtccggcgctctggcaggcaaggcgtgaagaggcccacctgtggatcctgcccgtccccaccgcgctacccggatcgatgcgatgcgtgacgggcgaagcaggacgcattgccgcggttgcgcacaccattctgggccggccgaaggtggacatcaccggcagatgggagggctcgggactgagcgcgttgttcacactggcccgtgcggtgtctgaagccgaaaccatccaccacaatcccgacaacctgaccctgaaggatgttctgccggcggacgtccatgcagaatggcaagcggcattgaatgagtgcggaatcgatccaatcgagctggaacgcctgcgtccccacttcgcggccagagcgctgcgcaaggccgtcatggccaggcatcagctggagtcgccgaaggcattctgcaaggagctgcgcaggataggacgcgcgggtggagcccgctacttcgtgccgcgcactgaactggctatcgacatcgcggcagctgacgactgcggtaaaccgcatcctgcactggatgacacgacacggtttgcggtgcaggtcgaacgactccgtcgccttcacgataccgcccgtgttcagtccaaggcctgggcgcatggcgatgcccttggcatgggtgggcatgacgtgcctatggatatgcacgtgacagcgactggcagcaacgagctggacacgcttcgacgcgaggcctggctcagcgcagtggaagccgtaactgcgggaagatcaaccacgcttgcgatgctcgatattgcagatgcgttcgacgggaacggctacatcagagcgctgcgcgaacgcggtttcagcttccagccggcgtag

SEQ ID NO: 509745 - DNA, 618 bp, Stenotrophomonas maltophilia
atgcacggacctgcgatgttccgctccacttcgacctgccttgcgcttgctgcgctggcgctgtccagcctgacggcgatggccgcgccggccgcgtccaagcgggtggtggcgccgcccagcctggtacaggcgtatcgggccgccgaagccaatctgcggctgattcccggcgatgacatcgaatccgagttccgtccggtgtggaccgctgttgccgatctcgatggcgatggccgtgccgaggtcgtgtatttctacacgtccacctacaccggcggcagcttcgcgcagagcaatgtggtggcggtgatgacggcgctgacagcgaacgatccgcgtggccaggagaacccgaagagcctgtcgccggtggaggcagaggactatgccgccatccgcaggtatggctatggcgatgatgccggcatccagattccgggcgcggtgcagtcgatccgaatcgaaggcaaccggatcatcgttgccttcaccgttaccgcaggcgcaacggtctgcgaaattccccgcgatttccgccacgtctgtccgccggacggaaactacacctggacgctgcgttggacgccggggaagctgacccccatcaagacgtag

SEQ ID NO: 509746 - DNA, 2277 bp, Stenotrophomonas maltophilia
atgatctcagctaaagcggacacggtcgacagtttgaagcgattgattgacgaagttgatgactttcatcccgtactcaattcgctgtttagaaagatgccggggattcagcgctgccattataatcagggccccaacgagatgggggctgattttatcctttatcgaagtgatgacgcattgctgagaacgactcaggtgggggtcgtggttaaggttggtactatcaagcaaaacaccacggaagttgagcggcagattaaggagtgctttgtgccgcgcagggccgctgacggtgttgatattcaaattagagaagtttgggttgtttctaatgtcgagataacgaggaatgcacgtgaagtccttatgtctcaatattctgacagaaaaatagaatttattagtggacaagatctggcgacgctcatagatagatatgcgccagattgcttcaccacaacctccccgcagcttcaagcatttgcagatgatgttgagacctcgctgcaggatgcggacagaacaagcttggttgtgccgggaatggaggccttctacattgagcctaagattaccaggcgactaatggatgggtacggaaattctagaactcgcacactttccggcttggatgagctgataagactcctgctgggatctcagcttagctttattgaagccggtgcgggtggcggaaaatcaaaggctgcgcgagaaatgatcagaaaggtcattcgcagttccgagttttctgatggccaggtggtgccggtttcaatccatgcgaaggatctttatgggaatgtgaaagatagttttagggcggcctgcgtaaaggctcgcgacgtcagtgcgtctcaagccgcttcggcgttagtttttgttgacggttttgatgaggttgatattagtccggaagatcgatctgtcttcgtgggtgacttaatatcagcttcctccgaaaactccgcaagtgcggtgttgctgtcgcgcccattcgacatcggaggggttgcagggccaagggtcgcctctctggacgtctaccagattgagcccctgcagggaacgcgagcaataaagtttctggagagggttaccaaacagtcggctttaagtggcaggttgatgcgagatctgggagggagtgctctaatgaaggcgctcgacgggtcgccaatatcatacatcttactgggaaggattcttgctgaaaacgagcaagatttgccatctaatctgacggagctatttcagaaatatgccgagatagttcttgggcgatgggaaatgagcaagggtctcaggtctcagaaggaatatgaggtgttggtggaggcacttacttggctatcaacttatcttttggataacgatttaccccgaattgcatcgggtgaattggaagggtggatcagtgagtacacctcgagtcgaggtcttgagataaattcatcgatgcttgtcgatcgtgtaactgagcggagctcaatcctgtataagaggcatgataatggttctgtgggattccggcatagagcttttgctgagttcttctacgcacgaagcttgtccaaacagcgagacgtaacgctagagccatcggtattctctccatattgggcgaacacatactacttcttggctggaatgtatcgggattgtccggacatgattcagtcgttggttgacatggaaattgatcaatttgatctcaagataatgagggttattaattttggaaacataatgctagcgggatatcttactccgcatgcgccatgttcgtcggccctcaagaaagtggcattggatgctgctgatatatatatggaatcaattgatcctgaggcaactagcccgctttctagtctcccggtgatgcagattctatgcgcgcttgtgcaaaccttctctgctcaatacggatataggcattttcgatcgccgcttgagtcagtcatattcgaactcgaagacagcactgagaacgaaagagtcgcagttgctttgttcttgttagacacggcctataaagaagctggtggctcgttgaggtttgacaatcttcttgaaaagttcggcgagcgacttccgcttcctgtgaagctggcgattggtcatgaatcggaccgcatggggcgtatgtcggatatggtgaagaagatggagaggaatttgaagaaggcattgcgtgggcggcccggaactgctgctttcatggcacagctttatcgtgttccagtggcgaaattggagaagaaaattgtctaa

SEQ ID NO: 509747 - DNA, 366 bp, Stenotrophomonas maltophilia
atgaatgggcgctacggtgtaagttcattgctgcataaggacgcgcgagtacatgccatgaacagctaccagtcctatccgatccgccgcgacgcggtgctgtgcagcctggccgcacttcctgacggcggcctccgcgtggtgctggatgatctgcgtcaggccgatgcgccggggcagtggaagaatcacaccttcgtgaccttcaaggactacgcggcgggggagctcgatccggcgatgctgccgaaggaggaacttgaagcattcggtcactatgtcttggttcgcttgttggcgataaacggttgcctgcgtgatacggacgaaggtcctgacagcgatgtccctctcaccgaccagtag

SEQ ID NO: 509748 - DNA, 1557 bp, Stenotrophomonas maltophilia
ttgcccaaacctctctttttgcgtcgtccaagcgggctctatgcccgctttttggtgcccgtggatctgcgcgcccaggtgggctcccgcttcctggtccgcgccctgccaggcttgcgtggcgatgccgctaggctggtcgctgcccggctcgggctggcactatcggaagccttcgacctgttgcgcagggggcgcacattggacatctatcaggcactgaaggcggcgcaagcggccgcaacccgtgaattgacttacgagcgcgagcgcctggcggatggcaccatccgggagcgctggcaggtggacagcgacgacgacgcacgacggctcaaggccatcatccagagcgacagcccccggattgaagacattgggatgtttccgccgcacctgctggccgaagccaacgccccacacctggccgagcggatcgagacctatctaggcgacatgcgccgggccgagcgcagccagaccaacctggacgacacggtttacaccctccacctgttcctggcgttgaccggggacaagccgctccaccggctcaaaaccgatgacgtgcgcgcctttctcgatgcgttggaggtctaccccagcaacgccaccaagaaagtggcgtttcgggggctcaccccgaaggaaatcctggccaaggctcagcgcgaggaccatccgcgcctgagtatgcgcacgaaggaaaagcatcgggatcgactggcggccttcctcaacgcgcaggtggccgaagacctgctgagcaagtcgccgcacaaggcccttatcaatcgggataaatccaagaccgacgcgcccagccgggagccgttttccccggaagagttggcggcgctgttcgaccccgaggcgtttccgaagtgggccgtgaagtatccccatcgctggtggggcaccatcctgggggtggccaccggggcgcgcctgaacgagatcgcccaactctacgtggacgacgtgcgcctggaggccgggcacttcggcatccacatccgagccgggcgcgaggaccagcggttgaaaaacgcgcattcgtcgcggttcgtgccgctgccgtcggcggtgctggcggcggggttcctgcagttcgtggacgacctcaagcgcgccgggtgcgagcggttgtttccgcacctgccgttttccaaggccaatggctacggcgatgcgatgggcgaccagttccgcgcctacgccatcaagcagggccttaccgggcggctgaagtcgttccactgcttccggcacaacgtgacaaacggcctcatcaatgagcacggcgtggccatccacacaacgcaagaaatcaccgggcacgacttgagcctgccttctggcctcaagcactacgtgaacccagggaccattcccaaccgcgtgttggcgctgaacgcttacggcccgccggtgccgctacccgcctacgaacccggccagttcgccgcctcattcaagctgctcaagcacatggagaagcggcggcaacgtgcagcgaaaaagcgccaggtctcccaaagaaaaacccccgcatga

SEQ ID NO: 509749 - DNA, 171 bp, Stenotrophomonas maltophilia
atggataaagtcacacgacgcgccgcggccaaggccgccgaccttctcctggcagccgccgggtataaccccaaaggcgtcaagctcaaggctgcgcagcagaagcgccgcgcctatgcagaagcctggggacagcagcacagcaagaaaaaacgcaagaagaaacgttga

SEQ ID NO: 509750 - DNA, 567 bp, Stenotrophomonas maltophilia
atggccccggaacacaagcgcctgagccgttacggcactatggacttgtccgaaatcatggcgctgcctgtgtccgaaatcgtggccgacactgcccacctgtatctctgggtgcccaacgctctcttgcctgaaggcttggaggtcatgaaggcgtgggggttctcttacaaatccaacatcgtctggcacaagatccgcaaagatggcgggcctgatgggcgtggcgtaggcttttacttccgcaacgtcactgaactactgctcttcggcgtgcgcggcaagaacgcacgcacgctggacccaggccgcacccaggtgaacttcatggcgacccagaaacgtgagcactcacgcaagccagacgaacaatacccgttgatagaggcttgcagcccaggccccttcttggagatgttcgcccgcggccctcgcgaaggctggagcgtctggggcaaccagtccgatgactatgcgccgacttgggcgacctatgccaaccactcacaagccgagagagcagccaagcgcccggcggttagtcctcgacgtaaagctcaggactga

SEQ ID NO: 509751 - DNA, 588 bp, Stenotrophomonas maltophilia
atgcctatcaacagccttagctcgttcattcgcgagcactacgagatccatgagtggcgccacgcctcggccattctagctagcgacttccctgcagaatgggacgatatccaagccacactagaaggctttcgactccatcgcagccaaatcctgacaccaggtggccgcaagtcagacattgcgggctggcttgacggtcaattggaacagcgtggctggcgagagaagaatttcaaaactcagatcaaggtcgatgaccacaccatggacgcacccacccacaaggtggattgcttcaagaacggggttgcgcttgaaatcgagtggaacaacaaggaccccttctacgatagggacctcaacaactttcgcctattgttcgacctgcgcgccatcagcgtgggcatcatcatcacccgctgcagcgaactccaagccatcttcgacggcttgggtcgcggtaagtcctacggcaacagcaccacgcacatgggcaagcttctcccgcgaattgaaggcggcagcggcggcgggtgccctctcctagtgtttggtatcagtcctgagctttacgtcgaggactaa

SEQ ID NO: 509752 - DNA, 1590 bp, Stenotrophomonas maltophilia
ttggacgaccccagcggcgcccgccacgactacagcaagaaagtcggcgtgttgtcggtggacatgcttgcgcccgatggcgcgccagcgtgggctacagatccccatcagctctgggcgaaggtcgaagaacacgagacgcgaaagaacgcgcgggttgcccgtgaagtgctggtggctttgccgcacgaactggaccccgagcagcggcgtggcctggccaaagacctggggcaattgctggttgaccgctacgacgttgccgcccaggtcgcgctccacgcacccgacaagggcggagacaaccgcaactatcacacgcacatactcatcaccccgcgccaggtgggcccggccggcttcggcaacagcgcggccaaggtcctggacgaattcaaagccggtgcccaggaactgaaagacctacgcgcggcaatcggcgcgcgcatcaatgctgcactcgctgcggctggcgttgccgcccgcgtggacccgcgcagcctgcgtgcccagcaagccgccgccgtaaagcgtggcgacttccaggctgtggccgcgttggaccgcgtgccgaccaaacacgagggcaaggccgtcactcaagcccgccgccgaggcgagcgcctaccacgtgcaaaacgaaacgacacgctgaaggccgccggtgagcgccgcttcaaccagcacacccgccgatttgaagacctcaaggccaaagccgcggccgaaggccgcctccaatccgtggacgagcaagccttacacgcgcgggccttgcttgagcgccgtaaggaaagcgcccgggacctccaagctgccgccggggctgaagtccaagccatcgaccaggcgcaggcacgaaaggccgccgtccaggcgcgtgcgaagaagccgcacaaagccggggcatccaagccccggccggcggctaacgccgctggtcatcaggggaaggtatcagcagccgttgagcgagcttcgcgcagtaaagaccgagtccaggtggagaacgtgatgatgcaagaagcacagaagcaactagaggccatgatcgaggaaatgctagccagggctcgccgggccctccagcaacccgagaccctaacgccctggcaacgagctaccgcgcggggcctgatagagagccacgacgccgcacgcgaagcgcgagaggctcaccggcgagcggcagaggcccgcacccaggcccgcgccacggtccgccgtgcccgagcagacaggggccaccagggaccgccggcaactgaccccgtcagcgtgcttcgccgagccctgggccagcccacccaacacgaccgccaggcattggaagcggcggaagccgtgaagcgtgcgaaagctgccgaagttaaggcgaagcaagagcgcgagcaggcaaacaagcagcgacagcaggcgacagcggaagctgaaaaggcgcgcacccagttcgcccaggctttcagcattcccgcgccaggcttcgaactgaaggctcagcaacaacacgaaccggcacccacccaggttccagcgttggagccaaggcagacagatccctccaatccgcagcggcctcgcatgcgataa

SEQ ID NO: 509753 - DNA, 351 bp, Stenotrophomonas maltophilia
gtgccaaatgtcgagaagcaaaagcaaaaactagaacgcatgatgaccgcgatggcgaaagagcaagcaaagctgctcttggccgaacgcgaagaacaacgcaggcagcgccgcgccgaactcaagcagcgcgaggcggaccgccgcgccgatgctcatcgcaaaattgagctaggcggcctcgtcatagccgcgtctgctgacgattgggaccctgcggaaatcgtgggcgcgctgttggccgtctccgaacaactggcacaacaaccgcaaggccgcgaacggctgcgacgcaagggcctggaccacctggaagcgcgggcatctgcccgcaaaggtgcgcggtcatga

SEQ ID NO: 509754 - DNA, 2346 bp, Stenotrophomonas maltophilia
atgacccgccgccaagcccagggctttggcctcgttgaaacgatgttgaccctcggggcgctttctgcgctctcgctcggcatctacctagtgttgtcccccacctcggccgcggcgaaagcgaaggtggagcaagacaacctgcgcgacctctcgacagctgtagatcgttctttcggcttgcttggcagcttccaaggcgtgagcgccgtgcgcgtggttgaggacggcttagcacccacgcgaatgctggacggttcaaacctgcgcaccgcctggggcacgtctgtgaccgtcgcaccgcacaccgtgaacgcgccaggggatgggttcgtggtcgtgtatccatttgcccccgcagatgtgtgcccgcgtctagcggccgccgtctcgcgtgatgcctatgacatccgcgtcgaaggcgtgagcatgttcgacaacggccagttgaacgtgaacgctaccgccgccgcgtgtggtgcgcacgacacggctacgatggagttcgtgtatcactctggcctggtagccggcacggccgtggcttcgccaggtttgatgctgcccccgtcgctaccgccagtttcttccccaggcaccgctccagtgggtgggccggtcgggccggtcgggccggtgactggtgcgactccggtcgctcccgtcacgggggcaccggtggcgccgcccgctcctgtggccccggcgctgccgccggtggccgctccggtgagccccaccacacccccagtcacgtcggttcccgcgccttcggcgccgattacaggagtgaccgcctgcgtggccccgccgacgtcttggaactatcagaacgtgaactgcgcggcgggcagttacggcaccattgcccaatcgcaatcccgcacctggtcctgcccggaagcctgggatgcacccgtgcccagcgcctggtcgagctggaccaccaccagcaacacctgcaccgcgtgcccgggctcaaccacgcaaaccgatacccctcgttggctgcccacttccaccgcttgcccctcggggcaggtgggcaccatcacctgggaataccagcagacccgcagccggtcggtgtcctacaactgcccagccgggaccaccagtttgccgagtcccacctacggcacctggtcgggttggagcaacaccggtgccacgcgcaacctggtcaacacctgcgccacggcctgcgtggtgccggccccggaatggcggccggctccgtataagggggcctgcccggcaggtatgaccggcacaggcagcaactggaccacgggcgagcgccgcacgtggacgtgcccgagccccaccggctcgccgaccaacacgggttgggtgtgggacggcactggtggcgtgttcgtggacaatggggattgcgcggccaactgcgtgttgccgaccccgagcacccaagtcggcaccgagacgcgcacagcccagcagacgttggcttgcccggcagggcagtcgggtgccatcacccagcaacgaccggagcagcgcacgcaaacccgcacggcttcgtgcccggcgccaaccggcagcttcacctggggcgcgtggtccacctggacggcttgggtcgggacgggggcttggaccacgaccagcaacacgtgtgcggccacgtgcgtggcgccgaccccggaatggcggccggctccgtataagggggcctgcccggcaggtatgaccggcacaggcagcaactggaccacgggcgagcgccgcacgtggacgtgcccgagccccaccggctcgccgaccaacaccggctgggtgtgggatggcacccctggggtgttcgtggacaatggcgattgcgccaccacctgctcggccccggcgccaacctcaaccgccatcactcgcgctttggccgatcagacccagaacgtgggctgcccggcgggccagttgggcgaccattggcagcgccgcagcgtgaccgaacaaggcacacgcacgacctattggacctgcccaggcccgacctctaccaccctagagacctggggcggtgggttcacttacggggcatgggttacaacgtcgaacacctgcacgactccggcccccagtggcccgcctgccggaacagcgctctgggaatgctcttacggcagcgatgcagattatccgttctgccgcgtggagttcatgatggggctgacgttccgcaacggtgaggcatccgtcgaccgttggacggaacaagccgagttttcggaatccgccgtcatcaacgtgcccacggcttcgtgcgcatcgggcaaggcccgagcgtatgcgtatgtgacctacggcaaagcggagtgcctatag

SEQ ID NO: 509755 - DNA, 558 bp, Stenotrophomonas maltophilia
atgcgcaagtttctggcagtgttggcattgctggcctgtgggtcggcctgggcgcagagcggttcgattccccccaccggaatcaaacaggggtgggagcgtcagcacttgggcgactactccagcgagcccggcgaggctttgccggacttcctccggcgcactggccgagtgcttcacgacttcacccgccagagcggaaacgaggcctgcggtgccattgccagcgacgggcagcgcttctcgttccgcctttacacggacggagtgccgcacggctgtgccatccggactagcgaggtgctggatgggtttgccttcactggcgaaaccatccatagccacccttggcagaagctgttgacgatgacgccatctgccagggcttggagtcagttctaccgtgacggcaacgctggggccccaaccctgcgtaacgacggagcgaccggttttagcaaggccgaccgcgccaacggcgacggctggttgattgccggtgggcaactgctgcacttggtcaatggaaaaaccgagcgcatcggcgaagtgctatag

SEQ ID NO: 509756 - DNA, 489 bp, Stenotrophomonas maltophilia
atgctgcgtcctgcttccgttctcgccttgctgatcgtcgcgccgctggtcaccgcggccagcgatccgcgcgacgtggtcacccgtctttacgccgtagtccaggcgccggcttcagatgaagcagccatcccgccgttgctgggcgatgccctgcgctcggcggtcgatgcgcagcatgcttacgagcgggcctgcaccgcgctggccgcgcgcgacgagaagccgcacatgctcgaccagagcctgtatctgctggcgccggaccgaccggacacggtcgcggtgggaatgcccgaatcgaggggtgacgcgacctggatccgcgtcgacatggcagtgggcgactatcgatggaccgaccgggtcctgctgcagcggcaggaccgggactggaaggtcatggatatccgctgggggcagggcggccacctgatcggccggctccaggagttctcggcattccgctgcgcgccttcaggccgctag

SEQ ID NO: 509757 - DNA, 861 bp, Stenotrophomonas maltophilia
atgtccgccgtcgaccagaatgacattgtcggtgcacagcacgaagtgcaacggcttcttggccgttgcattctgcgacttcagcagtgcgagcaactgatgaagtccatgctcgcctttcagaagttgtccggtacgccggaagcactcccaatggctttggacaagcgcaaagcagagatcagcggcaagacaatgggggtgctggtaggtcacctgactgccgaatgcgtgatcaaagagggcagcgaagcccctggcggcccatcgggttacgacagcaattcaagcttcgtcgctctgcacatggggctagagtttccagagcaatcccatgtaacgctgcaagccgacctgcgcgaactggtgaacctcaggaacgtgctcgttcaccacttcatcgagcaatacgatatccagactgtcgaaggatgcctgaaggcacaggctgcactcagccgttcctacgctcagatcgaccgccaatttcaacggctgcgtgcacttgcggcagatgttgcgcggggagcgaaagcctttgcggagctggttcagtctccccagttccatgagtttatggtcaacggcatcgcgcctgatggacagatccattggccgctcacaggtattgtcagtgcgctgagacaggccttccgagaaggggcgatcgacggctgggtgagtctggacacagccgttcgctgggtagcagagcaccacccggaacaaacccccaagaagtacggctgtgcccgatggcggcacgtcattcacgaatctcgtcagttcgaactgcgccacttcgtgcaccacggccagctcggggcttggttccgcgagcggccagattcgactggctag

SEQ ID NO: 509758 - DNA, 603 bp, Stenotrophomonas maltophilia
gtgttgcgccgcaaccgacttcttctgtgtgcgggtctggtcccgcttccgtggttcctgttctggaccagcgttgccgccgtggctgcgccgggctacaacacgtttgcacagcacgccagcgagctcctgcaggcgccagcgcttgcaagcttctgcggcaggatcgcggctatcggctccggcgtgggcttcgtggcgttctccatcggggtatggcgggagtccggtcgccggattgcagtaggtgcaatctgctggttggtctttggcatttccatgctgaccaacgggctctggcccatgggccatccgatgcacggcttctacaccatcggcatcgcaaacatcattgcaccggcgatgtcgcacatcgaattgagcgcgtggtctgccaaccgaagggcgtacgccgtgactgctatggtgagtgtcgcgggcatcgcttatctctggttgaacgtggtgggagcggacccggaggggttcagggggctgacacagcggctgttctcgtcggtcaactcgttgtggccgtttctggttgcgttgtatctgctgcgcgggggttcaagcgcgctgaagatgcagcttccgcattga

SEQ ID NO: 509759 - DNA, 1281 bp, Stenotrophomonas maltophilia; identical to SEQ ID NO: 366561

SEQ ID NO: 509760 - DNA, 648 bp, Stenotrophomonas maltophilia
atgcacgacgccaccagccagttttccttttccaatttcaggcttgccatagcgcctggcgtaccgtcatcgcatctttcggcattgcttgcgttgcagcgtgcggaagagccggaagtcaccatttcgtttcatgaggtcacagccgatgatttgattgcgggacttcgggaaggccgctacgacgcgggcatgacgcttgaaggatcgagcgatccgtcgctgaaaagccaacctctatggaccgagaacatggccgtcgccatgccgttgcgctttcccttacttgaccaggcgaagctcacgatcgccgaactgttggactactccgtctttcgctggcctgcagagaattgccctttgctggatcagcggctgccttctcttcccgcggtgagtcaacagaacattcagcgtgtctcttccttcgagatgatcgcgctatgggtcgctgccggctacggcgtcggggtatccgcgcaatcgcgcattgagcatgcgcagggatggggcattcacacacggccgctgtctgacggaccctacgagatcgtgacccacctgcagcggccctgcggacaagccgacgttgtttcagagcggttcgagcgcagagcactgcaggtcgccaagaatgctccaacctag

SEQ ID NO: 509761 - DNA, 294 bp, Stenotrophomonas maltophilia
atgcagaagcgcagcgttcaaccgggccgcccccctggcacaaccacctatgaagccgagccggcactggccttcggccaagcggtgcgtgctgcccgcttggcgcagggagtcgctcaggatgaattcgcgtccatggctggtatagctcgctcgcatatgggcaagatcgagcgtggggagcacatgcccacgctcgcattgatactgaaaatctccgctgccctcagcataagtgcggcagagctgatgagtgcaacggaacgcaatcttcgtgccgatgcccaatcttaa

SEQ ID NO: 509762 - DNA, 891 bp, Stenotrophomonas maltophilia
atggaactgcggcacctgcgttgctttatcgttttggccgaagaacttcatttcacacgggcggctgagcgtcttcacattgagcaacctcctctgtcccgcgccatcaaggagcttgaggacgagttaggcgctgtgctcttcgaccgggaccgccggggcacccgactgaccgctgcgggtgccgtgttcctgcaggacactcgccggctattcaccgtcctggagcaggcccgcgagaacgtcaaggctgtcgcggcgggcttgcgaggcagcctgcgcatcgccgtatccgacggcgcgctcgatccccggctgtcggcgtttctagcccgttgccgtgccgaagaacccgagatcgagatacggatgtccgaagtgcctttggccgagcagttgcgcggcctgcgctcgggcgacttctgcatcggattcgctcataccgccgacgtcggtgatggcatcgtcgccgaacctatctggcaggacccgctggtggtcgccttgccagcccggcacgcactgctcgtccacaaggaggttccactccatgaactccgggggcatcctcttgtcctgtgcgatccccaggtgtgcgaaggctactgccgcgagttggcgcgcctcctgcagacccaggaacacaaactgaatgtcgttgaggaggtttcctcgctggacatgatgctcaccttggtcggtgccggctacggcgtgggcttcatgacggcgaccaagattccggtcagccagcgaccggacgtggtgatccgtccattggcgctggatacagccgtgatcaccacctacctgcttcgactcgaaagcagcaactcatcggcttcgctggtgcgatttatcgaccgcctccgggacccttcgagcgactga

SEQ ID NO: 509763 - DNA, 1518 bp, Stenotrophomonas maltophilia
gtgagtgcccgcatcacgccccagacacccgccttgcaagcattgcgcatgcgactgcatgcccagcatcaacccgtcgtcttgatgcgtaccgattgccatgtctgccgtgccgaagggctggcaccgcggtcacaggtactgatcattgccggcgaccgcactgtgcaagcgctactgtaccaaatcgacagcgatctgctcaaaaccggacagatcgctctgtccgaggccgcctgggatgccctggacattcatgagggcgatcttgtgcaggttcggcatcctccgctgctcgaatcgttgtcggccgtgcgtgcgcgaattcacggccaccgactgcaaacgacggagttgcaggcgatcgtccgtgatgtggtcgatggtcgctataccgatgtcgcactttcggccttcctgaccgcaacggcggtactgcctctggatatgcaagagaccatccatctcacccgtgcgatggtcgatgtcggggatcacctgcaatggcaggctccgattgttgtggacaagcattgcgtgggcggattaccgggaaatcgcaccacgccgttggtggttgccatcgccgcagccaatggattggtgatgcccaagacctcatcacgcgccatcacctctcccgctggcaccgcggacaccatggaaacgctggctcctgtagacctggacctggatacgctcagaaaggtcgtggagaaagagggtggatgcgtggcgtggggcggcgcgatgcacctcagccccgcggacgacatcttcgtgcgtattgagcgtgaactggatatcgacacgcaaggacaactgattgcctcggtgttatccaagaagattgcagcaggggcgacccacatcgtgatcgatattccggttgggccaaccgcaaaagtccgcagccgggaaactgccgagcatcttgcgcatcacctttcggaagtcgccgcgtcatttggccttgtattgcgttgcctgtttacagacgggaatcagcctgtcggcagaggtatcggcccggcgttggaggcgcgcgacgtgttggccgtattgcgcaacgaggcggatgcgccgcaagacctatgtgaccgcgtggcgttggtggcgggcgcggtgcttgagcttggcggcgtcgccaaagaaggggagggacttcggttggctcatgagacgatcagcagtggccgcgcgtgggaaaaatttcagagaatctgcgcggctcaggggggatttcgtgagccgccccaagctctctatgtcgaaccgcttttggcaaccacttcaggccgagcagtacacatcgacaaccgtaagctttctcgtttagccaaattggccggtgcgcctgagagtccagccgcagggattcaattgcaggtgcgcttaggtgacgagataacacgcggacaaccattgatgtttttgcatgcgcaaacctctggagagatggcctatgcactcgcatacgtacaaggcattggggacattgtaaagattgaaccttag

SEQ ID NO: 509764 - DNA, 1359 bp, Stenotrophomonas maltophilia
atgctctcactgaccagcctgggcggtgccggtaccgtcaccggctccaaacacctgatcacatatggcagtacccgcatcctgatcgactgcggacttttccaaggactgaagaacctgcgcgagctgaactggcagcatcttgtcgttgagtccaaggacatcgatgcggttgtactgacgcacgcgcacctggatcattgtggatatctcccccgattggtgctgaacgggttccgcgggaagattttctcgacgccagccacacgggacgtcgccgaactcatcctgctcgacagtgcttggttgcaggagaaggatgccgagttcgccaaccggaagggattttccaagcacaagccagcccttgccctgtatcgggtccgagatgccgaacgcacgctcttgcagttcaagcccgtgccactgcatcaggagacggtattgccgggcggtgcacgcctggttctacgcagggccggccacattcttggagcggcgacggcgcagatcgacatcggcggcaagcgtttggtgttctccggcgacctgggccgctatgacgatgcggtcatgcctgatcctgaacccgtcacggaagcggactacatcatcatcgagtccacctatggcaatcgtcatcatgaccgttccgatgccgtcgaagcgctaggcgacatcatcgagcgtacgactcgccgcggaggcaccgtagtgattcccgcttttgccgtaggacgcgcgcagtcgttgatctatgacctatggctgttgcgacagcgcggtcggctccgcaacgtgcccgtctatctggacagtcccatggccaccagcgcaactgcgctgctgcaccgccatgccgacgaccacaagctcgctcaacacgatttcgagacggcattctcagaagtcacatacgtgcgcgacgttgaagagtccaaggcgctatcggcgaatcgataccccaaggtgattatttccgccagcggcatggccaccggcggccgcgtgctgcatcacatagaagcgtttggcggtagccatcagaacacgctgctgttctctggattccaagcagcaggtacgcgcgggcgcaagctgcttgagggcgctcgcgaagtcaagatccatggacgctggatgccgatcaaggcagaggtcgccgagcttgcgatgttgtcggctcatgccgacagcgatgagctgatgcgatggctgcgcggctttaccaaggcgccggaaagagtgttcattgttcacggtgaatctgatgcctctgaggcgctgcgcgaacgtatccagcgcgaactcaattggcacgcatcggtgcccatgcaaaaccaggagttcgccctgtga

SEQ ID NO: 509765 - DNA, 2331 bp, Stenotrophomonas maltophilia
atgtcctctcaagctaacctcgcaaccgattggcgtgctggttacgggcccatcgcgcacaggtctgaaaccatcgaacgtatgcaggccctagtgcaacgtctggtcgcgcaaaggcgtatagcagacgaagcctcggcccatgcgctgctggctgcagccgaccgggtggcctgcacggccatgagcgtagtggcgcatatgacctatgcccggcgcatcgaccgaagcggctgcccactgggctccgatgatttcaaacaaacgcccgaaggccacaccggcggctcgctcaacatggtgccagccttcgtgggttatctgttggccaacgcgctgaccgggacgacacgcggctggctcatggggcaggggcactgcgtggccgcgatcgaggcggtgaacgcactgaccggcgatgtatccgccgcccagcgtggacgctacgaccgcagcgaggcgggcctgtcgcgtttgatcgcggacttctactcctatgccatcgataagcagggtcggcccgcggtaccgctgggtagccatgccgggccgaacacggccggcgcgatctccgaaggcggctatctggggttcgccgggctgcagtatgtgcacacgccgttgccgggagaaagcctggtggcattcctcagtgatggcgctttcgaggaacaccgtggctcggactgggcgccgcgctggtggcgcgccgaggactgcggcttcgccatcccggtcatgattctcaacggacggcgcatcgagcagcgcacccagatcgtgcaggaaggtggcgctacctggctggccgaagatctgcgccacaacggcttcgatcccgtcatcgttgatggacgtgatccgatggcgatcgcatgggccattgttgaagccgaagacacgctgagcgccttcgccgcacgctcggatcggcgctatccggtcaagctgccctacgtgatcgccgagacggagaaaggttttggcttcccgggcgcggcgaccaatgccgcccacaacctgccgctgaacggcaatccgcgcgaggatgcgcaggcacgcgaggccttcaacgcaggggctgcggcgctgttcgtgcccgagagcgaactggaaaacgcgctcaccgtccttgcgaatcacggccagagccagcgctcgcgcgaaagcgagcaccccatggccctacgccatccagcgagccctcatctgccgatgccggcctgggcgccaacggaggtatcgggcagcgccatgtccgcactggaccgttggttcgtggagctggtgcaggcaaatccacagttgcgcatccggatcggcaatcccgacgaactggccagcaacaagatgggggccactctggcgctgctcaagcaccgcgtcaacgtgcccgaacccggcgtcccggaatcgacggatggctcggtggtcaccgcactcaatgaagaagccgttgcggccgccgccctcgccaacaaaggggggctgaacctgatcgtcagctacgaggcattcgcggtcaagatgcttggattgatgcgccaggagatcatcttcgcgcgtcggcagaaggagctgggccagccgccaggctggatctccgtcccgctgatcgtcacatcccacacctgggagaacagcaagaacgagcagtcacaccaggacccgaccattggcgaagcattgctgggggagatgtcggacaccgcacgcgtgttgttcccggtggatgaaaacacggcgtgcgccgcgttgcgagcggtctacgccagccgcggccaagtggcttgtgtggtggtctccaagcgcgacacgccgaatcacttcagtgccgccgcggctcaatcgctgatcgagcatggagcagcccatgtagccggcgatccgtccaccgcacaactgcaattcgtagcgattggcgcctaccagttggaggaagcgctcaaagcccatgcccgcctggagcaccatgggcttgcgtcgtgcatcaccgtggtggtcgagcccggccgtctacgcattccgcgagacgaacttgaggccgccttcgtgctcggtgacgaatccctgcaagcgctcttcccgcctcacctgccgcgcgtgttgataagccatacccgccctgagccgatgctgggcgtgcttcgccgcattgacagcggcccttcgaagacgcgggctttgggctacatcaaccacggcggcaccctcgatgtggctggaatgctgatcgccaatcgatgcacctgggtggatgccatctatgccgctgcgcaagtgaccggctggaacagttcgcaggctgctgctgccgcgaccgacgcgtga

SEQ ID NO: 509766 - DNA, 897 bp, Stenotrophomonas maltophilia
atgcaacgactcaccctggccctacccggcaatgaagatctggcccgcggcatcgcgcaggcatgcggcagcgaagccggccgcatcgaaacgcgccgattccccgatggcgagagctatgtccggttgcatggcgaacctgccgatcggatcgtggatgtgatttgcacgctggcccatcctgatccgcagttcctgcttctggcttttgccgctgacgcggcgcgcgaacttggcgcgcaagaggtgaacctgatcgcaccgtatctggcctacatgcgccaggacaagcgattccatgacggagaaagcgtgacgtcgcggtccttcgcacgtctggtctcatcgaccttcgacaagctgctcacggtggatccgcatctgcaccgctatccgacactatcagcggtctacacgatccccaccatcaccttgcatgccgcaccactgctggccgactggatcgcgaatcatgtcgaagaacctttgatcgtgggccccgacgaggaaagcgagcagtgggccggcgccatcgcgtcccgcatcggcgtaccgcacgctgtgcttcgcaagacacgccatggcgatcgcagcgtggacatcgatgttcccgacctgtcgatctggcgcggcagaacgccggtgcttgtggacgacatcgcatcatcaggccgcacgctcgccgtcgcggcgcgcaagctcgccgagcaaggaatgcgcaagccggagtgcgtagtggtgcatgccctgttcgccgaggatgcctgggcccaattgacaccgttgtttgcccgaattacgtccaccgacgcagtaccgcatccgagcaaccggattggtctcgcttcgctgattgccgacgctctctctagcgggaaaaccgatccgcgaggctga

SEQ ID NO: 509767 - DNA, 1074 bp, Stenotrophomonas maltophilia
gtgacgaaggttcagtccaccgaccaaactgaatggaggctgaaagtcgcagcccccttgctgctgctattgctgagcgcctccgcacaggcccagtcctgccaccaggacaacccgctgcgctcaacgggaacgctcaatctgcggatcgacaacgacatgttcggcggcattggacaagaccaagggtactccaacgggtttctcgccagttgggtttcccccaacctcgtggactatagcgatgacccttgtctaccgcgtctcgtccgtgggctgaatcgctttctcacgatgctccaaccccaaggcttcgacgaacagaacatgaccatcggcttcgggcagatgatgtacaccccgaacgacaaaacgcgcagcgatctcatcaaggatgatcgtcctttcgcgggcgccttgatgttgagccttggctataacgcgaggcggggcgatacgctgcgcacttcgcaactccgcgtgggggtggtggggccctcctcccaggccaggcaagtccagaactggtggcatgacaccgtcggagtggacagattcaatggctggagacatcaactgcgcgacgaacccgtgctgcagttgctccacgaacgccgaacacgagtcatcaggcaagaaaacgtcagcggttggggttgggatctgacccgccactggggcggcagcttgggcaatttcgccacctacgcgaatgtcggcggagaactgcgctatggcctacgcctgccggacgacttaggcaccgcaccgctgcgcccggctggagaaaacacctcgcccgtgcgtaagaccgctggcagcaactggaacgggcacctgttcgtggcactcgacggtcgctgggttttgcacgacatcacgttggacggcaatacgttcaagtccagtcatagtgttgataaacggccattcgtggccgatgtgggctatggcatcgcgatgactcagggcaactggcgcatcgcgatagcccgctaccaccgcacccgcgaatttcgtggacaaaaggaaatcccggtctacggaacgatcaccgtaggacggcgattctga

SEQ ID NO: 509768 - DNA, 495 bp, Stenotrophomonas maltophilia
atgtactcaagaatcctggttccgctcgacggaagtcctactgccgatttggcgctccaccacgctgcggtgctggcacgcctgaatggcgcaaccatcgtcttgctgcacgtcatcgaggagatgaagcacagcaacggcttcgagaggccgaggatctatattgaagaagtgaggccgggcttcctggcggccgggcagaagctgctggacgaggcggcgctgcggctgaggcaggaaggcctggcggttgagaccgtccttctggaaagcaagggcgagcgcgtctcggtgctcatcgctcagcaggcactgaccactcaatgcgagttggtggtgttgggtactcacggacgccggggcgtggacaggctgctgatgggaagcgatgcagagcagctcgctcgcatcgcaccagttccggtgatgctggtgcgccagccccaatcggtcattgcgactgcaacccctgggcagggtggcacgccagcgtga

SEQ ID NO: 509769 - DNA, 1641 bp, Stenotrophomonas maltophilia
ttgctcgcgtgggtggactgggcgagccatttagcaaacagtcctggcaagcaagccgagcttttggcgtttgcagcctccctgtccgagcaatggatggccgtattgaagaagaatccggccaacccggaccggggagccaccgctcctgaccggtcacctgtcaatgaccgccgcttcaacgatcctgcatgggatcaatggccctacgaccttttccgcagttcattcgtcaatcagaccaaatggtgggagcaggccacgcagggggtgtggggagtggatccgaaacaccaacgcctgctggcgtttggcgccaaacagtggctggaaatgctttcgcccgccaacgctgcggttttcaaccccgttgtcctgaaaagaaccatcgcagagcaaggcgccaatctagcgcgggggacgtccaactttctcgacgacttgcgtcggcaactatccggccagcctcccgcgggaacggagaacttcgtcgttgggcgcgacgtagcggtcacggaaggaaaagtcgttctgagaaatcgactgatcgaactgattcagtacacgcccactaccgagaaagtccatcccgaaccgatcctgatcattcctgcctggatcatgaagtactacgtactggatctgtcaccgcataactcgctgatacggtatctggttgcgcaagggcatacggttttttgcatctcctggagaaatccggatgctgaggatcgagatttgggcatggatgagtacctggagttcggcctgcatgcagcgctggacgctgtgacttccgtcgtccccgggcatggagtccacgcggctggttattgcctgggcggaacgctactggccattggtgcttcagccatggcgcgtgatggcgatacgcggctggtgtcggtaagcctgcttgccgcacagacggacttcagcgaaccgggcgagctgagtcttttcatcaacgagagtcaagtggcgctgttggaagccagcatggctcaaaccggttatttgacctccgaccagatgagcggagcttttcagctactgcgttcctacgatctcatatggtctcgcatgattgacgaatacctattgggcgatcgccgggcaatgaccgacctgatggcttggaatgccgatgggactcgcctccccgcgaagatgcattcgcagtatctccgacgcctttacctgaataacgatctcagcgcggggcgttatcccgtcacgggtcgccccgtttcagtgggagacatcgctgtaccggtgttttgcgtcggcactgcctcggatcatattgcgccttggcgctcggtttacaagctgcatctcctgtcttcggccgagctgactttcgtgctgaccactggaggacacaacggcggcatcgtgagcgagcccggccgaggtaaccgccaatatcaaatccatacccgcgcggccggtgatggatacatggcgccggatgagtggcaagcgacgatgcagacgcatccggattcctggtggcccgcatggtcggcgtggctgcgagagcgttccggtgatgttgttgcgcctccgctcataggtgctgaatccagtggataccccactgtttgcgacgccccaggggaatatgtacgcaactga

SEQ ID NO: 509770 - DNA, 1206 bp, Stenotrophomonas maltophilia
atgacgatcgatgccttccatggattcacgctcgccatcctgctgttgttcgtgggcaagggcttggttgcgcgttggggcatcttgcgtcgatacagcatcccggaatccctggtgggcggcttggcctgcgccctggttgtcttcgccctgtactacggtgcggggatcgtcatcagtttcgatctcgaagcgcgtgacgcgctgctgctgtacttctttgcggccattggcctgggtaccgacgcccgcacgctgcgccatggtggacggcccttgctgatcctgtcggggttggccatcgggttcatggtgctgcagaacctggccgggatggagatggcacgcgccttcggcctggatccgcgcaccgggctgatggtgggatcgatttccctgacaggaggcgtgggcaccaccttggcctggtccgatcacttcgttcacaacctcggcattgcgcaagcgcaggaactgggattggcagcgaacatgatcggcctgatcgcggcctgcaccatcgggggcccagtcgcaagcttgctcatgcgtaggcatcggcttcaagcctctggggacagcgccctggaaattggcacgctgcacagggatgagcagcatgcccgcctggactactacggcctgctgctggcattgctctggctcaacttcgccttgatgttgggatacggaatcaatgccttggtcgcgcgtaccgccgtcacgctgcccgcctttgtgggctgcctgctggccggaattctcctgcgcatggcggccgactggatgaggccaagtgggcgcggacgtttatggaactggccgagcatgcagccaggcatcgccctggtttccgacatgtcattgggcctgtttctgaccatggcgctgatgggactcaggctctgggaactgcagcccgtgctcgccttcatcacggcggcgatgctggtgcagattgccttggtcatcgcattcgttttgctgattgtttttcgggcaatgggcaaggattaccaagccgccgtggtgtgcgcgggtttcggcggtattgcgctgggatctaccgccactgccatcgccaacatgacggcggtgactcgggagcatggtgcggcacgcgaggcgttcattgtggtgcccttggtatgtgggttcgtcatcgatattgcgaacgcactggtaatcagcctgatggccggttag

SEQ ID NO: 509771 - DNA, 1239 bp, Stenotrophomonas maltophilia
atggacgtcaccatggcccgctccgggcgccgcgaacacggactgatccttgtgctgaactgcggttcatccagcatcaagtttgcggtgttcgattcctcggccgcgccactgccgcgtcaggcattgtggaatggcaaggtgcagggaatcggcggcgccaacccggatttcggagagaccggagttgcgccgttctcgatcgaactggacacggcacatccgtatcgcgccgcactgcgcctcatccgcgatcgtgtcagccggcggctcgacggccgccggatcggtgcggtcgcccatcgtatcgtccacggcggcagtaaatacttcatgcccgtgcgcgtggacgcgaatgtcctggccgacctcaagggctacattcctctggccccgctgcaccagccattcgcgctcgaagccgtggagatcctgctgcgggagcagccagatctgccacagatggcctgcttcgacacggccttccaccacactttgccccaggtcgagaaggtcctgccgttgccctatgccgcatgggagcgcggtctgcgtcggtacgggtttcacggcctgtcgtatgagtacatggcagtggccttgcccgaacgccatggcgacgccgcgcgcggtcgcaccgtcgttgcccatctgggcagtggcgccagtctgtgcgccatgcgtggactcaaaagcgcggccaccaccatgggcttctccgcgcttgacggcctgatgatgggcacccgcaccggcgcgctcgatccgggtgcggtgctctacctgatggaaatcgagaagctctcactggagcaagtggggcgcgtcctctatcacgagtccggcctgctcggcgtttcgggaatctcggccgagccgcgcgtcattgtcggacacgagaacgatgcaggcgaaacgggggagcgagcgcgcttggcactggccctttacgtgcgccgcatcgtacgcgagatcggggccttggtcgccgtgctgggtggcctggacatgctggtgttcacggcgggtgtcggtgaacacaatgcgttcattcgcgagcgcatctgtgcggcgctgggctttttgggcattgccttggataccgatgccaacgccagccacgcggcgaagatttccagcgatcacagtcaggtcaccgtggcggtcgagcccaccaacgaagagtggatagccgccagccatgcgctgtcctgcctggacagggagaaggcgcgatga

SEQ ID NO: 509772 - DNA, 753 bp, Stenotrophomonas maltophilia
atgcagtactcattctctggccgcgtagccctggtcaccggtgcagggtctggcattggcgaggccattgcccggctgcttgcaagcaacggcctgaatgtcgtcgtctccgatgtcagcgccgacaatgcgcagcgcgtcaccagcctcatcaacgccgagggcggccacgccgtggccaacgtggccgacgtggcatgcatcgatgaggtccaggctgccgtggcctgcgcggtcgatacgttcggcgaccttcattttgccgtcaacaacgccggtatcggtggcgaccagagcccggcgggagaactggaccctgccgcctggcgccgggtgatcgatgtcaacctgaacggcgtgttctatggcctgcgccatcagattcccgccatcctgcgctcgggaggcggcgccatcgtcaacgtctcctccatcctgggggtggtgggcgacgcagcgaaccctgcgtacgtcgcagccaaacatggcgtgaccgggctgacccgctcggcaggactggcctatgcgtccaagggaatccggatcaattcgattcatcccggttacgtgcgtacgcccatcctggatttcctggatgaatcggccctccaagaggccgttggcctgcatccgatcggtcgcctgggtacaccggacgaaatcgcccatgccgtggcgtttttgctgtcggaaggaagcagcttccttgtgggcacccagctcatcgccgatggcggctacacggcgcgctga

SEQ ID NO: 509773 - DNA, 1422 bp, Stenotrophomonas maltophilia
atgacgacttcgcccaaaccggtcgatgccactgccgatgcatggcatgtcctgcgcaaccgcaccttcgacgagatcgccatcggcgacagcgccagcctcgaacgcgcgttttcgtcgcaagacatccacatgttcgcgctgcaatcgggcgatgtggatccagaacctgctgtgtcctcaagcgctcggggcaccacggaggccatttgtgcaaacgccctgatctcggctgtgctgagcacacgcctgccggggcctggaacccgctatgtcaaccagaatctgtgcttcctcggggccgttcgacccggcgacaggctgaccgtgcggatgcaggtgaccagcaaggacacggccaaccaccatgtcacgctggcctgcacctgcaccaaccaggagggggtagcggttttccaaggccaggtagaggtcgtggcgcccaccgaacgcttggaacgaacgcgcaccgtgttgccggaaatccacccgaatgcgcagggccgcacaggcctgcaaagcctgctggcgcacgtcgcgcacttgcaaccgattcgggtggccgtcgcccatccctgcgatgcccccagtctgtccgctgcgctcgaagcacgccacgcggggttgatcgaaccggtgctggtcggatcacgggcgcggctggaagcagtcgccacagaggccgggctggatctggccgacgtcaccattgtggacacaccccacagccacgccgccgcgcagcaagccgtagccttggcggccaatggcgaagtcgaagccctgatgaaagggagtctgcacaccgacgaactgatgtccgcgctggtttcggcagcagcggggttgcgcaccaagcgccgggtcagccattgctttttgctacagacaccggcctatccgcgcccgttcatcgtcaccgatgcagcgatcaatatcgccccgactctggaacagaaggcagacatcatccgcaacgccatcgagctggcgcaggtgatcggcgtgcgcgaacccaaggtcgcaatcctggccgcagtcgagacggtcagcccgacgatgacggccacgctggacgctgcggcgctgtgcaagatggccgatcgcggccagatcactggcggcctgctcgacgggccgctggccttcgacaacgccgtctccatcgccgctgcgcgtatcaaggggatcgtttccgaggtcgccgggcaagctgacatcctcgtcgtgcctgacctggagagcggcaacatgcttgccaagcagttgatcttcatgggcggcgcagccagcgccgggatcgttcttggagccaaggtgccagtcattctgaccagccgcgccgactcgcgtgatacacgcatcgcctcatgcgcgatcgcactgatgctggcccaccactatcggctgtcacccccttga

SEQ ID NO: 509774 - DNA, 2367 bp, Stenotrophomonas maltophilia
atgaatcgagacaccacgacatcaccagcggccgattgggggcagttgctgtgggacccgttgcgactatcggcgatggcaaccgagtatgcagtggatgcctggcagcgatccattctgtatgccgacgttcgccgccaacgcggcaaccagtacctggagcatttgcaggagcagacgccgaacgtactcgacttcgcctccgaggtcatcatgtccgggctggatcttccgcggccagtcaactatggcctcgtgcgcatcctgccgccagccgacacgccgagcgatccccgcaagcgaccgttcgtggtggtcgatccacgcgcgggccacggcccgggcatcggcggcttcaaacccgacagcgaggtcggggcagccctcaaggcagggcatccctgctacttcgttggctttctgcccgatcccgttcccggccagaccgtcgaggacgtcatgcgcgccgaagcggccttcgtgcgcaaggtcggcgagctgcaccccggcagccgcggcaagcccgctgtcatcggcaattgccaggcgggctggcagatcctgatggcagctgccgtctggcccgaactgttcggaccgatcatcgtcgccggcgcgccgctgtcgtactgggcgggcgacatgccgatgcgctatgcaggcggcctgaccggcggtagttggttgacggcattgaccggcgatctgggcgccggtcggttcgacggcgcctggctggtacagaacttcgagaacctggacccggccaatacgctgtggagcaaacagtacaacctgtacgccaaggtcgacacggaaggcccgcgccacttgcaattcgagaagtactggggcggccacgtgttcctgaacgatgtggaaatacagtacatcgtcgataacctgttcatcggcaacaagctgagcaccgcccaactgatgacatccgatggcgtgcgcatcgacctgcgcaatattcgctcgccgatcctggtgttctgctcctatggggacaacatcacgccaccgccccaggccctgggctggatcaccgacctgtaccgcaacgacctggacgtgctgggacatgaccagaccatcgtctacgctacccatgacagcatcggacatctgggaatcttcgtctccggcagcgtcgggcgtaaagagcaccaggagttcgctgagaacatcgacatcatcgacgtgctgccggcaggcattcaccacatgcagatcgacgagcatcacgacgaggcgcaggaacacgagccagccagtgacgcctatctgacccggattcgccgcagcaacatcgatgaaatccgtgagatcgttcgccccgatcccgagagcgatcgccgttttgccgccgctgcgcggatctccgagatcaacttggcctgctaccgcagcttcgtgcagccgtgtgtacgcgcctgggtcacgaccgagggcgcacggtcgctggagcccctgcatcccctgcgcgtcggctacgaactgtggtccgaccgccagccgctggcagccgctgtgcaagaggctgcgcaacatgtgcgcgagcaccgccagcccgtcgccgaggccaatcctttcctgcaactgcaggcacagttttccaccgctctcgaacagacgctggatcaattccgcgattgccgcgaccggatctacgcgcaagcctttgacacgctgtacagcctgccgctggtgcaggccatgacagggcagagcctgcacgatgaggcaccgccgcgggcccatcccagcgagacgcccgagcaccgccagtatctggcgcaagagttgacccgcctcgaaggagccgttcacagcggtgggctggtggaagcagccatacgggcactgttcttcgtgctggccgagcgtggcgaggccgatgaacggcattttcgccacgcagaagagctggtgcgcccccaactgggcaacgacttcgacatgcaggccttccgccacctcgtgcgtcgccaggctttgctcatgaggctccacgaggacgccgcggtgtccgccatccccgggctgctgaacaacgtagcgcctgatgacatccgacaggttgcggggatgatcgcgcaggtgctcggcagcggcgatgcgctgtccgcaccagagcaagccaagttgaagcaggtgtctaccctgttcgagcaggcgatccgccgggcgcaggcggcttcggcgcccgctatgccctctgcccatgacgcaccctctgcggtcgcggacacgaaacccaagacctcctcgccaaagccgaaggcgcctcaaaagacaaccgcgtccaagacacccgccgcgccgcagacaagacaaacacggcgaggaaaaagcacatga

SEQ ID NO: 509775 - DNA, 747 bp, Stenotrophomonas maltophilia
atgccggctgaacaacgtaccgccctggtcacgggcggcactggcggcctgggcgaagccatcgcccgggccttgcacgatgttggccataccgtgctcgtcgtccactcgccaggcaatgccagcatcggcgcgtggttggaagcccagacggacgaaggctacaacttcatcgcctacggcgcggatgtggccgaccatgcctcctgccaggagttggccggcctcattcaagcagacggttaccacatcgacattctggtcaacaacgcgggcatcacgcgcgatgctacgttccgcaagctgagctacgccgattgggatgcggtcctgcgcgtcaatctcgactccgttttcaacgtcacccggccattcatcgacggcatgctcgaacgcggctggggcaggatcgtcaacatcgcctccatcaacggctccaaggggcagttcggccagaccaactactccgccgcaaaggccggcatgcatggcttcactaaagcccttgcgcaggaggtggcgcgcaagggcgtgacggtcaacaccgtctcgccggggtatctggatacgaagatggtgacgagcatgtcggaagaagtggtcaagcaagtgattgccggtattcccgtgggtcgtctgggacggcctgaggaaatcgctgcactggttgcattcatcgtcagtgaatctgcggggttcatgaccggcagcaatgtatcgatgaacggtggccagcatatgtactga

SEQ ID NO: 509776 - DNA, 462 bp, Stenotrophomonas maltophilia
atgagcaacgaaactatccccctgaacctgttcaaggcgaacgtggaactgcagttacgcctacagcgcttgatgcaggaaaacggccagcaatggctggagaacgccacgcgcgcgggcagcgagagcattgccgagtccggcgccgaaatcgaaagcctgctcaaggcccagaattggcaggaactggccacgctgcccgcacaagccttctggcgtcagttccagtaccacgtgggcggcgcgcaggcgctgacacaagtcgcgatcaaaaaccagacaaccttcacccaaggcctgcaaatagctattcaagactggcagaaatcggttacgcaggccgtaggccagggcgatgcggtactcccgttccaggatatcttcaaacagtggggagccgtgtgggcctcggcgcaggataaggaggcaccgggcaagaccggtggccgcaatgccggctga

SEQ ID NO: 509777 - DNA, 1131 bp, Stenotrophomonas maltophilia
atgcgcagaagaaacctggccaacatctacgaccttggtgtcaaggagctgtggagtctttggcgcgatccgatgatgcttgtgctcatcgtctacgtgttcaccgcgtcggtctacaccaaggccacgtccatgccggagacgctgcacaacgcgcccatcgccatcgtcgacgaggataattcggcgctgtcccagcgggttgcctcggccttctaccccccgcagttcacgccaccggccatgatcgactatggggacgtggacccgggcatggacgcggggctgtacaccttcgctctggtcattccgcccaacttccagcgcgacgtgctggcggggcgatcgcctgccgtgcagctcaatgtcgacgccacccgcatgagccaggccttcaccggcagtggccatgttcaacaaattttcaccggtgaagtcaacgagttcgtcaagcgttatcgcagcaccaccgcgccacccgtggatctggccttgcgcgcgcgcttcaaccccgccctcgacaaggcctggttcggctcggtggtgcagatcatcaaccacatcacactgctgtccatcatcctgaccggcgcagcgctgatccgcgagcgcgagcacggcaccatcgagcacctgctggtgatgccggtcacgcccgcgcagatcatgctttccaaggtctggtcgatggctctggtcgtgctgatcgcctccttcctgtccctcaacctcatggtgcgcggcgtcctgggcgtgcccatcgagggctcccttgcgctgtttttcgccggcgcggcgctgagtctcttcgccaccacgtcgatgggcatcttcatcgccacgctggcgcgcaacatgccgcagttcggcatgttgatgatgctcaccatcatgccgctgcagatgctctcgggtggcaccacgccgcgcgaaagcatgcccgagatcgtgcagaacatcatgctgatcgcgcccaccacccatttcgtggaattgagccaggccattctctaccggggtgcgggcctggagacggtgtggcagccctttctggcgctggccttgatcggcacggtgctgttttccctgtcgttggcgcgttttcgcaaaaccatcggccagatggcctga

SEQ ID NO: 509778 - DNA, 2766 bp, Stenotrophomonas maltophilia
atgagccacagcgcgcagctcgcgaccgttgcaagtgtccgccaggtaagactgcgctaccgcgacgtcattgccttggatggcattgacctggacatccccgctggacggatggtcggtctgatcggccccgacggcgtgggcaaatccagtctgctctcattgctggcgggtgtgcgcatcatccaggagggcacggtcgaggtgctgggtggcgacatggccagcaaggcccatcgcaagcaggtatgcccgcgcatcgcctacatgccgcagggactgggcaaaaacctgtatccgacgctctcggtcgaggagaatctgcaattcttcgcgcgcctgttcggtcatggcgccgcagagcgccgccagcggatcgacgaactgactcaggccactggcctgttcaaattcctggagcgcccggcaggcaagctgtccgggggcatgaagcaaaaactcggcctgtgctgcgcgctgattcatgacccggattttctgattctcgatgagccgacgactggcgtggacccgctggcgcgcgcgcagttctgggatctgattgaccgtatccgcgccgatcgccccggcatgagcgtgattgtggccacggcctacatggatgaggcccagcgcttcgactggctggccgccatcgacgacggcaaggtcctcgccaccggtacgccgaaggaattgctggagacaacaaacagcccgaacctggaagaggcattcatccgcctgctcccggaagagaaaaagcgcggacaccaagcggttgtcattccgcctctgcctgaggacggcgcggacgatatcgccatcgaagccgaggggctgaccatgcgctttggcgacttcgttgctgtcgacagtgtctccttccgtatccggcgcggtgagatcttcggcttcctcggttccaacgggtgcggcaagtccacgacgatgaagatgctcaccggcctgctgccggcgagcgagggccgggcctggctgttcggccacgaagtgaacccgcatgatctgggcacccgccgccgcgtcggctacatgtcccaagcgttctcgctctacagcgaaatcacggtacgccagaacctggagttgcacgccaagctgttcagcgtgcccccgaaggacattccgggccgcgtcgaagagatggtggagcgcttcggcctggtggacgtcatcgacagtctgccggccagtctgcctctgggcatacgccagcgcctgtcgctggccgttgccatggtgcacaagccagagttgctgattctggacgaaccgacctccggcgtcgatccggtggcacgcgacgcgttctggcggctgctcatcgagctgtcgcggcgcgaccgggtgacggtcttcatttccacccacttcatgaacgaggccgaacgctgcgaccgcatgtcgatgatgcatgcgggcaaggtgctcgacagcgacgtgcccgccagactggttgagaagcgtggtgccaaaaccctggaagaggccttcatcggctacctcgtcgaagcggagggcggcacggccgccccggccagccagcctccggctgccgaccaggcggatcagccacccgcggtgcccgccgaacacggcggcggtcactccgctggcggtttcagtctgcagcgcatgttcagctatctatggcgcgaaacgctggaactgcagcgcgacccggtgcgcgccacgctggcgctgggcggttcgctgctgctgatgttcgtgatcggcttcggcatcaccatggacgtcgaggacctgagctatgcggtgctcgatcgcgaccagaccacgcttagccagaactacacgctgaacttggccggatcgcgctacttcaccgagcacgcgccgatcatcgactacgaggaccttgatcgacgcatgcgcaacggcgaactgtcgctggccatcgaaatccccgctggctttgcccgcgacgtgttgcggggccagaacgtgcagatcggcgcctggctcgacggcgccatgccgcagcgcgcggaaaccgtccagggctacgttcagggcatgcaccagcactggctgcagatacaggccagcgagcgcggcggcgccagcatggctggcaacaccaacgtcgagacgcgctttcgctacaaccccgatgtcaagagcctgccggccatggtgcctgcggtgatccctctgctgctgctcatgctgccggccatgctgaccgcgctggcggtggtgcgcgagaaagagacgggatcgatcaccaatctctacgtgacgccggtcacgcgcatcgagttcctgcttggcaagcagttgccctatgtcggcctggccatggtgaacttcctgctgatgagcctgctcgcagtgaccatcttcggtgtgccggtcaagggcagcttcttcaccctggcgctggccgcgctgatcttctccttcgccgcgacaggcatggggctgctggcctcggccgttacacgcagccagatcgcggccatgttcttcgccatgatcggcaccctcataccggccacccagttcgccggcctgatcgatcccgtgtcctcgctcgaaggctccagcaagttcatcggcgagatctaccccgccacgcacatgatttccatcagccgtggcgtattcagcaaagcgcttggcctggccgacctgacagggccgctgtggtcgatgctcatttcggttccggtcattctcggcgtggctgttttgctactcaagaagcaggagcgttga

SEQ ID NO: 509779 - DNA, 1080 bp, Stenotrophomonas maltophilia
atgactgtctccccctctctcaagaaaaaactcctggtcgctttcgctgcagcggttgttgccgcgctggcctggtggagctggacgaggtttaccgacagcggcccgggcgaaggattcgtcaacggcaatggccgcatcgaagccaccgagatcgacgtggccaccaaacttcccggccgcatcgaagacatcctggtgcgtgaaggcgatttcgtcacagccggccagccactggccaagatgcggctggaaacgctggaagcgcagcgcgacgaggccctggccatgcgtcagcaggctgagcattcggtgaccgcggcgcaggcacaggtggcgctgcgtgaagccgacgtgactgccgccttggctctggttggtcagcgcgagtccgaactggacgccgcgcaacggcgcctgacacgctccagcacgctgtcgagtgagggagccgcctcgatccaggaactggacgatgaccgggcgcgcgtacggggcgcccaagcgaccctcgcggccagcaaggcacaggccgccgctgcccgcgccgcggtcgaagccgccagggcgcagtttgtcggcgcgcagtccagcgtgtccgccgctacggccagtatcagccgcatcgaagccgacatccgcgacagcgaactgcggtctccgcgcgacggacgggttcaggtgcgtgtcgcgcaacccggcgaggtgcttggagcgggcggacgtgtcttgaacctccttgatctgtcggacgtgtacatcaccttcttcctgcccgaaaccgtggccggccgcgttgcgctgggctcggaggttcgcatcattctggatgccgcgcccgagtatgtgattccagccaccgtttccttcgtcgccagcgcagcgcagttcacccccaagacggtggaaaccgccagcgagcgacaaaagctgatgtttcgcgtgcgcgcgcagatttcgcaggagctgctgcgtgagcacctgaaccaggtcaagaccggtctgcccggcgtagcctgggtcaagctcgacgccaaggccgagtggcctcagaacctctccgttcgtgtgccggagtaa

SEQ ID NO: 509780 - DNA, 1488 bp, Stenotrophomonas maltophilia
atgctcccaacttccccgttgtttcccgcgttcagattgcgcgctgcctcgttggccctgagcgccgtcgtcttgaccggctgcatgtcgctcgctccggcgccagacaccccgccattgcccgtgcccgaagcctggcccgcgcatcttggatcaggcaccgacggcgcccacgcgggagagcttgcctggcaggcgtacttcaccgaccccctgctgcaacgcctcatcgagactgcgctggaaaacaaccgcgacctgcgcgtggccgcgctgcgcgtcgaggaagccagcgccacattccgcattcagcgctcggatcgttttcctgccatgggcgtgggcgcccaaggtggacgcgcgcgggtccctggcgacctgaacatgtcgggccgatcgcaggtgggcggcgagtaccgggccgaggtgggtttgaccacctgggaactggatctgtggggtcggatccgcaacctggaagacgccgccctgcaaacttggctggcttccgacgcggctcgccaggccgtccatttggcgctgatcgcccaggtggcagacggctatcttggcctgcgcgagatcgacgaacgcgtggcgatcgcacggcaaaccgtgaccacccgcgaggagtcctatcgcattttccggcgccgcgtcgaagtcggctcgacctcgaagctggatctcacacaggtccagaccctgctgaaccaagctcaggcgctgctgacgcagcttgagcaggctcgcaccacgcaactgcacgccctggcactgctggtaggcgctgatcccggcccgctgcccgccaaggcacccttcgatgaaacgacggttctggctgagctgcgggccggtctgccttcggagctgctggtcagtcgcccggacatcatttccgccgaacaccaattgcgtgccagcaatgcccacatcggcgcggcccgcgcggcgtttttgccgcgcattgcgctgaccggcagcttcggcacggccagctccgacttgaatggcttgttcgattccggcagtcgtgcctggaccttcatgcccaccctgtcgctgcccatcttcgatggcgggcgccgccgcgccaatctggagctgagcgaagtgcgccgcgacatcgccgtcgccggatacgaaaaaaccattcaaacggccttccgcgaggtggccgatgcgctgagcgcaaagcactggctggctgagcagttgacgatccagagagccaacctggaagcgcaaagcgaacgcgcacgcctggccaagttgcgctacgacaacggctcggccgccttcttggaagtgctggatgcccaacgcgatctgctgggagcccagcaacaactggtacaggcgcgccgcgcgctgctgtccagccaggtggcgctgtatgccgcgctcggcggcggcaccctcgccgcagccggcgaggcacagggtgcggcctcgactcccgcttccaccccatcaacccgttaa

SEQ ID NO: 509781 - DNA, 639 bp, Stenotrophomonas maltophilia
atgccacccaataaagatgacgcgccagacaacaagcgcccctacctgtcctctgccgccaggaaagaggaaatactcgacgcggccctggtcgaattcgcggatcggacatacaacgcagtgtcgatggagcgcctggcggaatgcgcgggcttgtccaaggctggcatctatgcccacttcaaaagcaaggaagaaatttttcacgccttgctcgaacgtacgacgaagcagatttgtgatttccagggctggctcccggatgaggatctgacgttgccagagctggtagatgtctacctggatcgcctgtacgcgaccttcagctcccctgccacgatgtcgatctaccggctgcttctggccgaaagcgcccgaactccagagctggtgcagcgttggcacaacgaagttgcgctcgggctgaaagagcgggcgcagaccatcatccaccgcaacatacgccgaggcgtcattcgcccaggcgtcttgaccgaacacttcttcccgttggcgctcgcgcccgcagtgctgtggctgagttcctcgatgctgtccaagggcagtccttccatctcgctggtgcagttacgggatgcgcaccggcaactgttgcttgagcttttgcagcctcaatga

SEQ ID NO: 509782 - DNA, 1035 bp, Stenotrophomonas maltophilia
atgcacagagtcctgcgcgcccttgcaggcttggcgatcggctttgtggtactgctgctgactgtgtggggtgcgctggctctgtggcatcagatgccgggaccttcggtggtgcgatggttcgtcattgccatgtggtctacgttgggtgtgaccgttgtcttgtcgcgggcgggcttgcttgggcggcgcaatcgcaacatcgccggattcgcatttgtgatcgcagccgcctccctgctcatgtggtgggggacgctgcagccgtcacaccagcgtgtatgggctgacgatgtcgcccagttgctggaggccaggatcgacggcaaccatgttcacctgaataatgtgcgcaacttccagtggcgcagcgaaaccgactacaccccgcagtgggagagccgcacatacgacctggatcgtctgcgcagcgccgacttggtgctttcctactggatggggccgcacatcgcccacaccctggtgtcgttcggcttcgatggcggtgatcgcgtggtgttctcgctggaaattcgcaaggaacgccatgagtccttctcggcggtaggaggattcttccgtcagttcgagcagatcctggtagccgccgatgagcgagacattgtgcgtacgcgcagcaacgcgcgaggcgaagatgtttatctctatcgcttgcagatgaatcaggcgagtgcccgcgcgttgtttctggagtttctgaacgcggccaatgaactgcggcagaaaccgcgcttttacaacacgttaaccagtaactgcacgaccatcgtattcgagctggcccgggtcattgcgcccgcattgccaatggactatcgcctgctgctgtctggatattttgcgcggtacgtctacgacatgcatggattgacgcctggctatcgttacgatgaattgcaggcactggggcatatcaacgaacgtgcccttgcttccgatgtgtcagaggatgacttctcgatgtcgattcgacaaggcgtgccaggcatccctgccaacgaggtgaatccatga

SEQ ID NO: 509783 - DNA, 1941 bp, Stenotrophomonas maltophilia
atgaggttcccgcaggcctgccttctcattacatgcgccgctcttgctccgctgctgctggggggctgctcgatcctgcgcgagttcggcccagtggttgaagttcatacgctacctaccagggaggccatcgaactcaagcgcggcgacatcctgacacgtggcaagctcagcgatgcgactgtccagaccatcagggtggcggcattggatgagcaggcatgcgcaaagccgatctcctcggagtgcgcggaggccttggctaccgtgacgggggttgccacggatagacgcctggctgcactgtccgaactatggctggcgcaggctcaggccatgaagcccggttcagcgcagcaagccgcctggcttgagacgattcgctatgcctatgcttatctgttccttggtgaccatactccgggagagcgggccttcgaggatcgccagacccaagtgcgggattggtataactatgccgtcgagcatgcggccaccggcatgttcgaagttcggcaacaaatgccgacgcagttgtccgaccagaccagttggaacattgcaggctgggaactgaagctggatatgcgcggcgcgcgcttaccgggcagtacggcggtgccagccgaactcctgccagcctcgtccctgtctttccgtggattgcgtagcctctaccggcgcgacggctttggcgccgagcttgtggcggtcattccggacgagtccctgagcgccgccccaactcggggtggtcgcccagcggcaaaacatgatcagcaaccgctgccctggagcgagatgcccgcgccgtccatgacggttctgctgcatcccgacggagacaacttgaacagcgtgctgcatgctcgtacagcccgtctgacggtgcatgacccctatgtggaatcggccattatgctgcgcggccaacgtgtgccgctggcggccaatttcacggccggctatggcgtatggctggcccgtgccaatttcaaccgccagtcgctgcgcagcctgctcgggcgcgagggtggcatcgaccgcccgcacgtctacttgatgcagccctacgatccgaacaggcggatcatcgtcatgctgcacggactggccagcagccctgaagcctgggtggaactcgccaacgaaatcctgggcgatgaggccctgcgccagcattaccagatctggcaggtctactacccgaccaacatgccagtcgcgttgaaccacgccatgattcgcagggcgctcggggatacgctgacgcatttcgacccatccggccaagcgccggcgtcgtccgacctcgtgctggtggggcatagcatgggcggggtcatcgcgcggttgatggtgtcgtcaaccgatcaatcgctggtgcaattggctgcggatcacagtcggttgacgccgcagcagatcaggcgcattgatcccatgttgcgcttcgagcccttcccgaatgtcagcagtgccatcttcatcgcggcgcctcatcggggcacatcggtcgcgggtggacgcctggggcgctggatggcgggatttatccgctttcccattacggtgctcgaagaactcgcccatacactgacacccaatgcggccgccagcagccgtgaaagcctggcaaccattcccaatagcgtgaacaatctcgacgaaaacgatccgttcgtgcgtacggcggcgggctttcccatctcatcccaggtgcgctatcactcgatcgtggcccaagccaattccgaagtggccctcgatgattccgatgacggtcttgtgccttatcgcagcgcacatcttcccggcgcacagtccgagaaagtcattatttcggggcacagcgtgcaacagagcgcggccgcgatactggagatccagcgtattctgagagaggacatggctctgcgggaagcgcatttacagccatag

SEQ ID NO: 509784 - DNA, 216 bp, Stenotrophomonas maltophilia
atgggcgtaatgcattcatctgaatgcgcaaagagcatcagacttactgttgcccgctcgacgctggcacagtgggtcggtgcgtgcggcgcgcaactgcagccgatggtaaaggcgctggatgacgaactgcgtcgccacgtggtgctgcacgcccacgagacgccgatgctcaagcccaagcatcttggcgacggcaaggcgtacccaacgtga

SEQ ID NO: 509785 - DNA, 270 bp, Stenotrophomonas maltophilia
gtgatccgccgtctggcggcgacccagcccatgctcgacaagatcgtcggccaccaacgccacatcgctcaggcctacggcatatcgatggagcatgcgcgctggctgttgaccaccgtggcgttccactgccttgccgtggccgacacggtgtactcggtcgccgaacgggaacccgtcgtggatgcagaccgtgcgacggaggaagccgagatggaggccgaactcaacagggcatgcacgcactcattgttggcatgctggccttga

SEQ ID NO: 509786 - DNA, 378 bp, Stenotrophomonas maltophilia
atgacggccttcctgcgcggggccatcgaccttgcgctagacaaccatgccaatgcgccacgcagcaatacgcaatgggtgttcttcgaccgtggcctgatcgacgcggcggcagcaccccaggcactggacggcactactattctggacacgattgcccagtcgcatcgctaccactcgcgcatctttctggccccgccgtggcctgaaatctatgtgcaggacgaagaacgccgtcacagcatggatgaagcgcgggctgaattcgagcggcttcagcgcacctatccagcgctgggctatgcggtatcgcggttgcccaagatcagagtggcgcaacgcgctgactttgtgctggacaccttggctagccgctaa

SEQ ID NO: 509787 - DNA, 1863 bp, Stenotrophomonas maltophilia
atgctctccctgttccagcgaaaacggcccccggtcgccggcgcgccaccgccagcacccgccaccgtcctcccgaaagggttgatgcggcccgagtcggccgcatcgctgctggccaccccgcgccggcagaagctgctggagcacatttggcagcgcacctcgctgtcgcgcaggcaattcgccacgctgtaccgagcgcccctggaacgctacgccgagctggtccaggccttcccggcctccgaggcgcatcaccatgcctatctgggcggcatgctcgaccacggcctcgaaatcgtcgcctacagtctgaaactgcggcagtcccatctgctgcccatcggcgccagccccgaagaccaagcggcacagtccgaagcctggaccgccgccgtcgcctacgccgcgctgctgcacgacatcggcaagatcgccgtcgatctgcacgtcgagctggccgacggcagcatctggcacccttggcacggcccgctgcgccagccataccgattccgctaccgcgacgatcgcgagtaccgcctgcacagcgccgcgacaggtttgctctaccaccaactgctcgaccgtgaggccctggactggctcagcggctatccgtccctgtgggcaccactgctctacgtcctggccgggcagtacgagcacgccggcgtactgggcgaacttgtcgtgcaggcagaccgggcctcggtggcccaggagctgggcggcgatccggcccgcgccatggctgcgcccaagcacgcgctgcagcgcaagctgctcgacgggttgcgctacctgctcaaggaacagttgaaactgaaccagccggaagcctccgatggctggctcaccgacgatgccctgtggctggtgagcaaaacggtctcggacaaactgcgtgcgcacctgctgtcccaaggcgtcgatggcatccctgcgaacaacaccgcggtgttcaacgtcctccaggatcacggcatgttgcagccggcgcccgacggcaaggctatttggcgcgcgaccataaccagttccaccggctggtcccactcgttcaccctgttgcgcctcgctcctgcgctgatctgggaatctggcgagcgaccgacgccttttgcaggcacggtagcgatcgacgcggcagtcgccgaaaacgacgccgaggcgccgaaaatgccgcctgcggccatggcgaaggcagccccgaacggtcagaaacttccatcttgggaaggcagtagtaccgtcaccgcctcaccgcctaaggcccagcccgtgtccgatgtcatggaggacatgctggcaatggtgagcacgagcggctcgcctggtgccgagcaggatgtggagccggttgcacagagaagctaccccgcagaccccagcactcctatgccagcgactgccgcagtgcttccttcgccaccaccatctactgctaaaccacccctaacagcagcgcccccgtcaggcgaacatttcatgatgtggctgaaacagggaattgcttcgcgccggctcatcatcaacgacgcaaaagcgctcgtgcattccgtgaatgacacggcctacttggtcagcccaggtgtgttccagcgctacgtccaggagcaccctcatgtcggcacgctggcacggcaggacaagatgccggattggcagtgggtgcagaagcgctttgagaaactggggttgcatcgaaagcacgacagcggcttgaacatctggatctgtgaagtcaccgggccgcgcaagtcccggaagctgcatgggtatttgctgatcgatgcgaattggttgttcgatgcagtaccacccaacaatccttatctcagagttacgcaagagatttga

SEQ ID NO: 509788 - DNA, 633 bp, Stenotrophomonas maltophilia
atgagccacgagctgccttcgttcctgatcgatgccggtgagctgctccagcatgtgagccgcgtcgtctatcggggcagcccgctgtactatggccgcagcagcaccaatcgctacgatgacccggcccaggcctacggggtgctctacctggggcgcgacctgcccacggcgctgatggagtcggtgtttcataagcaccagtggcttgcggacacgaagcgctcgatcgcgctgaaagaagtccagagccggatggtgcgcgcagtgggcgtgatggacgacgtgcttctggccgacctcacggcgccgggcgtcatggcgggctacttcggcctgaacctggagcagttggccagccgcgactacacgcacacgcagcaggtgtcggcccaggtgcatgcgatgcttggagatgacggccaggtgctgttcgacggggtgctctatccgtcgcgcaacaactatcccgccaagagcatcgcgctgttcgagcgtgccagcgcgaaggtcagtgtcatcgaggacatcgatctcgttgaccatgtggactggccgcgtttcgttgctacataccgcatcggcgtggagcccgaccctggcccgttggaaccggatgacgaagcgtcctga

SEQ ID NO: 509789 - DNA, 360 bp, Stenotrophomonas maltophilia; identical to SEQ ID NO: 366562

SEQ ID NO: 509790 - DNA, 348 bp, Stenotrophomonas maltophilia; identical to SEQ ID NO: 366563

SEQ ID NO: 509791 - DNA, 1395 bp, Stenotrophomonas maltophilia
atgaagcgtcctgaactgatgaacccatccgccaaggttcgccgcccgctgcgccccacggcgctagccggcgcgctcgccctggtctgtggcctcgcgtgggcgcaggccggcttccagaccagcggccccgtcatcggcgatgaggtcatgtactcgatcggcggtggcagtgcggtgtccatgggccgcgccgctggcatgcgttcgatcggggtcggcctgggttggaacagcaacctcatctgcggcgacatgagcatccagaccacgctgcgcaatcagctcaatgggatcacgaatgggttccagcagatcatgagcaacgtgatccagagcgcgaccagtgccgtggcatcgctgccggcgctgatcatccagcgtgccgatccggggctgtacaacctgctgaccaatggtgtgctgcaggcgaggctggatttcgaccgctccaagctgacgtgtcgcgcgatggccgagaagatggccgagacggcgggcggccagctcggatggagccagatggcggaaggcatggcgctgcgcgatgcggtgtcgagcacggatgccgtatcggcgatcgagcaggccgagacgcgccgcggcaacgacggcgtgccctgggtgggcggcagcaatgccggcggcgcgggccagtcggccatccgggtggtcggtgacgtgacgcgggcgggctacaacctggtcaacgggcgcagcgtgactgacacgtcctccatcgcgcccgccagttgcgcgagcctgtcctgccagacctggacgtcgccgcagcaggcgaccgaatgggcgacgcgggttctcggggaacaggtacagcgcacgtgtgattcctgcaccaagaccgagaccgtgcctggcgtcgggctgacgccgctgatccaggaggagtacgagaccaagctggaggccttgcaggaactggtctctgggacgcgcaacacgacgttcgagaacctgcatgcagccggcagcacctcgctgcccattacacgcggcgtcatcgaggcgctgcgcgacgagccagaccaagacctgctggcgcgacgtctcgcgtccgaggtcgcgttgtcgtccgtgctggagaaggcattgctgctccagcggaccctgctgaccggcaagaaggaacccaacgtggcggccaaccagttggcggtcgaggccgtgaaccacgagagcgacacgctcgatcaggagatccgcaacctcaagaccgaacttgaactgcggcgcgaactggcgaacaactcgcccatggccatcatccagcgccacgggacgcgcgcggccggctcgcgcggcatctacgaaggcgacccggtgcccgaccgcctcgatcggttgcagcggggcaacccgggaggcacgccatga

SEQ ID NO: 509792 - DNA, 447 bp, Stenotrophomonas maltophilia
atgccagcatcttcatccaggttcgcatcgggctggcgaacccttggcctggccgttgcgctgccggcttccctggccgtgttcagcccggccagcttcgccgccgatgtggtgatcatcaccgacagccgtcacccggtcaggaccatgggtggcgagcagctgatcgagctggatgaagcgccccggatcgaagcggagctttctgcggcgctgcccgccgatcccggacaggcaacagccatcgtgaagcgccggctgagccaggggggcgctgacctccagcgtcgcatcgccaccgaataccagggcgttgccgacgcatggagcctgggcatcaccaccattccggctgtcgtggtggatcagcgctacgtggtctatggcgagcctgacgtggcccgcgccatcgcgcgcatcgaacagcaccggagggccgaaccgtga

SEQ ID NO: 509793 - DNA, 1788 bp, Stenotrophomonas maltophilia
atgagggtttctcgggtcaggttgatcaatttcgccaatttctcggatgttgatgtcgagacgggggaaagtatcgtcatcgtgggagagaacaaggttggcaagagcaatttcattcgcggcctgcagttgatccttgatccgggcttgtctgagcgcgatcgacaactggggcttgaacatttctgggacggacttggcgaagacaaggttggtgcgaccattgaggtctttgtggatctaacggacttcacaaacgatccccgactgatggctcacctcaacgattgcgtgattgatcctggcccacccatggtggcccgactcacctaccgcttccagcctaaggcgggcctggggcgcgctccggaatcgttgaaggactatgagtatgtgatcttcggtggcgacgatcccgacatgcgtatcggcggcgcactccgccggatgttgccaatagatgttcaggtagccctgcgtgacgctgagaaggaccttgcgagctggcgcaattcgccattgaggccgctcattgaggatcttgccgcgtcgttggatgatgacgcccgtgaggagattcaggatcaggtcgaccaagcacagcgagagctggctggacacgaggaagtggtagcgacagcagaacggatcagcgaacggctgatcgccatcgctggggggcaacatgccgttccggtatcgctcggacttgcaccaactagagtcgacgcgttgctgcgcagcctgcggctgctgatcgacaacggcgtacgcggagtcggcgatgccagtttgggaaccgcgaacctgatcttcctggcgctgaagagtctcgaactggaccgcctcgtttccgatggagagcgcgaccacaccttcttcgtagtcgaggagcccgaagcgcacctgcacccgcacgtgcagcgtctaatctatcgttacttccttggcacgggggcggaagatggtgaggaacagccaccgcttacgacaatcctcacaacccactcgccacatatcgcaagcgttgcgccgatcagatctattgttctgctgcgccatgacacagcggaaggcaagactgtcgcggtctcgacagcaaacgcacctttcacgcagcgggatgaagaggatcttcaacgttacattgacgtcactcgcggcgagattttcttttctcggggggtgattctggtcgaaggcgacgccgagcgcttcatcgttcccgcgtttgccgaggtactcgatattcccctcgatatgcttggaatcactgtgtgctcggtgggggggactaacttcaccccgtatgtgaagctactgggccctgaaggactcaacattccccatgtgatcctgacggaccgggatccaaccaatggtaatcatccattggttcgcaggcggcttatcaatgtccttgacgtgattgagggcggtgtcgatcacgaaaacttggatgcggatgaagtgatcgagcttgccgagcagtacggatacttcgtcaacgagaacacgttggagcccgaactatttgcaggtggactggcgcaggacatgcaggaggtaattcgggaggaactgccgcgattaaggagagaaactctgaatgccttgcagcagtgggtggacgatcctgatcaggttgatgaagactggctgctcagattgatcgagaggatcggaaaggggaggtttgcgcaggcacttgcaccgtcggtgtcacaggacgtttgtccggcttacattcgttccgctctggagcatatccgtgacgccatcgcgtag

SEQ ID NO: 509794 - DNA, 1818 bp, Stenotrophomonas maltophilia
gtgacgccatcgcgtagtgtcagcacagcctacttggctcaggctgccgaactggctgggaatccgggtcagttggcagcctacaactctcaaggacattgtgtggtactcgccggtcccgggagcggtaagaccaagacactcgtcctaaagctcgcccgcatcctagccgaagacgtcgaggcccctcgtggcgttgcgtgcatcacttatagtcaggagtgcgctcgcgaactcgctcgccgaattgaaagcttgggacttcagcaggcacctaatcttttcattggtacggtccatgggttctgtctgcgtcatctcttgatgccgtatggacgcctggccggcctgcccatatctttcccactttcggtggccactcaacgagtcagtgatcggttgttgaagcaaactggagatgcgcttttcggccagaaccatccgtacaaagttattgacctcggacggcatcgccgttccgtgctcaatcgaaatagcgtcgcttggcgtagcgaggaggaactcgctgcctgggccgagacctacgaggccgctctgcgcgacgaggggctgattgactacgatgacatggttgtcttcggccaacgtttgatcgccgagcacgactgggtactacctctggttcaggcaaaattccccgtgctcgcggtggatgagtaccaggatttaggtgtagcactgcatcgcatcgtcaaacgccttgccttcgacgggggtgtccgacttttcgctgtcggggatgcggatcagtcgatatatggatttacgggggctgatggcgcgttgctcatggaattggcggctcgcagagacattgagcctgtccagcttcaattaaattaccgttctggtgcagggatcgtgactgcgtcagagatggcgcttggagaagcccgaggctatcaagcgagcgatcctgcgcgacaaacgaccatcgaatttgtcctgcgcccgggtggtacggcggaccaggctgcgcacgccgtcgcgcagatcattccggcggccttagcctccaagccgggacgaacactgggcgatatcgcgatcctatacaaagactatcgcgcaggcgatatcgtggctaaagctgtggcaaccggcggtctcgattacatccgtgtggataccgcagcaccttaccgcaaggttgccctaacaagttgggtagaagattgtgcggcgtggtgcgcgggtggctggcgtgttggacgcccacaattgcgtggactactcgaccgctatcgcgcatttcatcgggcgagcttggacgattcacaggccaagcgcgaagagcaagagctaaccgccttgctatgggagctgcgcgctgaccagcaacctgcgcgagaatttgttgcttcgttgcgcaacggtgtagtggatcatctgctggcggctgaattggcgctcgctgatcagaaagagcaactggatcgcatgacggcagcgctcgccgaaggcggtgcactggcttcgctagacatcactagtttgggcggtcgggacggttcgcccgatcacctgaatctgctgacactgcattccgcaaagggctgtgagtacgacgtcgtcatcatggttggactcgacctcggaaatctgccgtggcgcaatgaaactccagagaagttgcgcgaaagtcgccggctcttctatgtgggactcacacgtgctcgcgacgaggtccacatgctgtattcgggcttcgttgatggccgctatggccctatgcgctttgggcgctcgccattccttgatgagctggaggcgcgaatgcgtgccgctggcatttga

SEQ ID NO: 509795 - DNA, 774 bp, Stenotrophomonas maltophilia
atggtgatcgaagcagcatatgcagatggtactggtgcagccaacgcactgcatatgtctcaggcgcagtgggaagagttgcaacgggcgtactgcgtcggtgatctgctgatgccttgctgcaacgctccagcgattcccaaggttagtgctaatgggtaccccttctttgcgcatctaggaggtgcgtgcagtacttccgaagaaagccaatggcacctggcggccaagatacttgtgcgcagcgtgcttgaagatcttggatgccgtgcctcggttgaaatgccgggttcgggtgatgcaggtcgctggcaggctgatgtctggggtgagcgcaatggggttaggttggctgtcgagatccaaagatcgtatcagtcgctccgtgactaccgtaaacgccaagagcggtaccgcgaggcgggcgtcaagtctctttggttgctgcggcaggagcgatatagcacactcaccaagagcatgggaaaggagcgtctgcgcaccgagtttgggggcaagttcccttcggccggccacttcggcccgtgcctttctgacctgccggtcgcgatgcttgagctagatccggccccaacggtcaagggtgccggattcttcaacgcaacccttccaaacatacttgaagcagtgcttagtgagcgctttctttgcatcaacggtctatggtgtatcgataacctagactcgatgaataacgccgccagactctcgcgcgagcgttttgcagccaatcgcttggctgcaaagatgtag

SEQ ID NO: 509796 - DNA, 321 bp, Stenotrophomonas maltophilia
atgttccccaatccgttcaagcggcccgcgccgcacaagcaacccttgttcgcaccggcctcgttgcagttgagcgagaaggtgcattggctggcccgccgaggtctcatcgatcccttgtcctatgtgcagcgccacgtgcgcggcgactggggcgagatcgacgaggccacccgccaggccaacgatgtcgcactcgatcaggacaacctgatgatctcccagtaccggatcacgccggaactggtgttgatcgtgaagaccagcgaagaccaccagaccacggtggtccagcttcccgaagagcgcgacctgatctga

SEQ ID NO: 509797 - DNA, 339 bp, Stenotrophomonas maltophilia
atgtccaccatcgcttgcgatatcccccgctccgcgctggatgaacccgcgtggcgggctctctgcgagacggcagccgcacaagccaccaagggttgcggactgtctcacgactactacgtcgaacgcttcagttcggcgatcgacgcgcaactcggtcgattgccggaagaacagcgcgcacaggcgctgaagatcgcacaggaatgggactacgcaacaccggccgaacggcaggaaacccaggactggaatgcggagcatggctattgctcgcatgggatcgagttcggctgctgtccggccggttgtgatcgcgacgatgacgactgggactaa

SEQ ID NO: 509798 - DNA, 537 bp, Stenotrophomonas maltophilia
atgaacacatcatcgacctcgccgaggctgcacctgctgccggtgtcgctgcgcacggccaacgtcttcgtgctggcacaccatcaccgtccggtccaggctgcgaagttcgccctggccgtcacgctggtcgacagcgacctgatccgcggcgtggccatcgtcggccggccggtcgcgcggcacctggacgatggctggacgcgggaagtcacacggctgtgcaccgacagcacacccaacgcctgcagcaagctatacggcgcggcctggcaggcggcaaagtcgctgggctacatccgcctgatcacctacaccttacccgacgaaggcggcgccagcccgcgcgccgccggctggcggctgattggcgcgcgcggcggcggcgcctggagccgtcccagccgccccctcgccgataccccgagcacctgcgccgccccaaatgcctgtggcaggcgccgggcggcgcggacaaagggaagcacccggatgccgattgattgctgccgcgcgcgcgaggcccggccatgctga

SEQ ID NO: 509799 - DNA, 354 bp, Stenotrophomonas maltophilia
atgtcactgcgattcaaaggcgccgacctgcgccccgtgctgaccgaagccatcgccaatcagtgccgcatcgtcctggtcaaggaccagggcgtgtacttcctcgccgagcgtggggagcgtcgcccggatggacgccagcaactgctcgcctacgccgtcggctgcaacccggacaccgacccgttcgatgactggtggcacctcgccggccgcgagctgggtggcgacgattttgcggagtatttcgacccgaaggacggcctgttcacgcgcctcctgcactcggcggacgatctcgtgctgtccgccaccgccacgcacctgtccttggccgtggtgcctcccgcctga

SEQ ID NO: 509800 - DNA, 825 bp, Stenotrophomonas maltophilia
atggaccgttccctcatcaaatccatgatgccttcgctggtcgcaggccatgtgccccgtaacgtgcgatcgttcaagtaccgcgtgttcgatgatcagccgctgtcctcaacgctgggctttgccatcgacccccaacccttcgacggcaaggtggtcgctgcgaccgacgatgccatcgtcgtcaagctcaagccttccgagttcgcggtgctcgatcccagcctggtgaccacggttcctgccgaaggcgccaaggtgcatgtccaaccctatgcccgtcgtcgcttcgacggactgcgcgcggacacgccggaggtcatcaccgagaagacttcggacggcacgccgtacaccatcacgaggcacatcctcggctcggcgccggccaagctgcccattcccacgccgcagtgcatggagttgggccagctcatcgagcagttggaagagatgccggcccccgatcgcttccggcgcatcacccacatgctggtggatgccggtgcccgcgacttcacctgggtcgatcccacgccctccaagatcatcgagaccccgccggcgatcagcttcacggtctcgaccgcgaagttcgagggccgggtgacgatcctctacgaccgcggcggagacacctacgtggtggaactgcaccgtcagaacggtgaatcggtcgaactggtcgatcggcacgacgaggtgtatttcgacatgctcggcgaagtgctggagcggctcatcgacgacgggcgctggcgccagatcgacgtgagcatcctcgacgcgaaggcggcccgtaagcgccaagccgtcccggcatga

SEQ ID NO: 509801 - DNA, 732 bp, Stenotrophomonas maltophilia
atgtcccagaatcccaatccctttctacgcggctactggaatctgaaaatcgtccgcacgctgtccatcagccacgaggacggaagcccgcatgtctggcgaaacatccaccagagccaagaacacctctccgatgaggagctggtttcagcatcctgcatcgtcaccagcgatttcgccgtagtcagcaatggcccagactccgtgagtgccgaggtgctggccgaacgcgatgccggtgaaggcgcctacggcgtggtgggtgccgtggtgtacgcgatccacggcgacgacttcgacggcctccccgtccacattggcgacacttattcggccgaggccgcacgggaagtcgtgcagcggttgagcttcgagaccggctactacagccggtgctgggaaatcagcagcgcgcacatcagccacgaaaccggccagtacctggccaacctggctgacctcgcgacgccggaagcctttttgttcattgcgttccgggttccctacagcccggcgatcggcgtcaagctgatttccacgccctggacgggccagcacctgcaggacgtcgaggagatctccgccgagcagcttcggcaggagcactgcagcaagggcatgccggacgacctggcacagatccttgcactggccggccaggccgatgtgcgcatcctcattctcgatgccgacgcacccgtgttgccgggcctgccgttggccggcgaataa

SEQ ID NO: 509802 - DNA, 558 bp, Stenotrophomonas maltophilia
atggacaccatcacccgacaagaccgcatcaccctcaagaacctcaaggtcgcggatttcgcgagcgaggaaacgctgtgcttcaccgccaccgtcatgttcgacggcaggcccatcgccgaagcccgcaacgacggacacggcggctcgacgttcgtgcgcgcgttgcaaggccaggccgcgctgctggcccaggccgaggaattcgccaagagcctgccgccggcatcgctcgacgtcgaacgcgaagacgacgagccgcttctcatcgacatgacgctcgacttcctagtggaccaattggccgatgccatgcacgcggagcgcaagctgcgcaccgcgttcaaccgcgacatcggcaacaaggtgctgttcatcaaggacggcaggctgctgttcctcaagggcatcaagctcaaggccattgccgaccgcgcagcgtatttcgcaaagctgcgcagccgacaggaccagcccatcgtcatcctggccgagctgccagcggacgaggcattcgccatctggaagcagcatgtcctgggcgacaagccccgctga

SEQ ID NO: 509803 - DNA, 747 bp, Stenotrophomonas maltophilia
atgcacaaggacattccaacatcgaaggtgttctatcgtcccatcgaggctgccatacggtgggccgggttgctgcggtacctgccgatgatcctggctgcgatcgcgtcaccgcgcttcctgcctccatcgttgaattgcccgcgatggaatgagtgccggctgtactcggagcgtatctatgacggcatcctcaacggggagctgccctacggccagaacggcatcacgctcaatgatccgaagctgctgcagtcgccggatctgaccgttcgccatgtcgatctgaagcgctggatgcgcaaccactatcccgagcaccggccaggattcctgttcagccgtggcgaacgcatggcgcatccttttatcaccttggaaacaggacaggcgatcctgatcgagcgactggcccttcaggcggccctggagcatgcgcgtcgccagatgcaggaattgcaggagcagcgcgacaccttgctcaagcagtccaccgcgctgctggcttccaagcaatgcgagatcagcgagcgagcggagacgacgtatctcaacatcatcggcgggatgctgacgctgatgctgggccagtccccttcgggtgtgccctattccagcttcaaaacacaggaggcactcgtctcggcattggtcgcccacttcggcggcaccatgggcatcacggagcgaaccttgaacggcaagttcgccaacgccaggaagtacgtccgtagcgcaagcgcatga

SEQ ID NO: 509804 - DNA, 240 bp, Stenotrophomonas maltophilia
atggacgcactttttctcgccgtgctgctggggtgtatcgcagccgcgtcgttggggttagccaaagtcgtgaggtggtgtgttgatcggcgtgcgttctccgctggtcgcactgcacgcgaaagccaattcgttgcgcagtcggtcgctgaactgcaccgcctggaaatcgaagcgacgaagcgcggcaacctgctcgccgctgccgagctcgctgaagagcaggagcgcgccgcatga

SEQ ID NO: 509805 - DNA, 171 bp, Stenotrophomonas maltophilia
atgagcaggtttccctcattcgccgaactggcggagttcgatatgggtcttgcggggtgcgccgcgctcatcgccgtttggctgggagtggcattgctctccatcgtgatcgagcaggcatggctggcgcttcgctactggttcaagcggcggaagggcaatgtccgatga

SEQ ID NO: 509806 - DNA, 240 bp, Stenotrophomonas maltophilia
atgaagctgatgaacaccgcccgccgtttcggcgcctccaccgtcgccaagatcggcgccggcaccactgccctggttgcttcgggtgccgcactggcctcgggcagcacttcccccggtgccgccatcgcagcggaagtcgccaagggcaacgccgacatggccctgatcatcggtgctattgcgatcctgctgggcatcttggtcgtgtgggcctacacgaagcgggccgcgaagtaa

SEQ ID NO: 509807 - DNA, 1371 bp, Stenotrophomonas maltophilia
atggaacggttccgcctcctcctgttgcttgcggtgctgggcgctctggtgaatggacttacgtacagttcatccgcatccgctgcgacttatcgttgcacctcctactcaccgattgtttgcgatcaaggtgaggcggtgtctgaggcgtgggcatacgcacgcgagattgcagcaaaacgagagggctacacggcttgtgtccggcctgatggaaagacgtttgttgcatggattgaaggcaacgcagcatgtccgaacaccggtttcactgttggcacacaaaccttctattacgacaagctgtgtgcggatcgttctagtcaaaccacaccgtttttccccccatctggctcggttcgatgcatgaatgggtgcgagtcggtcttccgtgataatggcgacgacaccactacctattcgccgaatggcaagacctgcgatcgtaagccggattgcgatgctcagggcaagaacatggtgtggaatgggatgctcggcgtatgccaacctgttgagcctgaatgccctcctggcaaggtaaagacgggcaatgcctgcaccgatgagaagccgtgccccgatggcatggcgctggtggccggttcctgtaagaagaaggacgaagagtgcccttcgggcatggttcgtagcccattgggcagctgcattccaggcgacggacagtgcgcccagggtgaggtgcgtggcccggatggcacctgtaagcgcgacaaggatgatgacggcaatcctgatcctaccggtcccgatgatccggagacgttcagcggtggcgatacgtgcaccgcgccgccttcgtgtagcggctctccaatcatgtgtgggcaggcgcgcatccagtggcgcatcgactgcaacactcgccggaacaacaacatcagcggcggtcactgctcgcagtctggtatgccggtttgcactggtgagaagtgcaatgcgatggagtacgccgggctgttgatgcaatggcgctcgacgtgcgccctggaaaagatggctggtgagaagtcggagacgcctggcactagtaagacggatgccaatggcaatggtgttcccgatgcgcttgagggcaggggggacgtaactgcgattggtgacaatgccgctgacgttgccagtgccaagaagtggggcatcggcctttcgcctgaccgccttgatacaagcaacatgttcggtgggggcgggacctgccccgagccacctgcaatcacgatcatgggcaagaccgttagcgcggctgaattcccgtatttctgcaggatcgcagcaatccttcgtgggttgatcctcatctttggtgcctatacggcactccgaattctcatgggagcattcttctaa

SEQ ID NO: 509808 - DNA, 321 bp, Stenotrophomonas maltophilia
atgggcatggtctctgactggatcgttgacgccaccacttcccttgttggcaagttaaaggatgccgcagctggaatgctcggcaagatgcttgcgacgttcggcctcaccactgtcacctttaatgctttgctgcccaagctgaaagagttcgtgatgcagttcgtgggcggcattgatggccctgccatgcagatgctttcttacctcggcgtgggcactgcgttttctatgatcttttcagcaatgacagttcgcatggcatggaagattttcatcgttccgaaggctgtggctgatcagatgggggcgggctcatga

SEQ ID NO: 509809 - DNA, 1185 bp, Stenotrophomonas maltophilia
atgatctactggtacaccggccagcctgggcatggcaaaacgcttcacgccattgagcgacttttggaattcaaggatcaggggcgcatcgtttacgcctgtaacatccgcgagttcgactacagcaaaactggcgtgcttgagatgacgcctgagcagttccgggactggcccaacttcctgcctgatggtgccgttgccctggtcgatgaggcgtatgagcacggcatgctgcctaagcgccctgctggcgcaaaggtgccgcatcatgtggagcagctggccaagcatcggcataagggcctggacttcatcttcgtcagccaatcgcctgataagcagtgcgatcagttcgtgcatgatctgatcgagcgtcacgtacacgtgcgccgtcgattcggcaccaagtttgtgcaccttcgcgagttcgaccgtttcgaggccaatgctgaaaaggccacgccactggtcacgaaacgcaagacgctccctaagcgcccgatgggtctctacaagtccaccgagctggacaccaccgagcgcaagattccgtggttctacatcgcgcttccgatccttgtcatcgcggcggttacgatgctgtatgtcgcattcgggcgcatcgacaagcgcgtggtcagcggcgagaacaccgcgcctggtggtgccagcggcgcggccgctccgcgcgacggagcgttagcgacggcgggcggagcgggggcggcaaagtcggcacaccctcttaaggattacgtcgacaagttcctgccgcgcgttccatcgcagccttggagtgcgcctgtgtacgacgacgcactcagcgtgccgagcgagcctccgcgtgtgttttgcatgtcctcactgggtggtgagaatggccttggtggacacgacgagccgagctgcaattgcgtgacggagcaggggagtcgatacgacctggacgaacctacgtgccggtacgtggcgcggcgcggtcagtacgagccctatctgcctcggcgcgagaaccgacttgtagatggccctacgcagatcaatcgcgccctggatcagattgatcagcgcgagcagggggttgtcgttgagcgtaaggccagggctatgggtagcttcccggagtcgcctccgattccgaccagcacgtatatgacgacgccaccaggggagaatcgactgtga

SEQ ID NO: 509810 - DNA, 687 bp, Stenotrophomonas maltophilia
gtgaccagcggcggacgtgaattgctgaagtggttcgccctggtgctgatgaccggcgatcacgtggtcacggtgttcgggttgcgctacgttccggtggtatccgagcttggccgcgtggcgttccctgtgttcgccctggtcatggcctacaacctcgcgcagccaggtgccgacgccgggaagtcggcgaagcgcctggcgctttggggcttggtcgccactcccgcggctactctggcatttggccaggtgttgccgctcaacgtattgctgacgttcgctgcagctgctggatgcatttgggctctggaacgccgtcattgggcgctggcggcaattctgtgcgtcgcggctccggttgccctggactacgcttggccgggcgtgtggctcgttctttcggcctggacgtggttcaagaaccacggaaggcgcatgcatttcctgctgggctcatgggactggcgtcgccagcggctctacctggcgttgccgatctggacatgggcatgcatggggctgctttgcctctacaacggcaacggatgggcgttgctggccctgccggtgatgatcctgggcgaactgtctgcacgcataccccgagcggggagggccttctatgcctactacgtgggccacctggcacttttggtggtgcttgcggctatagtcggcgcatga

SEQ ID NO: 509811 - DNA, 705 bp, Stenotrophomonas maltophilia
atgatccggatcgtggggttcgacggggacgacaccctgtggcgcagccaggagttctacgaccaggcgcagctggatttcgaggagatcatcgcccgctacatcgacttggactccgcgggactgcgggcaacgctgctggccaccgagcgcggcaacctggcccagtacggctatggcgtgaagggcatgatcttgtcgatggtcgaagcggccattgatctgacgggtggtcggatcgaggccaaggacatccggacgatcatggacatgggcaaggacctgctggttcatcccgtggagttgctgccgggcattgccgaagccgtcgagcaggtcgcccagcgttttcgcattgtcctgatcaccaagggggatctgtttcaccaagagcggaaggtggcgctgtgcggactgaccgcgtttcagcgcatagagatcgtgtccgagaaggacgtggccacctatcgccggctgctggacgagttcgaggtccagccccacgagttcgccatggtgggcaactccctgaaatcggatatcgcacccgtagtcgagctgggcggatggggcgtgtacatgccgtatcacgccacctgggagcatgaggtcctgcacgacttcgacggtgcggggcgtgtcgtggaagtggacggcgcagctcggatcaacgaggctctggacaggatgatgtcgggggcctga

SEQ ID NO: 509812 - DNA, 489 bp, Stenotrophomonas maltophilia
atgtccgaacgcatgctcgaactgctgatccggcaatggccgggcaagacgcatttgtcggcagaagagacggccaaggttctcatgcagcacccttacacggtgcgcgagcggatgcgcaacggcgagcttccaggggccgtgaagcgcgacggcacctggaagatgccgcttcctgacctggccgagcatctggagcccacgcccaaggcgccacagatcccgtcgcctcccgtcatcgtgggcggcgcccgccgccgcaaggcggttgtcatgaactaccgccgcgaccgcttctgggcgcaggtggcccgagccttgggcgatatggataccgccgacatgctggaccaggcggcgcaggacttgtacgacagtgaggttggggcttatctccgcgaacgagcggagcgtcggcgcgcgcagttggcggccgtcgctgctgctctggcaaacgacgtcgatccagggcccctcaaagccctgtga

SEQ ID NO: 509813 - DNA, 936 bp, Stenotrophomonas maltophilia
atgtacgaaccggctaacgcactcctactcgatcgcaacgcttctcaggagcacgctcgcgctgttctggacgaaccgctcgcgttcctgaccgacctggtgaattacggaacgcacctgatcatcaaggcgctgggtgacggggaagacgatacctcccggctggtggtgtgcgccggtctgttgaagcacatcgtcgggatgctggatgctgccgtcgtgctgttagagaacgggcactcgacaacggccctcacgcaggttcgatccgcattcgaggccacgctttacctcgaactgatcctgcaggaggaaacagagtacagggctcgggtttacctggtaggtgagtatcgaagaaggctggcgttcctccagcgggcgcttgatccatctacggcgccgggctccttcaatcacgactacgcacacatcgggatgagcacccaggcgctcagtgaagaagcaaaagcctcaggcgttgagcatatcgcccacattcgatccgtcctggcccaggccgacttgaccaccattgatgcggcctaccagaagacgcgcggcaacaagtccttcgatccccactggtatgagctattgggccacaagagcattcgacagatcgccaaggcgttaaaggaaggggccgcatacgatctttggtatgggcgcggcagccaggtcgtccacgctcagtcgcctactcaacattggtctgtgctgggcgatgtcgcggcactgaaagccatccgccacttggaagacggccattccgtgaaggatggcgtggcgcaagtggccctgcatgcctacaggctcgtcgtccgaaagtacctccctgacgacttcccggccttgcagcagaagtatctggctgactggaaaaaatctttccgcagcagcgtcaaggttcaatacgagtaccggggacagtaa

SEQ ID NO: 509814 - DNA, 2772 bp, Stenotrophomonas maltophilia
atgaatgctgttgagatcgaacaggcactgtcagacctagccgcgcaagcgttcgatggcgcggagttcccgttccagttcctggccgcgttcggcaataagaccaccaccatcgcccgcctgcgcaagggcgaaagcaacgcctcggacgtgccgggtggcgtgctgcaacgcaaccacatccacattgccgtggccgagcccggccaagtggggcagaccctcaccgccttgaaggccagccccaagaccgtccaggccaaggccaagttcgtcctggccaccgacggcaccacgctggaagccgaggagctggccacgggcgacgccatcgcctgcgagttcggccagttccccgaccacttcggcttcttcctgccactggccggtatctccacgatccgggagatcaaggacaaccccatcgacgttcgggccaccgggcgcctgaacaagctgtacgtcgagctgctacgcgagaacccagattgggcaacggccacgcgccggccggacatgaaccacttcatggcccgtttgatcttctgcttctttgctgaagacacggacatcttccccggcatctcgatcttcacggccaccgtggaccagatgagcgcgcgagacggaaccaacgtccacgaggtgttgggcacgatcttccgcgccatgaacaccaagaccgaagatcgtgcggctgctggcatcccgcgttgggcgattgagttcccctacgtcaatggcggcctgttttccggcagcaccgatgtgcccaagttcactcgtacggctcggtcctacctgtaccaggcggggcagctggattggcgggagatcaaccccgacatcttcgggtcgatgatccaggctgtggccgacgacgaagagcgcggcgcgctgggcatgcactacaccagcgtgccgaacatcttgaaggtcctgaatccgctgttcttggatgacctccgagcgcaactggaagtagcgggcgacaacaagatcaagctgctgaacctgcgcaagcgcatggcgcgcattcgcgtgttcgatccggcatgcggtagcggcaacttcctggtcatcgcgtacaagcaaatgcgcgagatcgaggccgaaatcaaccggcggcgcggcgaggcggaccttccttcagaaattccgatcaacaactttcgagggatcgagctgcgcgacttcccggccgagattgcgcgccttgccttgataatcgcggagttccaatgcgacgtgctgtaccgcggccagaaggaagcactgaaagacgtgctgccgttggatagtcagaactggattacgtgcgggaatgccctgcgcctggactggctggccatctgccctcctaccggaactggtgtaaagctgattggcgatgacctattcaatacaccgctggaccagtcagaaattgacttcgagaacgagggtggggagacctatatctgcggtaacccaccgtacaagggcagtcagacgcagactaaagagcagaaagcggacttggccgctgtgttcgatccttacggcatatcgtccaagcagatcgactatgtgggcggctggttcatgaaggccgctgcctatgcgcaagccacgaaggctgattcggcattcgtcagcactaactcggtttgtcaaggccggatcgtgccgattctgtggccggtgatcttcaacgccggctcgttcattcgctttgcgcacacgtcgttcaagtgggctaacctggctgcgcacaacgccggtgtgaccgttgccatcgtcggtctttcgacggagacaagtaaaaatcgcaagctctacgatttgaaccgtgatggtgaagccacggtgcgcgaggcggcaaacatcacgccgtatctgaccatcggcgagaacatggttgtcgaagggcagcgaaaaagcatttctggattgccaggcatgtctttcggaaacatgccgatcgatggcggcaatcttcttctttcagcggatgaagcggactcattgaatctgggcaggcaggacgaagaaaccttcgtgcgtcgcatctatggttcccaggagttcatacgcggacaggttcgtaagtgcctgtggattgccaatgatgagttagaacgagcgcaggagattgatgcgattcgtacgcgtattgagggcgtgcgagccatgcggatggccagcaaagatgctagcacgcgggagatggccgagcgtgcacaccagtttcgagaaatgtactgcggccaacggcacacacttatcttgcctggcgtttcatcagaagggcgggaatatttgcctgttgggttgattgacggccattccgttgtcagcaaccttgccttcgccctttacgacgcaccgatctggaacctagcactcatagcttcgcgccttcatttagtttggattgccaccgtctgcggaaagctggaaacgcgatatcgttattccaataccctgggctggaataccttcccggtgcccacgctgaccgagcagaataaggccgacttgacggcctgcgcccaagaaatccttctggcacgcgaagctcatttccctgccaccatcgcagacctgtatgacccggagagcatgccggacgacctgcgccgtgcgcacgagaagaacgacgaggtgctggagcgcatctacatcggtcgcaagttcaagaacgataccgagcggctggaaaagctgttcgatctgtacaccaagatgacggcaggccaggccaagccgaagaaggggaagcggaaatga

SEQ ID NO: 509815 - DNA, 2091 bp, Stenotrophomonas maltophilia
atgacatcggaaggcaccaaggcagtcccgtcggtttcgattgccaccgcccgcacgggcgcatcgagcaaggtcaacgccttgggtatgcggcctatgcaggagcgcgcctacgccaagcggggcgagcaatacctgctcatcaagtcgccgcctgcgtcgggcaagtctcgcgccctgatgttcattgcgctggacaagctgcgcaaccaagggctcaagcaagccatcatcgtggtgcccgagaagtccatcggcggcagctttgccgacgaggagctgactaagttcggcttctgggcggactggaaggtcgagccgcagtggaacctgtgcaatgccccaggcgatgacgaagtcaaggccgacaagagtaaggtccgggccgtaggccgcttcttggaaagcgaagacaaggtgctggtctgcacgcatgccaccttccgctttgccgtggaggagtacggcactgccgcgttcaacgaccgattggtggcagtagacgagttccaccacgtcagcagcaaccccgacaacgtgttgggaagtcagctcacgcagctgattgcggcaggctccgtccacttggtggccatgactggctcctacttccggggcgacacggtggccgtgttggccccgcaggacgagaaccgcttcgagacggtgacgtacacctactacgagcagttgaacggctacacctacctgaagtcgttggaaatcggctactacttctatacgggccggtacctggacgcgatcaccaaggtgctggatccggcgatgaagaccatcgtccacatccctaatgtcaacgctcgcgagagcctgaaggacaagtacaaggaggtcgaagaggtcatggaagcgctcggcacctggaagggtgtcgatcctgcaacgggtttccatctggtcgaacgagccgacgggtcggtgttgaaggtggcggacctggtggatgacagcgacgcgaccaagcgcgccaaggtgctgaactcgctgaaagaccctgcgcagaagaacaaccgtgaccacgtggacatcatcatcgcgctgggcatggcaaaggaagggttcgactggatctggtgcgaacacgcgttgacgatcggctaccgcagcagcctgaccgagatcgtccagatcattggtcgggccacccgcgatgcccccggcaaggagcgctcgcgcttcaccaacctgattgccgagccggccgcaggcgaagccgaagtcgtggcagccgtgaacgacacgctgaaagccattgccgcaagcctgctgatggagcaggtgctggcgccccggttcgagttcacgcccaaaaaccaaggcaagctggagggcttcgagtacgaaggcggctatgtcgagggcggtagcaacatcggcgtgaacgccgccacgggtcaggtccacgtggagattggcgggctgaccatgcccgagacccaggaagccaagcggatctgcaaggaggacttgaacgaggtcatcaccgcgttcgttcaggacaaaacggccattgagaacggcttgttcaacgacaacacgttgcccgaagagctgacccaggtgcaaatgggcaagatcgtgcgcgatcgctacccggagttgagcgagtccgaccaggaggccatccgccaacatgccatcgctgcgctcaacattacccagcaggccaagcaggccctggccagggccgaggccgatggaacggcatccgagcagcagggcaataccgccttgattgatggcgtgcgcaagttcatcaatgtccgcgacctggacatcgacctgatcgaccgaatcaatccgttcgaggcagcctattcggtgctggccaaggccatggacgagaaggtgctacgccaggtccaggccagcatttcggccaagcgcgtgaacatccccaaggaagaggcgttcgagttggccaagcgggcgctggagttcaagaccgagaaggggcgactgcccgacatcaattcacccgacgcctgggagaagcgcatggccgagggtgttgcggctttgcagcgctatcgagccgacgagaaggccaaggcgggctccaatggctga

SEQ ID NO: 509816 - DNA, 1182 bp, Stenotrophomonas maltophilia
atggctgacaacgagatcgatgatctgctggacgcgctgggggttgatgccacccccaccaaggccagcacgcatacggcgcagcaggagcgcctaatcgcaggtttcgaggacatcctgcgcttcgtggaaagccacggccgggcgccacaacatggtgaagaacgcgatatcttcgagcgcttgtacgccgtccgcctggaccgactacgtggtatcccggaagcgcgcgatctgctggcccccatggatactgccggtctgctggatggacaggtggcgcaggccgtcaacccggacgagctggacgaggatgccttgttggctgagttggggatcgaagcgtccgatgaggacgacattacccagttgcgccacgtctcgacctacgccgaacgcaaggcggccgaggaagtcgccaaccgtacccgctgcccggacttcgagaagttccagccactgttcgagcgcgtggaagccgacctcaaggcaggaagccgcaaggccttgcggtttgggcgtgacgccagcgttctgcaaggcaacttcttcatcttgggcgggcagatggcgtatgtcgcagaagtaggcgagcccatccgtgcccccaatggggaagccgatgcgcgtatgcgcgtgatctactccaacgggacggaaagcaacctgctgcagcgctctttacagcgagcgctatacaaggacgagacggggcggcgtgttaccgataccgacagcggcccgttgttcggcgacacgatggaacccgacgacatcgagagtgggaccatctatgtgctgcaaagtcggtccgaccatccgtttgtggcccagcatcgcgagctgatccacaagatcggagtgacgggcggaaaggtggaaacccgcattgccgcggccaaggacgatgccacctacctgttggcggacgtggacatcgtggccacctataagctggcccatgtcaatcgcacgaagctggaaaacctgttccacaagatattcgcgcctgcccagctagacctgaccatagaagatcggttcggtaagcccgtgaggccgcgtgagtggttcctggtaccgctgcaggccattgacgaggctgtgagccgagttcgggacggctcgattacgaactacatctacgatccgaaaatggcacagctaaaaaagcagaagtag

SEQ ID NO: 509817 - DNA, 321 bp, Stenotrophomonas maltophilia
atgatcggagtggatcaagatccgctgttcggcaaaattcggcttgtgggcgatatgcgcggctgtggcgacaacatggtgatggagttccgggactactacccttacaagttccccaatccatttgcggcctacctgatcccgcatggccttgaacctggcgcaaccgtttggcttgaagacctgattgaggatgtcgtagcggtatggggcaatcaggggtatcaccctcgattggcatgcggcccggctgtttggaatggaaaggacttcgagatcctttttgaccctgccaaagatgcagaggagtggatcggttga

SEQ ID NO: 509818 - DNA, 975 bp, Stenotrophomonas maltophilia
atgtgctattccgctgaagcctgggagctgtacgacggctacgtgaaagagtttggcgccgacatcgacatcaaggcgttctgggagctgtacctggggcgcgacgagaagtaccgcatccgccacaagctgtccgacggcacgaagatccccaagggtatggacctgaacttcctgcgacctagatccgagttggaacggaagatccaggacctgatcggcgagtggaacggtcgcaagctggctgaaagcgaagacgagttagccaagcaaaaatccaggttggccacggccgaggcgaagttggcggtcaaggaaacgaagaccgcgctcaacgagcagcgcatcgccggaaacaagatcaagcagctgaagcgctggatcgaggatgccaagcgcacaagccacaagcccaccacggacgatcgcatcttcccgctgtggtacgcgcccgtgctgttgatggaggatggtaagcccatcgtgcgccccatgcgctacctgtgtaggccgcaaggcatggacccgtccaccgactacaccaagacgggccaggtgtccggcaagtacaacgcgcggcgcgacaacctcacgaagttctggcgccggcagttcggccgcacccacgcacttctactggccgagacgttctacgagaatgtcgacgacgggaagggcgggtccaaggaaatccagttccggccgcgcacaggcgaaaccatgtacatcgcctgcctgtattcccactggaccgacccaaagggccaggagcccgacctgtggtcgtttgcggcgatcaccgacgagcccgaacccgaagtcgcagcccagggccatgaccgcaccatcatcaacatcaaacccgaacatgcgatggcctggctgacgccccagggccgtagcgacgatgagctgtttgccatcttcgatgacaagcgccacccgtactacgagctggtcaaggaagcggcctaa

SEQ ID NO: 509819 - DNA, 1200 bp, Stenotrophomonas maltophilia
gtgagcgaggaagacggaatttacgttgccaataaggtgccgggccgcatttatggttcgtccgccttcccggcaaagaccttggtcaaggatggcgagagcctcacggaagtcgtccgcagactgcggtatctcgatcgggtcttcccggacatcgagggggacgcactagccctggtcaagcaggaggtggtcattcggaccacacctaccggaaagaggcagatcaagcttctgctggtcgaggacccgaggcggatcaagtcgatccacattcagtcgttcgatatgagcgatgggaaagataatccgagccgaaatgctcacttcgttctcgtcggcaaggagatcgacgacttgattgaattggccatgctcgccgggaatgccgaattccgtgctgaggacaagtttaggatcgggatcgatcagctcagccgcttcacgctatccaaggacgcagccaagcagctcattggcaataacgagcagctgctggaagacatcctgacaagcgaagtgacggagcgtgatttggtaacagttgcctacaggcgccagcaacttgatctgttcgagcgacttctgtcagacgacacgttcttcgacgagcaggcaagtcaggtgcgaggccccgaagaagtctggcagcggttttttgaggccaatcattggatctttggcggctcgctgttcttcaatgcagcaggcgcgatcgacgagggcaagctggaacgcgtggtggctggggcaagcgttgcgggcccaggaaagcgtgcggacgggttgctcagtacccggggacgggtgggggcgctgtgctttgcggaaatcaagacccatcgaacaaagttgctgcaaaagaaccagtaccggcccggggtctggggtccaagtagcgacctgaccgacgccgtagcccagtcgcaaagaacggtccatctggccgaagctaacatccgtgaggcgctacgcgttgtggacgacgagggcaatccgttggggaaggacgcctatctcattcgtccccgctctgtgcttgtctgtggcgacttacaggaatttgtgacagagcatggagtgaaccgcgagaggtttgcctgttttgagctgttccgtagacaccttcaagggccagaagtggtgacgttcgacgagctgcttgagcgggcgcgcctgctggttgagcaaagtaaatag

SEQ ID NO: 509820 - DNA, 225 bp, Stenotrophomonas maltophilia
atgactgatcaacgcctggccaagctggccaaatacctcgccgaggtcgactcaaacaccgcccaagccgacttctgggctggttgggatcggatcgccggggacctatgccaacgggtctgggctgacgacgcggaccctcatctgcgcgaggcctacacggacctcctggccggcgctgacgacgcgggctgggttgtacctatggagcagtgccagcagtga

SEQ ID NO: 509821 - DNA, 324 bp, Stenotrophomonas maltophilia
ttggtcaaggtcaagctggccaccgtggcactatccgccgtgctgtccgagcgcatgacggaggaagacgccgggcgtctgctacgcgaagccactggcacccagtggtcgctgttgacctgcctgcagtatctgtcgggaaaggaagccaggggcgctattgcccaacttcccaagggctgggcagaggacggcatgacgaaggaggcgctggaacaagccacgaaggtggccgcttttgcagtggccaacgcgcaccccaagggcgtgcccctgtgcgccagcgacttggccaagcagtaccagggtaggggggcgatctag

SEQ ID NO: 509822 - DNA, 384 bp, Stenotrophomonas maltophilia
atgacgggtttgcaggacgacgagaaggcgttgttcgagcgcatggtcaacgacgccatgcgcgtgttcgggtatggccgccccaaggccgagaagctggtcaagggcgtgatcccacgaatccgacaccaggcccagatccagaaggagcggcagaagaaggcgacccgcaagaagaaggtccatggtagccagaagcggaatgggcccatgacacgcgaggaaatcgccaagctgcctacggtcgttccgcgacgtcccccgccgcgcaatgccaaggaacgcttggagcgtgccttgggaccggatgagggcgagcgcaggcgacggggcggcagccctgttgtccagggcggtagccccgggctagggcggcggcgctag

SEQ ID NO: 509823 - DNA, 2832 bp, Stenotrophomonas maltophilia
atgatcgaggggattctggcttggcaggccatcattttcgtgtcgatcgccctgggcgggcgcaagcgcggctggatcgtcgggttctgggtggtctggaccctcctgcaggtgttcgctctgtggctatccgttatccagttcggcacgatctggcttgcttggtcgatattcggcagcaagacttccagcgctgtttcagctcctcaaccgccaaagcgtgatcccgcggtcgaggccgagcggctggccaagcaaaagcgtgaggacgacgagttccaagaggcgcacagacagtggattggccgagtgtctggggctctgggcgctgggcgatggatcccgaacggtagtgtcgggagattgctggccaagtacccagcacctaagcacgcccgcaagacctggaagcaggccgtcggcgagtcgacacccgaagagaccttgcgtcttcagttctacaagttgaatgcccaacacttggcgcgccagaagattgcacgcaaggactttttcgccaccgtggagaagaacccactcacggacgagcagatccacgcctgcgtatgcatggatgacgcggtcatggtcgtggccgctgcaggctctggcaagacgtccacgatggtggccaagaccgggtatgccttgcatgaaggcctggccgcgccggagcagatcttgttgttggctttcaatcgagcaacggccgacgaagtaggacaacgcattgccgagcagctgaagggcgtaccgcaggtcgagaaggtcaggtccaacactttccacgccttcggcattgatgtcatcgccaaggctactggcaagaagccatcgctggccccgtgggtagaccccagtaatcccggcgccgatgtgcgggaggtaggcgacatcattcggatgctgtccgagcaggacaagaccttcaagcgcgactgggacctgttccggacggtgtacgcccgagacgtaggcaagtggggccagcccgacgagccggaagcctacgccaatggcgtgcgaggctttcgaacggcccggggggaggtggtcaagagcaaggaagaacgcacgatcgccgactggctgttctacaacggcgtgaactatgagtacgagcgcccctacgaacacgagacggctgaccaccaacaccggcagtacttccccgacttctactaccccgacgccaagctctaccacgagcatttcgcgctgaacgacaaggggcaggcgcccaagcattttcaggactacctgtcaggtgtgaggtggaagcgggagcttcacgccaggatggggacagcgctgtttgagaccacatcgcatggtctgttgactggcgacgctatcccagccctggaacaagcgctgattgagcggggcgtgcagccttccttcgatccgagcaaggaagtcacaggcctgccgcccgtccacgagcaagacctggcccggtcgttccgggtgttccagcagcacgtgaagaacaatggcctgacccatcaggatctgctggcagcgctcaaagcccagtccaaggacggctttggtgcacgcctgcgaatgtacctgtccatctacgagcggattgcggccgaatgggagaagcgcctgcagcggggcaacttcatcgacttcgaggacatgctgatcctggccgcaggccatgtggagtcaggcgcatacaagagcccgtataccctcatattggctgatgagttccaggacagctcgcgcgcccgtatccggctgttgaaggccttatccaatcaatccgatccgcccgcgcacctgtgcgtggtgggtgacgactggcagggtatcaatcgctttgcgggctcggacatcacggtgatgaccgagttcgagaagacgttcgacaacgccacgcgcctgtcgcttagtaccaccttccggtgcccccaggatctttgcgacgtgtccagccagttcgtccaggccaaccccgcgcagatcaaaaagaaggtcaagaccaccaacccgctgaccaagacccccatgctggcctatgggttcgcgaaccaagacagcattcctggctacgtcgaaaagcaactggcccacatgcaccagttggcagttgatggaaaggtgacgccggccaagggggcgcacattaccgtcatgctcttggggcgctaccgtgatgacaaacccaccgcgctggagtcctggcaacgcaggttcggcgacaagttgaagatcgagttccgcaccgcccacggctccaaggggttagaggccgagtacgtattcgtcctcaacgtcgtggagggtacgcgcggcttccccagccagatccaagacgaccccgcgctgcagctggccatgccggcgccagaccagttcccgttcgccgaggaacgccgcctgttctacgtggccatgacccgcgctcgcaaacaggttcggctctatacaacactgggccagccctcgcggttcctggtggagctggccaagaaggaacacatcaggatcgagcccatcgacggcgaggccctggaaccatgcccggaatgcggtcggggggtcttgcagttgcggtcaggcccctatggcgatttccacggatgtagtcgctttccggcgtgtaccttcaagcgcaaggtggaccaaggcgcggccacgccaccccagcctagaacacaagcccagcggctgccggcaaataccagggcgggcgaccaatgccccgtgtgcagacgaggcgtcattcagtcgaggaacggccggaatggtccgttcctgggctgttctcgcttccgagaaggctgcaaagctactcggaacctatcgagctga

SEQ ID NO: 509824 - DNA, 282 bp, Stenotrophomonas maltophilia
gtgcgtgagtggctccggacggggccactgtttgcgctttccactcagcgcgtaccgcacagtggtggcaggtcaatccaaccggggaagccgcaacaaaacgcttacatcgagcgctacaaccgcacggtgcgctacggctggctggcccgctccctgttcgacacgatcgagcaggtacaggacagagccacccgctggctatggacttacaaccatgagcgcccgaacatggcgctcggcggcatcacgccgatgcagaaactcgcccttgccgcttag

SEQ ID NO: 509825 - DNA, 270 bp, Stenotrophomonas maltophilia
atgaagacgacagcaacacgttactccccggagctgcgcgagcgcgcggtgcggatggtgctggagcaccagggcgatcacggatcgcagtgggcagcgattgcctcgatcgccggcaaggtgggccgtacgcccgagtcgctgcgccggtgggtgcgccaggccgagcgtgatcgcggcttgcgcagggggcagacggtaatccccccatttttagcagtcgccagaagtggagctaagcggcaagggcgagtttctgcatcggcgtga

SEQ ID NO: 509826 - DNA, 270 bp, Stenotrophomonas maltophilia
gtgcccagtgccgtcgtcaacgccttcgccaccggatcgaagcaggaggcatcgatcgccctcaccgatggcctgctgcgccgcctgagcccacgcgagctggcgggtgtgctcgcgcacgagatcgcgcacatcgccaatgaggatctgcgcgtcatggggctggcggattccgtcagtcgcctcacgagcctgctggccctcacgggacaaatcgcgatcctgctcaacctgaaccgccccgggttctccggaggctccaacctttga

SEQ ID NO: 509827 - DNA, 291 bp, Stenotrophomonas maltophilia
atgaagccaccggtaaagacgagctttcgcggcagggacgtcgcctacctggtaatttccattgttttagtgggcgtaggttacgcagcctaccgcggcttatactttgttggtgaaaacgttccttttgcccaagagatgatcctagtgttcctgggtgcagctgccactatctatctgacagctgtgctcctcaatcgccagactgagcttgagttaagaaaagaagggcaagttcttctttttcaacaaaagcatgacaaagggcttgagcatgcgtatacaatatag

SEQ ID NO: 509828 - DNA, 912 bp, Stenotrophomonas maltophilia
atgcattttttgaatttgcaggtcacacaggcagagctcctatccggccttatttccgtttcccaaacagttgcacagattgtgctcgtcatgatcgtggcgtggctcgtgtctgcagtgctttcgcgggccatcacacgcatgagcaaaagaacccgcacttccaagagatctgcagatgaggtcaaacgcattgaaacatcttttcgtctgatccgtttcgtcagtcggctggtcgtgtgggccttggccgtgaccatttccctctcaatccttggcatttctgtggcaccgatcctgacgactgcgggggtaagcggcatcgcagtggggtttgctgcgcagagcctgataaaagactatttttcgggtttggtcttgttgctggaagggcaactccgcatcggggatatcgtggatattggcggtgtggcaggccaagtcgaagagatgacgttgcgctatgtgcgcctgcgtcaactcaatggtgacgtggtctatgtgcccaacggagccatcaccaatctgacaaataagacaacggactattcgatggccgtaatcgatgtcggtgtcgcctatcgcgaaaaccttcaggaggcattgaacgttatggagagtgtcgcccgtgagctagcttcggaaacaacctggtcaacgagaatattagccgagccagaggtctttggggtcgaaacgttgggtgactcttcggttatcctgcgtcttcgcctcaaggtcttgccaggtgagcaatggtcaatccggcgcgaatatctgcacaggataaaacagcgcttcgacgaacttggcatcgaaatcccttatccgcatctgacgctttatgccggccaggacaaggatggaaaagcccctgcctttcggatcgaagctccggctggtgcccaatga

SEQ ID NO: 509829 - DNA, 612 bp, Stenotrophomonas maltophilia
atgaatacagacaccatcaccgattccagtgcggatgagcccaccaaaacactgtgttcattgaccgaaaattggtggatttttgcgttgcgcggtgtcttggcattgattttcgcagcccttgcgttctggatgccacactcggctttgttcgccatgacgatagtgttcggcgcattttctttggtcaatggtgcgttcaacctggttgcagcggtgcggcaaatgcggcaaaagcagcgctggggctggctgttgttcagcggcatcgtcggcatactcaccggtgtcgttgtggtagttgcccctctggctgccactttggcgttggcctatttcttgtgggtaagcgtggcattctgggcaattttcaccggtatgctggagatatccgccgccgttcgtctgcgccgggaaatcaagggcgagatctggcttgccctcagcgggctgctttccgtgctcctcggtgcgatcatcctatggatgttttttacccgcccgatcgaatcatttctggccgcgggctgggtattgggtttccatgctgcgatcttcggtatgactcttttgcttcttagttggcgtttgcgcaaagcgcgtcagaggtaa

SEQ ID NO: 509830 - DNA, 2037 bp, Stenotrophomonas maltophilia
atggccgacaaccaatccatggatatcaagatcgaggccaagcccgacttcttgaagtcgctggcatccaacgtcagcccgatcacggcagtctcggagctgatctggaacggatttgacgcaggcgcccagcacgtcaaggtcattctggaaccgaacgaactcaatggactccatgccatacgtgtggcagacgacggcgacggcatagaccgaagcaaggtcgatgcgctgttcggtggtttgggcgactcatggaaggccaaatcgcaccgctacaaaggtcggacgctccatggcaagaacggcaagggtcgtttccgagcttttgccctgggtgagagtgtcgagtggcggaccacttacctcgatggaaaagcattcaagacctacacgattactggccgcgcaagccaactgacagggttcaacgcctcgcaaccaacggtcgctgagaccacgatcctcggtaccgaggtcgtcatcgagaaccttgactccaacttcccgtcactgacgagcgacaaggcaacactggagatcaccaagcagttcgctgcctacctgacggaaagtccgggtcttacgctgtactacaacggggacaagatcgatccggcttccgtccagaactacaaggaagacttccacctgggcgaagtcgaactccaaagcggaaagcgcgttccagtttctatcacgatcgtcgaatggtcggtccagacagaccgcgtgttcgagctttgcgacaaggcgggcgtttccctccatgaagtcacgatcggaccccagatcaaggcgccgggatacaacttcacggtgtacgtgaaatcggaccacttccgcgacttggacaaggagggagcccttgccctgtccgacctcaaccaggatgtggccgacatccttggcgccgtcaaggtcaaggtgcgcgagcatttccggaaacgcgtcctccagcaccgtagcgaaacgatccagcgctggaaagacgagaagatttacccctacgaagacaaggccgaggtcaacgcttccgaacaaatcgagcgacaagtcttcgatatcctcgcggtgaatgtcgaggaccacctgccctctttcgacgaggctccctccaagtccaagaagttcacgttccggctactgtcccaggccattcgcgagaacccggattcggttcgcacgatcatggatgaagtcctgaacctcaagaaggaggaacaagacgacctggcaacgcttctgcaaaagacgaccctgtccaagatcatcacgtcggctaggatcgtggcggatcgcttgaactttgtggaagcacttagcgacctgcttttcaacaaggaaagcaagaagcggcttctggaacgggatcagctacacaaggccctggaagtcgaatcctggatcttcaaggaggacttcaatctcgcaggttccgaaaagaccttggaagacgctcttgccatccatatcggaaagctcggcaagcgcgaggacgacgccaacgaatcggacgacccagtcctgcgcgaagatgacaagggtgggcgaatcgacttgatgctggcacgttccatccagccaacccaaggtagccacgaatacttggtagtggagttgaagcgaccgaagcagaagatcaactcggaagtccttacccagatcgagagctacgcatttgccgtagccaaggactcacgtttcgaccagaagcggaccaaatggacgtttatggtggtctccaatgagatggatgagtacgccaagctcaagagccgacaaaaggataggcctgagggtgtcgtcttccagagcgacgattcgagcatcacagtctgggccaagacatggtccgagatcctgaacgacgctcgtgcgcggctgaactttttcagtcagcaactcgactatcaggctgactccgatagtgaacttgcctacctgaaacgcgcgcactcgaagtacattcctgacgacttggccgaactcgcgacgggtgcaggtggcgcagcagatgaaggcaactccccctaa

SEQ ID NO: 509831 - DNA, 1872 bp, Stenotrophomonas maltophilia
atgaagtcggagacttggacgatccagcaggtgttccaggatcggaagcagtacaaggtgccgttctaccagcgggcctacgtctggacgttggagaagcagtggccgttgctctgggctgatatcaaggacaaggccgaagagcggctggccaacacccaacctgcgccgcacttcctgggcgccatcgtggtcgagccccaagagaaggtgggcctgcggggtgtggataccctccacatcatcgatggccagcagcgcctgaccacgctgcagtacgtcctggccggcatccggctggccacccgcgaattgaacatcaccgactacgactcgtacttggcggcggtcttggacaaccccaatcccactaccatggccaatgccgaggtggaggtgttcaaggtctggccaacattctccgaccagaaggcgtttgtgtcggctatgacggctgacaagctggccaccttgcaggcgcggtatcccgctcacttcacccaggctggcaccttccggcgtatcgggattgtccacccgcccgcgctcaatgccatctggaacttcgccgaatgggccaaggcttggatcgaggccaatggcgggacggacgccgtcgaagccctggtcatggcggtgctgaccgacatgaaagtggtcctgatccagttggagaagggcgacgacgcccaagtcatcttcgagaccttgaatggacgaggggccgagctccatgccaccgatctgatccggaaccacctgttcatgacagtggacagcagcaaggaagatccggcggcgttgtatgaagcgaagtggaagcagttcgagcaagacacctggaaggtcgccgaacggcgcggtcgtatcaccaagccgcgcctggaatggctgatcttctcggccatccgtgcccagacagggcaagagggcgacctggctcgcctgtacgtcgatttcaagaacttcgcccaagggctgtccaccaccgagcagttggccatgctggacacctacggcaagcactacctgcaactgatccaaggcaagggcgacttgccggtggcccggttcgggcggcggctccagccgttcgacaccacgaccacccacccgttggccttgcgcatatcgacagctgacgtgcccgacagcgagaagaccgcgatgtttaacgacatcgtgtcgtacatcgttcgtcgtgccgtctgtggcctgacccccaagaactacaacaactggttcatgtcggtactgcgtcagtggatcaagggcgagcccacgcgggaagccttgaaggacctgctggcgtcatcaccgaacagcccggcggcgcgctggcctgaggatgacgagtttgtccacgccttccagacggcacccacgtactacggcaatctggacgcgggtcggtgccgaatgctgctcacggagctggagggctggttgcgcctgaccaagcgcacggaagagccctccatccccgatttgtccaatctggacattgaccacatcctgcccaggtcgtggtacgagcattggacgttgccgggcggcagcaaggccacgtttgccgagagccaggccgccgagcagcaggagttggtgggatctgtcctgtcggatcactaccaggctattcgccgccgcgccaaagccattcccacgttgggcaacctgacgttgctcaacttgtcggtcaaccgcgaggcgcaaaacaaggacttcgccaccaagaagcaactgctgatcgccaacaccgtgttgagcctcaatggcgacctgatggcccgcacaacctgggacgaggacacgatcgcggttcgcgccaagcggctggcggatgcggccacgcaactgtatccgcgctag

SEQ ID NO: 509832 - DNA, 672 bp, Stenotrophomonas maltophilia
atgactgactccaagaacctgcggcagcgcacaagtgaagctttgaaggtcctgcaccagacacgcaacacgctgtctgacatgggccatataggctctgagcggacggccaccgtcctgccgctcgtactggcctcaatggacacggccgaggccatctacgccttgctcatcaatcagccggagaagtcatgggtggccgcgctcatcatgcagcgggcgcagatggagtacgtgctgcgggcagccttctttgccaaggcggccagtgatagggagattgcccgcttccggcgcaggggaaaaatgcccagccgtgggagcaatcaaatctacgtggcagatgtggccaaggaagccgccgagcacctagggtggggcgaagacaagctactgcgaatggtcaaaagccactacaaggatctgtcgggtctggtccacggaggcaaggaggtgttggcgatctacacccaacatgatgcctggggcgacatcaccattgagtgggacgagttgatcaaggctgtggacaacatcctggcgttcgtccagctcgggcttggggtggccatgtcgctctcaccgctggaccccgaggccacggaccgactggtgcggccaccctacgaagcggcccacgtctacttcgggaaacgtaggccggaagtgtag

SEQ ID NO: 509833 - DNA, 306 bp, Stenotrophomonas maltophilia
atgtcatccaccgtctacttccccatgaagcacatcttcttcctctgctactaccttttcctgatctggttcgtctgggccggtggcctgttgggcctgaccaccaaggccggctacaacgacttttgggcgggcctgttcgtcgcctgggcgggcgggatgtacctcctgccgtcgatgattggcgcacaccgtggggccggacatagcacccgcatttcaatgctcaatgtcttcctcggttggaccggcattggctggcttgtggcactggccatggcgctgttctatcggcgcgcctactga

SEQ ID NO: 509834 - DNA, 423 bp, Stenotrophomonas maltophilia
atgaccttcgagcaagacgtttcaaaccttcgggctaacgccaatagcgccgtgctggatcagatcgtgggctactacggccctgccaacgacatcgagccatgggctcacctcaactcgctgctgtggccagacctgtccgagaacgagaacacccgtcgcgagcagatccccgcagtgctgggcgagtaccaggacgagctgcggcgctatttccgtcgctacgacgacctgcgggaacgcaggctggacgccctgtccaactacgatcttgggatcgcttatcgccagactggccccgagaacggcctgttccaggccttgaacgcggtgcgcaaccacatcggtcgggtgagggcccagatcgcgtggctctcggccgagcaggaccgcttggccctgccgcaactggccctcttttga

SEQ ID NO: 509835 - DNA, 750 bp, Stenotrophomonas maltophilia
atgccgtgtaatccccgcaagacgctggctgacgccatccgctatcacgctcgcgtgtccaagcttgaccgctcgcccgcccaggcactgaacaccatgattgcggggctgttcaacatcctggggtgccaccccttgtcgatgtatcacaccatcgacgagagctactacatcaacttcaagtcgcccgaacgcatgaaggaaatcgagtcgatttctgccatgacgacggcgtacctggaaatggtgaaggccaacgagccgttccatgacgtactgaccgacctggcaagcgagtttctggggcggggtggcgaggcgatgggtcagttctttacgcctcgggatctcgctttgctcacggtgcagttggctttgagtggtcagttgccgaagttgcggcagaaagccgccgcaggtgaactgctgaaagtgtccgatccgacgggttcgggaacgggttctcttcttttggcgcttctatatgagctgcggaaacaggcgcctgagttgcttccgtcggtaggcgtgtatgcggtggatctggacgtgaacatggcgcggacgacagccgtccaggttatttggaactgcctgatccaccaggttgatgtcgcgcacgtctcggtctggcacgccaatgcgatcacggagtaccaagcgaaagcgccgatggtggtttatcaaccgaaggtcgtgaatacggagctgttcaaccagcggacggaggaggtgcgccatgctgcgtaa

SEQ ID NO: 509836 - DNA, 210 bp, Stenotrophomonas maltophilia
atgctgcgtaagtgcaatcccaagcacacctactactgcccgacttgcggaagcacggatatttcgttcgatggccaagttgagtgggacgccgaggaagagcgttggattctgctcgagatccatgaagatccttggtgcgatagctgtaaggacacgatctcggaagcgaagttcggtgatccgacggaggtgcgccatgtcgcgtag

SEQ ID NO: 509837 - DNA, 756 bp, Stenotrophomonas maltophilia
atggacaccactgagacgagagcagatgcgaccagacacctgaaggatattggctgcaagatctttcaggtgctcgacgccggggatgccaagatcctctttgaccactaccgtggtctgggggccaggcttgatgagttgctggtgcctgccgtgtgcgccaaagcgcacgtgtttgtacggctgttgctggacgctggcgtcatggtgacgaatgaggccatggagcaatgggtgaagactggccgtttgacgattctcaaccatcttctcgatggggggggcgttccggccttcgagatcattcttgatgtaattagacgcacctactacgacgcatccgacagagttagcctattggaggcgatcctgacgaaagggcatccatgtctgacgcagcgggagcgcgatgagttgttggaggtggcagttgatcgtggctatgacagcaggatgcagcagttccttatcgagggctacggtgccaacgtcgatgtcgagtgcgaggatggaactccgttgatctgcgcttgccgtaatcaggacgacaggcatgcgctgtacttgatcgacaaaggtgctgatatcgattacagaaggccaggtcgatggtctgccaggacctttgccaagcgtcacaaggaagtgatgccattgacgcacgctcgcattaggcgccacgagctggcgaagaaggcggacaagaagcggagactgttggaggtcgatgaagtgcctgtgcgtcgggcgatgtaa

SEQ ID NO: 509838 - DNA, 945 bp, Stenotrophomonas maltophilia
gtgtcgttcatggacacgccccagctttcccccgcgagcaatgaacttccccagactccttcaagcgagaagtcgaagttccccgaaaccttcacccaggtacccctctcgtttctccgcagcgagctgtttagcgttgccaagtccggcatgcgacgggaccgaaagaacaccgagacgaccaagcgaattgagttcgagcgaggccccttgggcattgacatcgaatgtgcgggaccacacctcaaccaggagcacttgctggcctggcaggcggtgatctacctgggtcgcctccacaatggactgactggcgatacgttcatcgtgcctgccaatgaaatcctgagattgatgggaaaggactatcgcgatcatgttcagcgcacgtcattgcgacgtctccttgaagacctacaaggaactcgcattttcttgaagtcgcatcgcagccgctatgtaggaaatctgttggatgctactgggcaagaccatgagacgaagctcatggccatccgcctgaaccccgatctcgcccagttgttggacgacgaaacgctggacaacgacatcatgcggatggcaagccttgggcggaaccttcttgccatgtggctgcacaactacttcgcaagctggtcctcctatcggaacgtgacggtccaggagcttcatcggctctgcggaaccaacttggatctcaggcgctttcgctatcgcctcaaggaagctggtgaaactctgaaagcctgtaaggcctgcgagcgttcctacatcaccaacttccgcgtaggcgccgatgacgtggtctacgtcgaaaagaagcctaccaaggtcaagctcttgaagcctgaggacaaggccaagtcgaatgctggccaccaccacgcccagcacgacgccgcacggaaggcagcggcggctcgtgcagtggtgaacctgtaa

SEQ ID NO: 509839 - DNA, 867 bp, Stenotrophomonas maltophilia
atggatcgacacgaataccagaggctgcaagccaagaatttctacgacaacttgcgggagggcgtggcacctccgctctttcgatggcaagaccctgatacgccactgccgcagatcggcggcgagcctcgcggtgtgtccggctactgctttgaagccgacaacgccctgcagctggccatggccgctaaggcacagggcttccagagcccctactggctgtccaccgagcaggccaacgcggcaggcggctatatccgcaagggcgaagtcggcacgaagatcctcaaatggatccgcaaggatggccagctgtccgagcgggtgccggctaccgtgttcaacgctgaccagatcaagggcttgaacctgcccaggcaaaaaggtctgacacccgagcagcaagccacgcggcaagccgggctggatgccttgattgcgccgcgcaagaagacgcccacgattgagcagtacaacgctcgcctaaaagaagtcatggccgagaagtttccggcccaagaggacgtgcaggacaacgcccgaatgtctctgcgccgcgagtacgcgatcatgactgggcaagctcggctagggctgccacgggaagtcgaacccgagctggcccgggagttgaagcccttcatcgagcaccggccccaccctcaggaagtcgttcgggccctggatgacgcctatgcggcattgaaggaggtcggtgtcgagccgctggtctacgcgagcgtgcccaggaaggagatggcgcaacagccggtcaagcccgccagtgagccgcgtccgaagcgcgaacggtcgcaggccaaggccaaagagaagggcagggagcaatccaacgacattccattctga

SEQ ID NO: 509840 - DNA, 1818 bp, Stenotrophomonas maltophilia
atgggttcgcagaactgggagaacgaggggcggaacgaccgccccttcgcttgggaggggttgccgaaatcggcatcgtttctaggttgggtgtggtctccccacattcccttccccatgaaaaagattgcacttgttttggcgcttggtctgacggccggcgcggtgaacgctcaggtggtcgatccctacggcaacatccagatcggcaacggcacgtccatctcgccgccttccaatcctgactttccaaacacagtcaaaaccggtcagatcgtcatcggcgacggcgcgcgcaccgatggccaggacgctatggcagaaggcactgacgcaagcgctgaaggggataaagccattgccaaaggtccgagggccaaagccaaggccatgtgggcacaggctattggtgccgaagcagaggcaaacgccatcaatacaacggccaccggccaccaggcaaaggcaaacgacgcaggcgataccgccacgggcgcgctgtcagaaacgtgcgatgggcgagcaactgccaccggaattcaagccaaggcttgcggctaccaatctaccgccactggagcaggtgccgagggagctgcgcgcgacactaccgtgaacggtgcgttggcaaaggcgacgaaagagggtgctacgaccgtgggtgcgtactccgaagtcaacggagtcaatggcaccaacgtaggtgctggcagcaaggtaaatgccgaccgtgcgacgtgtgtgggcgcctcatgtgaggctaaccacgccaactctgtcggtgttggttacggtacgaagacgacacaagagaacgaggttgcggttggataccgccgggtaacgcaggtgtccagtggccgcgatgacacggacgccgccaacatgtcgcaagttcgggctacggccgagcacttgggtggcggggcgggcttcacgagtttcggaaacttcattccgcccgcttaccacttccgctcaggtgtaacccacggcaacgttggctcggcgctggatgacctcgacagccgcgtctatgacctcgagcagaacccgggtggtggttcatcgggtactgccgggcaggacggtgcatcggcctatgacattgccgtgcgcaacggctttgttggtaccgagcgcgaatggctggattcgctgcaaggccgcgatgggatggacggcaagaacggcgttgatggtcgggatggggttggcggcggctctactgttgctgcgggcgagaacatcgaagtccaagaccatgaagacggcacccagaccgtgtcgctgtccaaggatgtggacctgactgaagaaggctcactgacggtgggggccaccactgtgaacaacaacggtgtacgggtgggccagacctcgatttcccacgacggcgtgtccatcgagggtggacccagcatgacgcgcaacggcatcgacgccggaaaccagcgtgtgacctcggttgcgcctggcaggatcgagcgcggctcgactgacgcggtcaacggtggccagatctacgatctcatggagcggtgggacgaccggtggaccgagatcgatcgccgtttcgagcgcaccaacaagcgcctcaacggtctaggcgcgcaaatgggcgccctgtcgatgatggcggccacgccaggcgagggtggggttaccgtcggcgttggcttctcgggcggcgaaaccgccctggccgtgggttggtcgcgtcgtctcaatgaccgtgtctcgatcgcggtgggtgcgtccttcggtggcggcaacaaagcggtcgtgggcgttggcctgcggatcggggggcgctaa

SEQ ID NO: 509841 - DNA, 417 bp, Stenotrophomonas maltophilia
atggtcgtggaggtcatcgaaacgggccgcacgacgcgtcatgtggccaacgccaagggccgttggcatgcccatggcctgcggtcggacctgacctatcgggtgtcctgctatgcgccagacgcattggagcctgtcgtcgagttcgttggccgtgtccgcctgggccagacccacgtgcgaaattgcgtggtgggcaagttggtcaaggagtcccccaggcggctgtcgagctggcagtggaggcagccatcctatgctgacgaggtggtggtgatgtacagcacgctggaaaagtacggtaggcgtggccacggcacctacagtcctgcgacctgtcctgatcgcgtgatcttcccgggtcctggtgcatgggctgctcccggcgacaatacgctttcggtcgggccgagatag

SEQ ID NO: 509842 - DNA, 465 bp, Stenotrophomonas maltophilia
atgcgagtccccaagccgcttaccgccgagcagagccacctcatcgagcaagccgaagccctcatgcgctcccggatccggggcgatggaacccaactctccgatccgtccactgcaggctcgatgttccgctaccgtctggccagccacgagcgcgaggtgctttccattgccttcctcaacacgcgacacaaggtcatcgcggtggaagacctgttcgccggaaccctggatggcttggaagtccacatgcgcgaaatcgccaagcgggcactggaactcaacgccgcggccatcatcatggcccacaatcacccgtccggctcattggaacccagcgcagcagacagggcagtgaccacccgctgcaagcaggcgctggcactcgtagatatccggctcctcgaccacttcgtagtgtccgccgaaggctacacctcgttggccgcgcgtggctgggtctga

SEQ ID NO: 509843 - DNA, 618 bp, Stenotrophomonas maltophilia
atgaccactgcacatcgcgccctgctggatctggtccgagaacgcacaggactcactcatcccaactacaccgcgttgctgcgagcccgcgacgatgtgcgaaccatggcccatgtcctgggggtaaggggcgtagacccggacagctcagacatcgaaggctccactctccttcaccaaccagacctggcctgcggcgtggtgcaactgttgctggctgcaggcgccgaccccgatgcacgctggtatggcggccacggccgaacgcccttgttcttcgccactgttccgggtgtgcccaccctgttgtatgaggctggcgccgatctggaacatcgcgatgtcagcggcctgacgccgctactgttcaacatccagtacggcgccgtaatcctggtggacgaactgctggggttgggggcggacgacaccgtgtgcgacgacgcgggactggatgtgctcgactacgccagcctcgtacctacgcaagcggtcggagagcagctggccgcgatcgtgaagcgccatcgcgtccaacgagccaaggcgcgcagggaagggcttgtcgctgtcatgcgaaccgtagtgcgtcagtgcgaacctccgcgccgcttgtag

SEQ ID NO: 509844 - DNA, 201 bp, Stenotrophomonas maltophilia
atggaagacgccatctcactcagcgacgccctggacgcggcgcttcgctaccgcgtggttcgtacccccgatggggtggtgatccagccagggacagccgatgactacctgttggacatagagcaggccgtggagaaagtacggatcgcgttggaacggggcgatctggttgagacggatgaaagctccgaaggcgaatga

SEQ ID NO: 509845 - DNA, 1005 bp, Stenotrophomonas maltophilia
atgaagtacgcagagctggcgcagcagcaggcgcaactcctcatcgcgctgatggcgcaggggaaacctttcctgccattcttgaagccgggcgatccccgaaccgtgaacaacctgccgtacaaccccacgacaggtaaggcgtacaggggcggcaatcgggtcatgctatggattgccgccatgctcaacggctgggaagacaaccgctgggttacgttcaagcaggcacaagcgctcggcgcgttcgtgaagaagggatcgaagtccatccagctgcgctacacgatctacccagacgcgaacgccaggcctacgccgtcttctgaccacgccaatgcacccgctgccttgcccgacaacgacaaggtcaagacgttttacttcaacgtattcaatgcagcgcaagtggaagggctgccgccaccgccgctgcgccccgagacaaccccggcgcagcggatcgaacggtgcgaggccctgttgaaggctgcgggggtgcccatcgtgtacggcgctgcacagccgcactactcggtgcgaactgaccagatcggattgccgtacccggaacgctttgtcagtccggaagccttttacagcactgcattgcacgaactggctcatgcaaccggtcacccatcccgactggatcgcgacttgtcaggcgcatttgggtcagagagctacgctcgcgaagaagtcatttccgaaaccgcgtcgcacatcatgggcgttgagttgggcatagggcacgatccgagtcagcacgcggcgtatatccatcactggatcaacattgccaaggaagacccgaacttcttgtacacggcagcatcagcagcagaaaaggtgtgcgacttcgtggggcttgagcgcttccggtttgagccgttgctggacgagccggaagtggaagttgatcctcgaccggtggaagtaccagcgctggaacaagcatcggctttacccatgacccgggttcggggaatggagatggcctaa

SEQ ID NO: 509846 - DNA, 222 bp, Stenotrophomonas maltophilia
atgaactggcagacagcactgaaggcctacggcgcgcacctggcagaagacggccggatcgtgcgcaagggcaagaccttgggcgtggtgatcaaagagcagaagaaccgcctacggatcgagtcggtggcgggcagcctgctggcaagcggccccatcgagtcccgaactgttgagcggttcgtggagagtttctggtactggacgaaagaggtccactga

SEQ ID NO: 509847 - DNA, 288 bp, Stenotrophomonas maltophilia
atggctatgtatcgcttcaatcttcggttggacagagtcgtcccccatacgaccactgtcgaggtggaggccgacaacatcgccgacgcaatccaacaggtgcgcgccgctgacggcgacggtgctgtatgggcgccggaaggcaatggctactggggcgatgatctggtggtagacggcatgcgtcgcgtcgaacctgcgctggacttcgaggtggtggccgaccccatcgaggaactagggctggcgtggttcaagcgcattgaggacaggcaggtgagggcatga

SEQ ID NO: 509848 - DNA, 291 bp, Stenotrophomonas maltophilia
atgaggcggagcaaaggccccatcacccccggctacgtgaggcggatctcgcccacggccgtgtccgttatgccgttcacgggctctacgacgtcagacatggagcagctgcggttcctagccaagcagtatgcccgacacgtgcccttcggtttggactggcccttgaacttctggtcggatcggattggatttgacgcgggcgaccacgccgctcgctgctggctggatggctacttccagcggttcactcatctggccacgcacggtggcaacaaaacgaagcactga

SEQ ID NO: 509849 - DNA, 444 bp, Stenotrophomonas maltophilia
atgagcaaagacgacgagaaggtggtttccctgacccagcgccggatggaggagttctggggaaagcccatttccatctacacccgcgctcaagcgctggccgacggcgtgctggtagacctgaccgacacggcccgcaactacggtttcaagatcccgttttcctgcacggaagctgtctggcagtccctggattggccggccgggcacaagcccggcggcgggcagtccaccgctggccgagtccacgatgtcctggtgatcgcgcgactggccgcaaacggtgccgccagggctggcgcgtcggtggccgacttcgatgtgctgatggtgccgaccaggggccaaagcgttgagccagaggcggttcgtcttcggctgatggtgtcagcaggcgacaacggcgagccggtgctgaccttgatgtaccccggtgaagactga

SEQ ID NO: 509850 - DNA, 234 bp, Stenotrophomonas maltophilia
atgtcccgctttaccgtccccgactatgaccgcgaacagaccaagaagctgcatgaggtgattgcctctggcaaaccacgcaagctgcagtcgttcttgagaatgcatgatggctctatcgtcttcgacgatgcggtgtatgtcgatggaacggcttacgacttggccaaggcacacatgcccaagcaaattccgcggctggacgcgcacatgcgcaagcacttctatggctga

SEQ ID NO: 509851 - DNA, 468 bp, Stenotrophomonas maltophilia
atgcggcagcggcagcggcgctcccttcgtgagatcgccgagagcgtcggcctgtccaaggagcgtgttagacgggtcctgattgagcggggcgtgtcgacccagcccgcgccgccggaaaacaaacgaaaaaatcgattgcagctgaccgaagaacaactgcgtcagcgctatggatgtacgtcggaagagctagagcgcattcaaggcaaccggatcatggaggaccgggcgtcacctgttggcttgtaccgcatgcagcggaacaagtccttgcgactgaaacgcggatgggaattcacgctgcccacatggtgggcgctatgggaagcgcattggcccaaccgggttcgcggacgtctggtcatggtgccattgaatgccacccatcccatcggaccaggcaacgcccagatcattacgcgctcggaagtcatgaagaagtggcaccaccggaaaagaggttga

SEQ ID NO: 509852 - DNA, 156 bp, Stenotrophomonas maltophilia
atgcaaaccaagaaatcaaacgccaacctctatctgtactcgttcttgggcttgctgttcggcctggcggcttccgtggacgtgggctcactggcccagcacggcatggacaaccagacaagctatatccaagaggccacccggtgcctggactga

SEQ ID NO: 509853 - DNA, 216 bp, Stenotrophomonas maltophilia
atgaaccacgtatccgtcgtgtctcccaagggaggagtaggcaagaccatgctggcgttgcagctagccgcgtcatttgcccgcgatggggtgcgtgtgttcacggtggtggacgcgcggggcataccgcacctggccaaggccaaaaacgagatcgctctactgcggacagcggtagatgcggcgatcgcacaactgaccccatcccatgaatga

SEQ ID NO: 509854 - DNA, 225 bp, Stenotrophomonas maltophilia
atgaatgacatccagaccttcaagttcgactccccgctgctggcgatgaggaccatcgcccagctactcgctgcccagattcagttcacttgcacacgtgaggctgggcagatccatgtgtgctacccgattagggcggaagccaatctgccggcggtgtacgaccatacctgggagcagattttcaacgtcctgcaccacgcacagcgggggaccatcctatga

SEQ ID NO: 509855 - DNA, 174 bp, Stenotrophomonas maltophilia
atgactcgtgccctgatctgccgacccaacggtgagctggaagaaatcgacctgcggaccgctacgccggaagagcaggcactggccatccgtgatcaccgggaactggaactgatcctgatcctgatccggtccattcgtaccgtggaggaggctggacgtgagctggaatga

SEQ ID NO: 509856 - DNA, 294 bp, Stenotrophomonas maltophilia
gtgagctggaatgatctcaacgccgacgacctggccaaggtctcgttcatcaagcaggcaggcggtgtacggattctgcgtgatcccggaccgccgaagatctacgtagaagccagtcccgagtcggacaccaagccgatgctgcttcgcacttccaaggcgcttcatgaccggctggaacgagtggtcaatggcaatcgaagtgtggcgctgcaagccttgatcgaggaagcgcttgaccgcctggagtccgggcaagagtgttggcgcgtgatatcacgcgatatcgactga

SEQ ID NO: 509857 - DNA, 135 bp, Stenotrophomonas maltophilia
atgagcatctttgaccgtatcgcccactcgcaggaacacagcttcatcgctttgcgcagcaatggccttctcgccttggcgctgatgagcctggcagtcctcactgccgttgtcctccccctcatcgttgcctga

SEQ ID NO: 509858 - DNA, 189 bp, Stenotrophomonas maltophilia
atgaacaccacacgaacctccctcttgattctggccgtggcctgctgggtcatgctccctaccatagccgcgggtatcgcgttcttctcgtttggcatccaggcgctggtctggaccttggccgggattggcgttgcctgcgtgctgttcgaaaccccgcgggactggatcctcgaccgcttccagtaa

SEQ ID NO: 509859 - DNA, 306 bp, Stenotrophomonas maltophilia
atgcgaattcttgatcagcacaccgaccccgtttccggtcatgcatacgccgtgatcgtgaacccggttgccgacaccgcactgcccacgctgcgctaccgcctcatccgggcgatttcccggaactggatgcaggaggtcaacaccacgcggtccgtctcgcgtacccccggcgttgccatctacgacgagttcgactgcctggcggagtggaaagaccatcctcggtacgtgaagcgggtcgatgagttcaagcaggaagcctatcgcctcgccaccgccctccttcctcggagcccgaaatga

SEQ ID NO: 509860 - DNA, 528 bp, Stenotrophomonas maltophilia
atgaaattcaactcgacctacttctcttgcctgcggcaggccattgagcgcggctcacttccccagctgcaagaagccttgtccgctattcggaaagaccactggcggcacaccctcaaaaggcacaccaaggccagcgacatggactacaacacggttgcacggatgacgacctgtggcttggtggacgtgcgaggcgaagatgacatcaccccgctcattcttacctgtctgctgtaccacgagaaaaagttgaagggcgacaggcgcggtgcggcggccctgaacgacattgctggctggctcctggctgagggtgcatgcgtaaacgccgagggttgccgcccacctgtgcgcaccgtggaccgcaacactggcaagaccgtatacgtgcgcggcaggggcaagaacctgctggaagcgctgggctgggcggcgctcccacccagcgtccagaggcacatgcaaccaggccgctttcagccagaagcccggcgccaggactcacgactggcggttgcggcctga

SEQ ID NO: 509861 - DNA, 543 bp, Stenotrophomonas maltophilia
atgccatcgagagccagcctgacctttgaccacgccatccaggacgcggtcgatctggtcaaccatttcgacaaactgaactcccagccgccgcctcctgagaacgaggtcttgaagcgggcaagtctggtgatggccttggccgcgcttgaaacctatttcgaggaccgactggttgaggcggtcgaagccctatgcggggagggcgactctgcacagaaccgcttcatgcgcgagaccttggccaacgacttgaagtacttccacacgcccagcaccgaccgggtccggccgctatttcagcgctatctgggcgtggacatcaccgagtcctggcagtggaacatgatggagccggccgctgcccgcaacgagttgaaccgcttggccaagaagcgcggagacattgcccatcgttcctggcggcctgccaacggcacgcccaccaagcacgcagtgtctcgcgacgacctgcgccgccacatccacttcatccgccagctggtgctgacgactgacgcggcgctcgccaaggcgggctaa

SEQ ID NO: 509862 - DNA, 1014 bp, Stenotrophomonas maltophilia
atgacgcccgcctgccccaccctcacgctcgccgacttccagcaagccatcgactcgctcgatgttccgcacaacgccaccctgcccctgtatgcacgccgccgtgcccttgaagctgcaggtgaacactgccccctgtgccgacagacctacgtccgcgatgtgccccgttcgttctccgcgcccgtcattgccacgtgcgttcaccccttcctgggcgggccgctgacggtcgagaacgcgttcgtgtgttgccgacgctgccagcagtcccgtgcatcctccgaccttctaaccgtctctggacttcctgaacaactacgcgagcaacgcgcctgcaccctcctgctgtcgcataaccatctcgtcccgcttccgccttccgtgtctctgcccgcttacatggaagccctgcaggcccgccactccatgccgcgctcacgggtctatgccgcccaagccaacgatgggatttgcttactgggggtgtctgcgcgctacggcgacaggcagtccaagggtctggcgaacttgctcgcccggctggcaggcaagcctctggcgcgcgagaagcggcgggccgtctacctgctgaccgacgacgactttcgccgtgtcgtatggcaactcatcgacgccaacgcctgggtggtgggtgtgggccgccgtactgagctgcgcgacttcctcgaccactggtggctgacttcggccagcgtcagtgagctgcgccaagggaaggccgggggcgtaagcgttccgcctcccgtgctcaaagctcgcccggtcaagcccagcaccaagcgcatgcgacagctggccgagcgaaggaaggccgcccaggagcgcgcagaggccgaacgtgagtatgcggaagccaacgccgacatggaggccatgctgtcggcccggcgccagcggaaggccttcccgaccgacccagaggcggaagcggaagtgcttgccagatacggacaggcctgccggcggttgaacgcggccctgggctattag

SEQ ID NO: 509863 - DNA, 420 bp, Stenotrophomonas maltophilia
gtggcaggcaaaacgatctcagtgtggttgaagggcgatgaggccgaacgcttccagagcgcggccgacgaacgcgccctgtcgcttcccgcgttcttgaaacgcgcagcggatacagccctggacacccctgatccgcgcgaggcgctgcgtgccttcgctaccgagctgcgcgccgatttgcgtgctgacctgcgaggtgaggccgccaaggtcgccgaagccgtcgccctcatcgccgagcggcaggaagaacttcgcgggctgttccaccgtttcctgaacgatttgaacgagcagcagatcaacgccgtgaaggtcgcggtcgaggtcggccgacagcatggccaggccgaagccatgcaagcgctgggtgccaaaccctcgtgccgatccagctcaccaccgccgcttggctaa

SEQ ID NO: 509864 - DNA, 636 bp, Stenotrophomonas maltophilia
atgaaacacctgatcgtctccctctctgtcgcagccatgctggcaacgtccgttgctccggccatggcccaggacgctacccccaccccgaccgaggcaacgcccgacaagcccaaggccgacaagaagcgcttgttcaaagcgggtggcctgggctgcctggccggtggcgccgttgccctgctgtcgggcaagaaggacaaagcggtcgccgcgtgtgcggtcggcgcggccgtcggctcggtggcgtcctacaagaagcagatggacgaagcccgcgaactggccgcccaggcccaagccgctggcatgactgccaccgtcgccactaaggaggccaccgcccagtctggcgagaaggtggaggccttggaccaggtggtcatcgcttacgacccggacagcatgtccgctcgcgatccgaggaccgtcgccgtcttggacaagatcgccgctttggccaagcgctcccgtgagccgctgacgatcgctgccgaaggtcgcgacatgcgcgcctgtcagatcccgctggctgaactgtcggctcgcgacaccttcccgccggccaaggccatcgacaagtgcgggcagggcaagccgcagctggtcatcaccccagtgccggacttgacctga

SEQ ID NO: 509865 - DNA, 213 bp, Stenotrophomonas maltophilia
atgcgcaacaccaccattcagctcacagctcatccggctcccttcgaggacctgactgccgacgagatccgggcgttcttcttggagcagtccatccagttgcaggccgggccagctccgttccagggctacacaacagaggaactggaccttctctttgccgaggtcgccgctgctcccaccttcgctggcggcgagggcgaggagcactga

SEQ ID NO: 509866 - DNA, 843 bp, Stenotrophomonas maltophilia
atggacgacctgttctccgatctaaacgaccttccggttcctcctacgccgccggctcgcccggcggtttcgaacctggccgatggtctgcgcaacgccggcctactttcacgccaggcggtggcagatcgagcgtcggaccctgtcgtagagcctgagcacttcatcgtggccgagccggcgccggacaccgagtcggtagcggtgtgtgagcccgtcttcgagcaagaggatgcgtccgcagtgctggaggaagcgcctcaactcttcaccgacgcagaagcgaatctcgcggtcgagtttactcccgaggctgaacccgaacccgagcctgcgccggaggcatcgctcgcgcctcccatgatgacttcaacgcctgttgaaggcgtgcccgaggctggctctcgttctgctaccacccgacgctggctctgggtgggtggcggggccgtgttggcggtcggcgtcattggctggctggtgtacggctctagtaacaaggagtcggtgcccgagcccgtgcctaccccaatggcagagccagtggccgatgagctgcctgcggctcttgtggcggttgagccagaagcgcctgcgcctgcaactgttgaaacaccggccgcgccgatcgcaccgaacatgcctgctgcacaagacaaggtagtgcaggcgcccgaccccgcgcctgaggtgccgagcaagccagcaaccaagccagaggcgaagaagccgcaacgcacgaagccggctgtccagcccacgccccagccgaagcccgtacccaggcccacgtggcaggacgacgcattggacaagttggacgatttagaaaagcgcttatga

SEQ ID NO: 509867 - DNA, 747 bp, Stenotrophomonas maltophilia
atgatcctccgacttctcttccctcacttgcgccgcggcaaaccaggcaaatggtttgcctcgtacgtcctcaagttctacggcgacctcttcatcgggggccccaccgtggatgaccttcccaagcaagcacccatgaaggtccgccagcggatcgtggatacctggttcaatcacaacgaagaccggttgcccgagaagcggctggacaagtgggaggtggggcagttgaaggccgcccagttgcgagacgaagaagagaagtgggccgccgtcagggcgttcctgtactcggtcggcctggtgctggtgctgtacggactggcggcgggcgtcaataaggccgcgtcgggtgttgaggccaggtgggccaagcacaaagccgaagtcgctgctgaggaagcccgcgagtacgcagccaagcgcgacatcctcaagaaagagtgggctgtggacattgccgcctactcggcccagaagtgcatcgacgaggtctcagagctgcgtgatcgcaagaccgaccagaagcgcgaccgctatacggccctgcaacagggctgtgagcacaagcgggccgaaatcgagacgctggccaagacgtggtcgctggacgactgcaccaaggccggtgtccagctcaacaagcagctggccgacggcgcctcacacacgtgggtcgatgagttgatcttccgcggccactgctaccccacctacggcgccgcgctcgaagcgcgcctgaaataa

SEQ ID NO: 509868 - DNA, 2976 bp, Stenotrophomonas maltophilia
atgcaagtacccgccattccccaagacacgctgaacctgttcaacaagctggcatatgggatccgagatgtgatcctgcgtcgccaagaggctatcgccggcaagaccagccgcaacgactgggtctatgaccgggcgcaagagcgattcgactacatcacccagggcgaagacctgatcaacctggccccggttcgcgtgggcgagcccttggtcaatgtcgagccgggccaccacgagaagttgcgcgagcttggagctgtggagaaggacggccagtttttcatgccgaacttgctggacgacgagcgctgggtattcaagaactggttccccaaggcaccgcccgatctggtgtccatggatctgaactggcacctgacccgggatgggcggcccaccaacgggtacatccaccccgaagacctggtgcgtggtaacgacagtactgctacgtcctttctcatggccgccttccccgtgctgttcgcgggtggctatgccatatcccaggtccccgttgtaggcccgggcatggccctggccgtcaccggaccgctgctggccctgcacgcctacgctctgtaccaggcagaaggtgcggggacgctggcaaaggtcttggccctatcgggcggcgtgccgctgatggctgcaggcctgtcaggggatgtgcccttccaggtcagcggcaaggccatgcttatcgggggcgtgaccatcggggccatcatcgccttcgccaaggcgctggcctcgagcggcaagactcctgcagtgtcatccctgttctccaaggccgcgcacgtgttgatggtggtcggcacgctgttcggcatgaactatgctctgggcctgcttcccccatcgttgaactgggtcaagcccctgagctggttcgtggtggcttgtgcctacccgctgtactacaccgccggcaaccacaacgcccggaccgcgttcttcgatctgatgaccaagcgcggcgccggttcggtccacgggtcggccaccatgctgggcaagacttcctcgttccggatgcagcagatccgaagcgccttccgcgacaagtccccgttcctgacgctgggtaccgcgctgggcgtccaggcgaggtacaacctgtcgctggccccagatcctggccaggtcatgggcatgaccgtggaggacttgaagactcacctgttcttgttcggcaagaccggtaagggcaagacccaggccatccgcaagcttatgctggaactggcccaactcggcatgcctatcggtgcactggtggctgatggcaagtgggcactggtcgccgacacccgtgcctggtacgacctggtcattgagcccggtatcaagttcgcgcccttccaaggcctgacttcgctcactctcacccaagcgtttgccgaagcgaacaatgcgtcgatggaggacgaaggaagcatctgggtgcaggtagcaggccaagcgcatcgctacggttcggccatcctcgaagcgctggtggcgcatgagaaggtgcgcagggcggcggatcagcgagagcttgaagcggtcgaattgcggatcgagcggctggttgcccagaagatcctgttggagcgtagccacgcagacctttcggcagtcaacgcgcgtttggaggctgagagcacgctggcccgaaccttgatggccaagctcaaagacgggcgtgtttaccgctgggcgcctgccgcgtacagcaagatcatcaacacgctgggctcaggcgtgaagggcactgacggtgtctggcgccccagcgacaaggccatggccttgttcgactacttgggcttccggaccaagaaggacggcgaggacgacgccctgttcaaccagcgcgtggagctggagcccgagtccatccatccccacctggccgacgaaagccgcgtgctgtccaacgccatctacttcttcaccgtgccctggttccaagggaagaccgaagagcagcgccagtccttcctcatgaacatcgacaaggacctgcaaggcttcatgcaaaacgacgagctgcgcggcagcacgatcgggggtctggattgtggcgacgaggcctggtcgcataccgaagagggcgaagacgttctgcagtgcctaaacggcaagaaggtgggtctgaacctgtccgaccggtacggcaagactgccaaggtcatccagaagctgatcgagaagcgagtgttcgatgcagcccgtgagcgcaatgagcggtacggcgacgaatggcaggagaagacggggcagtcctacgtcgttgtgatcaaggacgagtgccaggacctggtatctccggccgacgtgaagatggtcgctgtgggccgctccatgggcgtgcagatggtctatgccacccagaactacgagagcctggacaccatcctgcccagcgacgatgccaagggtgcgttcctgtacaacttccgctcgcggatcatcttcgaagcgtcgcccaagacctacgactacatccagcgagatgcgggcgtgacgatgaaaaggaagctcacggtcagcgtgcaggagaccgtggataccagccgcacggtggacatgatctacgcgtccgcctacaccgaccgcaaccacccatcggcttggcgcttccgcgacatggcgcgccgcggctcgacccggctgcaggtcgtgatccagggcttgaagaactacatgggcctggctcggcgtgtcccggtggaagagctgcaagaacagaactacttccctgtgtactccagcggcaagtacgaggaaggtccgatcatcgagaagacggacttggccggcaacctgatggaagagagcaacgcgcttctgtacatcaaccgcgccggccatccccggatcgacttcgccaagatggaatacatcggcaccaaggaattcgggcgtcgcatgaaggccatccaagccgccaaggccgctgccctaaacgaaacgcactaa

SEQ ID NO: 509869 - DNA, 993 bp, Stenotrophomonas maltophilia
atgtccgcaaaccacgaaaacgatctgtccctgggccgccgctacaagaagtacgagggggcctacaacctggcgtttgccgccgatcccgacatccacttgcgccgcttcgatgagatggcgcccaaagacgatctgcagtggaagcgtctggaggtgttccgcggcaacgaccgtgaggcctaccacgcccacaagtccaacccaaacgacgctttggtgcggcctaccgaaaaagagcaacgcatgtgggaggccaaccaaaacgacatgtggcgcattgaccgtgagccttcctacggccagcacgccatgactaacaacaagtggttcgacctgtcgttggagcagcgtcgcgcggataacacacagaagttctttcacgccgcagaacaacgctacggcggggactacgagacttgggctgccaaggccggcaccaacgtggtggccaaggaggactacctccagacccgcgcggccctggagatcgagcagcggcaggcggcccagcagcagaagctgaaggaggcccaggcccaggcccaggcccaggcccaggcacaggcacaggcccaggtccaggtccaggtccaggcacagcccccgcaggaagctcccgccgcgcaccaggctgccccagcccagtccacgccgcaggcctcaccggacgcccaagagcaggccgcccccgcggaagcgcctcggcgcacgcgcctgtcgcttatgaacttcgccacccccgaggacggtatcgctcagctgcacgaggagatgtctcaactccccgccgagcaggtgaagcagcgggccgagcaggccgaaggggagcaccaggccatgggcaagggaagaaccgaagaggccgccacacgggtggccgctttgaacgcttatcacgcccaagtccaggaggtgcagcagcaggagcgcacacagcgtcaggagacgcccgcccaggtcgaaacccagcgccggacgtaccagcaatga

SEQ ID NO: 509870 - DNA, 831 bp, Stenotrophomonas maltophilia
atgatcacccgggccgtgttgattgccatgctgatggtgggcggctacgcccaggccggtgtgccccagcacatcgaaggcatgtcgcgcaccacgcgcgcgcacgccgagcaggccctggattgctcccgcaagctggggcgcgatcccacgctgctgattgtcgccgacatgcgcctacccagctcggcccagcgattgtgggccatcgatccgcgcacgtccgaagtggtgctgcgcacggaagtggcgcatgggcgtggctccgatcctgaccgatcgggcagggcgtcggtgttttccaacactcctggctccctcatgaccagcgtagggctgtacgccgtatccgaggcgtaccggaacaccaaggacggcagtacccgccgccggcttgacggtttgatggtgggcttcaacgacgccgcccgggagcgcgcggtggtgcttcatccggccagctatgtccgcgctggctgggctgggcattccgaggggtgtcctgctgtctcgtacgccgtcatggaccagttgaacgagcgtggcctggacaatgcggtgctgtggatcgagggcgaccaggccggcttggccgaggccatcgcgtcttgctcaggcggcaaggttcgccaccgcttccgctggccatggcaacccaagctccccgccaagccggtatggaagccggaggcgtctgacgccttgaacccgctgttcgacattcaagccgagggtttctgccctgtgcgaacagacttggtgtggttcagccaggatgcccccctgtttgccagcctggcaggcgggcgatggccactggtgatgtggtag

SEQ ID NO: 509871 - DNA, 171 bp, Stenotrophomonas maltophilia
atggctaccaatccacccaaaggagacgggcatcgcaacggcgctgtccgcaaccgttcccagacccagacgccctcgggtcactacgtcaaacgaaacgccgacactggtcgtttcatggacgtgaaatcggacaaacagcccttcaagggcgtccgtaaggaaaagtag

SEQ ID NO: 509872 - DNA, 153 bp, Stenotrophomonas maltophilia
atgtcgaattcgacgacgccgaactacccccatcgtccgggttacaggctgattttcaggcctgtgatcaccctgaggaacggcaagaagttgcatgccgcatccaaggggctgaaagcctggccgatttgggtacgcgaagacaccaagtaa

SEQ ID NO: 509873 - DNA, 273 bp, Stenotrophomonas maltophilia
atgaccttggatgccttggctctggccgcggggatgagcaagagctacctatgggagctggagaacaaggagtcgccccgaccatcggctgaaaagcttgatgcgttggcgaggatcctgggtcgccctgtgtcctatttcctcgatagtgaggaaggggtgccagaggaagaacatctgaacgaggccttcttccggaactacaaggacctcgaaaaggaggaccgcgagcgcattcgattgatcgtggagtcattccggaagcgctcctga

SEQ ID NO: 509874 - DNA, 870 bp, Stenotrophomonas maltophilia
atggctgatccgcttacggcgtctaaggcggcgtacaagttcacccgagttctagatctgttcgctgcccatcacggcactcagcggttccccatcgatgttgtcgcgctggccaaagatgccgccaaccagttcggcggctctgatccgatcaccgaagtacgtgccgcggacatcaagcggttcgagggagcgctgatcccgggtgatgatcgtcgcgagtggatgttgctctacaacgataagatccgatccgaaggccgcatccgtttcacgcaagcgcacgagcttggtcactacattctgcatcggcacaagcaggagtccttctcctgtgccgagaaggatgtggtcaacctggaaagcgatgaggctacgatcgaagcccaagcggatgtcttcgcttcgactctacttatgcccttgaatgactttcgggagcagatgtcgggctcggccgacttcgatgggatcggcacctgcgcagctcgctatggggtttcgctaacggcggcaacattgcgctggcttcgtcacacagaaatccaagcggtgctggtcgtacatcgcgatgggttcatgcggtgggcatactcaagcgctccggcgttcaagaatggcgcgttctatcgaacccgaagccagaccattcccattcccgacatgtcgctggcggcgaacgaaagcgtggatcatgagcgggtcggcgtggagatctcggctcgcacttggtttccgcatgcaccagcagatttgtcattgcgcgagatgaagatcagcgcgaacgagtacgactcggtgatgacgctattggtgctgccgcgcggctccagtgtgtggcaaccctggagcgaacgcgccggtcagtag

SEQ ID NO: 509875 - DNA, 1875 bp, Stenotrophomonas maltophilia
atgaagccccctgtctatgacgccttcggcctgccgggcaagcatattgacccgtcgatcccggttcggcgctgggaccatgggctgtcctatggcctgctaggcggggccggcaccttcatccccatcgccggctgggggatgggcatgcgcgataccgtccgcgcgctgactctggaccctgcgttctactcccaaattgacaacccacagtgggtgtccgactggtctacgctggccgtggccaccgccgtgggcctggcggcaggtattggcatggcgtggatggggcttatcccgcgcgccaaccagtgggtggtctccggccccaagctcttggaagggaaggaagctatccgcgaggcacgccgacgcgcaccctcggaagccaagcggcaagccgacaagttcggcatgtacctgcaccctgacctatggctgtccaagaagcagctgtcgcgccacatcctgatgtacggctcagtcggcagcggcaagacccaagtcttgttggcgctgctgcgccaggtcttccagcacgatgaggctaagtgcctgatctacgatgtcaaaggcgatctgacaagcaagttccccgcatcgatttgctcgcccttcgaccgccgcagccgggtgtggtgggtggcccgcgatgtgcgcactgccacgcaggctgcggccttcgccgacagcctcatcccggaagactcaggctcaggtaagttctggacacaggccgcccggcagatcctgttgggcgtggtgctgtcgttgcaaaacgagaagccgcagcggtggacgtggacggatctggcgcagcgtgtgtccatgaaggccaaagacctggccccggtgctggacaggaactatcgcaaggcccatggcctgatttccgatccagcttcccagaccagcttcaacgtgctggccaccctgcagggctacacccgcgtcattgacgatctggcgcgggcttggcctgactacgaggtgggcaagaacctgacgcccgaaacgccgtggccaggggagaaggaggaggccgcgtggaatgccgcgtggttgaagggccgccggctgttctccatcaccgactgggccatggacgactatcaagggccgaagaaggtcatcctgcaaagcggaccagacgcgggtctggtctcggcttacatcgcagccatggtcaacgtcgccgtgcctgccatcatctcgcctcagctcccggacaacgaggaaggccgcttcctgggcttcttcctcgatgagctggcgtccatcggccaaatcaatttccagccacttgtggacaaggggcgctccaagggctgcgtgtgcgtgctggccacccaggacctggcccagctgcgcgcaccgtcgttgtacggcgagcacctgaccaaggcgttgcagggcatggtgggcacccatgtgatctgccagatccagatgggcgagacgcgcgacgaactatcgcgcctgatgggcagcaacaacgtggcccgcatggaccacggccccggcgcccgcctgtccaacgatggcaagcccgtggtgtacccctcgcagttcaccgatatgttgggcttccgcaagaccgaacgctggtggtggcgcttctcgcccaccaagcgaaacgatcccgggttcatcatccgcgccttggtccagcaggggggtgatgtactgctgctggacttccccggacagaagctgcccgatcgacgggccggccaggtgcccgccaggtggacgcagcgcccggcaggcttggagcccgaacggcccgaggaccagatgatgaacacctggacagacaagcccatgggcaagaccttttcgggcgaagagatcgacaacatgttccgccgttga

SEQ ID NO: 509876 - DNA, 837 bp, Stenotrophomonas maltophilia
atgtcgctgttctcgtccactggccaccttctgccgctgccgcagttccgggagcgccttacccaaggcgccgaccccaacgaggtcttccatggctcagaacggtacagccgcatccccctgattgtcgcggccagtctccggtcaaccaagtacctgcgtgtgctgctgaccaaccccaggacgggcctggccatcaccgacttgcaaggcaggacggcgctacacatcgccgccgagcgggccaacctggaggccatcgggctgttgtgtgaggcaggcgctccactggaagcgggggacatcgacggacgaacgccactacaccatgcgcttcgagcccccgaccctcagtccatcggggccatgcggcggttgatggagtacggggccaacgtcagtgcccaggacaagttcggccgcacagtgctgcacgaagtcatgttgagcgggtcgtcgttctggcataagcccgtggaagagaaaaccgacttcctgttgtgtgcgcggtgcgccctggacgtgcccgacgagaggggccgcacgccccttcacttcgcagccgtcaccgggcaccaccgggtggtgcgggcactgctggcggccggagccaacgccgaactattcgaccatgacggctaccggcccgtagaggtcgtgcgacgccagatcgccgaagacagcctaggtctggacaaccacaagggctacttcgaggacctatctgaggtgctgaacatcttggtctcccacacccgtgcccggctcacccaatcggtcgggtcggtcgttgcgcgaacgggtgggcagtctggtgctcatgcccggcggatgtag

SEQ ID NO: 509877 - DNA, 2766 bp, Stenotrophomonas maltophilia
atgctcaacgtcaaagatctgaactcgcaaggccacaacaagtacggcgacccagtggtggactatgtgtggcagaccaagaggctgacgagctactacgtcggccagaaggggatggagaagaacaccctgcgctggggtggacacggggcggagtacttcaacctgaccgacaagcccgtgaccaaggaacagatgctggaactagccgctggctactcccctgacgggcaaaagaccgctctgtgccagaacgcgggagtaatgccccagcagaaggtcaaactcgaccgcaacggccagcccagattggacaagaacggccagcccatcaccaagtgggagggtggccaccaagtggggtacgactgcaagttcagtccccccaagtcggtgtcgatgatgttcgccatctctgcccctgagttgcgcggatctatcctggcggcgcaccgcgacgccaacgacaaggctatggaaacactgactgcggccattgagacgcgtcgcggcaagggcagcaagaactacatcggcgtgaatggccccatctgggtatcgtgcgatcacacgaccgagcgggagaacgggttccacctgcacacccacaacatcctgttcggtgtagcccaaggcgaggatggcaagtgggcgaccttcgagagtagcgaactgtaccgccaccagaaggccgctgacgctgtctaccagtcccacttggccgagagcatgcgtcgcttggggttcggcattgagcaagacgcccaactggacaaggaaggtcaagatactggcattcgctcgtggcgcattgccggggtgagccgtgacaccgagctgatgttctccgagcgccagcgccagatctacgaggccatggccaccggcatgtcccacgaccaggcctggcgccagacccgaaaaacgaaggacgaacccgagcccgaacagctctttgcccagtggcaggagtcgatcaagggccaaggcgtggaggtcgagattcagcactatctgggccgacctgacgtgcaggcgccccgccgcaccgacgagcagatcatggccaagctccacgagagcaaggcggtagtcacggacgcagacatccagtgggaagtcttccgggcgcgagccggcgacagtccccaagccatccaggaacacgtgcagcggctgcgggacaccatggtcaagatcgcacccgagcggcagcacgccatggaccagggcgaaattctctcgcgccgctacaccgagacgcgctttgcgtggtcggaagtcgtggactgggagcaggaagtggtgcggcgcgccgaagaacgcagaaacgaccacgccgtacaggtgcccaagaccgtcctggcccaaacgatcgccgattaccagaaggagaaaggcttcacgctgtcccaagagcaaacagatgggctgtaccacctgtgctccaagtcgggaggacacgcggtgctggcgggtgtggccggcagcggcaagaccacgatctccgatgtgtacaagcgggcgttcgaggccaacggtcaacaactgatcggcgtgtgcgtgtccaacaaggcggccagcaagctgcaagaagagtcgggcatggagtccatcaacatcaagctgatgttgtcccggctggaacgtggcaagccgctgtccgcccatatgccaacactcacgagcaagtccgtggtggtgctggacgaagccggcatggtgcccacctgggaggtgcgtgaactcatgagatatgtggacgcggcgggcggcaagctgctgcttcaaggcgataccaagcagctccagccgattggcgcggggtctggcatggtattggtctccgagaagcttggccaagcagaactcaccgagatccgccggcagaagaacaccgaagaccgcgatattgctttcatgctctacgaccgggacgagcaaggccgggtcatcctggacaaccgccgcgggccgaagtccaggggcgaggtgtttgagaagagcaggaccatctacgagaagctggaagaccggggctgtattgacgggttcgacacccgtgaccaggccatggacgtctgtgtgtccgactggttgaacagtccctatgccttcgacaacaagctcctgatgggttccgatcacgccgacatccaggcgctgacgctccgggtgcgccaggagctgcgcgcgcgcaacgcgctgaccggggaggatcacacgttcctgggccggcacggagatcgcgagttcgacatgaccgtggccctgggcgagcgcatgcgctttaccaagaacgatccccagctgggcgtgaacaacggcgacctggccaccgttgagggaatcacccgcaccgacaagggctcattggcgctgaacctacgggtggcccgtagcggccagcccagtttcgcagtggcggtggatacggcccagtacagccacttggcccccggctactgccgcaccgttcacgacgcccaagggcagggcgtggacgatgtattccttttcgccaaccccaagatgatggacaaccaatcgatgctggtggctttcacccggctcaaggcggggcgcttccgcatgtacgggtcagacatcgagctggatcagatccgcaacaagctgggcgtcgatcatttgaaacagaacgctacgcaagaaggcctgtggcaggagcgggccgccctgcgcgtgcccacgatggagcaggactacgaccaggtgttgcgccgacagcaggggatgcagcggtag

SEQ ID NO: 509878 - DNA, 366 bp, Stenotrophomonas maltophilia
atgagccagcgggtgcgaagaacccacttccagaagcgcacccgccacctgtacgcattggtcttcgatcaggagcgggctgtgtacatcggccagaccgtcaaccccaagcaacgcgcaaaccaacatcgggctgcagccggcggctggctgagaccccaccgaatggtgttactggaagcgatcgaaggcacctatgcccaggcggaagagcgcgagtacgtgtggcgctgggtggcccacatcaagggatggcgggtctatgtccagccgcccaacatggtggtggatctgggccgacgcatggggctgctacgccgcctggaagcgtggcgtacccgttggctggtgggttggccggtctag

SEQ ID NO: 509879 - DNA, 834 bp, Stenotrophomonas maltophilia
atgcggccccacccccggttcgccgggggtgtcttgtttggggattgccagaacacgctccctgcttaccttgaaggaatgccgacctatttcagcgttcccttcaacgacaaaaaccacgccaaggccctaggcgcccgctggtgcctggatcacgaactctggtacgcccctgatggccttcctgccgtcgatgcagctctggccgagcattggacgcggatcgagcccctactacctgtggacgtgtttccgggggaggatcgagcgttcggctccagccctaagcttgccgcacacctcgtccccaccacctgctggtataccaacgtccgctcatgtgtggagcctgaggattggaaacggattagcctgggcgtaaagctgcgggcaggccgcaagtgcgagctgtgcggtacccccgccaaccgggaacaggacatccacctggaagcccacgagcggttcgattacgtggacggcgtgcaggtcttgaaacggctggtatgtgcctgcaaccactgccaccacgccatccattacggccgcgccgaggcattgaacgaagaacagacggcccgtgaacacctgcgccgggtcaatggctgggacgaggagaccctggaccagcacctgcgggaagccaaccagtggtggaaggagcgctcaagcaagcaatgggagctggatctatcgatcatcgagagcgcgggcattgcgatacgactgcctgacgcccgccagcgtgccgagagggcggttcacttcgagaaggtgcgtccacccgattccacgctggacgagttcctggccgccttgggattatccgaatga

SEQ ID NO: 509880 - DNA, 363 bp, Stenotrophomonas maltophilia
atggccatgctgcagctccccatgagaaacggaataacgccgatgaccgtgaccagtcgggcaaaagcctcccttcgggcggcgcgggtggctgctggcttgacgcaggcagatttggggagggtgctgggcttggacgaccagaatacgggcgcgccgcgcgtcagtcggtatgagaccggtcggcatgagcccgaccaggaaaccatggccaagatcgctgaggctttgggcctgccggtggcctacttccatgccacgtccgacccactggccaagatcatcctgatggtgggacgcctgcccccaaaggagcaggcacggatcagcgatctaatcgagcagtggatcgagaagaagtag

SEQ ID NO: 509881 - DNA, 1404 bp, Stenotrophomonas maltophilia
atggctgccagggccaagtccaaggcactactggctcaggattggcagtcatccgtacccggcgtgttctttatagccgttggcgagcctcgatgggctgcccgtatccggtggcagaaggacaatgccgtttatcgcgataagacccatgtctggaagctgtcgatcagccccaagactggaggctacaccgagaaggatctgcaccattggcagaagcaggcggaagtctgggccgaagccgaatggcttgcgctggacaagtccaataagcagttctcgcgaagcgcacaagccagctcatggacactggaagccttgctgaagaagtatctggaaggcttggacgacgggtcgatcaagtatcgctcctgcgcctcggatcgctcccgcgttcgtgtgctgctgggtatcgcagagaaaggcgccaacgcccgcaacaaagcgttcgctcccgtgctgggcaagacgatggaccagttggtgccaactgacttctatacggagcgtccgaaatcccatccccgggccatcctgcttcactacaagggccgcaacggacagcctcccaagaacaacgcctgcatcaagctcatccagaccatccgcaccgtgatgggtcatgccatccgggagtgggggctggacctggacctgacgaaggtacctttgccgccgatcacgaaagatcctgggcgcgaagagaccctgaccgatgaagaattcggctggatcatggacgaaatgaaggaatgcgaccaagccacccgggacgtggtggtgatgaatcgctactcggccatgcgtcgtagtgaggcggtcaagctggactgggagcgggtcgctgcggacaacacatccgccaaacttacgaacaccaagagccgacgggtcaagggcgtggagctcaagcgcgagcgcaccgttccttttgcccctgccgtagtcgagatgctggcgcgtcgccgcgaagccagcgatacccaaaccggagctgtgttcttgactgctgcgggcaaccgcatttggccggatgccgtcacgaaagcttgggaacgggctcgtcgacgcgccgctcgaaagcacaaccgtccagacatgctgaacaagcggctgcacgacctgcgacacacccgcattacggagctgggcgaggacatgccggccgccatgatcgccaagatgtcagggcacgacgatctggcgtccttcatgaggtacttcaacccgaaagctgaagccatccggcgcaagatggccgaagctgaccgtaggcgcctggctgcaggtggtacggcgggcccatcagcagttgagacggcactggccgtgttgtcggaactgtcgcgcgacgagatggcccaggtcatggccacgctgtttaccaagcaggcctcggcgtag

SEQ ID NO: 509882 - DNA, 1020 bp, Stenotrophomonas maltophilia
gtgaatccagggggcgcactctatcttcttcctattttgatatgtggttatttgtcaggaatgcttttttggccgacgagattttttctcattaggctggatggtcaaagactattcttggcgtgtgctgggataggtattttctgggtgtccgcgctattcatcgcggcgcacttcgctaaagttcaaggcgcgccttggattgatccggccgcgaagtttattcatgaggcaatggacttccctcacgctgcgaagttggtaatttgcgttgggctttcggtcgtagttccggtcttgctgaattttatcttctggttcgtgacgggtgtttttggtgctttctggaataggattgataaagcctccgaactgattaatcggatagccgtgcggcgttatggtgggccgctggcaagaatgcttactcgcgcggcagacgagcaaattcctgtgatggtggtcctcgattcccggaaggtgtactgcggttatgtgctggaaatcggtcctgatgtagatagcgacggttatatcggaatccttccagtaaaatcatttacgcgcgagaaggattctttgattttctccaatgagctcgcctaccacgcggtagaggtgtctctggttgagtccgccgtagcggctgaggagaagtcattaagaaggcgtcttttggcttccgggatatatttccgatttctcaaggattgtccccgtttcgctgctctcctccgtcgttgtggcgttgatcttgccactgctaaagaaatacgtaagaagcttaggccaattttctcatctcttcgtcatcgcagacgaacgctggagaggattggccttgaaaagaagattgttcggcgtgattggacgaagttgatacctgtcggctctattgagactgtttctttctacgaagagtcagccgcaaagaaatggtttgcgtctcaatcgcctgcctccgccatcaagaatcaagaggccgccaatgaaggggagaggcataaagctaatgagtga

SEQ ID NO: 509883 - DNA, 270 bp, Stenotrophomonas maltophilia
ttgggcgtgaagaagcgcttttccgaagagcagatcatcagcttcctgcgtgaggccgaagtcggcgtggcggtgaaggacctgtgccggcggcacggtttcagcgaggcctcttactacctgtggcgcagcaagttcggcggcatgagcgtgccggaggccaagcgcctcaaggagctggaggcggagaacacgcggctgaagaagctgctggccgagcagatgttcgagaacgacgtcatcaaggatgccctgcgaaaaaagtggtga

SEQ ID NO: 509884 - DNA, 489 bp, Stenotrophomonas maltophilia
atggacttcgtgttcgaccgcaccgccgagggcagggtgctcaaggccctgaccatcgtcgacgacgccacgcacgaggcggtggcgatcgaggtggagcgggccatctccggccacggcgtggcgcgggtgctggatcggctggcgctgacacggggtctgccgcaggtgatccgcaccgacaacggcaaagagttctgcggcaagacgatggtgacgtgggctcaccagcgcggtgtgcagctgcgcttgatccagccaggcaagccgaaccagaacgcctacatcgagagcttcaacggccgcctgcgcgacgaatgcctcaacgagcactggttcccgacgctgctgcacgcccgcaccgagatcgagacctggcgacgggaatacaacgaggagcgaccgaagaagatcttgggcggcctgaccccgaccgcctatgcccaacagctagcggccaaagccgctacgatgaaacccggactctaa

SEQ ID NO: 509885 - DNA, 672 bp, Stenotrophomonas maltophilia
atgcagccgctgtggttcgagcatcccgagcgcaatcaggtcgatctggcgatgatccagatcccgcctccagccgttaataagttcagcttcttggatgtagctgagcttcagaagaactcgagtgtggaggaggtagtgggtaaggacgcatttgtggtgggatatccatttaacaaggaagaactcctcgagagctttggtgagttggcaccctactaccttcctacttggaagcgagggagcatcgcgtctgagcccgccgtgaggctgggagggaaggtgatcctaatagacactcagtcacggcctggcatgtcaggttcgccggtcttcatttcccaggagggccaggcgttcaagccaaccacgccagaggctgccgctgcggccaagatgttgagtgaccgcaatgtgtcggcgctggacaagatccgggcgatgaggatggacgagatgcgtccggtcaggaggaaggacttccggttccttggcatctactctggaacgatcgggagcaccaagctccaagaggttgcgctggggaagtgctggcacgcggacgtcgttcaagaggccattctcaatcgagtacctggagtaatgccacatcacgctcctgttgaaaacgaacactacgtccaatttcttagctcaatggagcagggctga

SEQ ID NO: 509886 - DNA, 831 bp, Stenotrophomonas maltophilia
atgctggcgcggctgctcgcccagaaccacctcgtccacgcgcgagaactgctgctccttcgacagcgcgagcaggctggcgctgacattgccgttgcgcgccccgaaagcgccgaggtcggccacctgctggtggatctggttgaggcgggcatgatcgtcgtgcgccgggtctgcgggcgtgccgcttgccgcgagcacgctgttgccgcgccactgctcgccgttctcggtgaacatccactcgcggaaggtctgcttcggcatcgggttccactgcaccctgtccagttcgctgcccttcacctgctgcggaatggcgttgaccgcgcggatgttgtccaggaccctggtagcgccctcgtagttggtgatctccccggccagcccgaccgggcgcagcccagcgtggttcagggcaccccaagcgaaatcggtgcaggcgttggagaagaagtcgtactccatgtcgaagccgtgcttcttcgggtctgccgagaactcgaggatgcggtcgtactgcgccttgctgatctcgatcgtgcgctcgaagcggggtttgtcgtagaccaacacatccatgtcatcgactttgcccctgttcggctcgtccttggtgcctgcgtgggtgaaacccacgctctccggcaagggttcacccgaacggcgcagcgacaggaacatgtgccccgcgaacgatggctccagcagaaacctgtttccctcagcatcacggccgtagcgcggcgtgccgggggccgccagatgaatggttacgctgtagcgttcggcatcgtccttgtgcatgtctactttcctagtgattggtag

SEQ ID NO: 509887 - DNA, 276 bp, Stenotrophomonas maltophilia
atgaagaagtgccgttctaccgaggagcagattgcctacgtactcaagcaggtcgagctgggggtggcggtcggtgaggtgtgccgcaagctgggcattgcggaggcgacgttctacgtgtggcgcaagaagtacggcgggtttggcgggttgggtccgtccgaactcaagcggctgcggttgctggaggagaaaaaccgcaagttcaagcagctggtggccaacctgagcctggacaaggcgatgcggcaggaggtggtctcaagaaatctctga

SEQ ID NO: 509888 - DNA, 471 bp, Stenotrophomonas maltophilia
atggcatatcacgaggagttccctgagatggacttcctatgtggctatcgaaaggaatgtgtttggagcggagatgcaattcgttacgtggaaagtagatccataggatggggcagcgccgggacgttgaacagtgcgatcggcaagcagtccctgaagacaacttcacataaagactactttttctcataccgactaattagacagatgacatctatcaattcgcttgaaaggcagtttgatcgcgtattcgttatgactttagccagtggaaagagctatcgagttggaatgattatggagtatgagccaacagcagacgccattcgcactttttgggatagatttggtcctatagatatagcatggaacatcaacccgaacggcaacccgacccccaatgccattgaggccgggagaaacttaggatgcaaggtgctcaaatgggaagatctgaagtctttgctctga

SEQ ID NO: 509889 - DNA, 735 bp, Stenotrophomonas maltophilia
atgtactttcttaaaattcgcataagacgacccaatccagttatggcgcaacgaaagagcatcgcaaaggagacgcagcttcgtctattctcagaggccgcgggccattgccagagaccggagtgtttgcaaccaattttcccggctgagatgggaggtgacaggcatatcgccgagatggctcacgtggttccccatggcgagaatggcccgcgtcacgaagagaggcccgctggagaatttgatgttgactcctttgacaacctgatacttctatgtccgtcttgtcatacgatcatcgacaaagacccgtccagctacagccggagcattctactgggatggaagtctgggcatttggcggccctggcgagtaagcagggaatttgcgcctacgatagacgcgatcaagccagagacgcagtggcagcggcaatgatggataaccatgccgtatggaaggagttagcgccctcagagggatcggaatttgagtatgatccggaatccgaatcagcccaaagatggacgaaaaggatgcggagcataattctcccgaacagcttccgcattctcggaataatatccttaaacaggcatcatttgacgacatcagagaaaaactcacttgccgcctataaagagcacgttcgaggattagttgagcgccatatctgcgacaatcctagcagagggatacgctttccagatgaaatcaacggaatcttcgaatga

SEQ ID NO: 509890 - DNA, 348 bp, Stenotrophomonas maltophilia
atgtactgcgatatcactttttgggaccgccctccattgattggtgtgcggttgagccccgctttgaatgctgccctgatgtacggtgccggtgcggagaagatgaaggaactttttgatcgcgtcgagacgagagatggtcaaactttccgcgccgtagatgtttggatgatcattgaatttccacacggacttccatcggatgcagagttggctgaggtgaatatgtcggatggcgatgcggaggtggctcccggggtatccatgcgacagatggccaaggagatttatcactgtgccgatgatgaggctgcagagcagatgcttcgccgaattctggctgcctga

SEQ ID NO: 509891 - DNA, 528 bp, Stenotrophomonas maltophilia
atgaaatttctcacgagcgctctagtactttcattcgtaacgctctcctccggcgtctcggcatccgaacccaaggcaagcccagacgcgcagcagaagttctgggcattaacagagagaattgccgttgcacttccgggtgatgggcgagatctgcagaagcttatttccccttccgttgcacgcaaggatgtctccgaatcaaagaccagacaagaacagcgcgccgtaattggcccgtcactgtttgccgatgacctcgcagttgtgatgggcaaggacaatcgtgccgattctgtttcattcgatctctcaggcagctgcatacccttctcctcggtccgcaagcggtaccccagtattctggtgctaaatcacgctgcgagtgatctcgaatggaatacgctcggaacccaagttggagattcagttattgctttctggttcaagggcacgaagtttggctgcatgcgcagagttgaaatcacccctgctgctaccacattgtcacgactcaacgtggactaa

SEQ ID NO: 509892 - DNA, 630 bp, Stenotrophomonas maltophilia
atgaagtcgacggcttttcttgtagttatcattctaggagtgtgttcccaagaagctagatcccaggtggcaccggtcaatacggggttaggcgactgcatagatttcatcatctacgcatctcccacattgacgggacaggtcaactcaacaccctattcgtttgcatactcttcgagctcctacctcgacaaggcaaacggagtggtgtacgtacagaacttcacatgcaatccgcaaagcccggacctgcctgggatctactcgcgcgtttctcaagtcagtcatgagatggggcatgcaaacttcgatgccagctttcccctgggaacgcgagaagactatattgaaaaggcatgcaccaatgaaggccgagccgtcctcaataacgccaccgcacgaagcgaaatactaaacacaagcgaaggatattcagacatcggcttggcagcagcgaattcaggcgcactacttgcacttatcaacgcaggcggacagaacctagacaagcgcgttggtgatttgttttgcgacacaaatgtcacctctacaaccggtgtcaactacaaagtccactggggaaatgtgtatgatgagctgtacggccccgaagacgaagaggagcagtaa

SEQ ID NO: 509893 - DNA, 948 bp, Stenotrophomonas maltophilia
atgcatgtggatggggttgccggcttcctggtcacaactcggggagaaggaaacaaggtcaagaacacgagctcactgcggtttgttccattggctcaaccggtgctggatgcaggtttcctccatttcgtagatgaggtgcgagcgtccggcgtggatcgccttttcccggaccttcccaacagcacaggactgggctttgggcgtcagctgtcacgtcagttttcgacctacatcaagcggcaaggtgtcaccgaagagggcatgggatttcatgcctttaggcattacttcatcacccacacggatcgagcgctgctggccaccggcatggaggtcagtgccagggacgtggccattggccgcatcaccggacatggcaaaccgcccaaatcggtcttgcgaaaagtctacgtggacaacagcgggttggccgtgccagcggcagttcagccagagaccttgcctctgcgggtggagacgttggcgatgttcaatccgccggtgacccatgccgtcgcatgtgccgggtcaatttggggagaacttgcaacgggccgctacggaagccaagcgaattgcgcgagaggcaaaaagaaacaaaacatccgcatgactgccgcggctgggatggcgttggcccggcaagacgtggaagccgatgaggcgcggtttccactcacttcgaaagcagaagttcagcctctcggacgcgcaggcataccgtccgagttgcgggtccaggtggttgagcgagctgacgacgagcaccaagccacgtatagccgcgaattcaccgtccaagaagatctgcatggcccgggcgtgaacacccctgggctggcagtgctggacttcaacttgaacctaccggttctcaaggcactcctgtccgaaggtgctccgcgaaagcgcgcgaaagcaaagcccgagcacgctccagcctga

SEQ ID NO: 509894 - DNA, 138 bp, Stenotrophomonas maltophilia
atggtagccagctacaaaaaaagcaaaggctgctacaagagcgaaagcaaggatgctggcgtcactgtgcttggtcatttgaatcaaaggctcctccgcgttgacattcgtgcttgcctgcgcgagtcgctggcttga

SEQ ID NO: 509895 - DNA, 195 bp, Stenotrophomonas maltophilia
atgacttggacgccattacacgaggccgtggtcatgggcgatgttgccgcgctcacgccactaggttcctggaggcgtgggaacggcgtgaccctgccgccacgtgtgcgacgctccttgccgcaggcgctgagccaaacgccccgaattgccgacacgagacgccgttcggtctggcttacccgcgagctttga

SEQ ID NO: 509896 - DNA, 414 bp, Stenotrophomonas maltophilia
atgaagaaccagaagggcttcacccttatcgaactgatgatcgtcgttgcgatcatcgccatcctggccgccatcgccctcccgatgtaccaggactatgtggccaagtcgcaggccactgctggcctggccgaaatcacccccggcaagactcagttcgaagttgccatcaatgaaggcaagacttcgaccgatatcgcaaatatcgctgcgattggcctgaagaattctgatcgttgcaccatcaccatgagcttcgctgagacgggcaatatcgtttgcaccctgaagggcagcccgaagctgacgacctcgaagggtgcaattaccctgacccgtgctactgacggtacttgggcctgcacctcgaacgtcgacgcgaagtatcttccgagcggctgtaaggctccgtaa

SEQ ID NO: 509897 - DNA, 408 bp, Stenotrophomonas maltophilia
atgcgtgaagaacgtggtttttcattaattgagttgatggtggtagtcggtgtcttggcaattctcgcgctgatcgcgctaccgatctatcagaactacatggccaaagcccagttagccgcggcatttgcagaaatacgacctggaaagaccaccgttgaaactgtggtgcaggacagtcgggacactgcgctcgtagacgctgcctatataggcttgaagcgctcggatatctgttccgctgtaacggccgagctggatgtcagtggtgtgggaagcatcacttgcaaagttggtggcagccaagcaatcagaggcaaagacctcatcctccgtcgcgcagccgacggcacctggacctgcgacggcagcgccttcgaagcgcgctatcgcccaaacggctgttga

SEQ ID NO: 509898 - DNA, 555 bp, Stenotrophomonas maltophilia
gtgcggcgtgcgctggtgcggcggtgggtgcagcgcggggcaagcgagcgccgtgccctggcgatcatcgggatgagtgccagcgcgctgcgctatgtccggcgcgaggatcgcaacgttgaattgagcgagcgcatcctggccttggcgtatcggcacaagcgctacggcgtcggaatgatctacctgaagctgccgcaggaaggacgcatcgtgaactacaagcgcatggaatggctgtatcaggcgcagcagctgcaggtcaggcggcgcaagcgcaaaaaggtggcggtcggcgagcggcagccactgctgcgcccggcccggcccaaccatgtgtggtcgatgaacttcgtgttcgaccgtacggccgaaggccgggtcatcaagtgcttggtgatcgtcgatgacgccacataccaagtcgtggcaatcgaggtggaacgtgcgatttccgggcacggcgtctcgcgtgtgctggaccagctggcctcgctgcgcggcttgccgcaggtgatcggtaccgacaacggcaaggaattctgcggcaggtga

SEQ ID NO: 509899 - DNA, 273 bp, Stenotrophomonas maltophilia
gtgagctgggcccacgcacgtggcgtgaagcttcgcctgatccagccctgcaagccgaaccagaacgcctatgtgaaatcgttcaacggtcgcctgcacgacgaatgcctcaacgagcactggttcccaacgctgctacacgcccgcaccgagatcgagcgatggcgtcgagaatacaacgaggaacgccccaaggacgccatcggcggcatgataccggccgcctacgccaaacatctggccaacatcgatatcatcaaccccggactctaa

SEQ ID NO: 509900 - DNA, 486 bp, Stenotrophomonas maltophilia
atggatacggatgaatttacggataggcagctgctggacctccactgtctggtcatggaagcgcttcgacaaagaggcgtcgtgcgctcatcaaacaatcccgtggcggactacacggaaacattggtggcgcgtgccctcaacgcaaaattggccgtgggctcccaggccggttttgatgcagttggccaggacgggacgcggtatcagatcaaaggcaggcgactaaccgcaaccaaccgcagcacacagttgagcgcgttgcggaacttggcgtctgatccattcgaccacctcgcagccgtggtctacaacagctctttgaaagttgaatacgccgcccttattccattggacgtagtgaaaagggttagccgctacaactcgcacacaaacgctcacacgcttcacgttcgccgctcgctattgaacgaaccgggagtggtcgatatcaccatgcaaatcgtcaaggcaatggacgcatga

SEQ ID NO: 509901 - DNA, 519 bp, Stenotrophomonas maltophilia
atggctggtatcgtgggggtgctcgttctgctgcttgtgctcgcagttttgttcaacattgcgtcatccagagagaaagtgatccgtgagctgggtgagcagtcggcccagcagggcagggacattgcagcgctgcgtcaggtgatggacgcggttgcggatcgcgtgctattgagccgagagcagcgacgggtgaagtggtttgatgaactgccgccattcgtcctggatgacttcaaagccctcagcgccggttccgagcgcgagttgatcatggcttgtggtggcggtgacgacgccgaggtcatgggtttgcactatcggcacgagcggcttgagttttgcaccgatggcgaaaaggacgcggttgcctacggcgttgctcgcccttgggcaacgatcgaggatcgtccggtgaagatctatctcaatcagtacgcgctcacatcaaaaattgtcggcttggatcaggacggtttcgtcaagctcgccccctataaggcacggttgcccgagtga

SEQ ID NO: 509902 - DNA, 876 bp, Stenotrophomonas maltophilia
ttgccggtatccgaagccaccgtgctgcagtttgtggtcgaccacgtacagcgccggtcggctgacggcgaattggcctgggaactgccgccggccgtcgatcaggccttggtggcggccggcctgaaagccaaacttgggccttggacgctggctaccgtgcggcatcgcgttgctgtgctatccaccgcacaccggctcaagcaagccaccaatccctgcgagcacccggcgatccgcaccgtgctcagtcgcgccgtgcgggctgcggtcaaacgcggcgagcgcccacgcaaaaagactgcgatcaccctggccgagctagaggccatgttggccacctgcgacaacagcttggacggaattcgggatcgcgccttactctgcttcgggttcgctagtggcggccgccggcgcagcgagatcgccgcggccgaccttcgcgacctgcgccgtattggcgaggcgggctatatctaccggctggagcacagcaagacccagcaggctggggttgcggccacttcgaccccggataagccggtgctcgatcgggccgccctcgccctccaggactggttggaggtctcaggcatcaccgagggggccatcttcaggcggctgtggaagcagcgcgtcggccccgcagtgggggagatcgtgcagcggcgggcgcgtatggcgggactggagggggagtttggcgggcatagcctcaggtccgggttcgtgaccgaagccagtcaccagggcgtggcgctgcccgcgatcatgcagctgaccgagcaccgatcgatatcgagtgttgtcggatacttccaagctggcggcgcggcaacaaatcccgctgcacgtctattggaagatgacttgtga

SEQ ID NO: 509903 - DNA, 2223 bp, Stenotrophomonas maltophilia
atgaatttgttcgagccgttagggcgcgcgcggcgactgttgcattcactttttctacgcgcacgtgcgtttctgccggtacagcaatcaatggcgttcagcccgacattcacggccgggcgcgaccgcatcgctgacatccacgtgatcaatctggaccggcaaccagagcgattatcagccgttcatcgtgagttgggtcggattgtcgacgctgcgggccaaccgctatcccagcggctcattcgacatccggcttgcgacgctcgggccgtccctgtgggaacgctggaaagcccggacatcgatccgtactacacgctcgccgatcagttgttcgtcgaaccgcagccgcatgcgcttccggcaaacttcgaccttagccgtccgatccggatgagcgacgcagaggtcgctgtcgcccaatcgcatatcgacgtttggaaaaaaatcgcaaactcggcagctccgtattcgctggttcttgaggacgacgtctggttcgaacgggggttcgggcggctcgtcgacatggcttggcgtgaaatgcgagcagccgatcagaccgagccttcctttgacgtactgtacctgtcgtacaaggaagtcaggcatggggctccaaagatcttcgtctcgcagagcgtcttccggcccgagcgtgggctctggtatctatccggatacgtgctgtccaaacggggcgcacagcggcttcttgcgcttttaccgtgccgcggacctgtcgacctatggatcaaccaaaagtttcacgaactggacgtgcgcgccgtgcgccgttccgttatagcccagcggctcgacttgcagtcgacgaactcctactcagttctgcctgcgctcagtcagattggcatcctcaacgatgggaccccaggtgcgtttcgccaactccccactgaaattcccatatttgcgttcggcgcgccgggctccggcttgtcgtcgctggctatggcattgtcgatgctcggctatcgctgctgcagtgacctggacgacttgccggactcggagcttgatcggctgctcgaagtacggcgcgggcgcatattcgacgcctatgtcaacgtcgcctcgcttgctccgcacattgcgacgctcaggcagcagtacccaggcgcgaggttcatcgtgtgcggcgagaccggcctttgctccacggagatcgcagcacttaccactgcggtcggggaaggcgtgttgcacctggatgaaggcggtgtctcggactggcaagccctctgtgagtatctccgccttgcaccgccgagcgctcgctacccgcacgttccggatcgcggtcaccgcacgcttcgacgcaccgcaatcagcaggccagctgcggtgacttggaagcggcctcgacacgatgtttcgccctgggtggcaccagcgcgaggcgagtggacaggcattgacgtcggtcccatcgagccatcggcgccttcggcagcggagtggacgcgtttcgaggatgacttggtcgcgctcaacccatcgcgctggatgcttcgcgacgacactttccctgggaacctggcgctgttccggcctgcgaacatcagcgcgagtccagctgggggcattgaactgcgggttgcgcaggcgtcgctcggtgttcggaacctgagcgcggcggcggtctgtagtcgggaccactacctgtacggtcgcttcgaggcgacgctgcaagctacggacgtccccggcctggtaaccggcttattcctccaccgtgattcaccgcgccaggagatcgacgtcgagattaccggcgaccgtccggaccggattctggtgaacgtgttttacaacccgggttcggacggcgcgaagttcgactacggctaccgtggcacacccgtcagtatcgatctcggattcgacgcctcaaaggcgttgcatacgtatgtgatcgaatgggagcccgatgaaatccgctggctagtcgacggccttctcgtccatcgacgtgtgctatgggatccgacgccgattccgcacttgccgatgaagttgcacgtgaatacgtggccaaccagatcccgcgagctggcaggtcggctggtgctccgtgcactcccggcagcagcgcgagtccggagaatcgccgttggcgcgatcaacgcagacgctgcccgccacgcaggctcgaccgcatttggggccggacatgtcatatctgcggtaacggcctga

SEQ ID NO: 509904 - DNA, 843 bp, Stenotrophomonas maltophilia
atgcgatccgaagccgacagtcccgaacatcatcgacagcgctcggagttcatcaggagccttgtccaaaaatcacgggtactgcagaacgccgacagcgaagcgccaagcgtccccaacaccatcgtgcagttctggcacaaccttgcgcagctacctgaagacgttcgggagtgcatttcctcttggtccaggtgggaatcccatggctttgcccaccgtgtattcgacatgacgggagcaggggaatttgtcggtcgctcgttaggtccggaccacgcgcacgctctcacgcgttgctaccaccccgcgatgcaggccgattatttccgactgtgctatctgttcgtcgaaggtggtatgtatgtcgatgcggatgatgtgtgcatcgcgagcgatatcgcgagtctgttcgatggctgccaactcaaagtccagcctctctgctacgacattggatccgactcgatggtgagtccaacagagtttctacagccgggcgcgaacgacgaaggctggatcttctacttcaacaacaatccactgattgcgagaaagggggatccggtcatcaggcgcgcacttcagcgggcgactcagcttctaagcagcgtttcggatggggaattccctgaaatccagtcgaccacaggcccgggcaacctctcgaggacaatttttgagctaggaacggcatcctcgatcgatgatcgggttctggtattgcataactgggattcgatcgccgtatcgcgttggccgctgagctaccgtcgcgacgcgaggaattggcgtctatcgaacggaaaacgcttccacatcgcagcacaggagatgcaatga

SEQ ID NO: 509905 - DNA, 216 bp, Stenotrophomonas maltophilia
atggagtacacgttccatgccaagttcgccggcgaggatgtcccggtctggacgttctaccttctagagcaaggtgagctgttcactgctccgagcaacgggaccaagatctgcgactttaacaaccgatatcttggcgagcagcttttggtgccgctaaatctggcaatactgcagaccgagctgtttgcgcctcgcgatgcagcgagcggctaa

SEQ ID NO: 509906 - DNA, 204 bp, Stenotrophomonas maltophilia
atgaccacaccacactccccgcccccgcgcccgatccaggaagcgccgtcacccgcacccgcgctggcccccaacagcctcatcgccatcctgcacgccatcggtgcgggcgctgcggccgacggtcagccctggcccgagcggcaccatctacgcagccggcagatgcagttgtccgacgccgactgcgcactcaccggctaa

SEQ ID NO: 509907 - DNA, 147 bp, Stenotrophomonas maltophilia
gtgcaggagatcctgctggcggccgagcgcacgcgccagaacggcgagccggagcagtacgtcggcgaccgggtgatggagggactggtgatggccgatctggcgctgaccgccttcatccacgagcggatgcgacccaaggactga

SEQ ID NO: 509908 - DNA, 531 bp, Stenotrophomonas maltophilia
atgaagaagcacggccttgccgctgcggcggtgtgcatcgcggtgatcggagcgatgtgggtggagtggcccgtgcccgcgggcgatcaggtgtgggcctaccagaagctgcagccggccgattaccgcctgctgcacagtgatgcactcggcttcgtgaccgcgaaggcactcgagggctttgaactgcacacgcgccatgccggggcgacatccttcgagatccgatgcaagggcgtgctggtgatggaggtggagaacgcgccctcgcgcgtgctgatccgcatgcccgccgatgcacgctggcgggcgccggacatcgaacgtctgcgcatcagcttcgagcggtggctggatctgcaccagagccggggaaggttgttggtggaaagtgcggggccttcgtgggttgaggcacggtttgggcgcttcaatgggctggtgctggatgagcaacggtgtctgcttggggcgcccggcatccgccagcccgatcccaccaacgacttcagcgctgaagtgccttcgtag

SEQ ID NO: 509909 - DNA, 288 bp, Stenotrophomonas maltophilia
atgaacatcatggatcctgtactcagcgaactgctttcccggctcggtgtcggcactgacttcggcgatacggtgctgacttgtccggagacccaaggggcctatgaggacacgcccctgcatgtggtggcctattacaacgatgtggccctcctcagcgcattgatgcccttcgtgactaccatcgatgcgcgtggtgatcttgatctgacgccgctggcaagagctttgatgatgtggtgcgtatggtcgacgccgcagatggaacctgctgatggaaacttctga

SEQ ID NO: 509910 - DNA, 216 bp, Stenotrophomonas maltophilia
atgcatatgcgcaagaaaataatgaattggcttggtttgttgttatttgcgctagtttttttgaggtcctcgtcctatcttgtattgaaggtgtatgctattggtcaccttgagaggggtgattattttgtaatgttgcctgtggcgctggggtcactcctgatttgcggcatgttcatggcgattgtgattaaaggaatgaaatccgatcagtag

SEQ ID NO: 509911 - DNA, 219 bp, Stenotrophomonas maltophilia
atgcgcatccacatccattcgcctgacagcctcaatgaatttccaaccttcgccaggatctcgctggatgatgccatcaacttcatccagcacgcctgtgagcggaccccgctcattcgcatcgactgcgagccgattaaagttaacccatgcttcagcgactttttccatgcactctttatcaagcattgtctagatctcaaattggttgagccatag

SEQ ID NO: 509912 - DNA, 375 bp, Stenotrophomonas maltophilia
atgaaacaccgcacaacctcgaccacggccctgcttgtcgcgctgatggcgtgctggcacgccgaagcgtccagacccaggacattcttcgtgcaaccttcggttgcgttcgagtcgacccagctgcgcgaccgcgacatcgacgcgcaactgagcgagaacgacgattgccgcgcgttcctgcagtaccacgatcagtgcgcaccgtcggtactgccggacgagtacgaccagggcatcagccggcgcaggctgcggtggaagtcaacgcaactgacgggagaagcactcggtgcctactgccgtgacctgcatctgctgtggaagcagcaatggaaagagcagtgccctgcccacgaggacgagggcacctga

SEQ ID NO: 509913 - DNA, 1509 bp, Stenotrophomonas maltophilia
atggatgcactaccccgctccgcccgtcgtcgccgctggccgcgcgtgctggccgtgctcctgctggtcccacccctgttgttcaccgccgccctgctctggccgctgtctgcaccaccgctgccccaccccggcaacagtcacgtgatcgtcaacgcacgcgtggtggacatcgcccgcggccaggccagcgaacccaccacggtgaccgtgcgcaacggcaccatcaccgccatcggtgaagacccgccggagaccacgttgccggttctcgatgcgggcggacgctggctgctgcccggtttctgggacatgcacacccatgcactgcagctgtcaccgcaactgcagtttccgttgatgctggccaacggcatcaccggtacccgcgacatgatggactgcccacaggccaccgatccgctgatcgcctgcgtggccgacaagcgccgctggaccgcacaggccattgccgggcagcaggttgcaccgcgcttcgtacagatcgccagcttctattttgaagacccggcgctgacgccggatgcagcgggcgaacgtgcacacgcgtaccgcgcacgcggcgtcgatgcgttcaaggtctacaaccgccttcgcgccgagacctaccagcggctggccagcgaagcgcggcagctgcatctgcccctggtcggacacctgcccagggcggtcccgctggaagccgcattgcacgcgggccagcgcagcttcgagcacggccatctgttcgtgcgccattgcgtggacagtgccgccgcctggcgcgaaggctcgctcgatgacgggaacccgaccgcgctcgccgaagccatggtgggtgactaccagcccgccctctgcgcccaggcgttcgacctgatgcaggccagcggtgcggcgttcgtaccgacccatgtcacccgcgaagaggatgcacgcgcgcgcgatccggcgttcgtcgacgacccgcgcctggcctacctggatccgctctcgcgctgggcatggcgcgacgatctgaaggccaccgtggcgcgctatcccggcgcgcgcggcgaacaggcgctgaaggcctacttcacccatggcctggcgctcaccggcgccgcccatcgggctggcgtgaccgtactggtcggcaccgataccggactgggtggactgcgttaccacgacgaactgcagtggctgcggcaggcggggctgagccaggccgacgtgctgcgtgcggccacgctgcaggccgcgcgtcatctgcagctgcaggcatcgcatggcagcgtcgaggtcggccgggccgccgacctggtgttgctcgatggcgatccgctgctggacaccggcaacacgcgccgcatccacgccgtgctgctggccgggcacttgtacgaccgcccgcgcctggacgcactgtgggcgtacgcccgtgcacaggcacgctcgccggcggtgatggcgcgcctgctgtggggcttcatcaccagcccggtcagcgctgagctgtag

SEQ ID NO: 509914 - DNA, 669 bp, Stenotrophomonas maltophilia
atgaagggcgagacggtcgcacgggtgactctgtggctgctgtggagcctgtggacgctggcctgcatcgtgctggtgctgggcgcgctcgccaattacctggcttcgcgcacgcagaccctgccgctggtgctgcagccgggcgcgaccgccgagatcacggtgtaccgcttcatcgacgacccgctgcgactgcgtctgcgttatgcggatgacggcgccgatccggcggtcgatcccgagctgcgcctgcgcgcggaaaccccaaccgatcgcaccgagttccgcgcggagagccgctcggcggtgaccgatccggagatccatcgcgcactggaatcggtcgagcgagaccgggtcgccgcctcgtacttcggctacggccgcagtgacgcactgccgcgaggccgttcctcgctgcggctgaccgtgctggatgtcgatccggcgttggccggccgtgcggcctcggtggacctgctgccgccgatggacgtgctgaagctgaccgacctcgactacctctggctgtggccgttcttcttctggaagatggcggcgctgttcctgctgattccaggggccgcgttggctgtctttactgtggcgttgtggcgctggcagcgccgggcatcatcgctgccgacttcagcagtggatagggattga

SEQ ID NO: 509915 - DNA, 2889 bp, Stenotrophomonas maltophilia
atgaaactcaagtccagccagctgcgtgacgcagttgtgatcgcgcttgtcgccggtgccaccaccgcgacggcccacgcccaggaagccaccaacctcgaccgtatcgaggtcaccggttcgcgcatccgtcaggtcgataccgaaaccgcccagcccgtcctgagcatcagccgcgcttcgatcgagaagagcggcttcaagacggttgccgacgtcctgcagaacatctctgccgccggcagcccggccatcagccgttccgagccgctgtcctccggcgaagccgtcggtggcttctacatcgacctgcgcaacctcggtgccgagcgcaccctggtgctggtcgacggcaagcgcctcggcgccagcgtcagcggcctgcaggacgtgtcgcagattccgtcggccatcgtcgagcgcatcgacgtgctgaaggacggcgcctcgtcgatctacggctccgacgcgatcgccggcgtgatcaacatcatcacccgcaagaacttccagggcctggaagccaacgcctacgtcggccagtacggcgaaggcgacggccagaagagcagcttcgacttcgtggccggcttcaccggtgatcgtggttcggtcaccatcggtgcggaatacgccgaagaaaaggccgtctgggccaagaatcgctggttcagcaagtcgcagcgcacggatcgccacccggaccgcggctggaccccggtcagccagtggggcgcggtctatgacgtcaatgatccgaatgcgccgttgctgacgctgaaccgtggtggaaatccgttcgatccgaacgcctatcacgagaccgacctcaccccgatcaccggtgacgtcagcaactccaacgagcagatgcacctgctgacgccgaccaagcgtcgttcggtgttcgccaacgtacagtacgacctgaccgacaacatccgcttcgtctccgacctgctgtacacccgtcgcgagtcgcaggcacaggtcgccggttatccgctgcagtcggccgactatgagcgtcagctgggtaccgtgctctcgcaggacagctactacaacccgttcggcaccgacatgggcttcatccgccgtggctgggaagtgccgcgcctgtcgaccaacaagctgaccaccttccgcttcactggcgccctgcagggcagcttccagttcaatgacaagtacttcgactgggaagccggctacatctaccagaactcggagaacctgcagacccagaccggcaactacaacatgctggcggtcacccaggccaccggagcgtcgttcctcaatccggccaccggccgcgtcgagtgcggcacggccgccggcctggccgcgggcaccaacccgatctatggcccgggccccggcggctgcattccgtggaatccggccattccgtacggccgtaccggcgacggcggcctgaccggcaaccctgccctgcagcagttcctgttcccgaccaccaagaacaccggtgaagtcaccaccaagacctactacgcgaacatcgccggcagcctgttcaccctgccagccggcgacctgggcttcgcgctgggttacgagtaccgcgaagacaagggcacctacgttccggatgcgctgtcacagtcgggctactcgaccgatctggcggccggcccgaccggtggtggctacaacgtcaacgaagtgtatctggagctgaacgttccgatcctggccgacctgccgggtgccaaggaactgagcttcaacgccgcatcgcgctactcgaagtacaacaccttcggcaacaccaccaacaacaagttcggcctgaagtggaagccgatcgaccagctgctggtgcgtgccacctatgccgagggcttccgcgcaccgaccatcgacaatctgtacggtggcagctcgcagaccttcgcctacttcaccgatccgtgcgataccgatttcggcctggctgccagcgatccggccaccgcccagcgttgcgccgccgccctgggcgcgctggccccgaatttccgccagctgaagcagggttacgtcccggcggaaggtcaggatgagcagagcccggtgccgttcaacgccgtctccaacccgaacctgactccggaaaagtccaagtccaagaccgtcggcctggtgtggagcccgaccttcgcccagggcctgaacatgagcctggactggtggaacatcaagatcaccaacaccatcgtcaccgacgatccgaccacccagctcaacgactgctacgtactcggcatcgccgaccgctgcaactcgttcacccgcgacgcaacccgcggcatcgtgaccaacctgacctacgcaccacgtaatgccggttaccaggaaaccgaaggcttcgacttcgatgtggcctatcgcttcgaaaccagcagctggggcagcttcaacgccaacctgcagaacacctacgtcagcaagaacgtgctgaagaccaccaacgcgcaacaggtgccggtgtcgatcctcaacggcttcagcagcaacttccgcctgcgttcgaacctggtgcttggctgggaatacggcgattggggcatcacctggggtacgcgctacttctccagcgtgaaggaacagtgctacttctcgaccgagtgcagcctgcctgacttcggctcgccggatccggcacgcgaccagccgatgaaccgccgtggcgccaccaccttccacgacgtccaggtctcctggaacgcaccgtggaatgcaaccatcgccgtgggcgcgcgtaacgtgttcgaccattacggcccgcagatgtactcggcgccgaactcgcagtactcctactacggtggctacgacatcggtcgcttcatgtacatgcagtacaagcagaagttctga

SEQ ID NO: 509916 - DNA, 741 bp, Stenotrophomonas maltophilia
atggctttgctcgaagacatggagggtgctgttgcgacgatctttagcagtgcctgggacaagcgggaggggcgcgtggttccggatccggaggatctgcgactcggcaatgacgctgttgaattttcgcgggctaccgtgctgtatgcggatctccacggctctacgaacatggtcgacactgaggaatggtggtttagtgcggaggtctacaaggcatttctgcattgtgctgccagcatcatcagggctgagggtggcgcgatcacttcttacgacggtgaccgtgtgatgggaatctgggtaggggatcgtcaaacgacaccggcagcgattgcaggtctgaagatcaattacgctgtgaacgaaatcatcaatcctgcccttaagaagcaatacccggcattgaaccgtaccatcaagcagagtgtcggcattgactctagcgctcttcgtgctgcccgcactggagttcgaggtggaaatgacattgtttgggtggggcgggccgcgaactatgcggcaaagctgactgagttggatctcgaacccaagacctggataaccgctgacgcgttcctgtatttgcttgatgaggcgaagttcggtggccaacccaagcagttgatgtggaaggagttcagctggaccgagcagggggggcatcgccatccatggttcgacgtggcaatggaaggtctagtggccgccgtctctgtggtgaaaaagtccgtcgcttag

SEQ ID NO: 509917 - DNA, 921 bp, Stenotrophomonas maltophilia
gtggccactggacttattgatcggttccgctcagatggagggcggaggctgctcgctgcattatctgaggcgcgactgcttggcgggatcggcggcttgccagagtggctcatggaccggggggagctgctagaagtccaggcgggcgagtcctttgtcgagcaggacgggatggacaccgaagtgttctttatcgttgctggatccgttgatgtagtgatcaacggaaagatcgtcaacatccgccatacaggagatcatgtcggcgagatggccgcgattgagccagctcagagacgcgcagctacgctggttgcacgggagctcagtgttctgctgaaggtcgctgaaagcgatttcattgaaatggcagatggtcacccgatcatctggaggcgactggccgccacactttcgaggagacttctgcagaggaatagccttctggccaagcctcgcaaccaagttcgggtgttcgtcatgtcttcggtggaggcgcttccagtcacccgtctattggtccaacactttgaacatgatccattcttgactgtggtctgggaccatggcgtgtttcgcgcgtcaaactacacgttagatgagttggaaaagcagctcgaactggctgactttgcaatcgcaatcgcgcacgcagatgatcttgtgattagtcgtggagacgaatggcctgcgatgcgagacaacgtcgtgttcgagttgggtatgtttattgggttcttgggtaggaagcgcgctttcttgatggagcctagggaagataagttgaagcttccgagtgatcttgcgggtctgactacggtttcctaccgttatgtgcctggggaggatgccagagcgaggctggctccggcttgcaaccaaattcgcgacatcattcttgctatgggaccaagagactaa

SEQ ID NO: 509918 - DNA, 1548 bp, Stenotrophomonas maltophilia
atgggccacagctggaaggaagaccgcgcgaagaagcgaatcaagtctcgctacgaggaagtgcgggacgtagaaatttacgattacaagcgcgatacctcgctggaaagcatcccagcaaagcgggcttatcgcattcatgcggcccacgtctacatcgatatcgtcaacattgacgaaatcctggcctgtacgaaggacgagggcactacctgccacaagcgcaccctaaaattcctcaaccagcactatcgcgctgtccatcgcattcttgaagagagcaatgccaagcgcgtcgacttccataaccagcgcctgcatgccttggtcgctaagccttacggcgaagatgaagagcgccaacgggtggccaaagccgtggccatcgcaaagctagttgacgaagtcttggcggaaacaggggatgccgatgagcacatcccaaatgcacgtgtccgcgtaggtattgatagcggcttggctctggcggtcaacaacggtcggcgcggaggccgcgagcccctcttcctgggaagtcctgccaatcacgctgccaagtgcgctgggcatgccagcacagaaggcatctacctcacaaactcagcgcgatccgtcatgggcttccccgcactggatggtgacaaggaccgctctacccgccttactgacgagcagatagccacctgcgttgatgaagccaagctcgaaacgtcgaaagacaagatcatcaagctttggaaggaagagcaggaagagactcccattggcagcattgaattcagcaggccaacgccacctttgtcagacctggactttgatgctctcaccccggggaattcaaagaacttcgagggcgtttctgtctacgctgatatcgatggcttctcggcatttgtggaccaacaccttgaagagaatccagagaatttggtccgcacgttgcacgtcgttcgctccgaactggactccgtcatgcacagcgactttggcggacgccgcgtaaggttcatcggcgactgccttcatggaatgatgattgaggggacggcctatacaacggatgcagaggcgactgtaagcaccgccgtccaatgcgtcggcgccctccgcagcagctttctgtccgctattgaacatctgaagtctgaaggtggagacactggggagttgggtctagcgattggctttgagtacggcccgcttagtttgagcagactgggcatgaagggggagcgcgtccgatgcgcaacggggcgggccgtaattgcctccgaggcagagcagcgcatatgcaagggaaccgagagcaggatcggccctgctgcatacaaggctggatcggacgcagttcgcactctctttggcaactccaggacggctgacaaccttgactatgacgcggctgtagaagaactttcggcctctggcgataaggtggcaaaggcggctcttgaagatgcatatgcctcttcgcgtcctgcggtggtcccgtccttgtcgcaaccacttcgcccacattcgaagctcgcccacgatgagcgaagttga

SEQ ID NO: 509919 - DNA, 882 bp, Stenotrophomonas maltophilia
atgagcgaagttgagtcattgctaaggagcgtggcccccgagttcggggctacgctctccaatggagccggtgcagtagatgccacgattgagatctctctccccagcgggaagactcgatcttttgctctattgctcaccatccatggctattacgtctttgtccaagagaaaaaagcctcgccccaactgcctcagtgctgcccggatcgccacatcaatccgggcggaacattctgcttgggctggaaagatgacagccctagcgaagtccgcgacgaagcagccgcacgccgatggtggtctgctgttgtgcgatttctttctcgccagatcaacgcaagctaccgacgcaaatgggcaggtcaagagtacgacagagcccatggtgatgctgctgtccatcaggctgccgctgaggctgcggcagagaagttggggcctgatttctcgggtcgcgcgaggcggggagactttaccgtgcgcctcgatgagcatctcagagggccacgcattgaactatggggagatggcagacgcctagcacggatcacgaagcgtggcggatcattggtgggaggacacacctgctgcccatgcgatccgtcaggaaagatcgagatttcgagatgccaggatcacgccgagcatctggaaaactacatatccagctactacctttggcgcgtttccgaagacaagttcatggatgatcttgcaaatcagggcgttgcttgctgcggaacgctgatctcctgtgggctgagggacgcgcattcgcgcctaaaccaactaaccaaacctactgctaagccatatgtccgacgatcaaaattctaccaacctcccaagccctccaaacgcccaaggcgggcgcgttag

SEQ ID NO: 509920 - DNA, 2121 bp, Stenotrophomonas maltophilia
atgcgagccgaggtggctgcagcagtcaaagcgaaggtggtgagtccgccaacagacgagcaatgggatatgattttggccgatcatccggctacttgtatctcggcaggggctggatcgggtaaatcaaccaccttggttttgagggtggtcttcatgctggttcatttgaagattcctgacgagcagttgaccgtcatttccttcacgaaagcatcctgcgcggacttgtgcaggtcgcttgtgaaggtgatgcgtcattgggggcgcaatgtcgacgatgagtgggctaagaatcgagtcaggacattccactctgtcttgtatggtctagcttctgttcccttcccagggcgccagttcttcgatttctatgatggtggaaagacgggcggtgaacctgtcgatgagttttcagttgataacccaattggcgcttcaaaactaaacgatgctcagtcgagcgtgttgagggaggcctatatttccctctttaatgatgacgatatttttcgggcgaaagttctgtcgatcttgaagagtgagctggctgtaaggcgctcagatcgtgacggagaagatctcaaagactatcagctctcatacgccagcgagcgtgactaccaagttcgccgatttgtcgaatcttcgtgggcagtagatggctggccattcgatggggtcgagacgggtgactttaagatcaaggccagcattggaaacaacagtatatatgctgatgggcgcgaagccgcgactggaattccaattgtgctggatattcacaactctgttgatatcaacggtcgtgaagcgctggtaggaaagaaacctgtatccatagcccttgccgttaacagcaagcttaagatcatttcaagatatgccgaaacaccttatatcttgcttagatcgcaggaggatgtcgccgcgttccagcttcggcaaaagtggctgacgatatccggagctagcgataagttggatgatgcgccgatcttccctctgaagattcaaggagagctgtcggcgctccagattttcgaggcgctctatgcccaaggctcatttattgaaagtcacgggttcgaggttactgaactgatcgccaaaatcccggctccccaagtggctgatgtcaacgccaacttcattggcgccttggcacgcttttggccacatttgcggcgctgcatggaagaatctcgcttgcacacttttaatcaagtctttctagcaatgactagagaagctagttcgattaggttttctccatcaaagatgcagtccatgcgtcatctgctgatcgatgagttccaggacatttctcctcagattgccgcatggataaaggccatgcagcgacggatattggccgacaatgtggggcttcctgtaagcatcatggcaatcggcgatgactggcagtctatctatgggtggcggggtagctcgcctcagctgttcattgacttccagaagtatttccccgcccactcccaattgggtccaggcccacaacttaagttcaccgccaattttcgctctatcgaccagatcatccgggactcggaacggctcattagcaaggtcacttcaaaggtggagaagatctgtcgtgcacagatcgccacgagtgaaggtgatcacggtgtcaagttgattgagtatggtaagcctaaggcacgaaccacggatgaagaggcgctcgaccaccttgtgaaagcggtcggtgcgcagtatgcgcttgcgctgaagatgaagagcaagcacaaagatcgcctgattgtaatgacgcgatccggcgagatatctaaggcgcttcgcagcgtttttaagtcgaaggattaccctggattaaccatctgcacgtatcataaggctaaaggcctagaggctgatgttgctttcatgatcgatgattgcagggcgggtagcccgcatcctcttcgcaacctaatttatagggtcagcggaatgtatcccggctacagctacgatgatgcgtgcgcggacgaggcgctgcggcttgcctacgtcggtataacgagggggcgccgcagagtggtttggcacgtgagaaaggctgagcctgacggaagcgcggtgaactttaggtaa

SEQ ID NO: 509921 - DNA, 798 bp, Stenotrophomonas maltophilia
atgacgttccggtttccggttggaccttctcacggtcgctgcaacatttgcggcgagcagggcgagctcactgcgaaccacgtccccccgcaaggttgggccaagggaatagcgcttcgggtggcgagcatcgcggataccatcagtggtgacaagcatccgccctcctataagatgcctaatggcgtccattttcgaacgctctgcagacgttgtaatggtgcgctgatgtcgccttttgacaaggcgctcatttcgatgtgtaaccaagtggcggcgttgttgagggaccctggaaaggtgaccttctatcagtccattagggtcaagccacagctcgttgcccgtggcatcctcggccacatgtgctcagtcggcttaaaccgctatgacgaaacacacagcaggcatctattcgatagcgcttctgatctgcttcgccaagttcgattgcactactgggtctatccctatggcgggcgaacggtgctgcgggatttcgccctttgcaacatagctctcagcaagagcgcggcgatctacatcatcaaaagctacccgctggccttcgcgatggtatgggaccggggcttctcctttgagaattggcagccaagaagcttcgactctttcgctgatgcggcacccgaagatgaggttgaccttccggttgatttcgttgggttgccgggccagctctggcccgagtatgttcaaggaaatatgttcgcggccatgcattcagacggtgtcttcgtcgcgacagcgaaacgcccccgtagatatctacagaagtag

SEQ ID NO: 509922 - DNA, 363 bp, Stenotrophomonas maltophilia
atggatcgagatgtcggggtagacacactgcttgatctggatggcaccatcttggatcagggaggcgggtattggattaagttggatgccaaaagggtgaaggttcaagaaggaattccacacggaattagttattcattgacccttcatgagcctagcggcgatagaattcttggctatgacaatgcgcatgctgtgaagcctggtaataagttcaaatacgcaggcagggtgctggattttgaccataagcataggcatgggaaagataggggggtcccttatgaattccagaatgcaagtcagctgttgagtgatttttttaacgatgtagaccgtgtgttggaggaggtgaggagatga

SEQ ID NO: 509923 - DNA, 1089 bp, Stenotrophomonas maltophilia
atgctgaactctgaacgcctatcggggcgtggcacccggttgctggcaggactgcttctgcttggcccctgcctgtgggcaagcgctcaggcgcagccccagcccgccgcacggaaggtgcccagtggtgccgaactgattgccgacgatgcacgctttctgagccctgcctatgcgccctgcatggcggccgcggtcaccgcactggacgcccgtcgtcgttgtgtcgacgctgaattcaaggtgcacgacgatgcgctcaacgccgcctacagtacggcgcgctccacgctgaccgccagtgatcagcaggtgctgcgcgatctgcagcggcaatggctgcgccagcgcgacagtcgttgcccggaaggcagcacggccgttgcccagctggattcacagcaatgccgcacgcacatgaccctgctgcgtgcccgccagctgcagggcggcggtgcggcggcgctggtggcggaagccagggcggccccggcgccggcgcaggccgctgtgcataccgccgatgccgcgcccgacaaacagggcaggatcgtcctgcagcccggcgagggcaggatcacgcctgcattgcaggtggtcttccaggtggccgactgcggcggcaccgacaacgtgacgacctgcagggtgcggagcatgggcgtgacccgtggcgggcgcaacgtggcggtcacgggcgtgcagccgcgcctgacccgcgctggcgccgatgcccagggtgcggcggccgtgctgctgaccgtttcggatttcaatggcgatggcgtgccggacctgcaggtgtggcaggacaacaacggtgtctacaacgttccggcgcatgcgttctacctgttcgacgccaaggtcaaccgctatgtgcgtgccaaggcattggaagcggccatcggcgggcgcgacatcgaccatatcgacaatgggcggttcgtgctgcgcgcgaaggtcagcccgtgcgagcgcgaggacaaggtcatccagctgcgcggaaccgggccacgcacgctgctgcagcgccgctatgacacctgcaggggcgaggcccctaccgaatcggacctgctgaagtag

SEQ ID NO: 509924 - DNA, 765 bp, Stenotrophomonas maltophilia
atggtcgtcctgcttgtgtcactggccggttgcggacgcagtgaagccgagcgggccaaggaaaggttgacgggggtcatcggtggtactgcactgaatgccagagcccaggcggtctggatctgggagctcgatcgggaagctgataaccaaggcatcacgccatgcgggccgaccctgcgcagtgcaaccttccagttgcgctggcccgagatggctcctcgtacgaaagccaaccgcgacgattacaacacccatcactccggtggaacgggtgattcacagtggatcgagattgggatgtctcaagggggaccgggggagatcgtctcgttgcagggaacgcgggagcgtgcgctcggtcgtgatccggcatgggggatgccataccaggtttcgctcgagttcggatgggatgagaccttgggacttgagatggcacggcccagcgtttccgagcccaagagctacaattggaatcggatcaattattccgataccttcgcgatcggggcaacgcccaacgtgctgattcgttgcatgaccgggccgcagtaccgacctccgcactggacgccgctctgcgaggcgacgctggaagatgccaatctgaagcaggtccacctgagcatcaggtatcgtcagaacctgctgccacactggcgcgatatcgagcgtgatgtccgccagttcctgcggagcgtccagagggaatgcccgatgccgggccacgggcctggcatcgcagctggtacagcggcttga

SEQ ID NO: 509925 - DNA, 603 bp, Stenotrophomonas maltophilia
gtgcgcccccaactcgtacaccaccacgtccggtgccggcgtctgcagcacgcgcgggtcggccttcatcaacgccagcgcggtatcgcgcgccagctggatgttgtcctcgtagccgatgccgatcaccagttcgacgcggcgggtcggctcggcggtcaggttgatgatcggtgcggcggtgatcagcgtgttcggaatggtggtgtgctggttgtcggcaccggtgatgacggtctggaaaatgcgcacttcgcgcaccgtgccggtctgtccggcaacggtgaccacgtcgccgacgcggaacggccgcagtgtcaccagcatcacgcccgaggcgatgttggacagcgaatccttaagggcaaggccaacggccaggccggcggtgccgagcacggccagcagcggcgtgatctgcacgcccagcgtgccgatggccagcaccaccacgatcaccagcgatgcggcgtacaccacgttgcgcaggaagctgcccagcatcgggtccacgcccatgcgcgctgtggcgcgcggcatcgcgttggacaggcgacgcgccacccacaggcccaccagcagcaccacgatggcggccagtaa

SEQ ID NO: 509926 - DNA, 240 bp, Stenotrophomonas maltophilia
atgccgggccttttttgtgcctgccgatgcgtagcgtcgagccatgctcgactgcgcctgctgggcgcaggcatgaaaaaagccgagcgtgggctcggctctccagaacaaaggggcgggcagggcgcggcggtgccgcgccggactcagtcctccacgcgcagcacggcgcccggcttcagcacgctgctgccgctcaggccgttcagcgacagtagcgccttgaccggcatgccatag

SEQ ID NO: 509927 - DNA, 4332 bp, Stenotrophomonas maltophilia
atgaatcgaatctatcgacgtatctggaatgctgcacgccagtgctgggtggtagcgagcgagctggctgtcgcaaggcagtgttcctcatcgccgagaagactccggctactagtcattccactatcgatgtctgcggccggctccatttccgcgaacgcgggcagcatgtactggggatgttcgcccttcgattgggacaaggcggacgtctattgcgtgcccatgtcaggacaaagtgaggatggaaaaacctctgccaatgcaaagatctccacctccaaggactatctgatcatggggggaggttcgtacaacgacggctcctggaacgctacctttggtcccaaggcccagatcattggcaactacaacgcggcattgggccacaaggccaacatcaacggcgtagacagcgttgccgtgggctacaacgccagtgcccagctggggcacagtacggtggtcggtgccaacgcctatggcaagggcatcggctctaccgcgttcggaaacaaagcctcggccacacggcagaactcgatcgccatcggtagcggatcgctctcgcagagcgagaattcagtggcgatcggtgcaaattcccttgccagtgaagtgaacaccgtctccgtcggcagcgacaaggagaagcggcggatcgtcaacgtagccgatgggcggatcaccgctgccagtaccgacgccgtcacgggcaaacagttgtacgcgaccaacagcaagctgggtgcggtcgaagcaaacgtcggcaccatgaagaatgatctgacagcggttcggacgcttgcgcagtccgccaccaatcgcatcgatgccactaccctggcactgggcaagggcgcggtcgcagaatcgggcagctacggcatcagcaccgccatcggcaacaatgccaaggcctacaacggccgcagtgtcgcactcggattcgatgcgctggccggcgtcgatgcggagggcaatcgagtgaccggccagaatgccggcgtttccatcggtgcaaacacgcgcagcgcgaacggcgcggtcgcgaccggattccgggccattgccagcggaaacttctccattgccgtaggcggtgacgccaatgcggccgccgaacatgccactgcaatcgggtacctgagcaaagccacggcaaagcagtccacggcgctggggcgtggcagcgaggccaaggcgcagttcgccaccgcgctgggcaatcttgcggtatcggccaataccagtgccgtggcactgggtgatcgggccaacgcccgccatgacaatgcggtggcactgggtgccggctctgtcacggcgtcggtcaactccgtttcggtgggcagcgctacgctcaagcgcaagatccagtacattgccgatggcgtggtcagcaatggcagcaccgacgcgatcaccggcaatcagctgttcgcgaccaaccaggccctatccgctgcccagagcacggccacgagcgcgcagacggcggccaacgcggccaaggccgacgccgccaaggcgctgaccgagacgaccgcgctcgccggcctggtctcccagacaggcgccaccggcaatgtccgcctgggcgggaagaacagcggcaccgtactggacgtgcgcaacagcgccaacgccagccgaaaggttgccggtgtggcggatggcgacttggatgacagcagcaacgaggctgtgaacggcaagcagctcaatgccaccaacgtgcaggtcgctgccgtggagaaagcggctacggccgcgcaggcggatgcaacggttgcgaaggcagatgctgccaaggcgctggtcagcaccaccgctctggaaggactggtcagccagatcgccgccaacggcaatgtccgtctgggtgagaagaacagcggaacggtgttggatgtgcgtaacagcttgggcactaatcgtaagatcactggaattgccgacgcagacgttggtgcgggcagcagtgatgcggtgaacggcgggcagttgttctcttccaatctgaagatagcagtgctcgaggagaagagccgtctctttggggcaggcaatgaagctggtgcggcctcagcacgcgccggtgagttcggggtggcgataggcaacggtgctgtggcatcagtcgattccgaaggaggggtcgccttgggtgcattcgctggcgcactcgccaggaactccgttgcccttgggcgcgcggccagcgtggaagccggagcggttgccggatttgcacttggcgcgggcgcctatgtggctgcaactgacggaattgcgattggcgccggttcggaagttgaggctggtgcagatgggggcgttgctctcggcgctggttccgttgtggctgagagcgacactgtttctgttggcaatgacagtctcaaacgtcgaattacaaatcttgcccgcggcaccgctgatcacaacgccacgaccgtctctcagctgaaggactcccttgccaccctcggtggcagcgcagggatggacgccaacggcaacatcattgccccgacctattcggtgcagggtggtacgcagaacaccgtgcaggacgcgctgatggcgctcgatggagctgtcaccaccgcaggccgccgtgcggacatggtggaaggccagctcaactcgatcttccaggattcaccctcggcccgtggcgatggcaggagccagatcgcgctgagtggcgcgaacggcatggtgttgaccaatctggctgacggtcgggtggcgccaggaagccgtgatgccgtaaccggcaatcagctgtacgccgcggagcagaagatctcgcagaatcgaaatgatctggaggcgatgcgcaaggagagggagatgggcgagcgggccatgcgtggattggatacgagcggcccgatcgattttggcggtgcgcgtttgactggagtggccgaggctaagctgtcggctgacagctcggatgttgtgcggggcagccagctctatgagaccaacagccgtgtttcggccatggaaggcatcagccagtacgtcagtgtgggtgccgctccaggctatggtcctgctcaggctggaccggttggtcttgcaattgggaacttcgctaagaccggcaacgatggaggaactgcagtgggaacccatgcgaaggcactgggcagaaattccatagcccttggtcgcgcttcggtcgtgcatgaggattccgatagcggatttgcgctaggtactggagcggaggtaggcattgccggaggtggtgcacgaggaggcattgctatcggtgctggagcaaaagtgggtaaaggagcgaatggttcgctggcaataggcgaaggctctcaggcgaatgaggccggagtggtttcatttggaagtgcaactacttatcgccgcctcataaacatcgccaacggcaccgccaaccacaacgccgccaccgtcggccagctgcgcggcgcgctgtccgcgctcggcggcgaagtcgatgccaacggcaacatcgtcggccccagcttcaccgtgcagggccagtcccagcccacgctcaatggtgcattggaagcgctcgacggcgcagtggtcagcaccacctcgcgcgtaaaccacgtcgagtcgcagctgcgcagcgtgttccaggacacgccctcggtccgcgccgacggtctcaaccagctcaccctcgccggaacccacggcatggtcatctccaacgtggccaatggcctgattgccgccggcagccgcgatgcggtcaatggtggccagctgcattcgatgcagcagcagctcaacggccgtatcgatggcctggaagagcgcatcgatgcgccgcagccgcaggcaatggcggtggcttcagtgcccgaaccggaagcgccggtgccgcaggccgaaggcggccagcaggtggcgtcggccggcgaaggtgagaagcccgcgccgcagccgaagtcgaagaaggacgacacgcccaagccgcaggtcgacaccgctgaactggagaagatgctggcacgcgccaacgagtataccgatggcgcgatcagcaacttcgaacgtcgcctggacaagatggacaagcgcttcaaccgcatggcggcgatgagcagcgcacagaccgcgatggcgatgaacaccgcgggcctggccacctacaaccgcctgggtgcgggcgtgggctacagcgagggtgagtcggcgatggcggtgggctaccagcgcgtgctcaacgagaagggctcggccaccttcagcctcaatggggcgttcaccaacagcggtgagcgcagcatgggcgtcggcgtcggcatcggctggtaa

SEQ ID NO: 509928 - DNA, 1134 bp, Stenotrophomonas maltophilia
atgagccggcgtgtgttgttcgtgttgatgctggtgtgcgcgctggccgtgctgatgccacgagcgtgggcgcagaagtttccggaaatacatccgacagatgagacccgtcgagtcaccgaaagctgggaccgatcagctgtcccagccgaagtcgtgctctggtcgccgatgacattgttggcctttcaggaaggtccagattccccttatgaagtttctcaccttgtctgcctgtccgataccgatgcatcccgcggacgctgtccagtgattggaaatccggaagcacgtggcaatgcgctccccgtttggttttacatgactgatcagcgaactggacttcgcacggagattcatgcactcggctacatcaagaggccgttgaatggccctaactgctcttcggatcactggggctcactgatctatccgatctggtcatctgtaccagatgtatgccgaccgctgatatccggcggaataggtgtctctcttgccattcggagctctgaactgaagcgcttggttgcaggggcgtgggcagggcggattgaactccaattgcgtcaaacccgtggcggtccgctgttggcgacctatgtcttcgatcttgcattcaccgtcaccgattacgacgcgatctcgatctactttccggccttcgacaccattgcgccgctggtcaacatggacctgcgctacgaccccatcaagcagatggtaggcggccgcaagcagctggagatgtgcctctacgacggcctcggctcgcagagcgagttcctcggcgtcaccgtgcgcgacagcgggccgcgcccgccacccggcagcgacttcgcggtctggcatcgcgatggtggcagcgacgaccgccagcgcctggactaccacgtcagcctgaactacggcgggcgcgatatccgcatgcggcatggcgtggaagagctgctgcatggcatcgagagcgccgaactgcgcctggtcatgctgcccggcatcagccagccggtctattgcgtgcccacgccgctgacattgctgacacctcccacccctatcgccagcaagcgccccggtctctacgagggcgagctgacggtggaactgcgcgtccccaccgccaaaccctga

SEQ ID NO: 509929 - DNA, 2985 bp, Stenotrophomonas maltophilia
atgacgtacaaccgcccacctggccgtcacccgctcagcagcgccctgctcgtcggtctgctcgccgtggccgcagcacctgccttcgcgcaggaagcctcctccaacccgatcgacctcgatcgcgtcagtgtgaccggctcgcgcattgcgcgtacgggctttgtgaccccctcgccggtcacggccatcaccgccgaggagattcgtgccaccggtgcgaacaacatcggcgatctgatgacgcgcctgccagcactgacaccgacctacacgctgggcaactcgacccgcttcatcggcaccgccggcgtgggtctgatggacctgcgtggcatgggcacctcgcgcactctcgtgctggtcaatggccgccgccacgtcggcgcgacctcgggttcctcggccgtggacgtcaacaccatcccggtggaatggatcgagcgcgtggaagtgatcaccggtggtgcctcggctgtgtacggcgccgacgccgtggctggcgtggtcaacttcatcatgaagaagtccttcgacggcgccgaagtgcgcggtcagaccggcatggccagcgaaggcggcttcaaccgctccttcatcagcgcctcggccggcaccgacttcgctggtggccgcggcaacgccgccgtcgcccttgagtacagcaagcaggaccgcttcgtccgcaccgaccgcgccatcggcaacgagttcctggtgtcggtgcgcaacccgaactacgacagcagcaagccgtccagcgaaagcaacccggaaaccgtgcttgcaggcccgggcggcaaccactcgatctccttcggcggtaccttcaacattggtaccttcaacccgaacaatccggctacctggggcaaccgctatcagttcaacccggatggcaccttccgcaagcagcgctacgacggcaccgtggtcagcgcaaccagttgcgtgaactgtgatttcgccgacctgaactcggttgccgacctgcagccgaagttcgaccgcaagagcatcaacacggtcgtcaacttcgacctgaccgacaaccaccgcctgtacttcgagggcaagtacaccgaaacggtgtccgacttcctggcacagccgtcgttcgaccagaccctgcgcatccagcgcgataacgcttacgtgtcgccggaattgcgtgcactgatgaccagcgccggcctgagccagctaaccctgagccgcttcaacgtcgacgccggccagcgtggtgagcacgtggagcgcaacacccagcgctttgtgctgggcatggaaggcaacctgaccgagaactggacctacgacgtttacggcaactggggccagagcgaagtcaagcgctggaacctcaacaaccgtatcaacgagcgttggcaggctggcctggataccgtggtcaacccggccactggccagatcgtctgccgcaccacgctgaacccgaacgcgaccaaccccaacaacggcaaccgcgtgtactcgcagttcgcccgcgaaggctgcgtgccgttctcggtgttcggcaacggcgcggtgacccaagctgcacgtgactggatgaacgtcaattcgttcaactactcgcgcctgcagcagtcggtgttcagcgcatcgctggccaacggctcgctcttcagcctgccggccggtgacgtcggcgtggctggtggcgttgaataccgccgcgaaaagagccgcgaaatcaccgatccgctggccgcgcagggcctgaccttcctcaacgccattcccaaccgcatgggcaagtacgacgtgcgcgaggccttcgttgaaaccaccgtgccgctgctggccgacatcccgggcatctacaacctgaccctggacgccgcaggccgctggtcggactacagcagcatcggcaagaccaccacctggaaggtgggcctggactggaccatcatcccgtcgctgcgtgcccgcggcaccctgtcgcaggcggtgcgcgcaccgagcatcggtgagctgtacaacccgcagagcgaaaacttcgccacggtcaacgacccctgcaactacctggccaccaacccgaaccgcccgaacaccgcggcggacccggcactgcgccaggccaactgctcggcgctgggcgtgccggtcggctgggtcgacacctacactgccacccgcccgggcgtcagcggcggcaatccggacctgaagccggaacgcgcacgcagcttcacctatggcctggtctggcagcctgatttcctgcagggcttcggcatgtccgtcgactactggtggatcagcctgaaggacgccattggtgcggtgaccgcgcagaccaatgcaacccgttgcgtggattcgccgggggggatcaacaacagcttctgcggcttcatcgaacgcgcaccggtgggcggcaagaccgatgctggcggccgcaccttcccggaatactcgatcagccgctgggttgcgctgaacgaaaacctcgcccgctcgcgtcgcgtcggcgtcgatctggaaatggactaccgcttcaagctggccgagggtgacaccgtcatccgcctggtgggcacccgtctgctgcagtcgcgcgagtgggccttccaggccttcccgaacgagtacgacgagaacgtcacctgggtgaccgatccgcgctggcgtggccagctgcagaccaagtactcgctgggccagtggcgcgcgtcgtgggacatgacctacgtcggcccgaacctgcgtgtgcagccgaagagctaccaggccaacccgggacagaccagcccgatccgcaacggctcgtacacgtaccacaacttccagttcggctaccgcttcccgggtgacaagatcgacgtctacctgggcatcgacaatgccttcgacaaggatccgccggtgaactacttcggctccgacgtcggttcggcgatgtacgacaacatcggccgttacatgtacatgggcgccacctacaagttctga

SEQ ID NO: 509930 - DNA, 864 bp, Stenotrophomonas maltophilia
atgtcctgggatgcgatcatcatcggtggcggccacaacggcctggtctgcgcggcctatctcgcacgcgctggcaagaaggtgctggtgctggaacgtcgtggcgttctcggcggcgcggcagtcaccgaggaattccaccccgggttccgcaactcggtggcgtcctacacggtgtcattgctgcagccgaaggtgatcgacgacctgcagctgcatgcgcatgggctgcgcatcgtcaatcgcccggccaacaacttcctgccattgccggacggccgctacctgctgtccgcaccgggccgcacccaggccgaggtcgcgaagttctccgagcgggatgcgcagcggctacccgaatacgaagcgcgcctggagatcttcgccgatgtgctgcgcgcgtgggccctgcgcacgccaccggatgccggcgttgcgggtggttggcgcgcgttgcctgcgctgtggcagatgggtcgtcttggtcgtgaactggccacgctggatgcctcgctgcggcaggagctgctggacctgttcacgctgtcggcagccgagtatctggatcgctggttcgaaagcgaaccgatcaaggcgctgttcggcttcgatggcatcgtcggcaactacgcaagcccctatacaccgggcagtgcctacgtactgctgcaccacgtgttcggccagtgcaatggcatgaaaggtgcgtggggccatgcgatcggtggcatgggcgcgatcagccaggccatcgccactgccgcgcgggaggccggggctgagctgcgcgtggatgccggtgtgcaacgcctgctgatcgagcagggtcgtgtcgtgacgtgttcggccagtgcaatggcatga

SEQ ID NO: 509931 - DNA, 504 bp, Stenotrophomonas maltophilia
atgcgttcttcccacggcttccgcaccgccccaatcccctctggctgggtccagaccggcgagcgctgggcgctttggtacaacggccgggagacggccagcgtcacgcccgacggcggttccggggtccggctatggatggaaggccagaagatgtggcaggtgaaggaagtgcgcgcggccaacgtccggcaggcgaagcggtacgccgagcgctggtgcgcggccaggctgtatcccgatcttcccctgcgccaggcggtcgcccggctgaccgacagcactccgatccagcccgagccgccgctgctaggcctgccgccgacgcgcgagcagcagcaacaggcccggcgcctggccgaggccgggcggttggaactggcgcggatcaaggaagcgctggaaccgcgccgaccgccgaaggagaccaagcccagggcgagggatccgatgaaggcatgggtcaaggcaggtagagagcagctgtcccgcgctcgaatctga

SEQ ID NO: 509932 - DNA, 447 bp, Stenotrophomonas maltophilia
atgatgaacgctaccaatcgaaagaccgccagcttcggagtgccgtgggaatcggcctacgggtacgtacaggccgtccgcgtcaacaacacgatcttcgtgtccggccagctctcgcacacgccgcagggcgagctggttgcgccggcggagctgggggccgacggcaagcccgccaacttcgataccatggaagcccagatgaggcgcacctacgagaacgcgcaggtgctgctggcagagctgggtgggtcgatcgcggacgtggtcgaggaaacgctgttcgtcatcgacgttccggccgctttcgcggccagtagcaaagtccggccggccgtgtatggccagccggtgccgcaggtggccagcaacctgatcggggtctcggcgttggccttccccgagcagctgattgagattgccttccgggcggaagtccagggttaa

SEQ ID NO: 509933 - DNA, 462 bp, Stenotrophomonas maltophilia
atgaatcgagcgaactggttcgtagtctctcccgagggcgccaaagccgtggggcaactgcatcactttgtgaccgcgaacacatctctgccgccgaaactggtgcatctggtgtttttgcgtgtgtcgcagctaaacggctgcgcccactgcatcgacattcatacccgtgatctgcttaaggaaggcatgccgttcgacacaatcgctctcctacctgtttggcacgaggccgcctatctattctccgaacaagagcgcgccgcactggcatgggcagaggaagtgacgctcgtgagcgaaacccatgcatctgatgaggcgtacgaaaaagtagccgcagtattcggcgagaaagacctggtcgacctcacgctcaccattgcggccatgaacgcgatcaaccggatgggcgtgagcttcagattgaagccccgcgccaagcccgctgcggagaagtag

SEQ ID NO: 509934 - DNA, 138 bp, Stenotrophomonas maltophilia
atggcaccacccgatccttcctcgacgatgctgcatatccgcgaggtgatgcccgcctcgggtttcatcgacagcggcatcgggcatggattggacgaaggcgatccggagctgatctaccgcttttccggcagctga

SEQ ID NO: 509935 - DNA, 642 bp, Stenotrophomonas maltophilia
atggccctgcatacctggtggtggttcctggccacggtcttcgtgctgtgcgggacgcctgggcccaacatgctgcacatccttggccgcagcgtcgggctgggatttcgcggcagcgtgccggccatggccggctgcctgctggcgatgctgctggtgctggcggcttccgcagcgggcctgagtgcgctgctgcattcctcgcccatgctgttcgaggtgctgcgctatctcggtgtggcctacctggcctggctcggcatcaaggcctggcgcgacagttgccggcccgcacccgcggtggccgatgctgacgaggtcacactggcgccggtacatggcgcaggaacggtgttccgcggcggcctgtgggtcggcctgagcaatcccaaactactgctgttcgccgcagcgttcctgccacagttcgtcgacccgtcgcgcagccaggccgtgcagtacagcgtgctggtggcgaccttcgcggcctgcgaactgttctggtacgtgatgtatgcggccggtggtcacggcctgcgccgttggctcgccaagccattcgcacggcgctggttcgagcggctggtgggaagcgtgttcctggctttcgcagtggcgttgttgcgcttccggccgcgttga

SEQ ID NO: 509936 - DNA, 1359 bp, Stenotrophomonas maltophilia
atgtcctctgaagtcgccgtggccgagaccgtcatcgaggtcaaaggggttggcaagtcgtaccacatgtacgaacgtccttcgcaccgcttgtggcaaacgctggcaggcaagcgcaagtccttctacaaggatttctgggcgctgcgcgacgtgagcttctcgatccgccgtggccagacagtgggaattgtcggtcgcaacggctcgggcaaatcgactctgctgcagatgatcgccggcaccctcaatcccaccgagggcaacattactgtgaaggggcgcgtggccgcgctgctcgaactgggcagtggcttcaaccccgagttcaccggccgcgagaacgtctatctcaacgccaccatccttggcctcacccgtgcgcagatcgaccatcgcctggagagcatcctggccttcgccgatatcggcgagttcatcgaccagccggtacgcagctactccagcggcatgtcggtgcgtctggcctttgcggtgatcgcccatgttgacgctgacattttgatcattgacgaagcactggcagtcggtgatgcctttttctcccagaagtgcatgcgcttcctgcgggaattccagaagaccggcacgctgttgttcgtcagccatgatgcggccgccgtcaccaacctgtgcgagaacgccgtgtggttgcagaacggccgcatgcgcctgtccggcacctcgcaggaggtggtcgaggcgtacatgaccgagcagcatgtggtcgggcggcgtgaggcgggtgatgctgagatcgtcgtggaaaagaagcagcgcaagcttgtttccgatgcgccggacttccgccacgatgccctgctggaagccggtgttgtcaatcggatcgcgctcttcgagttcgacccgaacaacgtgggccaggagttcggtgcacgtggtgcacgcatcatcgatgtgagcatgaccgacgagcaggggcggcgggtcggcgttctggagggcggtgaactggtaaggctggagatccgcgtggagttgctgcagccgctggagaacctcatcgtcgggttctatgtgaaggatcggctgggccagcgtctgttcggtgacaacagctacttcgcttgccgggagacacccgtttccgggcaggccggaagcatcgtccggggcaccttcgtgttccgcatgccgatcatgccatcaggctcctacatgattgatgctgcagtcgcttccggtgatcagcatgaccatacgcagcagcactggatccacgacgcgctggagttccgcgcgatggacgaaacgatgcgcttcggcctcgtcggcctgccgatgctggccatcgaagtttccaaggagtctcaatga

SEQ ID NO: 509937 - DNA, 594 bp, Stenotrophomonas maltophilia
atgacagtgctgccaaacgtgccgggcttcgtcgccgggccggtcacaaggcggcccggtgcgccagtacttttccttgatcgggacggagtgatcaacgtcaatcacggctacgtgcatacaccggatcggactgagtgggttcccggtatcctgccgctgctggccgatgctgcgcgtttgggctaccaggttgtggtggtgaccaaccaggccggcatcgcacgtggcttctacagcgtcaatgacttcaccgactacacgcactggcagcacgagcagttgctgcaggccggcgcgccgctgctgggcacgtggttctgcccgcatcatccccaggccggccagggtgaattcaagattgaatgcctgtgccgaaagcccgaaccgggcatgttgctgaaggcgatcgaggagttttcgattgacccggcgcaggcggtattcgttggcgacaagatctcggatatgcaggcgggggcggctgcaggcatagggaagctgctcctgatcgcaggcgacatcggcaagggtgctgcgccgcagcaggccatcatggtgcctgacctcgctgcggtgcagcgtcagctgtag

SEQ ID NO: 509938 - DNA, 882 bp, Stenotrophomonas maltophilia
gtggcgcgcttcagatctgtgtcgtcgacgggtaactgtctgctgtgcaatgagccggccactgccttcagggtggttgatggcgtgcagtatcttgaatgtggcatctgcgatttcatattcgccgacccggcgctgatagcatcgatcgatgctggccaatctccccgggaatacgacgaggactactggcgctccgaattgcagtcggcacgtgaccggtctttcgggtcgtcgttggcaaggttgggggaggcgttgctctactgctccattcccgtccagcgcttcatcgatatcggcacgggaccgggttttctgctcgatgcggtgcagcgctacctgccgaagagttcgcattgcttctacggcgtagagaagtttccacccgagccggcgtaccgctccagccacgcgaattacaggtgcggcgatctggccgacattgggatgacgttcgaatgtggtatctgcgtggaagtagttgaacatctgaccccgtcgatggcgaggtcgttggcgagctccctacgcaaggtcgcggctccgggggggctgtttctgttcaataccggactgactgagtatgtacggaccgaggatccaggctaccttgatccgttccaccgggggcatatcacctgctggtcggaaagcgctgcgcgccggctgttcgagcctctgggcttccgcgtgctcccgctgcagggcaagagctgggctttcgtggtcgaagtcctttccggcgacccacgccagcaggttccgctggctgatcgcatctggtcggcgccgcaggccaacgtcgatcttttgactgatgaggacatggggacggtcatgcacatcctggcccgggagagcgctcgggcttacatctag

SEQ ID NO: 509939 - DNA, 1893 bp, Stenotrophomonas maltophilia
atgtttaacaagatcctggctgtaaagacggtggtgcgcctggtggacctggcggccatcgcagcgatgacgttcgcgctgtccatctacttctatcatccctattacttcggcgacgagatgttctccttcaacttcggagagcacagcggcaacaccctgatgggggttttcaccgggctgaacagctacaagccacgcatcgtcatgaacttcatctgggcggtcatcgtctcccaggatcttccgcgctggatgaccatgctggtcaattgtgcggcgttggcaggatgtgccgcgctggtctacgggatcgcgcgggtgcatttcaatgctcgccgaagcgctgccctgttggctgcggcgatgatggtggcgtgtcgtttcaacatcatgctgtacttcgactacgtttcgggaacggtcgaggcgctcagtctcctgttcctcctggccggtgttgccgtgtccatgcccggtctggtgttcctgcagcaccagcgcgcttcctgcctgggattggcgctgctgctcttcatcctggcggtgttcactcatgagcgctacgcattggcgctgctgggcctgtccggcgtggcgatgctgcgctggtggcctatgcgcaggtcagtcggcgcccggcccctggtattcgccctggtcactgctgttgttccgctcggcctgtacatcgttgccgtgaaagtgctgtccaaccagccggtggcgatgggtacctccggacagactgtcagcgtatcgctggacacaatgaaagtgtcggccacctacttggtcaaccttttcctgggtggtaatcacggcccacagtacttcgttggcatgttcaaccatgcggcgccccgctacatgtatctctttgtgccgctggccgcagtctccctgttggcctggtgcctgccgtggctgcgcccgcagtggcgttcgacgacctacttcatgccgatgctggccttcctggccgcgattgtcggcctggttgcgattgcgagcctgcccggttcagcgcggcaggaggcccgctggatgtacccggccatggcgttcctgctgctgtttgtctttgccggctatcggcaccgggcgcagatcatcatcctgtcggtactggccgtcacccagttgttctacctgttcttcggcagtatgtggtcgattgccagcatcaccggcgcgcgtctggccgtatccatcagcgattcgctgagtaccctgcgccaggctggagacggtgtggtcgtagctgggcccgagccggacatcagctgggtgctcggtgaagatggcaaggtctattgccgccttaacctgccgaaggggcattgcctctatccgcgtgccgaattcagcaagggtaatgtcaaggaattcagctatggccttgtggtgggtgagcccaatctgcgcggccgtccgggattcagcgtgatatccgctgaacaggccaagcgtctgatggatcctgcggcgttaccagctcctacccatcagctgggtgggggcaaggagtggccggaatggatgggtattccggatgaacgggtaagcagcgagggattggagctccgcggactgtcggaagtgacccgtcggcaggctgctgaggaacttgatcgccacattgtcctgtacaccgcccagtctgccaatgggcagcccggcaggatgcgcctgcagatcaattggcatggcgcggacggcgggttcatttcgactcagatcgaagtggtggatgtggggctcgtgccccgttcctatcccctgctggcagttgcccccagcggcgcgacccatgcctatgtctatgcgacgctgcctgacgaccactcgggtagggtgctgctgcgcaacatcggagtggccaatccttga

SEQ ID NO: 509940 - DNA, 417 bp, Stenotrophomonas maltophilia
gtggtgtggaaagtggagcaggagaagattgttcgcctcctcaaatccgagaagttgcgattcctgattgtgggcgcgggcaataccgtgatcggctatgcctgcttcctgctgacgttcgcactcatggatccctgggcaggcccggtcgccattcttgtcgccgcctatctggtcgcacttcccatagccttcgtcaatcagcgggtgttcgtgttccgttcacgggcgccctgggtacgcgagttcggccggttcctgctggccaactccacgatattcgcaatcaatgtggtagcactgccgatctgcataaggctctctgaaggtgacccgcgcgtcgtccagggagtgttcgtgatggtttcgactgtcgcgagctattttgctcacaagtatttctctttttcccggtga

SEQ ID NO: 509941 - DNA, 1131 bp, Stenotrophomonas maltophilia
atgcgtcgtattccgttgttgattccgaggatgccgtctgcggacaaggtgtatccgtatctccgaaagattgaccagaatcggatttacaccaattacggccctttgaacgccgagttcgagcagcgcctagcgaccgaactcggccaggggcttgagccggcccatctgacgactgtctccaactgcaccgtcggtctcgagctggctatccaggcgcttgccttgcgtgcaggcgcgcgggtcctgttgccctcgctcaccttcgtcgccacggccacggcgattgtcagggtgggggcgaccccgctgttcagcgacatcgacccttccggctggtgcctgactccggccattgccgaggaggcgctggcgcggggtgagatctttgacctggtgatgccggtcagtacattcggcaagcagcacgatgtcaccgcctgggatgacttcagcgcaaagaccggtatcccggtgctgatcgacgcggcaggtgccttcgggaaccagccgatcggccgcacgacggacgttgtgttcagcttccacgcgacgaaatccatcggcagcggtgagggcggattgatcgtgtcgttcaatgccgagcgcatccggcgcatccgtcagttggccaacttcggcatcgacgccgcccgtggcgagctgatcggactggggaccaacggcaagctcagtgagtatcacgctgcagtcgggttggcggcactggacgagtggcccgacattgtcgagcagcggcgcgagctgcatgcccgctacctgcgtaagctgcagcaggcctgcccgagcgtggggctgcaagaaaaggatcccgatggtatctatccgctgcttccggtgctcctgcctgacggtgtcgacgcgctggccatcggtgacgcattgcgcgagcagggtatcgatacccggcggtggtactgcccgccgttgcacgcgcatggcgtgctggcccatttcgaccgctcggactcgctgggtgttaccgctgccatcggcgaccgcatcctcggtctgccgttcttcgccggtatcactgacgaggagatcggtaccgtggtcgattcgctcgcacgggcgatttccaccgagaccgccggagtcgtccagtga

SEQ ID NO: 509942 - DNA, 957 bp, Stenotrophomonas maltophilia
gtgagcacgatcagctacgtcattccggtctatcacaatgaaggttcaatcgagctgacctgggctgggatccgcgacctgttcgccaccagcctgcccgaacacgactacgagatcgtgttcgtgaatgatggctccaaggatggctcccatgcagagatgctgcgtgtcagtgcgcaggatccgcgcgtgcgatcgatctccttcacccgcaacttcggccagctgtcggctacgttggccggcttcgacgccgccagcggcgacgcggtcatcaacatgtccgcagacatgcaggatccgatcgagttgaccgccgagatgatccgcaagtgggaacagggcaatgaagtggtcatcgcgcatcgtgcggaccgtgaggacaacttcacttcctcgatgttttcccgcattgtctacggcatcctgcgcatgtccaacccgaacatgccggcgggcgggttcgatttcaccctgatgagccgccgtgcgctgacgctcttcatgagcatgaaggggcgccatcgtttcttccagggtgacgtgctctgggccggcttcccgaccgcctacattccgtacgtgcggcgcaagcgcgagatcggcaagtcgcagtacaacttcagcaagaagctgaaactggccttcgatttcatcatcgacggttcctatcttccgatccgtctcatgtccttgtccggcaccgtgctggccatgctggggctttgctatgccgtcgtgatcgcggtctcgcgcctgttcgacctgacgccgttctcgggctgggcgccgatcatggtggcgatcctggtggtgggcggcatgatcatgttgatgctgggtgtcatcggcgaatacctgtggcggattctcgacgagatccgtgccaagccgatgtacatcgtccgagaagatacagctgaaaaggctgccatttccaagaatgagctggagtaa

SEQ ID NO: 509943 - DNA, 243 bp, Stenotrophomonas maltophilia
atgagtaacaacgacgagcgactggtatcggtctattcggctgccctgaacatcgacgcttcccgcgtggtcgatggcctgctttacaacagcattccggaatgggattcgattgcccacatgctgctggtttcgcagcttgagaatgagttcgatgtcatgttcgacactgatgacatcatcgatatgagctcggtcgccaaggccaaggaaatcctggcgaagcacggcgtcgagttctga

SEQ ID NO: 509944 - DNA, 753 bp, Stenotrophomonas maltophilia
atggccggtttgctggaaggaaaggttgcccttatcacgggggcgtcccgcggcatcggagaggcaacggttcgtgcctacctgcagcagggcgcacacgttgtggcgactgccagggacaccgccgctctgcagccgctgctcgacagcgtgcgcacgagcatgcctgaggcacggctggaggcggttccgcttgacgtgaccgatccggtttccgtgcgtgatgctttccagtccgtgttcaagcagcaccgccggctggacgtgctcgtttcgaacgcgggcgtcctgcaggatgcccttatcggcatggtcacgcccgagcagatccaggcggtattctcggtcaacacctatggcgtcctgtattgtgcccagtatgcgagccgactgatggcacgcaacggtggtggctcgatcatcaatcttgcatccatcatcggcgtgaccggcaacgttggccaggcggtctacggtggcagcaaagcggccgtggtcggcatcaccctctcgctctccaaggagctcgcgccgaacaacatccgcgtcaatgcgatcgcgccaggattcatcgacacggacatggcgcgctccattggttcggagaaatatgccgaacgcgttgcgtccatcgccatggaccgggtgggtgcgccggcagaggtggccaacgtggcagtcttcctcggatcggatctggcgtcctatgtgaccggtcaggtgatcggggtcgacggcgggatgctgatctga

SEQ ID NO: 509945 - DNA, 1392 bp, Stenotrophomonas maltophilia
atgttcgcccgcgtactggaacagcacggcgaccagattgccgtgatccttcccggcggagagtcactggcataccgcgaactggccgcgcgcgcggacgctgcgtgggctgctgtcgatccggcctggggcgtcatcgccctcgaatgcgccaatacgctggacaacctgctggcctatctgggcgcgctgcgtgcagggcagcccgtactgctgctggatgcctcgttgaacgacacactgcgcgagcaggtcattgatcattacagcatcagccacgtgcgccgtcctgatggccagtggcatgcaactggcaggcgcgcggccgccgtttctgctgaactggcagtcctgctgccgacatcgggtagcacgggatcgtcaaagctggtgcgtctttctgcaggaaacctgcaggccaacgcccagtcgatccaggattacctggggatcgacagcgcgcagcgggcaatcacctcgttgcccatgcattactcctacggtctgtcggtgatcaacagtcacctgctggccggtgcgacgttgctgctgactgccgagtccgtggtttccaggtcattctgggactttttccggcagcacgaagcgacgagtctctccggtgttccgacccactacgagatgctgaagcagttccgcttcgagcgcatgtcgctgccttcactgcagaccctgacgcaggcgggaggccgcttggccgagtcgaccatcgagtggttccacaacttggccgagcagcgcggccagcgcttcttcgtgatgtacggccagaccgaggccacagcccggattgcctatgtcccccatgacgtgttggccagcaagatcgggtcggttggtgttgccattccaggcggaatgctatcgttggtggacgagcaggggcgggccatcgagcgggccggtgaggtgggtgagctgcgctatcgcggcgcgaatgtgatgctggggtacgccgagggtcctggcgatctggcgttgggcgacatccagcagggtgtgctcagtacgggtgacctggcgcgttttgacgacgacgggtactactacgtggttggccgcttgaagcggatgatcaaggtattcggcagccgcttcggcctggacgagatggagtccaagctgcgagccgatggctgggatgtggtcatgaccggacgcgacgaccttgttgtcgcgatccttgtccggcctgaggatgatgcctgcgagcgtctgaggcgggatatcgcggcgcgctacaagctgaatccaatcgcggtgagggtgctgccggtcgacgccattccgctgtcctcgtcgggcaagattctgtatgcagatctccttcaacaggctgaggcaggccaaggggcggcccgtgcaacgtga

SEQ ID NO: 509946 - DNA, 1149 bp, Stenotrophomonas maltophilia
atgcagatctccttcaacaggctgaggcaggccaaggggcggcccgtgcaacgtgattactttgacctgcctgtctatggcgtcggggctgccgagaaggaagtcctgctcaagcagctgctgagcagcttgaccgtgcatcatgccgagcactgcacgccctatgcgcgcgtgctgcaggcccacgggcatacgcccggctcggaacaaagcgtcgaccagattcctttcctgcccgtacgcctgttcaaggagttcgagctcagctcgaccccggccgatcagcgcttcaaggtcctcacctcgtcgggcacgacgtcgcagacggtctccaggatcatccttgatcgcgatacggcggctgcgcaaacgcgcgcgctggtgctgatcatgcagcagttcctcggcaaggcgcgcctgccgatgctcatcatcgatcatcccggtgtggtgaaggatcgcgccaatttttccgcgcgtggcgctggcattcttggcctgtccaattttgggcgtgaccatacctacgcattgaacgacgatatgtcgatcaatctcgaggcagtgaatgcgttcctggagcggcatgccggccagcgcgtgttcctgttcggcttcaccttcatggtctggaagtactttgtccaggcgttgaaggggcgcagtgatgtgccgcggttcagtgatgccgtactcatccacagtggtggctggaagaagctgcaggatgaggcggtaagcaatgaagagttcaagcggtcgctggccgagagtttcagtatcggcgctgtgcacaatttctacggtatggtcgaacaggttggttcgatcttcgtcgagtgcgagcacggtcgcctgcactgtcctgcctttgctgatgtgaagatccgtgcgccgagcacgtgggagcctctgccggcaaacgtgccaggccttatccaggtgctgtcggtgttgcctacgagttacccgggccatagcctgctgaccgaggacatcggcgagtggaccggcgtggacgattgtccgtgtggccgcctgggccgcacgttccgcgtgcatggccgggtggcgcgcgcagaactgcgtggttgcagcgatacccatgctgccgatgcggcaaccgccccctttgatgcacgcccatga

SEQ ID NO: 509947 - DNA, 1209 bp, Stenotrophomonas maltophilia
atgagtaattacgagtcccttatcgcgacggcccctgacctggaggtcttggccgaggcccctccgcttcccgcgttcgccgagccctcggtggcattcgtcgatgctctgtctgcagagctgttccgcatgccggaggcacggagttatcccgagctgagcgcgctggcattctggatgcggcgctcgaacatcgtgcggctgaaggaagcccatggtcgccgtcacgacggtcatctgtcagtggcacgcggaacggttctgcatttcgcgccttccaacgtggacacgatctttgtctactcctggttcatttcgctcctgtgtggtaaccgcaacatcgtcaggttgtcgacgaaggcatcggtgcagaccgacctgttggttgctgccatcggccgggtaagcacgcgtcctgagcatgccgagattgccaggcgcagcctggtggtgcgctatgcggctgatgctcgcaccactgcattgttgtccgctcactgcgatacgcgtgttatctggggcggcgatgcgacagttgcagccatccgtcaggtgcccttgccaccgactgcgaccgagattgcatttgcaaacaagttctcgctcggtctcttcgatgcggccggctggatattcgcttcgcccgagcagaaggcgcgctggatcgatgggttcttcaacgatgcctattggttcgatcagatggcctgttcgtcgccgcggctgattctctggatcggaagcccggcgcaggtggatcaggcacgggacggcttctggcccgcattggaacagaaggtacgggaaaagggtgtttccttcggcgacgtcgactatgtgaacaagcgaatcgcgcaggatgtgctttccatcgaggccgatgtcagcattccggcggcgagcggcaacaatgttgcgcgcctctggcttgaggttccggcattgcatgccgatgcacattgcggtgcgggactcttcttcgagtctcgtattgcgcatctggatgcgcttcgcccactgctttcccgcaaggttcaaacggtttcctacctcggtatgccatcggatcagctgcggtccttcgtgcagcaggcgccgttggccggtgttgaccgcttcgtaccggtgggaagtgcgcttgatttcagcagtgtctgggatggttttgatctgatgaccgtgttcacgcgcgaaatcacggtcgcctga

SEQ ID NO: 509948 - DNA, 666 bp, Stenotrophomonas maltophilia
atgccattgcttaatgatcgtgccatcgattcggtggtgattgccggggccggtggcttcggcatggaagtcttcgattacctcagtgcagacgcccgcggtggcgggccgatgatctccggattcattgatgacggtgcagataatccgattcctgcccagcttggttcgacccaccttggggcaatcggcgactatcggcccgtagaacgcgaagctgtggtcgttgcggttggctcggtgaagggacgtcgactcatcctgtcacgtctctgggagatgggggtgtacgctcccccgttcgtgtcggccaacacggtgatctctccgaatgcgcagttcggggatggtgtactggtgtgtcccttcagcgtgatcaaccgcaatgcgacgctgggccggggagcggcggtgaacgtgcattgcagtgtgggccacggtgcccatgtcggggagttcagcatcctttctccctacgctgcgctcaatggcgatgcgtcgatcggcgacgattgcttcctgggtacccgcgcgacgatctatcccaggacccgtttgggagccgggtgcattgtcgacagccataccggtgtgcgcgcaagtgcaggtgatcgccagatggtctccgcgcgcggaacctatcaggtgatcgcgctccggacctaa

SEQ ID NO: 509949 - DNA, 2073 bp, Stenotrophomonas maltophilia
atgacggctgatgcagggcgcggttacgtaccgcacatcgatggactgcgcgcgatcgccgtattggcggtgatcgtgttccacctggatccggcctggctcccgggtggcttcaccggcgtggacgtgttcttcgtcatttccggtttcgtggtgagtgcttcggtgcaccgcctgccgccactgtcgctgggggcatcgatgctgcgcttctacgcgcgccgcatccgccgtatcgctccggccctggttgcctgcctgatggtcaccgcggtggccagcgtgctgttcatccccgaatcgtggttgagcgaggccagtgacaagaccgggctgatggccttcttcggcttcagcaactgggtgttggccgcggtgggcaacgactacttcgcgcccaaggccgagttcaatccctatacccacacctggtcgctgggtgtggaagagcagttctacctgctatttccgctgctgttcctggcctgggcacggggcgcgcgtgggcgctggctcagcgtgggcctgttcgcgctggtcagcgtcgcatcgctgctgcatgcggcggtactgggcctgcgcgaggccccgccttcctgggccttctacgcaacgaccacgcggttgtggcagctgggcgcaggtgtgctgctgttccagctgttgcacgtgcgcgcatcgctcgatccactgacccagcgctcgctggcccgcagcaggtgggtgttctcgctgctggccgcgctgtcgctggccctgctgggctgggcgctgtggacggcgcgcgccgggcattcaccttggccggacggcctgctgccggccttcgcgacggcgggcctgctgtgggccctgcacaaccatccgcaggcctggatcggccgcgtgctggcctgcgcgcccatgcgccgcatcggcctgctgtcctactcgctgtacctctggcattggccggtgttcgtactgatgcgctggaccgtgggcctggatacgccgctgcagatgcttcttgcgatgctgttggtgggcgtgttgtcctggctgtcgtggcgctgggtggaacagcctttccgtggcccgttggcgccgcgggcgacttcgctgcgctgggtggtgatgggggcgctagtgttggtaggtgccggcgggatccagttcggcctctatcgcgaggcgcactggatttcgttgagcacggtcacccgacatcctgccgactggtatccggaaggtcgcggtgcggcggctgactatcccggttgcgaactggtggcaggcaagcatccgttcgctggcggcaatgcccgctcattcgcgcgtcgcgcatgcgaccacgcgcgggtcgagggtttcccgcaacggatcttcgtcgccggtgactcgcatgcgatggcatataccgaactgttgagacgcgtagcccttgagacgggcgctaccgtgatcctgtacgggcgcggtggttgcccgcaggtaagcctgcagcgatggcggggggctggtggtggctgcagcgactacgatgctgccgtgcgcgccgacatccagcaccaggcacgggcaggcgatgcggtagtgctggtgtcgctgcgcatgccgcgcctgtccgaccagtacatcctcttcgatgctgccgagaagctggcggatgaacgatcgccgcgtgcggctgaactgcgctcggccgaggtgcccgaggagatcgcgctgtggaagcctgtggccgaacagggcgtgcgtatcgtgctggaagcgcccaagccggtattgccggcaccgccgtatcgctgttcagacaccttcaacgccaggaacgccatttgtcgcaatggtgtcgacagcacccgcgcggacatggatgcgctgcgtgcaccgatgctgggcagcctgcagcaggtggttgatggcctgcccggcgcagtgatgtgggatccgctgccggtgttgtgcgatgccaccctgtgcccggcacagcgcgatggccggccgctgtacttcgatggcgatcaccttagtggctatggcaaccgcgtgctgctgccgtcgctgctgcaggtactgcggcagcactga

SEQ ID NO: 509950 - DNA, 1845 bp, Stenotrophomonas maltophilia
atgaacttcaagcacctcagccttgcgttggcggcactactgccgtcctgggccagtcttgcccaagacgcagccacttctcagcaaaccgcagcggcaaaggcccatatcggcttcctgagcccggcatcaaacgcctaccgcgagctgctgccgggcaactatacgaatctgtacttcacgctacgcaatgatgactggcaggaccgggtgcggctgcccacctcgctgtcgttgtccgagcgttccatctatctggccaacctggcgacatcgccccgccatctggaggtcgacggtgtattcacccatctgccctcagaggtcagaaaggtgatgttgcccgccggccagaacctggccgtcagcaacaggatgagcatggcctggcgcctgtccccgaagcacctgcgcgagatcaatggcccgaacgaagcgcgctggcgcattccttcaaacggacgcaagctcgcaacggtactcaatctccgtgatgggcagcatgtcggccaggtgggcctgcccgacggcgcacactcctatgacacggttaccattcggcacacggcaacgtggccgagctcggtcatcgcagccgatacgcagttcccgcgctcgaacctgcggatcgagtcgggtgacgtgcaccactacgtctttgatcccttcttccgcgtgtggaaactgaatcatgcaacctatcgccccgtacttccgaatgacgcatcgcgaaagacgagtacggcacgcacactggtcacggccaccaacgagaacttccggggctaccatctgaatttccccgatagcccctcggaccgtgatcgccggaggttcaagatcgctgactcgaaggtgatcgacccaggctatggactgaagatcagcgctggcaacatctttgatcgcgaggcccacatctggacccgccctggcgaagcgttcgagttcatcttcgtcaacgacaacggccctggctccggttactggcacgcacttcgcttcccggtacagcgcatcgacgtcgacaaggagcgtggtggcgaggtcgacaacgccgccgcacagctcacctgggtgtccacgggcgggggcacggtcacattgccgaatgcgcaccagcgcctgacacgcttggtggtggagaatgtcaccggcgtccggccgcatccgacaccaaggacgaccacgattgtcggccccggagtgtcggacaaaatcctgccgggcgagcaggtgtcctatcgcctcagggactacaagtggattcgtgaaacgaccactgtcgacgtggtgtttgccgtttccgaccgcctcggcgagatcggttcgaaggacatggcactggaattaatgcgtgaaagcctgaagaagacgaacgatgcactggacaactccggcgcgaccttccgcttccgtgaagcggcggtgcgaaatatcaccgtgccgtactacctgccgacctatgccattcccgagtggatcgccaaccacgcatcgcaagtgatcagcgacagcggtgccgatggggtcttcttcggtggcgtggccgatggctgcaacggcgtccaccactccaagccgcgcaagcagtttgcggtggcaatgaacctgctctgctccaccgacatgcttcgtgaggaaatgggcaaggcactgggcttgaaggtcaatggcatgcagggcgttccggtcatcggcgccggcaacaagctgccgctgtacccgacgccgttgcgcttcgtggacgatggcaaccgcgccatcaaccccggccagcgcgacgaagtgcagcacatgaacggtgtcgccgccgaagtcgcccgctacggccacgcgcgttga

SEQ ID NO: 509951 - DNA, 267 bp, Stenotrophomonas maltophilia
atgcataacgagagcccactgcagacctgtagagccgagccatgctcggctgacggcgtgctgaccaacggtagagtcgactgtcagtcgactcgcgaagtgcagccgactagcagtcggctctaccagaaccaaagccagagcgaagcccaacaccacggcatcgaacagcaacgccagcgtgcccggcgcacggcgatgtgggtcggcgccatcgcggtgctggtctacgtcggcttcatcctcagcggggtgatcggccgatga

SEQ ID NO: 509952 - DNA, 1932 bp, Stenotrophomonas maltophilia
atgaccattcgcacgctgatatccgtgatttctccaaagacgcgttgcactgcgcgccgcaccccgctggcattggcgttggcaggtgccttgatgctgccagcagctctggctgcagcagcggacaggggggactgcgccaatgaagcaaccgatgcggagcgagagcgctgcaccagtgaccagggggtgacgtggtcgagtgtgcttgccaccaaggttgaactgggcgatgacgccgtagcggggggcgcgcgcgacattgccatcggcaattcagcaaggacggacagcttactttcgccgggcactgattcgccggactactcgattgcgatcggacccggtgcgcaggtcgtgggtggaggatcgctggctatgggcgggggcgcgagcgtgctcggggccccaaccaccaagatgaaggcagtagccctgggcaatgccagtactgtttcggccgaaggtggcgtagcggtgggctacgatgcgaccgccagccacagtaacagcgtcgccttgggagccggggcgaccaccaatgcggccaacacggtatcggtgggcaatggcgttgacaaccgccgcatcaccaacatggctgacggtgtgatcgctgcaggcagtgccgatgccatcaccggtgcgcagctgttctcgaccaatgagcgcgttgggcgggtggagagtgacatcgacacgatcaaggacgatgcctcgaagctgggtgcccaggtgggttcgctggagagcgacgttggcggattgcagacgcgcatgtccggcgcagaaggctcgctgaagacgctgagtgatgacgtcgcgggccttgctgacggctcctccggcatcgtcacccatgattccggtacgggcgtggtgagcgtggctgccggcaagggcggtactgtggtggatttcgcaggcggggatggctaccggcgcctgagcggcgtggccaacggcgtcaacgaagatgacgtggtgaccatcgcgcagctgcgggcggctggcgcgattgatcccgtcagtggtgagacgctgagcgtgctcacttacgacgatgcaagtctgtcccgggcctcgctcggcggaacgggtggcacggtgctggacaaggtcgccgccggccagattggccagttcagcatggaagccgtcaatggcagccagctgtggcagatgaatgccaactgggaagcccaatggcgacagatggacgaccggctgggttcgatcgagcgtgggatcgaggatggttccattggtggcccggggaccggaaatcccggcacgggcaatccgggtgtctcccccggtaccggtgagggatcggtggccattggcgaagggagcgatgcttccggcaagggcgcgatcggccttggcaatggaagcgcggcgtccggcgtgggcgcagtggccgtgggcgagggtagtgtggcctcgggtacgggctcggtggccatgggcgaaggcgccagtgcgacgggcaacaattcggttgctgtcggtgccggatctacggctgaccgcgacagtgagttctcggtgggctcccaaggcaatgagcgcgtcgtcagcaatgtcgcggccggcgtacgcccgaccgatgcggtgaacgtgcagcagatggatgatcgtttcaaggccgagcgtgagtacaccgatggccgcttcaacgcgatggacacgcggcttgaccgcatgggggcgatcagcgcggcctatgcgggcatggcaatcaacaccgccggtttgagcggcgacaaccgcgtgggtgcgggtgtcggttcgcagaacgggcgttcggcgttggccgtgggttaccagcggatactgggcgagaagaagaacgtctcggtgtccttgggtggcgccttcagtggtagtgaccagagcgtttctgccggcgcgggtttcagctggtag

SEQ ID NO: 509953 - DNA, 768 bp, Stenotrophomonas maltophilia
gtggccgacctgctgctggagcagggccagcgcgagctggcactgcgggtgctgtcgaacctggccgaaatggatctggataaccgccacctgctgcgcgtgctcggttaccgactgatgcaggccgatgctcccgcactggcggtgccggtgttcgagcaggtgctggcgatgggccaggaagaaccgcagagcttccgcgacctgggcctggcgctggcagcggccggcaagccacagcaggcactggcgccgctgtaccaggtggtggtgcggccgtgggacagccgcttcgatggcatcgccctgatcgcgctggatgagctgaccaacctggtggccggcagcacgccccggctggataccaccggcatcgacccgcgcctgttgcaggcgatgccgctggacctgcgcgtggtgctgtcgtgggacgccgacaacagcgacatggacctgtgggtaaccgacccgaacggcgagcgcgcctactacggcaaccggctgacctaccagggcgggcagatgtcgcaggacttcaccggcggctatggccccgaacagttctcgctgcgcaacgccaagccgggcaagtacaaggtggaggcgaactactttggcagccgccagcaactggtcaccggcgcgacgacactgatgctgcgtctgaccactcattggggcacggccaagcagaaggatcagatggtgacgatgcgactgaaggaccgtgccgagaccgtgctggtgggcgagttcgaggttaaatag

SEQ ID NO: 509954 - DNA, 198 bp, Stenotrophomonas maltophilia
atgctgatgggcgtctggaccttcgtcggtttcgtgatctaccggacgtgccaggagactgtcggaggcggggaggggggaggttgcgggggcgtgagccgcatggatgcggcgaccgagcttacagggatgtacttgcagcgtcccccgcaatctcccccctcctcgccaaaccctcagtccagctgttgctgttga

SEQ ID NO: 509955 - DNA, 213 bp, Stenotrophomonas maltophilia
atggccaagcgtaccggcgatgaccgctattggcagtggtacgagcgtatctgggcgtattcgtgggaacacttcgtcgatcaccggtacggcgcctggttccgcatcctcgatgccgacaatcgcaagtacagcgacgagaagagcccggccggcaaggtggattaccacaccatgggtgcgtgctacgaagtgttgaacgtggtgcgttga

SEQ ID NO: 509956 - DNA, 687 bp, Stenotrophomonas maltophilia
atgttgggaattggccagggcatcctcggcatcggcgccttcaagcagcgcctgccgcgcccggaagaggcgctaccggggcgtgaccaaccgctgccgctgcacagcaaccagcacttcgtgaacagccatccgctgaaggaccgtttcgccggcctgcagcagatccgctttgcgctgggctgtttctggggcgccgagcgcaagttctggaccgagccgggcgtgtacagcacgtcggtcggctatgcaggcggcatcacgccgaacccgacctatgaagaggtctgctcgggcctgaccggccacaccgaagtggtgcaggtggtgttcgacccggcggtggtgagcctggagcggctgctgcagctgttctgggaaagccacgatccaacccagggcatgcgtcagggcaacgacaccggcacccagtaccgctcggcgatccatgccaccgacgaggcccagtacagggccgcgctggccagccgcgaggcctaccaggcgcagctggctgcggccggctacggcccgatcaccaccgagatcgtgtacccggcaccggcgtactactacgccgaggactaccaccagcagtacctggcgaagaatccgaacggctactgcggcatcggcggcaccggcgtgagctgcccgatcgggttggatgtggaggcgccgcgctga

SEQ ID NO: 509957 - DNA, 705 bp, Stenotrophomonas maltophilia
atggtgtggatctacaatccctccatgccctcccccgccctgccctggaatggcacgctgctgctggatgctcacgtggccgtgttgcaggggcgtgccggtgacagcgatgtacacgcgcactatgcccatcagctgctgttgagcgaagccactccctggcacgtcgagatcgacggtgtgcgccagcagggccaacggctgtgggtgccgtcgttccggccgcacgcgatcctgtcggcaccggacgcgggctgcacggtgttccttgagccggcgcatgccgacctcgaacagatccagcagcacctgcactcgctgcccggcactgcggccgggctgcaccgctggctgccacggctgagccgcgcgcagccactggaccggcgggtagaggcggcgctggcccgcatcagccactacctgcctggcccggtgccggctgccgacatcgccggagccgcgcacctgtcgaccagccagctgcaccggcgtttccagtccgacctggcggtgaccctgcgcggctgggtgctgtggcagcgtttgcgtaccgcgctcgcgcaccacctgcaggggcacagtctgaccgccagcgcgcatgccgccggcttcgccgacctggcccatctctcgcgcagcctgcgccgcatgttcggcatcggtgccgcacagctgcagggcctgcagttgcgcgcgacctga

SEQ ID NO: 509958 - DNA, 693 bp, Stenotrophomonas maltophilia
atgggcgtccacccggcacctatacaccagctgctccttcgaagcaggattctgtcaatccggaaaccagtaattcagctgggaatggcaggctcactgttccgcaaggggggctgctgtccccccaggagactgggctccgggctgcgaataagatcagcggcaattgatgaagaggtaaatatgtctttggcttcgcgcgtgattcttctgatgattacgttggtagctgccggccaagcatttgcagaagggcgttgcccgccaggtcagtacccaatcggtggcccgggtgtcggtgggtgcgccccgattccaactgggggggagagcggcacatctgcgcccaggcccgacggccgttggatcaagacgtggggtgccatctctctgtcacctgcgtccggtgacatgggggcatccaagggtcataaggataagtcggcagccgagacagaagcccaagagcgatgtgcgcagtatggggcgaccgactgcaaagtcctgacaacttacaagaaccagtgcgttgcctacgcgaccgcgcaggaaggacggaaggtaaggacgaacacgggagcatcgcgcgaaagtgcaacccagaatgtgctggctgcgtgcagtaaggagagcattgggcaatgcaaggtgctctataccgactgcactgagccgctcttcaagtcttactga

SEQ ID NO: 509959 - DNA, 873 bp, Stenotrophomonas maltophilia
atgcgttcggacaccgcacctcaatcccccgccctgacggccgataacggggttgtcaccgcttgtcccgccgtgaccggcacggcgccgcccgcccgcttcgacctggtcctgctcgatgaatctcctgcatcgctggcaacactacttcagcaatctttccgtccggcgcaagctcaacctgctgacgctgctcatcgcgctcggcgtgatcgcgctctcggtgatcgccgcgcgcatgcagtacctggatctcaccgagacccgcaagaccgcactgaagacccaggtcgaactgagctacggcatcctgcagcactaccaccgcctggccgctaccggcgaactcagcgaagaggctgccaagcgcgccgcgctgcaggcattggaagtgatgcgtgcagagagcgatacctactatttcaacgtctacgacaccggctaccggctgctgatgcacccgttccgcaaggacctggtcggcaaggacatgaaggacttccacaccgacgacggcgtacggatctactacgaccaggtcgaagcggctcgcgccggcggcggcttcgtcaactaccgctgggccaagccgggcagcaagggcgacgtcgagaaggtcgcctacgccggcctgtttgcgccgtggaactgggtggtcagcagtggcgtctacatggacgacgtgcagaagcaggcgctggtgttcactgccatcatgacagtctccggcggcgtcctggtgctgatcgtactggccctgagctgggtcatcggcaatcgcatcgccgtgccgttgaagcaggccacggccgtcgccgagggcatcgccgccggcaagctcgacagccatatcggcccgcagccgcacgatga

SEQ ID NO: 509960 - DNA, 276 bp, Stenotrophomonas maltophilia
atggaaagcgaggttggcacactgtccgtggggaagcgtgccgacctgcagatcatccgtttggactcgttgaatctcgcaggctttggcggcggagacccttcagccttactggtctactcagcacgccccagcgatgttgacagtgtgctaatcggcggacgggtggtaaagatcgatggcggcttggtcgatgtggatctgcccaagcttctgcaggacgcggaagcgtcagcgcgtgctctcacgtcgagggtaggggaacccaagcaatag

SEQ ID NO: 509961 - DNA, 2061 bp, Stenotrophomonas maltophilia
atgaatactgcactaaagtttaatcacgagattcaaaggggcgctggcgcaactggtgctgcgattgcggttgaaactacgcctgagcaacttcgggtgatggggcggcatgaaatattgtccctccaagagcgtttgatgatggggtccgaatggttggtctttgaggtcgcgccggaacatattcgtccagggcatgtgaccttgagccagaggagctaccgtattgagttagcactcggggaggatttagatcgtcacggggaatttgctgagagagtctggtgtgagctcatgagggtggctatcgggctcaggctgtttccgaccgctagcgccaaggcgaagcgaccatcattctcatacatcatcaacatccttcgcaaatgtggaatgctgacgcgccgaatgagttcgaacttggagggagggttttggtcgacggtagatgagcgctgtgatggtcggcctatctctgacacgagcgttacaattcttaggcgtctccattctctgggcgccttgtccgattgtttgccaggcgatcccatgattcgcggcgaagcggcgccaaggcaccgtctgggtgagagcgatgttgtagcgccgcaggcatctgtacggcagtttctgccctttcctgacccatttgtgggcagggcaggtttcgctgcgatctttttttctactgaagtcggaccgactctacttgcagcgattgaggcagcaagcgagattgtattgcctcatgttgcccgcaacaatccgaacagaccgataagtgagaatcttaccaacggcggtaaacgacatcatcttacaccggctcgagacgaggtgatccggcattggcagtggagggattcgtctggcgcggatctcatggagttgcctatggatactgagttcgtatcgaaatggaacaagagtagtgacaggcagaacggagcattcgaatggcctcctaagtcgttctcagatgccatcacgctgctggtgctgctgcagggatgccatctgtggatcatcgcgctcgccacggccggacgacacggcgaagtgcaagctctggaggtcgactcacttcgccgggaatccagtgaagtcggtacgattggactgcctcgctggaagatcgggggggtgggtcagtctgctgaggagctgccgactcccaaactggtggttcaggtcataaagcagcaggagcggctcgcggcattcgccaagcgtgctggaaacgtgaatgggaaccacctgtgggtgcaagtcacgtcaagacggggagcgcctttggggggctttaaccacacgttgaagaatttcgcgaagaaattctgcttggaggacgtgttggacgatgatggcattcatatgcatcgttttcgaaagactctagtgagggccgtcgctctctcgttggtgcatgcacccaaagtactcatggatctgctggggcacgacgacgagcagatgacgattatgcgctacatcctgtctgatcccggcatacttgatgaaatccgggaggttgtacgggagataatgattctcaagggcgtggatgtaattcttcgctgcgacgagcttgagggcgcgggcgcggatgttatgaaggagagaattaatgagtatgcccaccgcctcggtaaatccgcctttgacccgcagaatttgcgtgaatttgcatcagcgatgacagagggcggtcaagggtgggcgattattgcccctggtgtgatctgtactggctttaccaagggtggcctatgtaacaaggggcagcccggtggcgcaaacccacatcactgcagtcctgcctgctgcaaccaaatagcgctctccacatttgaacgtgaggggggagagttggagtccgcgcatgatcttgcaatagctagtgttgactacttgttcgtaagcctccaagaagctgtcgatgcaggtgaggaaatgctcgtggcacaattctccggacagatcaggtcccttatggggagatggtcggcagtcgacaagcatacgaacgaccaccctctttccatcctccttgtgcagtag

SEQ ID NO: 509962 - DNA, 1527 bp, Stenotrophomonas maltophilia
atgttgttcgctcccctcgcgcaaaggaaggcgactccgaaggacactgcgacagaggaagagggcctacggatcatcagacacctgcggcaagaagtatcaaaaatattcgcggagtggcggcgagctgatgtattagctaaacagggccgggatttgcttgatattgcgacggcaaacggtggaacgctacccaaaggcttcgaaaccacagaggcggatgcacacgccacttttcgggcatttgtcaaacgtgtgggtagcccgactgcgagcgttcgagatttcaacaagtttacgatcaatccagaacgaaaatctcttcctctgtggtggccacgtcatgcaatcagttgcgatgttcgtggaacgaaaagagggggcatcgtaagctggaatgagtgtcaatcaggcgcgtatccgacaaccgtggaagtcacgactattgccctgctggcgctggcaaggacaggttggaacccctctactctacttgccttggattacgagaactggtgcgcggcgtatgatgaagaccactactggctccatgcggtaaaggagcgctctggtggcgcgcgccagtattcgatctcgcgacggcatcaggttactggaacgtatcagatcgtgaccaggctgatcgctcgaggcctgcccttaaggcaagcagccctgtcagacccaagccgccttgggctcttacagtcggaattgagcagcccttggttagggttgaatcagaccttcaatcgactgttcgtggcgaacgcggagaagagcgggtcgctaagtcgggcgatggcgattcatgtcgagaatgtcaacaaaaaactatctgatgaagagagagttagggctgttacccctagcgattttagggacatcgccgctgctgtgatgtacagggatagtcgctacaacgcatggatactgatggtgatgctgggtcacaagaacataagtactacgcgagcttacgggtttcgacattccgcgaggcaggagtctcatactcaagtggcgagcgttgtttctgacgtattcgagcaagttcgccattcaaaaaaatgggatcctgcgcttactcgagcaaagatcgaaggtatcactgtatctgatgatgcgttggcgcggctggacgactatcgagaagtacgtacctatgcgggagcactctgtaggaatccatacgaaccaccgtcgtctattgatccatctcatccgaaagatggcgctgctcgctgcattcaagggcacctatgcgtagcgcgcgcttgcccaaatgcaatcgtgctgaacgatagtttgagtgatatctgcaaaatgctggccgagctggaggctaagcgcttgatgctaggcgtcgtgcgctttgccactggtagtgagcaggcagacatggagtatctgcgaagaaccttggagcaatggccggaagagagcgtgcagcagaacctcgcttactggaggtcgagaatttccgagggtactcattatccgttgatgtttgcaggacagcgatga

SEQ ID NO: 509963 - DNA, 975 bp, Stenotrophomonas maltophilia
atggcctacgccgagttcaacaacatccccgatgtccagaccctgatcgacctggtggtgcagttcgcgcaggccaatggctggacggtcgagcgcaacacccttagcggcgccaaccgtaccgccacggtgcgcattccgggcgtctcggactacgtccacctgttcaacaccgaccagctgagccttaaatcacgaatttccatcggctacgacggggtggcgaccccagctttgcaaccgttggtatctcctcgcgacatttcctcctacgaactgactggacccttcccgcgcctgaagctgttcgccaatggcaccgcgatccatgtcgccattgcccaggccgtggccggtgagtatcgccaccatgccttcggggttctggagaaggccggtagctattctggcggcacctacgtcgatggaacctactgggctcgaacgggtggttggagtggcgttctcatctcaagcggatccaacgtcgttctatttggccacaacaccagtagtaccggttgtggccatgtgcgtgccgattcgattgaagatggcaggaccaacagttaccaccagctgtgcaactactacaccggtacgctgggtgtagaaggtcaggccggcagtggagtcggctcgatctaccaagcaacgacatccaacacttacgacagcatgtggcttggctatgtgcttgcgggagcggacgacaacaccttctccggccgcagcgtctttcagccgatacacctgactgtccggcgccctggcaccaatccatacctatctccgatcggccaggtcatcggtttacgcgcgtgctacatggaacggttggagcccgagcaggaggtgacgatcggggaagagacatggatggtgttcccgtggctgcgcaagttggcaatgaacagcgccaccaatgcgccacctgcaagcggcaactacggctgggcggtacggaagtcctga

SEQ ID NO: 509964 - DNA, 309 bp, Stenotrophomonas maltophilia
ttgctcgcgggctgtggggagaccaagcaaccgctgacccgcactgaactggtcgagtggccggtcctggtctacgtcgagctgccgccggcactcaccgatccgctccaggccccggccccaccgccgccgctgtgccgtctgcacgacggcacgctcactccatgcgcgattgacgcgatcgtgcgagaggccgcctggcagcagttgctgcagcgggtcaacgacgatcgcgcgacatcggaacggctcagtggcgccagaaaaatgtcacagcccaatctcagtggcggagacgccacgaaatga

SEQ ID NO: 509965 - DNA, 234 bp, Stenotrophomonas maltophilia
atggccttgatcggccttctcgtaagtgtccgtgaaaacgggggtgaacccgagagcttcttccagctactgaagcgggagcgtattaagcggaggatctacagcaatcacgacgaggcacgggccgacgtcttccagtacatcgagatgttctacaacccaaaacggcggcacagttccaacgacgggctgtccccggtagagttcgagaagcagtacgcactaaacggctga

SEQ ID NO: 509966 - DNA, 684 bp, Stenotrophomonas maltophilia
atgctgcgagctcatcgggggagagcttaccgcgtcgaacctgactggaacgtcacgaaggctaatgacgatcggttgcatgcagatgactgcgggatcgcagcagaatgcttacggatccttaacttccggctaacgaatccgtgggggattcccgccaacggcgcagcccctcgtgggtggtcgtgtaacgcgtttcatgtgattgggccggggcgaggtgagtgcgcgggacaccccgtgaacccgtccctgggggctcgatggcgccatccatggcgccaacggtcccgcgcacccaccccgaccgaccccgacagttttcgggcacgtccagccacggaaaagaaaaaagaagatcaaaagcaaaaacagcttggttggccgctttttgtagagccgagcccacgctcggctgctttccggccagtccgcgaagccgagcgcaggctcggctctacacaagcaagcgcagcgcgcgacccgcttttgctgttctttatctcttccgtggctggacgcgcacggaatctgtcagcggccgggtgggtgggggtggcggggtatccgcggcatgggtcgggcgcatgcgcccgacgggttgggcaggacgcccaaccccggtcttgccgtgtgcgcaggacagcgcacacgtgcaagccgcggccaagcccccatgaatga

SEQ ID NO: 509967 - DNA, 273 bp, Stenotrophomonas maltophilia
atgtccgctccactcaagccgaaggaaaaagccgcgttgctcgcagcgcatggcgcttcggacctcaccctccaccgcaccgccaacggattcgcgccccgcaaccgccccgagaagctgttcacgcgccgcgtcatgaactggctggatgagcgcgtgctgatcaggtacgacgacccgcagctgccgcgcaaggcgaccttgaccgccaccggcatcgccgccgccgaggcggagatcgccaaggcccgcgacctggcaatgacggcatga

SEQ ID NO: 509968 - DNA, 255 bp, Stenotrophomonas maltophilia
atgagcgcacgaactgcaggcgcgatctggcgccgtctcgaccgcttggcgttcagccagctctgcgcagaggccgcacgtttggctgtcgagaatgagcggcttcgggaacagctgtggcgagcagaggacgccgctcaattctggcaagaggacgctctcgacctgcagcaggctctgtgcgaggcaacgggcgggcgtcctggaatcaccagtgacggcacccttgtcgttgtgcaggcaggtgtcgcatga

SEQ ID NO: 509969 - DNA, 492 bp, Stenotrophomonas maltophilia
atgacgcgggtactcctagcgctactgctcggtctgagcgtcttcgttatctggcaaaggggttcggttgcccaggctcaccgggctgccgacatcgccttggctgcccgagacaaagcccgcaatgagcgtgatgccgctgcgacagcactggccgatgcaaatggtttgattgcagcagagcgcggacgtgctcaggcagccaatgacttggctgccacatatgagaaggagaagaacgatgcgcagaaggcctctgatcgtctcgtcgctgatcttcgcgctggcaaccagcgcctgcaccagcgttggcaagcgtccgtcgccaccgcagagctgtccgaggccgccgctgccggcagccagcctgatggtcgagccgacgaccgaattgaaagtgcgggccgagctattggcgccgccgcccagtgcgacgcccaggtgagggcgctgcaggcttacgcgatgctgtgttcgggaggtgcgcggtga

SEQ ID NO: 509970 - DNA, 3750 bp, Stenotrophomonas maltophilia; identical to SEQ ID NO: 502584

SEQ ID NO: 509971 - DNA, 3606 bp, Stenotrophomonas maltophilia
atgacgatctccgctatcgatatcaagctgcgccaatcgcagcgactcaccgacaaccccgacggtggtggccggatggtgcaagccgagatcatcgacggcgccatgaataatctgtttcccgacatcggtgatgaagaacgcacaacggggcgaacgactctgcgcaagttgttcgtacacctggatacggctgcaccggacgtgctgaaggatgcgatcggcgtgctgatcgaccctccgagtgatcctcgtgtgaccgtgagcatgttcgcgaccgggtcgtacagcgatgttcggctggatgcaaagaaccgcgtcgagagttacatcacgcgcggtaccgagtccaggttcatcctgatgggcaaccatttcagcggccaaatgacgatgctggtctacaccacgtcagatgcgcccagccccgacatcaatgacaacttcagcctgttgactctcgccggctccgggcatgacgaggcggagcagtacgttcgtgtgagaactgtcctatccaggacgactcgcaccttcacggacgatcagggcgcattcgagcgcgatgttctcgtgatcgagttgatcaacccgctgctgcggaacttcttcggacaagaggtcgtgcgctacagcgcaacaaagccggccacccgcgtgtatgagacaaacgtggttgacgcgacgagctatcacagcgtcaagcgcctctctgcggctgccaagcccggcgacctctctgtggtggtcgacacgccgtatgtaccgattgtccccacctccacggcggagacgccggtgagcgacgttctggctggcatgggcaccatcagtcacgtgcagtccgggccggtcgggagcttgagccaaacgttctccgcgagcttcaatgccggcgtggcggtcaaccgctatttgggcaccggtgtggcagtgggtagcgtcaaagtcatggctggaagcgtcgagctggtagatgacggcagcggtgccctggaatcggcggcggtgactccctggagcggaagcgtcgactaccaatccggggtgataacgatctcccacgctacgggcgtcggattgaccagcctgagcatctccgccactcctgccggctcaatctctgtgcagggctacaccgacgagatcacggtgacccaaaacaaccagggaatggtctggttgatgcagctgacccctctgccggcgcctgggacggtcactgtcgactatcgggctctggggcgttgggtgaggctgagcgacaacgggaaggggcagctggttggcaagccgggtcagggcggtggcacgatcaactacatgaccggctcggtcgtcctgacggccggggctttgccggacctgaagagcagcatcattggcgcgtggggcacggcggttgtggcagagcctcggacgggcgatgccgccattttgccgcccgcgttgcacttcacgttgggggaggggaccgcgatcccgggcagtgttcacatgctgctccgcgtcggcggcgctgacatcgaggtgaccgataacggcgtgggtggtctgcttgtcgggggacagctacgcggctcgatcgcgtatgccacaggtgaggtaacgctgcggccggcgaccctgccggacgctgatagccaggtcgcggtcacatatgactcgggccagcagctcaatgcggcgccacagccggtgccggacggctccgggatcgtctcctttgtgctgccgcaagggcctgtgcggccgggctcggttctccttgactgggtgatcagcgtgcgccgcgatcgcgacgacatctcgtcagcgccgcagccaatgcgcgcgatcgccagggacgatggcaatggaaacctgcgggccgtctcggtcggtgatgccagtgccgacacggtgttgggctcggtgaactatgcgaccggggcggtaagcctgcaggctggaaagttcatggtccgccaggtgtcctacccgcaatacgagcttcagtccgggcggctgaaggtggtggggtacggccgcttggatgtgctcgctgagttttctgctggcactatcatctcagtcgcttggctgttgtcgggcgactcctcgcagcaagcgcaggagagcttgccgctgcccgcgatgcagctgcagctgacgcccaccatcagtgatagcgtcgttcctggtagcgtgcgcttcagtttccgtgggcggacatacgtagaccgcagcggcggcctgtatcacagcatcgaccctgccactggcgcgggtgtttacgcaggcacgatcgattacacgtcgggagtggtgaatctgtcgcagtgggtgccaggcggaagcaatcaggtccagatcctctccctgctgacccgaatcgctgacccgggcgttgcgttcatcttcttccgcgccccgggctcccctcttcgaccgggcatgttcacgttgagggccagccgcctcgacggagagctgctgaccgcgacggcggatataaatggcgatatcgccacctcccagatgcgagggacggtcgattgggagagcggtgtcgtcaaggtgcagttcggcgagctggtgcctgtcgctggcaatgagggaatgccttggttcgaccccgcgttggtggaaggggaccgcgtctggcggccggctctggtcctgcctggctcgatctacatgggagccgtggtctatcggtcaatccccctgtctgaggttgtgatcggcctctcatctgttcgccttcccagcgacggtcgtgttccagcgttcaagcccgggcagacggtcctgattcaccacacggcaaagcacagcgttgcggagccccaggcgaatcaggtgctgagtttcggccggacgcgtatcgcaggggtggaagtcagggacgcggctggaaagcccgtggatagtgcttggtacaccgctgatcttgatgcagggagcttgaccttcagcgatccactcaacctttccgcgtacacgctgccaatcgtagtgagcgagcgtgtcgaggaccgccgtttggtggtccaaccgcagatcacaggagagattgaaatcaacacgggcctcacccacgactacccagctggcgaatccctcatcagcaccgccttgcggcttggcgaggcaaatgggtccttggacctgcaggcgcgcgtcgagagcctgttcgatcaggctgcgtggactggagcctggagcaacattccgattggcagtccggcgcctggcacctacaacgacacggactttcctctcgaagtgaccaacagcgacgccatcacggagcgatgggctgtgcggttcaccagtacgacaaactttgaagttatgggggagacggtgggcgtgatcgccactgggagcaccacaacggaccttgcgcccatcaaccctcgaactaacaaggcgtacttcagcatgcgcgctgctggctggggtggtggttggtcggtgaacaatgtcgtgcgctttaatactgtgggaggcctggcgccggtgtggatggcccggactacgctgcctggtacgccggcgggtgcgaccgactccactcgacttatggtggtgggcaacgtcgcgggaggtgcccagtga

SEQ ID NO: 509972 - DNA, 1035 bp, Stenotrophomonas maltophilia; identical to SEQ ID NO: 502600

SEQ ID NO: 509973 - DNA, 318 bp, Stenotrophomonas maltophilia
atgattcatggaaccttctatcgcagttggggcccccgaggcggcgacggcttcctcggcggaaacgctccggagggcgaggacgacggccgggcgaagatcatgaatgtgccgagtcgcgtgtacatccaggtttatgcgatgcaggacgccgtaaccttccagtacttggcgtcagtactgagcggcccggatggcgtgtggcgtcttcaaggcatcgaccgaacgctgaggtaccggctgatcggtacggatgtggctggcagggtcaactcagccatccaagacggggtagtgccggcaaagatggaggcatga

SEQ ID NO: 509974 - DNA, 651 bp, Stenotrophomonas maltophilia; identical to SEQ ID NO: 505160

SEQ ID NO: 509975 - DNA, 813 bp, Stenotrophomonas maltophilia; identical to SEQ ID NO: 323919

SEQ ID NO: 509976 - DNA, 1125 bp, Stenotrophomonas maltophilia; identical to SEQ ID NO: 327941

SEQ ID NO: 509977 - DNA, 216 bp, Stenotrophomonas maltophilia; identical to SEQ ID NO: 327940

SEQ ID NO: 509978 - DNA, 618 bp, Stenotrophomonas maltophilia; identical to SEQ ID NO: 327939

SEQ ID NO: 509979 - DNA, 747 bp, Stenotrophomonas maltophilia; identical to SEQ ID NO: 327938

SEQ ID NO: 509980 - DNA, 2115 bp, Stenotrophomonas maltophilia
atggcagaaatccaactctttcccagagaacaggtcgtcgggatctttcgtggtttccagcagggaggcatggaattccacgccgacctcgttttgccgtaccgaaacgagttccagaacatcccgatgcacgggcaatttctcatcgtccaactggagacacccgatgaggcggtgttgggccgcattgcctccttttcctctgagggcaagctgtcgttcggctccggcgaggaattcaacatccgtgcagttcgcgaggaaaggcctattccggaggatttgcgtgagcagtatctcaagtatcggatcaacatccgcgtgctcggtgttctacgcaagaacggcaacgggctgacattcgttccctcccatcgtcgacttccccatgttggcagcaaggttgcctttccaagcgccgaggtgttgcgcgagatcgctggacacaacattgatggcgctcccataggccatctggctttcggggaatacatctacgctgccggcaacaaatcattccaatcgcaggaatggatgcaggtggtcgacccggaggtgctggttcgcttcccgatcgagtccctggtctctcgccgcagcttcatcttcgcgcgagcgggcttcggtaaatccaacctcaacaaactacttttctcgaagctctacgaaaacacgcccttcgtgaccaagcgcgcaggcaagcaagtccctgtgggcacggtcatatttgacccggatggggagtatttctggccagacgacaagggccggcccggcctgtgcgatgtcccggcgctggaagacaaggtcgtcgttttcaccgaccgaaagaatccaagctctttctaccaatcgttcgttgctggcggtatcaagcttgatatccgtcgccttcgtcctggcgatgtgatttcaattgcgctcgggccagagcgccaagaacagcaaaacgtgcggaagctcagaggacttccacaagatcgttgggaatcgctggtcaatctgatagacgccaatggcaacaccacgccgctcgaagatgtatgtggactgctcgatctcgaccctcagcgacaggaggccgaggcgctggcggcccggggcaacatgacggcgatcgtgaagatgctgcatgacaagagcagccagctcatggacatgctggttcatgcgctttccgagggaaagctgtgcgttatcgacgtctcccagatgcgcggaggccagtccttggtgctctctggcctgatcctgcgccggatcttcgatcggaaccagcaagagttcacggccgctgaccccaagaccattccgacaatcgccgtcgtcgaagaagcgcaatctgtgttgaacgagaacgcacctgccgccgagccttacattgcctgggtgaaggaaggccgtaaatacgacttgggggcactgctgatcacgcagcaacccggcagcattccagtcgagatcctcagccagggcgacaactggttcatcttccatttgttgtccgcagccgaccttacatccctgaaacgagccaacgcccatttcagtgacgaccttttgagttcgctactcaatgagccgatcccaggccaaggtgtgttctggagttcggtgggaggcaaaccttatccggtcagcctgcgcgcactgtcgttcgagaagatgtattcaatgcgggaccatgactacaaccaacccgtagggaatacatatgcgcaaacgctgcgcagcactttctctggaatgaagcagagtgctgcggcagcccgggttccagacgcaaacgcttcaggctcgctcttttccgccgagactggtttcgaaggctccgagccagtggacgtcatggcaaccatagagcagcgagcgattgatgccttgcgaggagatgccgacatccgccagaagctcgaatcttcgaatggcatgctttggtatggagttcagcagtttctgattgaccacctgccggaacatttggaagaccgccgtcagtttgcgtacaacctggtttcaaaggcgatgaatgcgattttcggctcacaacccagaggatgggagacgttcaagagtacgtccacgggcaagacttggattagggctcacaagtga

SEQ ID NO: 509981 - DNA, 1143 bp, Stenotrophomonas maltophilia
atgattgacccggcaagccaggcccaactgaaagaggccatcgcagactgcatcggaaccgatcaaggggtgctggatgctctgcgagaagaaattcagccgttgaagagtgccacgcgccgaatccagccgcgcgccacgacgtcgatctcactggttggcaccgatgggggaaacaaccagcttcagttcgaccccttcctgattcagttggtccgagtcgtagatagcagcaacaacgagtactgccttgaagcagtttcgcccacgacaccggtgcagaaactcaaccaacgccagttcgatgaggatgggacgcccaaaacggcactgggtgaaatgatggttttcctgggagtagacagcctgcaggcgctctcccacatgatccgaccgacggacagtggaaagccggtttctcccagctgggttcaggtttatcgggagctggtcgagtgggcgatcctattcaagatcctcgataaagattacggcactgacacgttgatcatctgcgacggccttctgcgaagcaaggtgttcgccaaagacctattccagcgtctgctccaagggatgaaggagcgtatcgacaatcaatggagcaacagccggcggcgggtttatctcgcgggtgtagccaagcacagcaaggtgctttctcggtatcgcttggccatggctctggaaggcgtccttcagactgattaccccgcctacgtcgaggtaccccgcgaagtggaggaaaaggcatacgtctggtcggagttcgcacgaggcgatgaccgaactggcgagggcggcgaaatcaacaagtttgtcggcggcaagatgttcctggtgaagtttggctcccaccgccgcgatcccgtgtggccaatcgacatctttgttccacaagtcagcgagtcccaggcaattctcgggtcaatgcttgcggatgcgatcaacggttttccagttccccattacccacgctgcctgcaaaaggcgcatgaaaatgcggcgttggtcgatttcgacttcgatattttgcaggacttcatctacgagggtgtgcgttcgagtctcggcggcgacgcgggcacattggatgcgtttcagctgcaggacgccgatcctgcgcagcgtcggtacggataa

SEQ ID NO: 509982 - DNA, 894 bp, Stenotrophomonas maltophilia
atgtctgacgaacaacttgacgaccttacccagccgcagcgcgatcgccttgccttcgtggagctacgcgtgcgcttcatcggagatatccgccgccaggacctggtgtcgcggtttggaatccagtcggccgccgccacgcgtgatctggcgatctacaaggagctggcgccgggcaacatcgattacgacaccaaggccaagtgctatgtccttggagaggacttcaagccgctcttcgactttccgcctgaacgggttctgtcctggctgacgcaaggcttcggagacggagagccctcccagctcaaggcgtgggtggcaagtgagatcccgtcaaggctcacgcatcccgatctggatgtgctggcctgtgtaacgcgcgcgatccaccaggagcgcccgatccgtgtcgagtatcactcgatctccagcggccagaccgagcgccagatcgttccctttgcgctgatcgacaacggcctgcgctggcatgtgcgggctttcgatcgcaagtctcaggagtttcgggatttcgtgatcacccggatcaagcgcccggtcttgttgcgagatgaagaagtgcaggcaaatgagcgcagcgaccaggacatccaatggacgcgaattgtcgagctggaactgattccccatccggaccagccacgttctgaggttacggagatggactacggcatgcgggatggcgtgctgcgcatgaagctccgcgccgccacggctggatacattctgcgcaagtggagcgtggacagctcgcccgatcacagcctgagagggccggagtatcggctctggctaaagaaccccttggccctttacggcgtcaggaacgcggtgctcgcgcctggctaccgatcgccggaccaagcatga

SEQ ID NO: 509983 - DNA, 1497 bp, Stenotrophomonas maltophilia
atgcaagaagctccaatcaatctcagtcagctcgaaggtcacctctgggaatccgccaacatcctgcgtggcccggtggatgcggctgacttcaagacctacatcttcccgctcctgttcttcaagcggatctgcgatgtctgggacgaggaatacgccgagatcgtcgatgagaccggcgatgccgagctggccctgttccccgaatcgcatcgtttccagatcccggatgactgtcactggaatgacgttcgcgcggtggcgaccaatgttggcaacgctctgcaacgggccatgcgcgagatcgagaaggccaacccggacacactgtacggcgttttcggtgatgcccagtggaccaacaaggatcggctctccgacgcgctgctcaaggatctgatcgagcatttctcgcgcatctccttcggcaacaaaaacatcgcctccgatgtgctgggcgatgcctacgagtacctgatcaagaaatttgccgatgccaccaacaagaaggccggcgagttctataccccgcgcagtgtcgtgaggctgatgatcgaaatgctcgaccccaaagagggcgaaaccatctatgacccggcctgtggcaccggcggcatgctgctggcagccgttcagcacgttcaagaacaacacggcgatgtgaagcgtctgtggggcaagctctatgggcaggaaaaaaacctcaccacctcgtccattgcccgcatgaacttgtttctgcacggcatcgaggattttcagatcgtgcgcggcgataccctgcgcaacccggcgttcttcgagggtgaccgtctggcgagcttcgattgcgtgatcgctaatccgcccttttccctcgaaaagtggggcgaagatctatggatgaacgatcccttcggacgcaacttcgcaggactgcctccgtccagcagcggtgacttcgcctgggtgcagcacatggtcaagtcgatggccgaaggggccgggcgcatggccgtggtgttgccccagggcgcgctgttccgcaaaggggccgagggaagtattcgccaaaagctactggagatggacctggtcgaggcggtcatcggcctggcgcccaaccttttctatggcacaggcctcgccgcctgcatcctggtactgcgcaagaagaagccggcccagcgccgcaagaaggtgatgattgccgacgcctccaggctcttccggcgcggtcgggcccagaactatctggagccagagcatgcccttgaaatccagggctggttcgagaagttcgaggatgtgcaggacgcggtacgcatcgtcggcctggatgaaatcaaggccgaggactggacgctgaatatctcgcgctatgtcctgccgccgttgcaggaggatatccctccgctgccggaggccatcgagtccttcaagtgtgcactcactcgctgccgggaagcggaagacaggctggccaaggtcatggtggaaggaggctggctgcaatga

SEQ ID NO: 509984 - DNA, 1518 bp, Stenotrophomonas maltophilia
atgagtgcccgcattacccaacaagaactcgaatcctatctctggggcgccgccgtgctgctgcgcggcctcatcgatgccggcgactacaagcagttcatcttcccgctgctgttcttcaaacgcatctcggatgtctgggacgaggaatatcaggctgcgctcaaggagtcaggcggcgacttgtcctatgccgagttcgccgaaaaccatcgcttccagataccggatggcgcgcattggaaggacgtacgccaggtcccgaaaaacgtcggcatggcgatccagtcagccctgcggcagatcgagtccgccaacccggacatgctggccgggatttttggcgatgcgccttggaccaaccgggagcgcctcccggatgaaaccctcaagaacctgatcgagcatttctcgacgcaaacgctctcggtggccaacgtgcccgaggacgagctcggcaatgcctacgaattcctgatcaagaagttcgcagacgactccggccacacggccgccgagttctacaccaaccgtaccgttgtgcatctgatgacacagttgttggccccgcaggccggcgagtcgatctacgaccccacctgcggcaccggcggcatgctcatttccgccctggccgaggtcaagcgtagcggcggcgagtaccgcaccctcaagctctatgggcaggagcgcaacctgatcacctccggtattgcccggatgaacctgttcctgcatggcgtcgaggatttccagatcatccggggcgacaccctggccgaccccaaacagatcgaaggtgaccggctgcgcaagttcgacgtgatcctcgccaacccgccgtactccatcaagcagtgggaccgcgaagcctggggccaggataaatgggggcgtaacttcctcggcaccccgccgcagggtcgggccgactacgccttccagcaacacatcctggccagcctgtcggaccgaggccgctgcgccatcctgtggccgcatggcgtgctgttccgcaacgaggaacaggcgatgcgcgccaagatggtcgaacaggattgggtagaagcggtgatcggccttgggccgaatctcttctacaactccccgatggagtcctgcgtcatggtctgcaaccgacgcaagccagccgaacgcaagggcaaggtgctgttcatcgacgcgctgaacgaagtcacccgcgaaagggcgcagagcttccttaagccggaacaccagcaacgcattctggaagccttccgcgccttcgcgccgatcgagggctttgcagcggtggcaacgttggaccagatcacccgcaatggcggcaatctctccattccgctgtatgtgaagcgggcgacgagcgcggcaaacggcaacggaaccattgaggccgtcagccttagtgtggcctgggagaaatggcaaagcgacggccgcgccttctggcagcagatggatgccttggtggaaacgctcgatggcctggaaaccgaggaggtcgagcgtggctga

SEQ ID NO: 509985 - DNA, 1167 bp, Stenotrophomonas maltophilia; identical to SEQ ID NO: 327937

SEQ ID NO: 509986 - DNA, 2976 bp, Stenotrophomonas maltophilia
gtggcatttaacgaatccaatactgtcgaagcctacctctacgacctgctttctggaccggcaaagcccatccccgccaatgtcgtacaggagccagaagccacctacggccgcagccacaaggggatcggctggcgccgtgtcgccagtgccgacatcccgcgccagcaccaggatgtgctggttgaatcctgggtgcgcgaggcgctgattcgcctcaatccggaaattgccgcccagcccgatcgcgccgacgaggtgctctacaagctgcgcgccattgtgctagcggtgcgctccgatggtctgatccgcgcgaatgaggaattcacggcctggctcaggggggagcgttccatgcccttcggccagaacaacgagcatgtgccggttcgcctgatcgatttcgacaacctcgatcagaatcagtacgtcgtcacccagcagttcaccttccgcgccggcagcgccgagcgtcgcgccgatctggtcctgctcgtcaacggcctgccgctggttttgatcgaggccaagacgccgacgcgctcagcggtgagctgggtggatggcgcgttgcaggtgcacgacgattacgagaagcacgtgccggaactgttcgtctgcaatgtgttctcggtggtcaccgaaggaaaggaatatcgctacggctcgctcggcctgcccatcaaggattgggggccgtggaacctggaggacgacggcgatgcgctcaagcacccgctgagaggcttgaaactggctgccgagagcatgctgcggccccatgtggtgctcgacatcctggccaacttcaccctgttcgccaccaacaagaaaaagcagcgcatcaagatcatctgccgctatcagcagtacgaggcggccaacaagatcgtcgagcgggtgctggccggctatccgaagaagggcctcatctggcatttccaggggtcaggcaagtcgctgctgatggtgttcgcggcgcagaagctgcgcctgcatccgcgcttgaagaatcccacggtgctgatcgtggtcgaccgtgtcgatctcgatacccagatcaccggcaccttcacaggggccgatatccccaacctcgagaaggccgactcccgcgacaagctgcgccaactgctggcgcaggacgtgcgcaagatcatcatcacgacgatcttcaagttcggcgaggccgatggcgtgctgaacgatcgcggcaacatcatcgcgctggtggacgaggcgcaccgtacccaggaaggcgacctcggccgcaagatgcgtgatgcgctaccgaatgccttcctgtttggcctgaccggtacgccaatcaatcgcttcgaccgcaacaccttctatgccttcggcgcggaggaggatgacaagggctacctgagccgctacggcttcgaggagtccatccgcgacggcgcgacactgaagctgcacttcgagccacgcctgctggagttgcatatcgacaaggcggccatcgacgcggccttcaaggagatgaccggcggcctctccgatctcgaccgcgacaacctcggtaagaccgccgccaagatggcggtgctggtgaagacgccggaacgtatccggcgcgtgtgcgaggacatcgtccagcacttccagagcaaggtggaaccgaatggcttcaagggccagatcgtcaccttcgaccgcgaatcctgtctgctctacaaacaggagctggacaagctgctgccgccggagtcctccgacatcgtgatgacggtcaacgccaacgagccgcagtacaaggcctacgcccgcacgcgggatgaggaagagcggttgcttgaccgcttccgcgaccccaacgacccgctcaaactgatcatcgtcacctcgaagctgttgaccggcttcgacgcgcccatcctgcaggcgatgtatctggacaagccactgcgcgaccacacgctgctgcaggccatctgccgggtgaaccgcacctactccgagcagaagacccatggcctgatcgtggattacctcggcatcttcgacgatgtggccaaggcactggagttcgacgacaagagcgtgacggcggtggtgtcgaacatccaggaactcaaggaccggctgccggaggcgatgcagaaatgcctggcgttcttcgccggcgtagatcgcactatcgagggttacgagggcctgatcgcggcccagcagtgcctgcccaacaatgaggtgcgcgacaacttcgcggtcgagtacagcctgctcaataagctatgggaggccatttcaccagatccgatcctcggtgagtacgagaaggactacaagtggctctcgcaggtgtaccagtcggtgcagccctccagcggacacggcaagctgatctggcattcccttggggccaagaccatcgagctgatccaccagaacgtgcacgtcgatgccgtgcgcgacgatctcgatacgctggtgctggacgcggatctgctcgaagcggtgctctcgaatcccgatccgaagaaggcgaaggaaatcgagatcaaggtggcccggcggctacgcaaacacctcggtaaccccaagttcaaggcgctctcggaacgcctggatgccctgcgggaccgcttcgaatccggcgtgctcaacagcgtcgagttcctcaagcaactgctgcaactggccaaggaagtgctgcaggccgagaaggaaacgcctccggaagaggacgaggatcgtggcaaggcggcgctcaccgagctgttcaatgaagtaaagaccgccgagacgccgatcatggtcgagcgcgtggtggcggatatcgacgagatcgtgcgcttggtccggtttcccggttggcaggacaccctcgctggtgagcgcgagatcaagaaggcgctcaggaaatccttgttcaagtacaagctgcatgccgatgaagagctgttcgagaaagcgtacagctacatccggcagtattactga

SEQ ID NO: 509987 - DNA, 2100 bp, Stenotrophomonas maltophilia
atgaaagcagaagacacgctggttaccaatctgctgcagggcgcgaagcaattcatcgtgccgatctttcagcgcgactacagctggggcacgaagcactgccagcaactgtggaaggatgtgattcgcgtcggcagcgacccaaatgtgaaggggcattttcttggctcagtggtctatgtcgcggctgaggacaacacagccaccatcactcgttggttgttgatcgacggccaacaacgccttactacgctgacgcttttgttgatcgcgcttcgtgaccggatggcacagcttcctggcaattcaggtcagggagaggaggaagcgacgcccgatgagctggacgactattacctgcgcaaccggcacggcaagggagagcggcggcacaagctgcatctgcgccgggcagatcacgaaacgctgattgcgcttctggatggaaagacgttgccagaggctgtctcggaacgggtgaaggaaaacttcctgttcctgcgtgatttggtcgcccaggccgacgtgcaaaccgtctacaacggcatcaagaagttggtggtcgtggacgtgagtctgacgcgcggccaagatgatccgcagatgatctttgaaagcctgaactctactggggtggatttgactcaggccgatctgattcgaaatttcgtactgatgcgactggatgagtcctcccagactcagctctacgaagaacactggcagccgatcgagcaggctttcgggcggcgctaccgtaccgagttcgataaattcgtgaaagattttctgacgctgcaactgcgtcccggcacgccattgaaggcggccgagatctatcacgagttccgcagctacttctcccgtactgtcgaaaagcgtggtgtcgatggcattctcagcgacctgcgccgcttcggtacctactacacggcattcagtctcggacaggagaagcagccggcattaaaggaggcatttgcccgcctgcgttccctggtcgaggtggcttcgccggtcgtgctgacgctttacgactttcatgaccgagcaaagaccctgcgtaccgatgaattcgtcgaggccgtcgagttgcttgaaagctttgtgttccggcgttcagtgtgcgacatgcaaacgcgcagcctcggacaaatattcgcaagcctcgcctatcggatcaccgagagccagccgttgctcagtttaaaggtggcgctgtatcggcaaggcaagaagcgccgctttccgagcgataccgaatttcgtgaggcgctcgaaacccgcgatgtctacgacatgcgtacttgcttctatctgctggatcggctcgaaaacttcagcaaggagcgcatcgatacctcgaacttctccattgagcacgttatgccgcagaacgaggatcttcgtccggaatggcgaacgatgctcggtagcgactggaaagcaatacaggaaacgtggctacaccgcctgggcaatctgacgctgaccggatacaactccacttacagcgaccgtccattttctgagaagaaaacgattgccggtggtttcgatgagagcccgctgcgcttgaacaagttcattcgcgaacaatctgcgtgggacggtacgaccatcgagcagcgaggcaagttgctcgccgagaaggccgtgaccgtatggcgaccattggttgtcgatttactggccgtgaagcaacgggagttggaggagcacaaggcctttgccgccaactacaggatcgaggacctggaactggatgacatcgccaagaatttactggaggctttacgtccacagatccaggcatttggtgaagatgttgtcgagctgcccaatgatcggagcgtcatctaccgcgtgttcgatttcttcgtcgaaatcatcccgcgtaagcagcggctgagcctcttgctgaatctggattttgccgactgcgaagatccatcagggaaagcccgcgatgctacggaattcgccttcatcatcggcgcaactgagacgggtggagtgctgtacaacctggaatcacaagacgatgtgccggctgcgatcaacgtggtcagacaagcgtatgagcgtgtgactgagtga

SEQ ID NO: 509988 - DNA, 4212 bp, Stenotrophomonas maltophilia
atgttcctgcggaccaagtgcgatcgcgaactttatctgtctttgcatgaagactcggagcttgattcgcatggcatgccggtttcgttgcaggcacgtcctggaatcggtgtcctccaaacggcaggacgggattttgaggatgagcgcaacgatcagttgattcaggcgttcggcagtatggtcatctatcagccggacaagggaggcgcaaacaaaccagtcaaggccccgctcgcctcgttgcttggcaaggtaacagccctgccgtcgatcatcctgcaagggaagttcgagccctcttcctaccagaacgccgtgatggcaaatattggtctgcaacccggacagatcactcaggtcccgccaatcgcagggctcatccctgacatcatcgtcgtgcgccaggccacagccgatgacgaggaggtggggccagacggatgtcgtcggcgaattgacccggcaactgaggcgcggcgtgcattgagcatcattgatgtaaagcacaccagcgaggctaatccgagctactccgccgaagtcgcgctttacgcactttttctggcgaactggatcgccgaccaggggttgcagaatgagtatttcgtaacgattcgcagctacctgtggacccgattcaagcaaggccagtctgaactcgacgcgttgatgtcgggcacatccccagcgacagcgattcagtatctcaatgctctgatcgccgatagcgaagacgccaacttgcgcttctatctgcccaccgttctgcatttcttccgggaggacttgctccgggtcatcgctgttggcgacgcatcaaccaacgggtggcagaaccttgaatggcatgtcgatggcaggtgtagtgcctgcgactggttggggcacgagaagtgggcaaatgcgaaggacaaggcgcgaattgcggctcagccgaaccactattgctaccccgcagcgaagctgactgggcacttgagccaaatcgcgggtatgacacgaggtgcaagaaagacgctccagattaatgccattcaggacacggcgggtgcggcaagcgccccctccgcacatcctgccttccagcaacacagtcatctcaaaaaggaacgaagccgcatccccgcgcgagcgcaggccctaatttcttcggccacgaccgtggacagcgccgctgtgctggcgagcttggcgccagcgccacaactccatgtggcgatcgcggtcaacttcgatccgagcgctgggttgctcactggcctttcgatacttggtagagcgacggcctatgtgacgggacagtcgccccggcagtttgcgacgaaatgctttgtcgtggatcagaaggcgctggctgacgagtgggtggctttggaggggctcctgtcgacgctgtctgacatgattgatcaggctgaggcatttgttcgcgctgctggacgaaccccgctaaccgcacaaatcgcgttctgggagcaacgacagtttgaagagctatgtgcggcaatggggcggcacttgccaagggtgctgagcctgaccaaccggaagaccaaggcgctggcctggcttttccctgccgatgaactgatcgaaaagcccgatggcgccgtcagcccctgcgttgttttcgttgatgagattatccgacgagttgtttttgccccaacacctcatgtgatcaccctgttcgatactgttgaaacctacttttcgggccctggaccagttcggctgggtgatgcgttctatcgtgaattcctcaccaacggcattcctcgggaacgcatttatgagatttggagcaacgtcaccacgattaaacgggggtccgttaccgttccccgcaacaccgtcattcaggaattcggcaatgcgctggagaagcagtgccgggcattgaacagcgtcgtcgagagactgcgcacggacttcaaggggcagctcaaggcaaacgctccaaagctgacattgtctattcctcagggcgctcgcgacgttgcgttcgacagcaagctttgggtttggtgggaggaactgcagtatcacaccagaaagctggagtcccaccagcggttggcgctcgatgccgaggcattagaggctagttacgaagcggttcggcttaccaacggacacccaacaggggtgccgaacgagtacgtttttgacgtgcttcctggttcaaccgaggccaagctcgacgacaacgaaggctatctggctctcggcaaggaaggtcatcctgggcttcccttacagcgcggaagggatctgatatccggtggcgcgcccctttacccaggacagaacgacacgctactcacaccgctgtggtcggcactctccgtaacgctcgtgtcctttgaccgaggcatgcaaaaggctgtcctgaagctaaccaactggcgcgacgcggcattcgtcccgtacttgctggccaattcgactattgatctgctgaacgacatcttcatcaccaaaggccagggctcgttcaagtggtacgagacggtcaagcggattctcactgcagtagggaacccgtcgatagcggtggcagatagcaatgcggccactgcgatgggcgcgaggcctccgcgccccggctcagacccggttactcctcttgcccgcgtactctgggaggccgacactcttcacgcgacatccgtcgttgctacgacgcaggcctcatcggttgcagcctacgccaaggccaagcacaacctgaacagtagtcagaccgatgccgtcgcccaggcggcggaaagagggctgacgattatctgggggccgccaggcaccgggaaaacgcagacactagctggatgtattcacggccttgttcatgatgccgtgcggcggggacaaccattgaaattgctggtagccggaccgacgtacaaggctgttgaggagattattggtcgtgttgttgaggcgttagacaacgatgcaacctgtcctgctgaggtctttgttggatattcctcttcgcagaccccaaaggtgttctcggcaagcaagtcacatctgctcgttgagtcattcaacctgaaccagggcaatcaggaaacacaggactgtcttgctagtctggcgaaaaccgatgttgtcacgattgtcgccacggcgacgatgcaggcatacaagctcgccgaatggacctatggtcgccatgttgcgccgatttttgacgtcgtgattgtcgatgaaagctctcaggtccaggtcacacatgcaatctcgccactggccaccttgaaggacgatgcgagactgatcattgctggcgatcatcttcagatgccgccaatcatggcgcttgaaccacccaagggttccgaatacctggtgggcagcatccagaaatacctgctcgaccgtccgtttggcagccaaatcgttccatgtccgctggaagagaactatcgctcggcggaggacattgttgcctatgcccgcacgatcggctaccgatcgacgttgaaggcgtcaaacgccgcgacggcacttcatctcttggctgtggtgccaactcccgcatcaggttttccaggggccttcccttggtcatctctgtggccagatattcttgaccccacgaagaaggtgctgacgttgctccatgacgatgatctgtcgtcccaaagcaattctttcgaagccaagatcgtcgccgccttgacatggtgcctgaggcagacggtgagcgcggaacttgatgggcgaggtgccgtgacgcatgtgtcacctacgcccgatcagttctgggggcagtgcatcggaatcgtgacgccgcatcgcgctcaacgtgccctggtggttcgcgaactgcggtcaatattcccgtctgatccgccgaacttgatcgactcggccgttgataccgtggaaaagttccagggcggtcagcggcacacaatcgtcgtgacttttggtgtcggggacgcagacgtgatcatgggagaggaagcgttcctgatgcagctagagaggacaaacgtggccatctcacgcgcgatggccaagtgcctggtagtcatgccaatgacgctcgcaggacacgtccctcaagacaagaaggcactcgaaactgcacacgcaatcaaagattacgtcgacgaattttgtaatcaagagcttattggtcaagtctcgtttggggtgatctcgagacaagcgaagctgcgttaccaccaatag

SEQ ID NO: 509989 - DNA, 1212 bp, Stenotrophomonas maltophilia
atgagtgccaaacgttccctacacgcccatagccgtgtaaactgttccttatatccaaaattcacgccaagcacaagtacccagaacgtggcccttgcctataataaagaaaatgcgctgaacgcaatttgcccttactttacgatgtttccgctcgagtatccgaacagggtcctcaaaaggcatctaaaggaaaagccagttgtgctcgacccattttgtggtcggggcaccactctattctctgcgcgaaagtttgggttttctgcctggggcattgattcatcgccagttgctgttgctattgcgaaggccaaacttgcgagctgcgacatcgaggctcctctagagcttgctgctgaactgattgcagacgtcgagccagccgacttgccagacactccattttttcgttccgcgtatcaccggtcgacgctccgtgatatttgcgccctgcgcgaaggattgctcggactcgaaaatgaaacggatgcatcgtccatattgcgtgctgctgcactcggatgtttgcatggcccacttcccaagcatgttgagaacgcgggctacttttcaaatcaaatgccgaggacttacgcgtcaaaaccggactacgcggtgcgattctggaaggaacgcgacctcaaagcgccaaagatcgatgtacttcgagtactgcgtcgaaagatcgagcggttggctggacttgatcaagcatcgccttgtccgataactcatgtcctacatggagatgctcagtcggaagagttgtttcagtcgattagcaaagcgccctcggttgtaatcacttctcctccatactacggaatgcggacatatgttcaggaccaatggttgagaaattggtttctgggtggccccgattccattgactattcagctggcccgcaactggatcacggtgggcaacaggcattcgcagtttcgcttggaaaggtttggcgcaatattgccaacacggcctcgccctccgaatcgctccatatgtacatccgattcggaataattccgtcagcgttggttgatgcaaagaaactcttcagggactctttggaggaatctggaatcaattggcgcttggtttctacgcgctcagcaaattcagctgatgttggcaagcggcaagcagatcaaatgaaagccgagtctgccgccgccgtcgaatttgattttcacgtcgaaagagtttga

SEQ ID NO: 509990 - DNA, 204 bp, Stenotrophomonas maltophilia
atgaaaacgaacgtgatcgtcaccatcgacgatgtgcgcgccgttggcctgtgcgtgaacggcacgcgcacttggtttgcgcgtcacgatctggattttcgcgccttcctgcgcgatggctgtgacgccgaaaccttgctggccaccggcgatgcgatggcgtggcgtgtggttgagcatgccaggcaacaggagcctcgctga

SEQ ID NO: 509991 - DNA, 156 bp, Stenotrophomonas maltophilia; identical to SEQ ID NO: 327923

SEQ ID NO: 509992 - DNA, 1005 bp, Stenotrophomonas maltophilia; identical to SEQ ID NO: 327889

SEQ ID NO: 509993 - DNA, 219 bp, Stenotrophomonas maltophilia; identical to SEQ ID NO: 327884

SEQ ID NO: 509994 - DNA, 279 bp, Stenotrophomonas maltophilia; identical to SEQ ID NO: 327879

SEQ ID NO: 509995 - DNA, 357 bp, Stenotrophomonas maltophilia
gtggtgctcaccaccgcggagtacagcgtcgccaggtggtttgcggcgcgagccgccgattggcagcctgccatctttggcaactggctcggcggcaatgcgaacgtgcctgagacaatggacccacgagaaggcgcttggcgcctggcggtcgcacggttctgggatcagccctctaacagccgcatctactacgacctcgagacccgcgatgtctgctgggagctgatgcagatcgccgaggacgcctgggcctccacgccgtcgatccttccggatgaagcactgaaggcggctcgcgacacgctgatccagcgcggaaagtggcctcgcgccatgcctcccccactgccatag

SEQ ID NO: 509996 - DNA, 435 bp, Stenotrophomonas maltophilia
atgctgatccctgacccgctggcgccctacgcgaagctgatccgcctcggactgtggtgcctgctggccggtggcttgtacgtggccggctgccagcgtggcgaggatcgccaggctgcgtcagatcgggagcagatcggcgcggtgcagcgccagctcgacggcgcgcgcgctgaggcggccgagaacctgcgcgcggccaacgccgccgggcagctgctgcaggaggtgaaccggcagacccaggcatcgatcgacgccgccgaggttgcgcgcaaggcagccgctgcagcagccagccgggctgaagcggcagcggccgagggtcagcgccgggccaccgcggcagagaaggcgctgcaggccgcaaagtccacgccggcatgccggtcacaactggagatggccctgtgcgattccattcctttgctctga

SEQ ID NO: 509997 - DNA, 711 bp, Stenotrophomonas maltophilia
atggcgcgcatcacagcacaggaggccggcggcgtaatctacgccctgactgagccagacggcggggccgtcaggtacgttggccataccacgcagcctttggctgagcggtttggcggtcacatctcggcagcaaagacgggggcgagccgcccggtatgcctgtggatcgtcgggctgctcgatggtggcgaaaggcctggcatccgagtgctggaaaagctctctgcttccgatgactggcaggaaagggagcgggcatggatcagccaatacaggagtggcgaggccctcctgaacctcaccgccggcggccttggctggccgggtcatacccattctgctgaagagcgcgcgaagatcggagccgcgcacagtgggaagaccatctcgctatgccagcggcaaaagcagtccgcagcgatgtccggccggcgtctgtccaaggaagcgcgccagaagatctcggatgcgatggccggtcgcgagttttccgcagagaccagggcgcgcatcagcgcttcgaagttgggtcgtcctgtcccgagcgcctcgggcgcattgaatcatcgggcaatcctcaccgctgaggccgttaaggccatccggctgggcgaaatcggcccccgggacgcaaagcagatgtggggcatctccaagtcccagttctaccgcgtgaagcgcggcgagcaatggaggtcggcagcatga

SEQ ID NO: 509998 - DNA, 405 bp, Stenotrophomonas maltophilia
atgtgccacacaccggccgccccccgcggccggtgctaccatcctcccatgagcgcctccctttcagagctaaggaactacctgacttcgaccagaaagatgctggaagaaggggaagatcccttttctgtggcgcttgccgcagatagtcggctggtggaggtcgcaaaccatgtggctatttgccaccgcgtgacggccgaggccagggccgagctgcgattttccttcttccccgaccgcaccaagctgaacgccaaaatccagtcggctggtgagatcctggaagagatggaggtcttgcagcaggagctgatcgatgtgaagggcgaatgcctttccagaatccggtctgaaatccgcagactgtggaacgtcgtcaaatcccaacaggaacaatcatga

SEQ ID NO: 509999 - DNA, 186 bp, Stenotrophomonas maltophilia
atgaaaggctggaaaaccaacgactacttcagctggaagtcctggtcgcgcatccaggcggagaagcgcgacgaggagctggccaagaacagcgccagcccaatcccgctgctggcgctctccgcagttttcctcattgctgcggcggcaggccttctgttcgttctggcgtctgttctccgctga

SEQ ID NO: 510000 - DNA, 2406 bp, Stenotrophomonas maltophilia
atggcgactcctccgcttccgcccggtttcgttctcgagccaactgccgcacctgctgcagcgcctcgcgctgtgccgccgcctccgccgggattcgagctggaagacatcccgaccctggggaccgttaaagcactgcctccggacttctccgaagtcaccggcagcgtttccagcaccgccgatggacggcaggcggacgggtggaaggcaggtatcccgcgcgacctggcgttcggcgctcgttcggtgctacagggcatcggaagccttctgggtgcggtcggtggggacgccctcggcgcgctggagaccaagatcaccggccggcctgtggccagcttccgcgacaacgccgcgacgctgggcgatgccctcgggctgccaaaggcacagacctccggcgaccgcgtcctcggcgacgtgggcgaggcactgaccggtaccggcctgacgttgggtgccggtggcgcgctgactgctgggcgctcggtagtcccgacgctggcgcgggcagtgccggccccgaatgttgttccgactcttggcgagaaggccggcgcgtttctcactgcccagccagcattgcaggtagccagcacgattaccggctctggcgcagcaagtggcacgcgtgagcttggcggcggtaccggcgcgcaggccatcgcaggcctggctggcggcctggcgcccgggttcgtgccgcgcttgccgacatccggcgtgggttctgctgtgacccagaatctgactcgccgcgctctgcgtggatcggaccctggtcggctggaacagaccctcagcgagttcgcggaggccggtgtacagccaagcatggggcaggcaaccggcaatcgtgtcctgcaggcaaccgagaccctgctgggaagtgttcccggctcggccggcgtagtggatcgcttcgcccagcgccaggcgggtcagttcggtgatcgcatcgatgaaatcgcgtccgcgctggctcccggcggccaagcggtcgacccggaaatggccggcctcgcgattcggcagggcatcgccggccccggcggcttcaaagagacctcccgcgcagagagcaacgcgctgtaccgcgcgctggacgagctgatcccgcaggactcgcgagtcgacatttccaacgtgcaggccgcgctgcgtgagttgaatcaggctatccccggcgctccgtctacctcgcgcctgtttcagaacgcacggctcggtagtatcgagggcggcctgatcgatgacacgcagggcgtgcaggcgctgctgacccagcccggcatgcaggagcaggccgatgcctaccgcgcctatctgcaggcccaggctcgctccgtcgagatggagaacgcgcgtcgtaagtcgctgggcatgaccgtgatggagccggtgccgacggcggaccagatcgagcagaacgtcatggcgacgctgagcaacatgaccgacaaccgcctgccctacgaggccctgcagaagctccggtcgctggtcgggcgggagatcgacaacgccaacttcggcagcgacgtgccgcgcagcatgtggcggcccgtgtatgctgccctgagccgcgatatggaggaggccgtcaaagctaccggcaacccgaaggcggccgaggcgctgacgaacgccaaccagtaccactcgcgctatgtggatcagttggagaacatcgactccatcatcggcaacaagaacggtgaagaggcgtacctggcagcggtgcgaggcgcgaaggatgggccgagccgtatccgttcgatcatgcaggtgcttcccgaggagcagaagaagatcgtcagctctgccttcattcgccgcatgggccgagcggcggaggggcagcaggatgccgatggcagtgtgttttcgatgaacacgttcctgacgaactggaacaagaccaacgcgcaggccaggaaggagctgttcggaagctacggcccagagttccagcggaacatggacactatcgccaaagctacctcgcgaatcagggatggcgcaaaggtattctcgaacccgtcgggcaccggcgggcgtcttgctctcgttgggcaagttgcgacaaccgggagtgccgcagggacgctgacggccatgggcaatccaggcttggccttcatcacagttgcatcttctgcactaggtgcagctggtgcaaacggcctcagtcggattatgacaagccccaagtacgtgaactggcttgctcggacgaccgagaagcctcagggggaattgctttcccagctgcaggttctccgtggcatcgcggaacggtcccgtgacccggaggtcgtggagctggccaacgcggtgcaggagcaggtcagcggagaacagacgccagaacgaacagaaggcctgccgccgcagcaatga

SEQ ID NO: 510001 - DNA, 1224 bp, Stenotrophomonas maltophilia
atggccaatccataccaggccggtcaggccctgggcgccgcgctgttcggcaacacgcgcgatacctacacggatcagctgggccggaactaccaagtcgaacgggcgctgcaggaggcccgtcaggcgcgttcgaaggccgtgttggccaaccagatcaacgaacagcgggcgatgatcacgcccgaactgctggggtcgtaccgtagtggtgacaacgcagcaaccaaccagctgatcgctgcaggtctgctggccaacgacaaggtggatttctcgacgcttggagacatcgagggcgcgacctatcgtcgaaacgctgtggaccgcgccacgctgggcgattgggacggggcgaatgcgtcgatgctcggcgtcgcgaacggcccgcaggagcttgctgccgtccaggggcagaacctcatcaacaaccgattcctgaccgggggcggtggcatctccaccaccgagcagggcagggctagcgttgccgccgatgcggcgcgcgctgccgcttcctacgccagcgccaacagctcgaacgccagcgcggcgcgcacccggcaaggtatgggcatcgacgcggccaagttcggcttgcagcgcagcggccagtggaaccctggcggcaagtctgccggcacgcttggggatagcggcaagccgctgccggtcggcgcactgaaggaactgctggcggtcgaggacgcgctgggcggtacccaggttcttggcggcatcatcgcgaagaaccgagagcgcttggacaatggaaccctgcagatcgggccgttgcagtcgctgatcggcagcgtgcgcaccggtctcggcgtggccggtgacagcgatgtggcgctgaacgagtggaactcggatctgacgaagatcgtcaacgagtcgctgcgcctgaacaagggcgttcagaccgagggcgatgcccagcgtgccgcaaacgagttgatgaacgcccgcgatgccaagacggtgcgcgcggcgctcggtcggttggaaggcttcaacaatcaagcgatccagctgcagcggcagaagcagaacctgatcaactcgaactacggccgcacctcgacgctcggtgagccggcggcgacgtcgccgcgtgcgccgggtctaccctcatccggcgccagtggcgcacagcgcgctcgcaacccccgaaccggccaggtgctggtcctcatcaacggccagtgggtgcccgaataa

SEQ ID NO: 510002 - DNA, 576 bp, Stenotrophomonas maltophilia
atgattcccgctggcggcctctccaccacaccggtgcccgcgccgaacgtcgagcgggtcaattcgacgctgcagccgctgatcgacttcgagatgggtggcgtggcgctgaacgacgcttcgcaggggctgcgggtgaagctgtggcgcgtgcgcgtggatggcgacgtggtgtacctgggcccggacggcggcagcgaacaaccggcgttcatccggccggggatcacctcggtggcgctggccttcgaccagaacatgcagccggcgattgcgttcgtgcagtcgggcctggcgtggctgtggtggtacgacagctcggtgccgggcatggtgttcacctcattcccgggagcaatcaacccgcgcctgacgctggacgacaagcggccgacccagaccagcaattccgacgtgattctcggctacctgcgcgccggagcgctctactaccgccagcagcgtgaccgataccagaccgagtacctgctgagcgccaatcccccctgcggcggcctggccacgctctgcatgtccacgggcggccggctccagttcggcttcggaggtgcgtga

SEQ ID NO: 510003 - DNA, 960 bp, Stenotrophomonas maltophilia
atgaacaacgtcctgcacgcgcacaacggagtggccggttggtacaagatcgaggcattccgagtggatgcccagggcgaggaggtgccgggcagccgccgggttgccgccgattggttccccaacctgatcaccaacgctggcttggacctgctcggaacgacaggctccaaccccgtctacggctactgccgcgtgggatcaggtaacactgctccggcgttctccgatactgcgcttgtggcgcagattgcagtcagcagcacccagcaatcagacaccgacggcgtgaatcggacgggtacgttctatggctggcatcgccgcacaatccgcttctccgcaggcagtgccgctggaaccctggcggaggttggggtgtcagctgacgctgtcggagctctgttcagccgggcgctcattctggatggaggtggtaatccgacgacgatcaccgtcctggctgacgaagttcttgacgttacctacgagctccgcgtgtaccccacgctggcagacgcaactgggtcagttgtcatcgccggtaccacctacacctggacggcacgccccctcacgaacgccacctatgacacccgctggtctcagtacctcggctatggcatcgcattcaatgtcacgtccggcaatttcgcgtcctacgggccacaggcgatggcggatcttccggcgcagggctcgatgcccgtgtcaccggtggtaggcacaagcatgaatccgcaggcatatacggcgggcacctaccagcgctctttccgcatggatttcgacctcaacgacggcaacgtagcgggggggataggtgcgttctttgccgcttccgccacattccagttcgctggtgcctgggcttggggcgtctctccgaagctcccgaagaccagcgcgttcaaggcgaccttcaccgtacgcgtgagctgggggcgctacaccccatga

SEQ ID NO: 510004 - DNA, 546 bp, Stenotrophomonas maltophilia
atgagcaaggaaaccatcatcgtcccggtagtgcaggcgacgatccagcgcagcgagtacgtcacgatctccgactcgttcccgaagcacgagctgccgatcctggagctgatccacggcgaggaaaacgtggtcgtgaccgacccggactacttcgcgttcgaactgccgaacaacgccacgcaggaactgcagcgcatctacaccaagtacaccgacaagtaccggtcggtggtggaccaggtgttcccgcgcggcgcccgcgatgtcgcttccgagctgggcatggatgtcggcaaggacactttcagcaagcagtccgaggccgtgatcgaaagccgactgccgccgcgtccgaccgcagccgccagcctgagccgtcccgcgccggaagacgatggcgacgaccagcccgagctgacccatgccgagctgcgcgaagagctgacccgcctgggcatcgaccacaagggcaacgcgccgaaggccgaactgcaggcgctgtacgacgccgcgcaggccggcgccggcaccctgggcggctga

SEQ ID NO: 510005 - DNA, 144 bp, Stenotrophomonas maltophilia
atgactgtcgtgacccacaatccgtacaccggcaagccgcgtgacccgcgcgacatcgcaagtgacccgagcgcaatcttgtgcgtaaagccgggtgagccgattcgcgccgcccatcgtgaagactgcccggggagcctctaa

SEQ ID NO: 510006 - DNA, 441 bp, Stenotrophomonas maltophilia
atgactcagcactacgtaggaaccaagatcatcgaagcgtggccggctcaaaaggacgaccgcgacggctattcggtgaagtatgccgacggttacatcagctggtcgccgaaggaggcgttcgaagccgcatacctgccgctgggccacatcgggcatcttccgccgcacgtacagcgcatggtcggcgagttggagcagttggacgacaagatcagcaagctgggcaagtttcagggcaccgatatctacgcgagtctgtcggacgacgaacgtgccgatcttgatgcgcagggcaagtgcatggtcggctactggaacgcactgctgagccgtgtcagccgcgcgcgccccgagtacgagcggccggcgctgtccgaagccgattcccttgcggacctgaccggagccccgcgccccgaccatccgagcgccgcctga

SEQ ID NO: 510007 - DNA, 315 bp, Stenotrophomonas maltophilia
atggctgattggctgtccggtgtcgagaaggagcagctggtcaaggaggtcagtgactgcgtgcgcgccggcggcgacgtcgagggggtcatccgcgtctggtgtgatgggttcgctccccgtgaccggcaggtcagggatggcgcgcgctacaccgccaaggtagtggcggagcaggtcgagagggagaaagccgagaaggcagcccgagacgcgttcctgtctgacgacattgccgtggtggaagatctgatccagcgcctgcccaaggtactggagcggctgagggccgcagaggccgcgaatggccggtaa

SEQ ID NO: 510008 - DNA, 366 bp, Stenotrophomonas maltophilia
atgaacgagctgatcctgccgtggccggacaagcggctgtcgccgaatgcccgtgtgcactggtcgaagcggtccggcgcggccaggttggcgcggcacctcggcgccatcaccgcgctgaaggccgggtgcaagggctggactctgccagatggccgacttcacctgcatgtgaccttccacccgccgaccaagctgctgcccgacgatgacaacatgctcgcccggttcaagccgtaccgggacggcatcgccgacgcgctggggatagacgacaagcggttcatcagccacccgctggtcagcactgaggtccggaagggcggacaggtagtggtcaggatcaccggagggccggacgcatga

SEQ ID NO: 510009 - DNA, 144 bp, Stenotrophomonas maltophilia
atggctagtaagcagttcgttgctggctgggcgctggtggtgatcggctgctgtgggaatgcgccaagcttggtgaacgcggtctgcggtgtgtttggcctgctcattgtctggttctctgacgatggggagggcaacgcatga

SEQ ID NO: 510010 - DNA, 306 bp, Stenotrophomonas maltophilia
atggacgccatcgagcagcgggcgctggaccaactggctcaactgctgcagtccggagggtttgaaggagagctgcgggttggccgagagttcggtaaggcgctggtcgcagagattgccgccctcacgccgcccgagggctacgttctggtgccggtggaggaattgcaggatgccaagcggttccgctggctgaaaacgtgcagcagggagcaatacctgctcgcgcgcggcgtgttcgggcttgccgaagacgtgattgatgcggtcattcaaagtgaggaaatggaggcccgcaatggctag

SEQ ID NO: 510011 - DNA, 333 bp, Stenotrophomonas maltophilia
atgaacctcgaacagatcgacaccagcactacggcggggaaggcccgtgtgatgcagcttgcggctgaggggcggagggtggcctatcgatcaggcaataaaccttgggcagagaacggtaaccctgcatggaactgggctgttggtgagtacgccatcatcgccgagccggttgggccggaggaggtgtgggtagtagttgctggcgaccatttggccgcaggtccgtttaaggatgagcaaactgccattgattgctcggagtcattcagaaacatatccaatcaagtcgtccgctacatccgcgctgacctcgctggggagaagggctga

SEQ ID NO: 510012 - DNA, 156 bp, Stenotrophomonas maltophilia
atgaagattttgcggaagtatccgaagacggccataagcgctgcagcggtactgatcaacctcccattcgccatgtccggcttcggggttaacaccttcctgtgcggggcattctcagtgttcgcactgtgggattactgcgaggagcggaaatga

SEQ ID NO: 510013 - DNA, 1413 bp, Stenotrophomonas maltophilia
atgaacgcggtcctggctgacttcccgcacgacaacctgcgccagctgccgcagtcccgcgatgccgagcagtcggtgctgggcgcgctgatgctggacccggaagcgttcccgaaggtgtccgagtggctgaaggccgaggacttctacggccgcgaccaccagctgatctacacctccatcgtggagctggccggcagcgacaagccgttcgacccggtgaccatgggcgagtggttcgccgaccgtggcgagctggaactggtgggcgagggcgcctacctgatcgagctggccaccaccacaccgtcggctgccaacgtggttgcctacgcggagatcgtgaagggcaaggccactcagcgccgcctgatcgagatcggcgccgagctttcggccaagggtttcaacccagagggcgaggacgcatcggtaatcgtcgccgacgcaacccaggcgctggccgagatcgccagcatccgccggggttcggtgaagggtgccaaggagatcggcaagcgctggtatcgcgagcttgccagtcgcttcgagaacgacgggcagtcgctgggcctgctgaccccgtggaccggcttcaaccgcctcacgcgcggcctgcaggacggccatctggtcatcgtggccggccgtccgagcatgggcaagtcggcatgggccatcaacgtggcagtggccgctgccctgcggggtaagcggtgcctcgtcttcaacctggaaatgaccgacaccagcatctacaaccgcggcgtcgcctcgctgtccgacgttccgctgtcgtggttgcagcagccgaacaagaacgatgaggaaaactggtcgaaggtgacgcaggcggcgagggttctgaacgagtccggcctgctgatcgatgacacggccggcctgtccgaacagcagatcgtggcgcgctgccggcgtgagcggatgaaggcacccatcgggatggtggtgatcgaccacttgcacctgatgccgctgccgggcaagacccgcgagacggtggagataggccacatcacggctgggttcaagaagctggccaaggagctgtgctgcccggtggttctgctgtcgcagctgaaccgatcgctcgagacccggcagaacaagcggccgcaaatgtcggacctgcgcgagtccggaaacatcgagcaggacgccgacttgatcgtgttcctgtaccgcgacgactactacagcgagcgcgagggcgtccggtcgccgctggatggcttcgtggaaatgatcatcgccaagcagcgagagggcgagacgggtcgtgcctggggccgtaatgcgctggcctacggccgtatcgatgaccacgacggcgacgacccggtgattccgcagcaccaggccgccggcaagcgtgccggggggatggattga

SEQ ID NO: 510014 - DNA, 804 bp, Stenotrophomonas maltophilia
gtggcccgcatccgaacaatcaaacccgagttcttcaccagcgaggacatctgcggcctgtcgccattggcgcggctgctgtacgtggccctgtggtgtgaggcagatcgcgaggggcgcctgacgtggaagccgcgcacgttcaagctgcgctactttccggcggacgactgcgacattgacgcgttggcacgcgagattgtcgcgtcgggactcgtcgtgcagtacggcgacgggctggctttcatcccgcagttcgccaagcaccagcacatcaacccgcgcgaggcggcctcaaccctgccgaatcctcccgtcaatgacgaaaacgcacccgtcactgacgcgtcagcacgcgtcactgacacacaggtaggaagggaagggaaaggaaaggaagggaacgataaaagcccccctaaccccccacaggggggaagtgaccatggcgaaggtcagcagcagaagccgaagcgtgccggcaagatcgggtttgccgcattccgggctgagtgcgaggaagcaggcgagaacctgatccccgtggacgacgcggtgttcacctacgccgaccggatcggcttgccgcacgacttcgtggcgctggcctggcgctggttcaaggtccgctacgccgacaagcagcaggtgggcgtgcgcggctggcggcagacgttccgcaacgccgtggagggcaactggcccaagttctggttcccgaccgacgacggcagctggcagctgaccactgccggcaagcaggcaaagctcgtcgccgaggctgacgccgggggtgccgaatga

SEQ ID NO: 510015 - DNA, 210 bp, Stenotrophomonas maltophilia
atgagcgcccctgtcgatgtgctggaagagctgcgggccgagattcgaagcgtcggctggagggtgaccgcgttccgccttgggtccctcgtcgggcagaacagcattgacgtggcctgcccctacaagaccgatcgctgcgtgaagctgtaccacgagggtattgagttcggtcagcggcagcgtgccgcgaagggcggtgccgcatga

SEQ ID NO: 510016 - DNA, 234 bp, Stenotrophomonas maltophilia
gtgagccgggtcgatgtgctggctgtgatagaccgcgaaatctcacgcgctggcggcgtttactactcggacgggcgagacctgatccaagcccacgctgcagtcgcggaggttttcgccgccgcccacgcgtccctcgcagcccgtgaccttgccgaccagctggccgccgacgaccgcctgcgcgccgctctggccgcgtgcgaaccggagacgtcccatgaccccgtttga

SEQ ID NO: 510017 - DNA, 315 bp, Stenotrophomonas maltophilia
atgagcagtaagcacacgccggggccgtgggtcgcccacaaggccgaagacctgcatgggtacaaccacttcgtgatgacgccgaacggcttcctcggctacctgccgaaggacagcgaaggcggcggtgcgcaactgttcatcaaggccgacgcccaccttatcgccgccgcaccggagctgctggaagcgctgatccggctcgaggcggagctagtcgaagacaagtacggcgagtgctacgagccttccccatttgagaatctggcactcgcccgcgccgccatcgccaaagccacaggcggtgcgcaatga

SEQ ID NO: 510018 - DNA, 894 bp, Stenotrophomonas maltophilia
atggcactgcgcatcatccgctccaccgacccgatcacggtcacccgcctgaacgtctgcatctacgccgcccccggcctgggcaagacgtccatttccttcaccgccgacaagccgctgctgctggacttcgaccgtggcgcccaccgctcggccaaccgcaaggacaccgtgcaggtggagcgctgggaagacgtggcacacatcaccgccgacgacctggccgacttcaacacggtggtggtcgacacggccggccgcgcgctcgacaccctgacgccggacatcatccgccgcaatccgaagatgggccggggtggttcgctgacgctgcagggcttcgggcagctaaaaagcgagttcgtcgcatggctgaagcacctcaacagcctgggcaaggacgtggtgctgatcgcccacatggacgagcagcgcaatggcgacgagatcatcgagcgtctggacgtccagggcggcagcaagggcgagatctacaaggcggcggatgccatgggccggctgtcgatacgcgatggcaagcgcatgctcaacttcagccctaccgactcgcagttcggcaagaaccctgggcagctggaaccgctggaagttccgcacccggatcgcgacccgcagttcctcgccggcgtgatccagcagatcaaggaccgcctcaacgccctgaccgaggaacaacgccaagcgcaggcgctgttggagaagtggcgcacgcagctggccgacgtggaggacgtggacggcatcaatggacttatcaaggatgccggcgacctgccgcgggcggtgaaggtgctggtgcacgaccgcgccacgacgctcggcctgattgccgacaaggccagtggcggctacgtcgcaccgaaggcggcctga

SEQ ID NO: 510019 - DNA, 222 bp, Stenotrophomonas maltophilia
atgaggggcctcaactacaagttcaaccacatcggcaccgtgcgcggcggcaaggccaaggctgcgctgttcgcccgggttgtggacggcaagagctacaccatgcgcgagatcgcagagcagctgggcgtgtcgaagaccaccgccgacaagcgagtgcgtcgcggtccctacccgctcacctgggcaaacctcagcaagtcgcgcctggagcagccatga

SEQ ID NO: 510020 - DNA, 291 bp, Stenotrophomonas maltophilia
atgaccaccgacaacaagaccctcgctgtcgatgtgctggcggtgatgtcaatcgcacagacgattttggcgaatgatccaaccaacgacccaacagacaggcttggatccgcccgcgccgcagtcgccgagctgatcgagtacacctcgttgctggtcgcgcagctcgtactccatggcgacatggacgacgggtgcttctactacaacgggcgttcggcatcggagttgcagacgccgatggctgatgtaagcgccgccctcgcccgcgtcaaaggagaatcagcatga

SEQ ID NO: 510021 - DNA, 1401 bp, Stenotrophomonas maltophilia
atgagcaacgacaagaccctggcggacgtgcagcccggtgggagggtgaggctgggggatcagcgttccgacctggtgccgggcatcgtgcgctgtgcgaagtgccagttccagcttgcgcgatcgaacctcaacatgcatagcggcaccgtgaccgctggcgacagcaagactgagccgtgcccgaatggctgcggtccgctctggcccgtgacgtgggagacgtgggcgcgcgaaggctgggccgaggccgaacgactgcacctggagaatgccgccctctccgcccagccctccccgggtggtcagggggatgcgccacggtgcttcgtctcgctggatatgctggccgggagccggcacaagttcggagaggttttcgatcacccgcagggcagcttcgtgcgctacgaagaccatgtgcgagccctcgccgcccgccagccggtggggcagaactggcagcacatcgcgaacgaatgggccgacgcggcgaccaacggcgtgcagtggctgcgcaacatccgcgacggcgcttcgaccgtcgccgacgcgctggcgtgcatggaaagcaatgtcgagcgcatccggcagctgaagccgcagccggtgggggagccggtggaagccaccgacgcaatggttgaggccgcacttcagtccactgtggcgcacaacgcagcaccatggcggcaggttgtagcctccgaggatcatgccgacttcatctcggatatgcgggcagcaattaatgcggccctcgccgcacgcccatctccactgacggtcgaaacaactaccacctcaacgcagacggttccagaccactgcgaccggatcttctggcagcacaactactatcagctccctgttggaccaactgatcagaaaaagcccacgaagcgcaggcagactgcggtggaaaccttgcagggcttgggatatctgtggcgcaacgatgcatggatagccccgcccgagcaggccgtggacctggggcagctacgtgttctggcagaccacgccaccggcaggatcaaccacgccaacaacggcctatgccctgaccaaattgagggacacgatgcccgcgatccggactgcactgtgtgccgcgctctgaccgacagccatggagacggccatgcgcataatttccaggcggtgaaggtggtagctacccgcaacctgcagtgcgagcgcggctgtggccgcaagaccaccaggcagcgcatcttcgagtgcaccatcaacccgttcaacaccaacgccgacggctcggtgaagagcgaatgcgaggtgcgcgcccaggcccaggcgaaggctgacgcctggcgaccggacccgtacacctgcaaggcgtgccaggccaagatcgacagccaggcgatgggcaaatga

SEQ ID NO: 510022 - DNA, 852 bp, Stenotrophomonas maltophilia
atgatcaccaccccagcattccgctatcacggcgcgaagttccgtatctccgggtgggttcaccagcacctgccagcgcaccgcacctacgttgagcccttcggaggtgccgcaggcgtgctgctcacgaaggctcgcagctatgccgaggtctacaacgacctggacggggatgtggtgaacttcttccgcgttctgcaggacatcgcgcagcgcgaatcactcatcgaagcctgccggctgacgccctatgcccgcgccgaattcgaccaggcgtgggagccgacgacagatccggtggagcgcgcccgccgattggtagtgcgtgcgcagatgggctttggctctgctggcgcgacgaaggggaagaccgggttccgcatcgactcacaacgtgcctatggcaccgcgcagcatctctggctgaagttccccgatggcttggccgcgatcgcggagcgcttcagcggcgtccttatcgagaaccggccggcgatcgaggtcatgcggcagcacgacacaccgcagacgctccattacgtcgacccgccctacgtccacagcacccgggtgatgcaggccgggaaggctggctactacaagcacgaaatggccttcgaggatcaccaggagctgctgtctgcgctgctcgcactgcgcggaatggttgtcgtcagcggatatcgaacggagctgtacgacgacacattgaccggatggcaacgggtcgagacaacggcgcgcatcagcgcgggacgtggcggggcgacccgcactgaatgtctatggatctcacccgcagcccaagattctggccaccagcagggactgccgctggaggcaaccgcatga

SEQ ID NO: 510023 - DNA, 249 bp, Stenotrophomonas maltophilia
atggccaagaagaacaaggccgccccgggcgcgggggcactgtgcctgtcccgggaaacgatgcgggagctgtgcgacaccccttacagggatcgccagctcgcgttcctggtgctgaacggcattccccacttcaagggtctggacggttggccgcgcgtactgtggtccaccctcgaaggggacagcgacgtggaaaccgataaggcgacggtcgtcgccggctggaaatcgaacaaggcggcatga

SEQ ID NO: 510024 - DNA, 951 bp, Stenotrophomonas maltophilia
atgcgcagagcattgcttgtcggcattgacgattacgacaacttttcgtcgctgcgaggatgtgtcaacgacgttatcgcgctgcaacctctgttcgaacgacatgaggatgattctccgaactttgaagtagttccgctcacaagtgacagctctagggtcaccaaggctttgctgatgtcgaacatcgcgaagcttctggcccctggagctgatgttgcagtgctctatttcgcgggccacgggcaggcggaagccagcgatgtcactatttgcacaaccgacgggctgccaggagatgaaggagtagccttctcaaaaattctttctcaggtgagggaatcgaaggttggtgaagtaatcatcattctcgattgctgcttttccggaggtgccggggggacaggtgtaataggaggcgatttgtcccttcttcgaccaggagttgccattctttctgcaagcagagcggaccaaccggctggagagaacaacggtcagggcgtcttctccttctaccttggcggcgcactagatggcggggcttcggatgtacttggccacgtaacagttgcgactgcctattcctacctaagcgagtcactaggagcttggagccagcgccccaccttcaagagcaatcttgagagactgaatgccctacgcaaatgcgaaccagctgtgcctcttccactgctgaggagactgccgactatcttccccacagagagctacgagctgcctcttgacccaagctacgagccagatgcagcaccgggccacccagaacacgaggaggtcttttcggtactgcaaaaatttagagccgccaagctgttggaaccggttgggaacgaacacatgtactacgcggcaattcatagcctgagttgccgcctgactcgcctaggccgccactattggcgaatcgccgctaggagagctatatga

SEQ ID NO: 510025 - DNA, 354 bp, Stenotrophomonas maltophilia
ttgcaggcgctattggctgcagtgtggcggcgcaagccaagccccgggcttctgcttcactccgaccagggaacccagttcaccagcgaagactggcagagcttcctgcgcgagcacgacatcgtgtgcagcatgagtcgacgaggaaactgccatgacaacgcagcgatggagagcttcttccagctactgaagcgggagcgtattaagcggaggatctacagcaatcacgacgaggcacgggccgacgtcttccagtacatcgagatgttctacaacccaaaacggcggcacagttccaacgacgggctgtccccggtagagttcgagaagcagtacgcactaaacggctga

SEQ ID NO: 510026 - DNA, 561 bp, Stenotrophomonas maltophilia; identical to SEQ ID NO: 509122

SEQ ID NO: 510027 - DNA, 354 bp, Stenotrophomonas maltophilia; identical to SEQ ID NO: 510025

SEQ ID NO: 510028 - DNA, 354 bp, Stenotrophomonas maltophilia; identical to SEQ ID NO: 510025

SEQ ID NO: 510029 - DNA, 354 bp, Stenotrophomonas maltophilia; identical to SEQ ID NO: 510025

SEQ ID NO: 510030 - DNA, 354 bp, Stenotrophomonas maltophilia; identical to SEQ ID NO: 510025

SEQ ID NO: 510031 - DNA, 354 bp, Stenotrophomonas maltophilia; identical to SEQ ID NO: 510025

SEQ ID NO: 510032 - DNA, 783 bp, Stenotrophomonas maltophilia
gtgttcttccggtcgatcctgtcgtatccgcgcaagaggattgacgagttcggcatcgaattgctcggcaacatgatggcgtgggtcgatagcatcgccctgatactgatgaccctgtgggtgctgatccagggcttccggatcgtcaccggccgcagccgcgactccatgatggtgctggtgaccaacatggcgcgcgcggcgttgattgtgagcgttgccaccagcatggcgatgttcggcagcaacctgcagaaattcctcaacgaggacgtcaaaggcctgatcacccacgtggtgaccggcaaggaccagcagccggaagaccagatcgacaagagcctggcgtggatgcaggtggcgctgtcgagcattgatggcatcaagatcctgaatgatccggggttgcaggcggacaagacgcgggcgctgtggttcatcggcatgggcacgggcggtccggccgtcaccgctggtgcgatgttgctgctctacgaggtcgcgctggcgctgttcatcggcctgggtcccttgttcattctgtgtctgctgttcgaccagaccaagcagctgttccagcgatggctgttctacggcatcggcacgatgttctcgatggcggtactggcagcgatggtatcgatcgcgctggacatggtgatccgtgtctcgaccgcattctggtccaccgccctggtcaacaagttcctgctcgaaggcgcctccagcgacggcatgaccagccaggcgatgcagcagggtgaatcgcccagggttccgtag

SEQ ID NO: 510033 - DNA, 177 bp, Stenotrophomonas maltophilia
gtgagcatcgcgagcatcgtctatctctggttgaacgtggtgggcgtggacccggagggctaccgggggctgacacagcgcgtgttctcgtcgctcaactcgctgtggccgttcctggttgggctgtacctgctgcgcagggattcaagcgcgctgaaggcgcaggctgcgcattga

SEQ ID NO: 510034 - DNA, 354 bp, Stenotrophomonas maltophilia; identical to SEQ ID NO: 510025

SEQ ID NO: 510035 - DNA, 387 bp, Stenotrophomonas maltophilia
atgtcagccacgtctgatctgctggaccgagtgcgggatgccgcgaacatcccgtccgacaacgttttgagccaacggctcggcatcacgcgtgccgtcatcagcggctggcggaacgggaactacccggtcccggacgaacgaattgcgcagctgtgcgacatggcgaagctggatgggccgctctggatggcactcatccacgccgagcgcgcaacgtcggcagtcgagcggaagatctggcgtctgatgctggacaggatcagcgcggcggcggcggtcgtcgcgctggtagcgctgtcaatgccggggctcgcaaacgcaaaaaccgcccaaattcaatcagctagcaccgccgacaacggcggtatgtatattatgttctag

SEQ ID NO: 510036 - DNA, 354 bp, Stenotrophomonas maltophilia; identical to SEQ ID NO: 510025

SEQ ID NO: 510037 - DNA, 279 bp, Stenotrophomonas maltophilia; identical to SEQ ID NO: 323918

SEQ ID NO: 510038 - DNA, 1272 bp, Stenotrophomonas maltophilia
gtgaccgaactggaccgctacctcgatgcggccacgcgccagaacacggtgcgcagctatgcgtcggcgctgcggcactttgaagtcgagtggcaaggacacctcccagcgacaccggacagcgtggcccgctacctggccgcgtatgcgcagaccctggccaccagcacccttcgccaccggctggccgccattgcctcttggcaccgcgaccacggctttgtcgacccgacccggtcgccgctggtgcgcaaggtgctcaaaggcatccagaccctgcactcgggccaggtcaagcaagccgcgccgctgcagattcggcggctggtcgagctcgatgactggttggctgccgcgatcgctgcggcgcatgcccggggcgatggagcggcagcgcttcgccaccaacgggaccgagcgctggtgctgctcggattctggcgtggctttcgcggcgatgaactgctgcggctggaagtggcccatctcacgctggtgccgggacaggggatgacctgcttcctgccgcgcagcaagggcgataggcaggccgccggcgtcacctacaaagtgccagcgttgtcgcggctgtgtccggtggaggcgacccagacgtggctgcaggcggccgacctgcacgaagggccggtgtttcgggcggttaaccaatggggccaggtgagcgccgagggcctgcatcccaacagtttggtgcgcttgctgcgcgagttgctggccagtgccgggtttgccgatgctgggctccacagcagccactcgctgcgccgcgggtttgccagctgggccaacgaccaaggctgggatatgaaggcgctgatggagtacgtgggctggcgcgatgtgcactcggccatgcgttacctggacgggcgtgacccgttcgcccgggatcgcattgaagcgagcctgcccagcccaaccgcgccagctccgacgatggtgctgccggcgcccgagggcaaatctgccctgcagctgcgcctacgcctggtgctgaccccgtttgcccgcgccggccgcggcgcggccagggcccgaggccggatcgaagagatctgcttggccccgttccaggctatgcgcctgaacaccgccagcagcgagtaccggttgactgttcccaccgatcccgaccgggatctggatgaaatcctggccacgttgctcgatgacatgcaccgcatggccgatacgcaccagtgtttcctggaagcgtcactcagtacagacgacggccggcactgggactga

SEQ ID NO: 510039 - DNA, 1143 bp, Stenotrophomonas maltophilia; identical to SEQ ID NO: 501390

SEQ ID NO: 510040 - DNA, 1947 bp, Stenotrophomonas maltophilia
atgcggatcaagcgatccccgagtgaaggcttggcgaacggcggagcatctcagaccggcggtgcgtgggcctggagatcgatggccctcgtggtgaacggcgcgcatgcaacgcattcgcaggccattgaccgctcccgccacatgctgaacgctcctcagcgccaggccatcctcatgacccgttccgcgcttttgctcgtcttcttggccccctccctcgccttcgctcagcagggggacggaaccgacgtccaagccaacgtccacacgttcaaacccgccaaggtggaggcgacgcccgagcgcgttcaggccctgacggtgcccagtggcttccaagtgcgtcccttggcgcaaggccttcaaaatccccggatcatcgccgtgggaccagatgggcggatttatgtctcacgtcgagatcaaggcgacgtgctgttgctggaggatgccaatgaagacggagccttggacgccgaaccgaaggtggtcttctcacgtccaggagcgcacgggctggccatcgccaacgggcagctgtatgtcgccacggccaacgacgtgtatcgcgcccccatacacccggacgggacgttgggtccagaggaacggatcatcaacgacctgcccgatggcggtcagcaccccaaccgcacgctggcctttggccctgatgagatgctctacatcagcgtgggctcgtcctgtaacgcgtgcaacgagaccaatcccgagcatgcggcgctgctgaggtcctcgccggatggcaagagccggtccatctttgccagcggcctgcggaacaccatcggctttgcttgggactccaaaacgggggagctgtgggggatggatcacggcatcgactacttgggcaacgatgagcagcccgaggagctcaaccgcattcagaaaggaaagaagtatggttggccccacatctggggcaaggacggggtgaatccccagagcacaccgccagggcagatcagcaaacagcaatgggcggcgacaagcgagcccatggtgctcggctacacagcccacgcggcccccatgcagatgctgttctacaccggccagcagtttccggcagcttaccggggggacgccttcgtgacgatgcgcggttcctggaaccgcaagcctgcgtcgggctacgaggtggtgcgggttcgtttcaacgccggcaagccggtcgggtttgagcccttcttgaccggcttcctggtcgacaacggccaggcgcatatcgcaaggcccgtcggtctggcgatgacgaagggcggtgcacttttggtcggcgacgatgccaacggcgtcatctacagagtgacttacggcccaggccaagcgtccgcctcccccgcgaccgcagtgcctagcgggcccttgatggcccaagtcaatcaaggctcgggcgtgccgttggccaaggatcggatcggcaaagccgccacgttcgagttccgctccccggcgttttcctcgggccaagcattgcctccccgcttcagcgcgtatcacgacgatgcatcgcccgctctttcttggagcccgatgcctggtgccaagtcctatgcgctgatcatggaggatccggatgcagccaacgtcaaacccttcgttcactgggtcgcttacaacatcccagccaccgagcaatcgctgcccgagggcctgccggtcgatccgcggcttctgaaaccggagggaatgctgcagggggcgaacagccgaggatcggtgggctatttcggccccaaaccgcctgtgggcgatccaccgcaccattaccacttccagctgttggccttggacaccgtgcttgatctgaaggccggcgcgacgcgggacgaagtgctaaaggccgcgaagggccacattctgggcatgagcaagactgtgggaacctaccagcaggtcgaggccccgctgaaataa

SEQ ID NO: 510041 - DNA, 792 bp, Stenotrophomonas maltophilia
gtgcggtctcgagacgtgttcacccattgcccgtttggcaccaccgccctgcccagcccgacttacgggggctggtccaactgggtggatacaggtgcgcgtcgcaacgaggtcaacacatgcaagcccacggctgctcgctgcagcgatggcagcttgcaggttgtggcgtggcactccgccgatgggcaggacgttccgcccacctcgggttcgagtggcatttcttactggtatccggatgcggtggtgcgcctgacgccagcggagaaagcaaagctggactgggccatcgccaacgtgcccatccaccgggtggagacgcccgcaccgatgcccggcaactggcccgccaacgtgagcgagtcggcgttctacgaagagcaatgcaacgcgctttcggacgccgggaacatccgctacgcctattcctacgacttcgaatgcgtctccaacatgggcatgcattactgcgactacaactggaccagcggcggcacctctttggccgtgtgccggcaagcgtgcgcgtccgacctagtgggcaagagcaacaatccctatcgctgggagtggcccgagtcgtccgtggtggcttcgacgccctacacgacctgcacgggccagcccggatgcacgcccaacggtgggtttggcacccagcaaggcctgccggcgtgcaacgagcacaacgtgggccagaccttggcgttcaactggtatcgccagttctacaacccggtgcgggtggactatcaagagattacgttgacgtgccgggggccaacctga

SEQ ID NO: 510042 - DNA, 879 bp, Stenotrophomonas maltophilia; identical to SEQ ID NO: 498392

SEQ ID NO: 510043 - DNA, 354 bp, Stenotrophomonas maltophilia; identical to SEQ ID NO: 510025

SEQ ID NO: 510044 - DNA, 1518 bp, Stenotrophomonas maltophilia
atggccccggtttcgatacgccctatacccgtccgcatgcagcagcactggacgctgcttgcggtctgcctggccgcgctggcgctgccgttgtccttttcggccggtgccgtcgcggtgccggtgctggctcgttctgcgggggcctcgcccaccgcgttggcctgggtgaccaatgccttcatgctgaccttcggcagcctgctgcttgctgccggtggcctggccgaccgctacggccgtcggcggatgttcctgacgggcacggtcggattcaccgctgctacgaccgctgtatgcgtggccccgacgctgctgtggctggatctggcgcgcggcctgcagggcgttgccgccgccgccgcgctggcctcgggcactgcggcgctggcgcagggctggcaggggccggcgcgtggccgcgtcttcgccctgctgggcacgacgttcggtgcggggctggcgcttgggccgttgctggcgggcctgctgctgcaggcactgggatggcgcagtgtgttcgcagccggtggtttaccggcattggcggccttcgcactgggcgcgcgcgtgttgcctgagagccatggagagcgcggccggctggatgtcggcggcatgctgggtttcagcatgatgctggcggcgctgacgctggccctgctgtggctgggcgaattcggcgtgcacgccatgcgcgtgcaactggcattgctcgccacgctgttgctcggcgcagcgttcgtctgcatcgaacggatgcatccattcccattgctggacctctcgctgttctcgcaaccggcgttcctgggcgtccagctgctaccggtggcgacctgcctcggctacgtggtgctgctggtggtgttgccgcttcaactcctgggtgtgcatgggcagagcaccacgtgggttggcctgcagatgctggccctgtctgcgccgatgctggtgctgccactgttggccgcgcgctgggcgggacggatcggcagcgcacggctgtgcactcttggcctgctggtgtgtgcgtgcggcctgtatctgctgtcgcggtatgcggccaatccgtcgccgcggcagtggatgccatggctggcactgatcggcgcagggacggcgttgccgtgggggctgatggatgggttgtcggtgagcatggtgccggtgcagcgggccggcatggctgcaggcatcttcggcaccgtgcgggtggccggcgaaggtattgcgctggcggcggtgacagcagtgctgtcgctgattgccagcgagcatctacagggagcatcgcctgcatcgttggcgcgcgctggtgcctatctggccacgggtacgcaggcacaggcgcaggcactgctgccgtcgatgagcggcgagcagctgcagcacgccagtgccgaggcgctggcggtgctgctgcgtctgctggcactgctgaccgccgcatgcgcggtggtgtttcacctgctgctgcggcggccgacattggccgtgctcagaaccgatagctga

SEQ ID NO: 510045 - DNA, 261 bp, Stenotrophomonas maltophilia
atggagatgctcagcgtcgaggatgcacacgttcagacgaccttcctcgctggttcgcgtccgttggatttccggagcggcgatgtcgtatttggccgcttctacggcgactcagatctactggtgatgaacgcctttggtacggtgctggtctgcctgcctttggacgagcgaaaagattggcctgaagcatcggactcgcttgcaggcttcctatcccggctgcatgaaacccaaggttccaagtactgggagttgtga

SEQ ID NO: 510046 - DNA, 1575 bp, Stenotrophomonas maltophilia
atgcgcaaggtattgctgctgttgatcctgctgaccggcctggcgcccactgcctgggccgcgacggtcaagaccacccatcgcaccattgccggctgggatggaacgcctctcggggccttcgtcatcgaaccgcaggatgcgggcggcgggcgctatccgctgctggtgatgcccagcagctgggcggtgcccagcgtggagtacgtgggggtggcgcagtcgctggcacagcgcggctatgtggtgatcagctacagctcgcgtggcttctgggaatccggcggcagcatcgacatcgccgggccctccacggtggaggatgtcagcgcgctgatcgactgggcgctggacaacacccgcgctgacccggaccggatcggcgtttcgggcatctcctacggtgcgggcaccagcctgctggcggcggcacgcgatccgcgcatcaaggccgtggccgcgctcagtggctgggccgatctgcaggcctcgctgtacagcaacgacaccccgagcgcgcagggcatcgcactgctggttgcggccggcctggtgaccggacgccctggcgcggagctggccacgatcaaccgcaatgttctggcgggcaactaccagggcgcggtggattcgctgttgccggtggcggcgcagcgcagtcccgcggccagcatcgacgagatcaacgccaaccagccggcggtgttcctggccaacgccttcaacgacagcctgttcccgccgggccagctggttgatttcttcaaccggctgaaaggcccgaagcagctgcagctgcgccacggtgaccacgcgctcaacgaagcgctcggtgcactgggcattcccaacgaagtctatgaccaggtgggtgactggttcgatcactatctgaaggcagtggccaacggcatcgaccgccagccggcggtgcagctgaagtcacagaagggcagctggagcagttacccggattggcaggcgaccagcaagggtgcggtcagctacggcctgaccgcaccctctggtttgctgctgccgaccggcggcctggccgagcacggtggcggcaccggctggaactaccgcatcggcagcggtttgctgactgcggccaattccggcgtggcgatggcctccggcgcgctgcagatgatcaacctgccgccgggtgcctacgtaccgtttgttggccgcagtgccgccggtgtctggcaggggccgatccagtggagcgccaaacgcctggacggtgcgccggaagtgcgcctgacggtcacgcccagccgtgccagcaccacgctgtacgcctacctgtacgccgaggatgtgctgggcaatggtcagttgatcagccacaagccgtacaccttgcgcggtgccacgccgggccaggcgaaaacgctcgacctgcggctggaagcgagcagctggaaccttccagccggcagccgcctgaccttggtggtcgataccgtggacctgcgctatgcgggcatcagccagctgggtggggcggtgaccttcagctcgccagccaatgcgccgtcggtgctgaaagtgccgctgcattga

SEQ ID NO: 510047 - DNA, 5316 bp, Stenotrophomonas maltophilia
atgaatcgtatctatcgccgtctgtggagtcgcgcccgtcagtgctgggtggtggccagcgagctggcgccatcccgcggaaaagcgtcttccaccgttcgtgcagggggtcttgtgcttctttcgttgctggtggtgccgactgctggcgcgcgcgaggatgacgaagatgacacagcctggtgggcacgacagacaatgagtgccttcgtcgcaacggctggcgccagcgggcgcgcattcgagacccgggcagtcaatcgtggcgatgtgtacagcaacacgtcgcgggccaactggagtgtcatcgacggcaaggagtccatggcacttgggtcggaagcacgtgccagcggtgaacatagtctcgcggcaggtatcagcagccgtgccgcgggtgcgagaagcgtgacgcttgggagcctctcggaggcatggggagataacagcattgcgctcggccactatgccgtcaccaagaacggtgggtatggcaccgctgtaggcacctacagtgaggccaacgggattggagcaacggcgctcgggcagaatgccaaggcccgaaccgataactccattgccgtgggaagtgggtccatgacggatgccggggctggcgtctcaaagattgccatcggtggtgatgcgtacgcgggcagtagtggctggacgggtgcaatcgcactgggcggggaatcgcgcgcagagtacgacggtgtggctgttggttatggtgcaaagacatcggcaaatggcactgtggcacttggtcgtggatcgcttgccacagaggccaacaccgtttcggtcggtagcgccagcgtgaaaaggcgggtagtcaatgtggccgatgcggggctgaactcgaccagcagtgatgcggtcactggcaagcagctgtatgccaccaactccaacgtgaccaaggcccaggccgcggccgatggggcgaaaacgacggccacggcggcacaatccaccgccaacacggccaacagcaatgccaactcggcgctggcgaaggccaatgcggtcagtggcctggtcagccaggtatcggccgctggcaacgtaaggctgggtggtgagaacaccggtacggtgctggatgtgcgcaacaagtccaatgcggtgcgcagcatcaccggcctgaaggatggggcgctttctacctccagcactgaagccgtgacgggcaggcagctcaatgcaaccaacagcaacgtgacggctgctcggactgcggccgacgcggcgaagaccacggccacagcagcgcagaccaccgccactacagccaacaccaacgccaatacagcgctggccaaggccaatacggtcagtggcctggtcagccaggtatcggccagcggcaacgtacgtttgggcggcgagaacaccggcaccgtgctggatgtccgcaacaagtccaatgctgttcgcactatcactggcctgaaggatggggcgctgagcacgaccagcaccgaggcggtgacgggcaagcagctcaatgcaaccaacgccaatgtcagcaaggcgcaggcagcagccgacgcgacggctacacggctgaacgccagcgcagtggcccttggcgcgggagctgtcgcggagcaggccagctacggcatcagtacggcgctgggcaacaacgccaaagcctacaacggcaagagcgtcgccatgggcgcagacgctcgcgcgacggtggatgacgcgggtaacaagatcagtggcaacgcgggtgtgtccatcggtgctggaacccgcagtggcaacggtgcggtggcgcttggattggatgccgtcgcaacgggtgatcgaggcgttgccgtcggccatgaggcgtctggtaaaggcacgcacgccaccgctctgggcttccagagcaacgcgtcggccaaccaggccacggcggtcgggcgcggggcggttgccagcagcctgtatgcctcggcactgggtaatcaggcgagtgctaaggcacagagcgcgctggccctaggtgatcgcgccaatgcggcacatgcaggcgcggttgcgctgggtaatggctcagcaacgactgggaccaatcaggtctcggtgggcaatgactcgttgaagcgcaaagtggtcaacgtggcggatgccgccttgagtacgtccagcagtgaagcggtgaccggcaagcagctgcatgccaccaacaccagcgtggctgctgtgaaggcgaccgcggacggtgcgcaggcgcgcgtggcggtactggatggcctggtggggcaagtgtcggcaagtggcaacgtgcgcttgggtgcagacaacaccggcaccgtcgtcgacgtggccaacaagagtggcgccaagcgcaaactgcagaatctggccaatggcgtgctcagtgcgtccagcacggatgcagtgaccgggcagcagctcaatgccaccaacagcgaagtggccagtgtgcgcacggcggcaaccgcagcgaagacggcggccgatgccgcccgtggtgtagccgatggcgctgtgcagaaggctgatgtcttgggcggactggtgggccaggtgtctgccagcggcaatgttcgcctgggtgcagagaacactgggaccatcgtggatgtcgcaaacaagaccggagccaagcgacgcatctacaacatcgccaacggcacgctgagtgcaggaagcacagacgcggtgaccgggcagcagctgtttgcgaccaatgccacggtggagacgcagcgacaggctttggctgggcatgcgcagcagctgacggatcaggacgggcgtatcgccgacaaccggatcgagctggatgcgctgcgtacggacttcgataacttcgatccggatctggatggcgtggtcaagttcagtgctgatcgtcacctggtggacatggaaggtgcgcgcgtatcgggggtggcagcgggggatatcagttctgcggccagtacggatgctgtgaatggtgggcagttgtttgcgaccaatgtccgagttagtgagctcgagcgaaacgggcgattcctgagcgttggctatgacgatgagagcattgatgcagatgccggtctgtttggggttgcgttgggcgattcggcaaaagcctcgctgggatctgagggcggagtggcaataggaagctttgcggttgcaggtgcgttcaactcagtcgcgataggaagaggtgcggttgtcgcagaggccgcagaaagaggctttgcgttgggagtcggttccaacgtgtatgcaaaagaaggcgtcgcttttggtgcattgagccgtgtcgtagcgggcgctgatggcgcagtggcactgggttcctattcaattgcaaccgaagcaaatactgtttcagttgggaacggctctgtaaaaaggcgcctggtaaaccttgatcgtggcatttccgatcacgatgcgaccaccgttgcgcagctcaacgaagctcttgctggactcggtggcggtgcaggcctggatgctttcgggaacgttgttgggcctacctatagcgtgcaaggtggcaagcaggacaatgtcggagatgccctggctgcactcgatggggcggtggtcaggtcagacagccgcgtagatggcctcgaaggtcagctgcgtgcgacgttccaacagtcgccctcgacccgggcggatggagttggtcagctgaacttggcaggtgcgcagggcatggttctgtcgaatctggccgatggacgcattgcggcaggcagccgtgatgcggtgactggcaatcagctgcatgctgcggagcagaagatcgagcacaacagacgcgacattgatgcaatgcggcgcgattggcgtttggatcagaggaatctgctgactgagattagcgatggagctctcatcgatttcggcggcgcacgcctgaccggtgtcgccgatgcgcgtctctccgcggatagttcggatgtggtgcgtgggagccagctattcgagactaatcagcgactgaatgacatggagggcaaggataggtttgtatctatcggaagcggtggagaacagaatgcagcatctgctggggcgttctccgtcgcagttggcgattcggcgatggccgcaaagggaaacgaggggggcgttgctatcggcgcgtacgcttacgcagggggaatgaactcgattgctctcggtcgcgcagcttctattcgagacggagttaacgacgggtttgcagtcggcacgcgatcattggtggaagctgatgccagtatggctattggtgccgaaagccgagtttctgcaggtgctaagtatagcgttgcactaggcagtctctcggtggctgacgagtttggtactgtgtcagttggtcacgcggcattccagcgtcgcctcgtcaacgtagccaacggccgcaacaccaacgacgcagccaccatcggccagctccgcggcgccctgtccaccctcggcggcaacatcgacgccaacggcaacgtcaccacccccgccttcaacgttcagggccagcaccagaacaccatcaacgacgctctcaccacgctggactccgccgtggtcaccaccggctcccgcatggaccgcgtcgaaacccagctccgctcggtcttccaggaagccccgtccacccgcagcgacggcaccgcccagctcaccctggccggcgccaacggcatggtcatctccaacgtggccaacggcctgatcgccgctggcagccgcgaggccgtcaacggtggccagctgcatgccgtacagcagcagctcaatggccgcatggacgggctggagcagcgcgtggatggccagccgcagtcgcgtgcgttggctgcggcttcggccgcacccaccgaacaggtcacgccaacgccggaagccggcgattcgccacaggtggcctcggcaggcgagggcacttcgcccacgccgcagccgaagtcgaagaaggacgacacgccgtcgcccacgccgcaggtcgataccgctgaactggagaagatgctggcccgcgccaacgaatacaccgatggcgccatcagcaacttcgaacgccgcctggacaagatggacaagcgcttcaaccgcatggcggcgatgagcagtgcgcagacggccatggccatgaacaccgctggcctggccacctacaaccgcctcggcgcgggcgtgggctacgccgagggtgagtccgccatggcggtgggctaccagcgcgtgctcaacgaaaagggctcagccaccttcagcctcaatggtgcgttcaccaacagcggtgaacgcagcatgggcgtgggtgtgggcatcggctggtaa

SEQ ID NO: 510048 - DNA, 1722 bp, Stenotrophomonas maltophilia
ttgcccgacttcaatttctttttttccacgagcctccaagatactctcactctggatggctatcacctgcttcaagaccatgtgggcggccattacgcacggccttgggacgacttcgactacatcgtgacgttccagatccagcgggtcgagcagggtgagcgagagttcttcggtcgcacgaaagtgctaattcgaggcgaaaaggatacgtcaaaatattttgttgccaatggagatccgcttggcaatagtttcgacataggcaaactactggatccaaactccgcggtctcactggcagctgatctcgactattaccaacgtttggctaagcggcttgggagcgcagccgaagagttcctacgtaagatttgcgatgcaagctatttccgcaaccggtacgagagctacagccgctgggatggcttcagcgcctcactgcaaaggggcggaagtacagcattggccattattgataaaggtcaccaaattgcagctggtcgatacgtcccggaaaaagacttcgaattcaacgtgacaggtctcacagaagacttcgagccgatccagtttcgattcgacaaggatcgaaggcttggcaacactaatgtcaaccttctgattgggcgaaacggttcgggcaagagtcatgtcctacgccacctagtagaccagctgactggcgtagttacgagtgaggagaagcagccctacttccataaggtggtggtcgctgcctattcgcctttcgagtcgtacaagaccgagaaccagttgtcggctacgctaggcgaggtcacccaaggcaaagacgcgatggaggaaatgtatcagcgacggcttatggtaaataaatatgcgtacatcggatttaagaaacccgatggatgcttctctctggactggcccaaggagagcagcgcacatgcattaattaagatccttgcttatgacgaggacagttcgtggcgcgacgtaagccgcttctctcttctctttaaaaccctgaagcaatcgatcaactttgacttcatggcactcaaggacaaagaaggccggccaatcctgctctcggcagccaaagagcatgagcagccgagcgtgacatctatccaggataaagtagatgcgacccaaggcatcctcttcctaaaacaagagggcaacacacagcccccgtcctccgtcctactcagttcggggcaaaccatttactcgtacctccttccaaatctggttgcagaagttgaagatgagagccttattctcctagacgagccagaactatacctgcacccggcaatggagatcgctctcatcaacatggtaaagtctctgctcagaagcacgaaatcgaacgccattgtcgcaacccattcgtctatcttagcgcgcgaggttgaccgcttaggagttgtggttcttcgacgtgaagaggagcagacaaccgcaacgcgcccgcccattgagacatttgggcaatcggtggagctaatcatgggcgaagtattcgacgactatcacgtacgcaaagcctaccagcagtcacttgatgcggcagcaaacagtttctccagcccccaacttgcgttggagaaccttgctgaatcagtaggcgatgaagcgctcgcatatctggcctctaaagtcgacgatggtcaggtcacgatcgaactgcgtacagcggacgacgcggaagattctccggagcaagcatga

SEQ ID NO: 510049 - DNA, 876 bp, Stenotrophomonas maltophilia
atgagatttctcgactcgatgagactggctagcgccccgtgtccgtggtacaccaaagccaaagtatccacacgaaagcggcaggcagagtggcttaagcgagccgcagtcgaggcatattttcaccagcactatgctacgtacgacaaaactgtcgccgattttaagttgccgccgcaatcaagctcaaagcgcagattggattcactgatgcgggagttctatcttcgtccaaatactgcacttcgtgccgaactgcatcaacgtaggcacgaacacggtttgacggaatgcccctattgcggcaacccattgatgccagacacactagatcactttctccccaaggaggattggcccgagtacgctattttggcgaacaatctagttccgcaatgcagatcatgcgcacccatcaagggcaggcgctactattgctcggatgtaatgagcgcgatgtttatgcatccgatgtatagctctgcactttcctcggtacggttcaagatcgacgttagtttcccggcggacaggccaatctttgcaataacgtttagtgtcgctgcgagcacaactcccaccgaagtcgaccgcatcgctctacacttgaagaagctcgaagtaaagaatcgaattattgttttctgcgttcgaaactggtcattctggcgacggaaagtggagacccttggaatagatatcaaagcgctatttcttctcgaactcggcacagcatcctcaggagaacacggccaggattgggcgacggccttcatgaagggcgttcttcgggataccaaggcgctggcggctttgaacactaagtcatctatcccgctccagcctttggagaatctgatagcgctggaagtttaa

SEQ ID NO: 510050 - DNA, 126 bp, Stenotrophomonas maltophilia
atgccgccaaaacccgagacgcttttggcattgtcgcatagcgaggaaagcggcgagagccttggcgtgcttggcgcagcggcgcttctggaacggagtcgtcagaaccttctgccagagatgtaa

SEQ ID NO: 510051 - DNA, 198 bp, Stenotrophomonas maltophilia
atgcgcatcctgtcgaacctcatagttgaagttggtggctccaacgccgctgagcggatcctgcaagactccgctaccgtacgcgaggcgctggcgtccgagtggctgactgcgttccggatcggcgtagagttgggtgcccagccctgggaagcaatcacgccgctagccaactacgccgtgaggacaggcttctag

SEQ ID NO: 510052 - DNA, 474 bp, Stenotrophomonas maltophilia
atgcgcccgactatccttgcactcgatttggaggggacactgatatctaacgcggtcagccagatccctcggcccgagttgcttagcttccttcaatttgctcgcgacgccttcaaggaagttgtcctcttcacaacggtaccgaaacccagtgcgctgaaaatcgcgtcgctcttggcaagcgaagggcacgtgccgcagtggttcgcagaggtccgctacatcgactggacaggatctacaaaaaatctgctactagtgtcgccgcaactgggcgaggctctcctgctagacgaccatgagccgtatgtccatcctggccaacacgccctgtgggtcgaggccccgctgttcgcgtcgccgtatcctgctgaagacgcaggtatgcggatctcgcagagacgcatcgagcagagattgtccttgctttcgagctcgcggagtgagccgccggcaccaaatcacctcagctga

SEQ ID NO: 510053 - DNA, 1233 bp, Stenotrophomonas maltophilia
atgaaatacataatattttattcttggcagtctgacttgcccaacaacaccaatcgaagcttcattgagtcggcacttcaggcggctgtttccgcaataaacaccaacgacagctttgagttggagccaaccgttgatcgagatacccagggagttcccggggctccaaacatttctcaatccgtgctggataaaatcaaggcatgcgacgcattcgttgcggacatatcaatagtaactggcgacaagtcggccgggaaaaggctttctccaaatccaaacgttcttattgagttgggctacgcagttgcattgttaggatgggaaaaaataatcctcgtgtgcaatgccgaatacggggatggcgaagaccttccatttgacattaggcagcaccgcaggatttcttattcccttaagcagcaagacgaaaagactcctacaagaaagcaaattacatctcaacttaaagcacatctatccgtcctgcttgagcagggaaaacaggtggcgcaaaaaaaatcgccaaacatatatattcaatggcatgtccttggagaagatcattcggatgatatttctgtcaagcgaatgagcgattctgcggtcgagaccatggctgatttgaaaaagaaaagtgatcgaatagattgtattgatggttcgattgaccctaagtggcccgaaagtgttgcttggtttaagaggcgagccagtcacgtcattgaaagtctatcagacccacagttggcactaaattacgtaatcagcaagaataaagacatagctaaagcgttcacaatttgcgtggcaaacaatggaaatagcttggcttctgacataagggtgaatattcatctgcctgagtggcttcaggtttattcaaaactcccagagtcagaggtcgtggcgccactgatgccgacgccatccccaccaagccccccggtcgttggaaaggcatatgcgaccgctatgggcattcgacgtgaggcgtttcaagtgccgcccttacgggcgcgctcatctgcgtgccgtgaagaaggacggcacaagatacacttctgggcagaccgcctattgcacaaacatcaagttgagaacgccgacgataaactctacttgatcgcattgccatcagccccgataggggagcatgagataccatacaattccttttgttcggaattggatgattgggtagatggaacggtgattgtgaaagttgaataa

SEQ ID NO: 510054 - DNA, 831 bp, Stenotrophomonas maltophilia
atgcatctatctccaccctgctttcatatactcgaggccgtggatcagcttctggatagatgcatccgaggctgctatccaagagcctggaacgaagatcacattacgtatagctggctgagcaagttgtccgaggcatggccgtcgctggcgcctgctcgccatggtcctatagacgtaagctgggatgcttataaaatggacggagcgctggaagaagagaacggagatgttgccttcctcatcgacttgagattcgacaatggcaatacgctgcagggagtcggcttcctagaggcaaaaaggatctacacgtccggacgattcgatgcgctgaaatggaagcaacttatagggctagaggccaattccacgaatcaccagctcctgctgtacgactatgacccagtgcaaacggagttttcgcagttcgagtcgatttgttacttcgattgcgaagaatgcggtgaggaacaagagcttcgctgttaccacggctacgccgacaagtcttctgccattgtagtccccagtgttcatgcaattgcttacgaagaaaagggtcgagtcctcgagtcaatcggctacaggcttgccgagcagatcatcatgcgctatttccgcggccttgatctgaacttcgataaagatctcgtcgctaaagttctggcaggagtagcaggcggcgcaaagtatttggccgttgctacggtctcggttggtagctcggatcaatcgattaggcgcgcaaagggtgacgatttgaagctgcaaccggaagaacgaagcgggtataggcgcctagagcgggccgcaaacggcgagagctaa

SEQ ID NO: 510055 - DNA, 2415 bp, Stenotrophomonas maltophilia
atgaagctacaggcataccggctgcagaactaccgtagactgcgggacgtcctcatcgaaatagatgacgacatttcgatttttgtcggtgccaacaacagcggcaagacgtctgctgcacaaggcctatactcgatgctccgcggcgaagcgaagaagtttgaactcttcgacttcagtgcagcgctgtgggccgagatcgacgcggtcggcaggacgcctggcgatgaggatgggcccaaaaggttaccgtccatcctcttggatctctggttccgcgtcggtgaagacgaccttgccactgcaatgtcgctgctgccgagcactgagtgggacggcaagtgcgtcgggatccgggtggcgttcgagcctcgggatgcccacgagctcgtccgaaagttccatgaactacgtgagaaggccaacaacgcagctgtcgcgcttgccgtcaagcgcaagtccaccggggaacacgcagtggaggcgggcgcggaagacgcggctgtggtggtggccgatgccggcgagtacaagccttggccagaaagcctgacgaagtacctcaccaaggagctgagcaaggaatacaccttccgctactacgtgctcgatgagcgggcttttgccggatatcaggcaaaggaggccgactacgagccgctacctctaggcaatgagccgggcggtgcggccattctcaagtcgctggtgagggtcgacttcttgcgcgcgcagcggcacctcgatgacccggattccggtagctctgatcgcgccgagagtttgtcgcggcgactgagcaagttctatcaccgcaacttggagaagcgtggcgacgaccatgcggctctcaaggcgctcgattcttcggagaaggagctgaacttccatttgaaggaagtcttcagtgacaccctcaaacgcctggccaagctcggctatccgggagtcaacaatcccgagatagtgattcgggcagccttggatccgaccactgtcctggggcaagacgctaaggttcactacgtgatcccgggcgtggcttccgcccaactgcctgacagctacaacggcctggggttcaagaatttggtctacatggtggttgagttgctcgacttgcacgagcagtggaaagccgaggaggacaagcgagctgcgcttcatttgatcttcattgaggaacccgaggcgcatctgcatgcgcagatccagcaggtcttcatcaggaacgttttgcggctccttgaggatgctaacgatcacgcggattttttccacacgcagctcgtcatcaccacgcactccccacacatcctctatgagcgggggttctcccccatccggtacttccgccgcgtcagcgaccagttggaccaccacacggaagtgcgcaatctgtcgcaattcaagacgggcgtggccgacgctccaacgcgcgagttcctgcagcgatatctcaagctgacgcattgcgatctcttcttttccgacgcggtcatcttggtggaaggcaacgtcgagcgcttactcttgcctgccatgatcgagtcggcggccaagcgcctgcgttcctccgccctgaccatccttgaagtcggtggcgccttcgcgcatcggttccaggagctgatcgcctttgttggaatcactacactggtcatcacagatctagacagcgtgacagtcgagacggacgccgagaaagccgccgcgcaaggcgcaggtgttgagagcgccgtcgacggagattacgaggacgacgacctgaaacccttcgagctcgaagacgacgacgcggcggaacctggccgaaagaagaagtccaggaagcgtggcagcacctgccatgcgcatgtagagggtgccgtcacatctaatcaaaccctcatcagctggatcccgaagaagcggtcggtggcggaactatgggaggtcactgcggagcaaaaaacgctgtcgctgtccgagggctccagtgctgagattcgggtagcctatcagacgaaggtttcagtaacggtgggtgcggcgacctcgcagctctgcggacgcacgcttgaggaggcctttggtcttgagaacgccgactggtgccaggctgaggccaaccgggcggtcggcctcaagctcaagcgcgcgccgagcagccccgaggagctggctgagaagctacacgacagagtagtcggcaagaacttcgacaagacccgctttgcgctggaggtcctcgcgagcgggccggtcaatggctggaaggttcccgcgtacatcaccgagggcttgatctggctcgaagccaaagtggcccacgagcttgaggcggacgcggccatcgccacagaggtcaccacgattaagccgactgcatcaggtgttgttactgtcattgctggcgagggacagacggcatga

SEQ ID NO: 510056 - DNA, 1932 bp, Stenotrophomonas maltophilia
atgagcaggcgagtcgatagtccggacactgacgccgaccgcgagatccacgcgtgcattgccgcgacgccatcgcgtcccttcgtggtgcgtgccggcgcaggttcgggcaagaccacctcccttatcaaggcgctggactgggtgatgtcggagcatggcgccagcatgcgggcgaagaagcagaaggtcgcgtgcatcacgtataccgagctcgccgccaacgaaattctggcggacgtcaacgaagacccactggtccatgtctcgaccatccatagcttctactggtccattgcaaagacgtttcaggtcgacatcaaggtttggctgcagagcgacatccgcaggcggatctccacgctggaagaagagctcgagaactacggctcgcgtgttcggcagaccacgcgcgacagaaacagggccgaccaggagcgctatgcccaaaacctggaggcggtggctaacgtcaagactttcaactacggcgtgggcagtgactacgcgaagggcatcctcggtcacgaggacatccttcagctcactgatttcctgttgcagaaccgcccgctgttccgacgggttgtagcgctaaactatccattcgtgttcatcgacgagagtcaggacgcgttcccaggggttgtgaagtccttcaaggaagtggaggctcagatgcgaggtaagttctgcctcgggttttttggcgatcctatgcagtcgattttcatgagaggcgcgggggacatcccgctcgaagaccattggcgggccattacgaaaccggagaactttcgctgcgccaagcagattcttgacgtcgccaacgccgtgcgcgcgcagggcgacggcatggagcaagttcgcgggctgcacgagagggtcggtggggacctcaggccggtggaaggctcggcctgcatgttcgtccttccgaatgcactcaatcgaacggaagccctgacaagagtccgagcgtggagcgcggcgaggaacaacgacgagggttggacgaccccagacgacggggtcaagattcttgtcatcgtgcaccgcatggccgccaaccggctcggatttggcggtatctactcggcactgaacgataagacatcggaggccatgaagcaggggctgcaggacggcaccggttggcccgttcgacccttcctcagtttcgccctgccgatcgttgcagccgtgaaagccggcaacgagttcgcagcaatgaacctgctccgagagttcagcccgcgcctggcgcctaacgcactggtcggccgccgtgccgcagatgtgctgcgagagctgcacgcagccgtattgagacttgtcgccatgctggatgaggcagtcaccaccgttggcgatgttgctcttcatctccgtgacgcgggccttttcgagttcgatgagcgctatgcgcgcgtgcttgggttcgtcggagatgtttcagaaccagctcaagaggttgatgcatctgacgcaactcccgccgagggacgatccgccgacgcagcgatggtcaagttcttcaggtgctctgcgcacgagcttcggccctacgaacgatatgtctcagaaggctccccctatgccacgcagcacggtgtgaagggagcccagttcgagcgcgtcatcgtagtgatggacgaggaggagagtgactaccggacctacaactacgagcgcatcttcgccagcgctgaggcccgtgcagcagatcgcgcacgagtacagggtggtgatgaaaacacctggagccgaacgctgcgcctgctttacgtctgctgtactcgcgcccagcgtggtctggtgttgacattctttgtcgccgatccggcgaacttcttggagaacgtcgtggcaagcgggatcctgccccggagtgcggtgttcacacaggacgcgctggttgcatttccgtag

SEQ ID NO: 510057 - DNA, 285 bp, Stenotrophomonas maltophilia
atgaatacccagattagccgacttcgcaagaaggcgtccgatataggagaaagctgcctcgtcggtttcaactttcatcgcgcgcgcgccacctttggaaccgagttggccaaagctgccctcaagcatggcggcataactttcgcgatctggcttgtgaaaagtgcgctcatgcacaagagcgagaaggacaccatcagatacatcaaatttgtgcagtctatttcaattctcgaagagacttccgaccagttttctcacgagttctttgggatgcttccatga

SEQ ID NO: 510058 - DNA, 1737 bp, Stenotrophomonas maltophilia
atgacaatgaaattgcatcctatggagttccctgagatccgtcagagctcttcacagcgactcttcgacctccgcttcctggcgtacagaaacggggcgtcactagactgcgtcgcgttccgcttcagaactttcgatcaagcaaagtccaagggactgcttggtcagttcttaccgcaccgcctacctctgctcttgaagttatacgagacaatgaaacgcggcgttgcttccggggatgcaagtccgaccacctactcgaggcttcgggccgctttcaaattctatgaatgggccgatgacgagcagcgccgcgtcgatctatcaacagccgccgacagttttttggactggtgcgaacacgtccatcaaagaactctcaaagggagtgaaatgaggatatccctgaataccgcccatagtttggtcggcaggctggacaccgtattagtgcgctcgcttggctttaaccgctctttactagccgcgaccagtctttcaaagcgccctccacgacaaacattcctcgctgataggcaggacatgcgatccctcgagatctttggcagatccttggtggcgatctgcgattccttgacgccggagtcgactcttggccgccttccggttgttgtaagtgttggcgacagcggatccatctcacactggtgcggtcttctgccgccggagaatgtggctgcgcaaagtatgcctgcgaacagctacaagaaagccgagtcagaccgagctcggcttgcttgggagctcgatccgaaccctctcaagcggctcaccgtcttcaacatgcgaatccgtgcagaaatgttgatttttatagctcagacatccatgaacttggcccaagcccaagcactgaagcgcgaaaagcttcgcagctatgtggaaggggaaatggtggcctatgtcagagcatacaagggacgccgccgaggtgaagttgtcttccgcgcgtttcgctcctatcgaacacatttctctcgctacctggattggcttgacgcttgcttccctgatcggcaggaactgttgtttcctattgtcggtctgcaaaagcgaaccacatggaaatcccaaggatttcaaaaactgaaggaagagttgctgggaattggcgtccccttctttggacccatgatcctgaggagagtgaaggcaaactggcttgcagagaggatcgggaaccgatctgtatccgtggaggcaatccagcaccttgaatcgacgaacgctgcctatcagcgcccaaatctgtcgagggcgatgggcgagatatccgaattcaataggatgatcgagcaggcattggattccgctggtccaggccagtgtactgtcccgtttcagccttggcagatgcagacgtcggcggcgaatgcccccatccctgactgcgtcaatcctgccggttgcttgttctgtgtcaaccatcaggacatcgaaagccttgactacatgtggtcactcgcaagttacagagcacttaaagtactcgaagtagcgaaccatcggaatgctcctttcccgtcgagcgtccctccaagtgaagacaggccacctgctgtgcaggccgccgatcaggcgtcaaagaagctgatagaacttagcgccgtcagcctagtggccgcaggttgggcgaaggaggcagaggaacgagtccgggaaggtaactttcatcccaaatgggctggattcataagactaatggaactcggatga

SEQ ID NO: 510059 - DNA, 2043 bp, Stenotrophomonas maltophilia
atgaactctagaaacttctttcagatcaagtctgaattcgcctctcgatcgcacgatgcagcaaacagtgctatcgaatcttggccgccaccagatgactacccgctggtcgttgatgagtttgggtccgttgtttctcggatcggagatccttattggaacttcactccttggacgcgcactcctacccggctcagctttgagagtgtctccagcagaaggcgctcggttccgttggatcaagccaacgccaagatcttcaagtatgtggtactaacgtggctcttcggtcccaacagggcccagaagccaagttcggtggttggaaagtttgaactcatgaggccgctgtttgtcctctgcacgcaaacagggatttctgcggcggatctctggcgttttccggccatcgtttcgagagtcaaagactgcttttcgcgtgcccgtgcccgcgagagcattactatccttcatcaaatatatctacttcgccgggagactgggttcttcatcctactgcctgagcagatcaacgaacttgcaaggaacattcctaggcacgaacgcatccagacaccatacatcccaccgagaatatgggtgcacctgatgcagagatgcaagtcctgcctagaggattttatagacaactctagtcgagtggaggctctcttcaagttctcgattgaatcctatcgggcaaacttgatggaaggcaagaatctctatgtcgattctttctcagccggcaggaatccgttctccactccatcggggaatcgcggcactcgcacgtctgtagtgatacacggaccattccaacattgtgctgagcagtttggcgtacgcaagttgctatcaaagtggataaagggaatgccgacagagaacgtggctctaaaggtcagcgatctgtctaagtacctgtcccttgttacgctttgcggcgaggtgtacatctcgtgcttcgcgttggcgcgagtgaatgaggggaggagtttacgcgcaggctgcattgaacaaagagtcgacagcctcgggcttcccctaactctgatcaaggggcagacgaccaagacgatcgaggaggatacttattggatcggatcagatttttgcaagaacgcggttgtcgcaatggagcgggttagccttctacggatgtcgtgcgcaatcgaagacccccggtctcctgctacggaggaagacctcgacaccagaccgctcagacttcgcgcgtatgaaccctggatacccaattccggagatgtgggccttcctatcgactcgcttcccggagcacaggctctggggaaagccttggatgatttcgagtacctactggatgacagggagctccagatcacgtccgaagaccttagcatcgctctgtccgttacccctggattggaccctgagaagttcgcaatcggcaagagatggcatttcgcatggcaccagcttcgtcggactggagcagtcaacatgaacagttcgtcgctcgtcagcgataagtccctccaacttcagctcaaacactctgctgaagctatgacaagatactacacacaaggatactatcatcttgatttggttctagatgagggttcgaggaaagaattccttctggcactttatgatggtgtagcgaaggacatgacagccttacaagagccgtacttctccagcccattcggcgacaatcacaagtcatctcttctgaaccttgtttccgaaaagaagcataatcagctggtcaatctcgctcgccagcaggacataccttataggaccacattgctcggggcctgcaccaatccctcaccctgccaattcggcggagtagatgccttggttgaatgtgctggccgctcagatttctgcgcgttcgtactgttagaccgcaggaaaattcccgccttgggcgaacttaaggctgacctgcgccgaactgccagagaagccaaccctgacagcccactctatgccagcctcacagctcaagtagccgctattgagcgagtggaagattgctcgcgttaa

SEQ ID NO: 510060 - DNA, 561 bp, Stenotrophomonas maltophilia
atgtcgcttcaatcgccccaaggccgtcctcccagcgcagtcgccgcccaggatttcatccgaccgctgggcttggcttccctactggtctgcgtaggattcatcgtactcattgcacttcaagcagtgttgctttggcagctggctgacagtccgctctggcagagaatgatcatgatggccactgagcagggtttcccccacagcgtgcagtggatgctgaaggacccggtcgccgccacattatggctgtcgctacccggcatacctgccgtgctttcaagctggggcttctaccggcagcgtcgctggggactctggagctacgtggcgttgctgtggttgtccgcggtggcgaatttcgcagtcgtctggtggctggacagcatcttcgctgacctcatgacgcatatcgtcgatccacatacgctgcgcgaagcccaggtccaacgaatcctggtgtcactgaccttgtccggaggcgccgtggccatactcgttgcacagggctggctggcctggcgcctgctgcggccggacatccgcgcgcgtttccactga

SEQ ID NO: 510061 - DNA, 276 bp, Stenotrophomonas maltophilia
gtggagtgtcggtcgtgcggtgcgcccctgcgggcagcaatgcgggtgtgtgcctactgtggaagcctggcggaagaggcagcggcggtcgggcccgcgatggatgcctggagtgccggcgaagcggagccgcgtgccctggaggcctccttgcgtcgcgagctcgcgtttcttgtcgagcagcaggttgaaaccggtcatccgagcattgcccggaagattgaaaacgtcgagcggaggctcggcgcacttttgcagcaaacagggggagtgtaa

SEQ ID NO: 510062 - DNA, 840 bp, Stenotrophomonas maltophilia
gtgtcggatgcagcagattccttcgtcgagaaaaccttcgacgagttcaccgaaaagaccgaaatcacgcatgtccagcagttcatgtggggagagggcaacctctacatccgcgattacctggacgaggtcgccatcagctcggaaaatctgagcgcgttcaatgcccggtttacactgcggcgtgtcaagacggctgagctcgatgtccttgtgctcgattgcgtggtgatccgtgccgatgattggtttcatgcgcgcgatggtgtgatcatcttcaattgcgaccaggtcaatcaacgggtcgagttcaccgagcaggacacccaggtcgagcacatcggtggccagctgttctgcttcgagaatgggcgttacatcatctccgaagcgcttctgaagacgatctgcgctgctcaggtcctgaaagtgcgcatccagggcgcgaccgtccattcggatccgccgctggactggtgccagggattccagaagtactgcaggcagttctacaacaacgtctacgatgccagcgcctggcccgaagcggtggccggtggcctgccgccgccggcgaagacggggtgtttcattgccacggcggccatgggctcatatgaggatggcagcgtgcgggtgctgcggcggtatcgggaccgcgtgctgcgcaggacagcggcaggccgccgctttgtcaggctctactatcgctgctcgccgccggtggctcgcctgatcgagggcagtgcgctggcccgtggcgctacgcgggtgctgcttgttgcaccgctggctgcgtgggcgcgccgtcgcctgtctgccaacatgatcgaggcctga

SEQ ID NO: 510063 - DNA, 1107 bp, Stenotrophomonas maltophilia
atggcgctcattgatgtcgttgcgttcgagaacactgcgcaggacttcgtctggaagtttccctccacccgcctgaggtggggttcgcagctggtggtgaagcctggccaggtcgcgttcttcgtctaccgcggcaccatccgcgaggaggtgcgcgaagggacgattacgctcgatacgcacaacctgcctttcctgaccacgctcaccagcgtgccgttcggaatggacagtccgttccaggccgaagtctggttcgtcaatctcgtctcgaagctggacaacctgtgggggacccgtcgcccgatccagctggaggatccccgatacggcgtggtcgtgccggtgcgcgcctatggccagtacggtttccggatcaccgacgcgcggcggttcctggagtcgctggtgggggcggggaccggcttttcggccgggcaggtggtcgagtacttcaccggggtggtgctgcaggccgtcaacgtgcacctggcgcgcgcgctgacgacgctgcgcatctccgtcgtcgaagcgtcgctgcaccttgaggagattgctgcgcaatgcagtgcggccatcgatgaagagatgggtcaattcggcgtcagcgtcgtcaatttctacttccactcggtcaacgtaccggaagacgatccgagcttccggcggctgaaggaactgaaggaaaagacggctgagctgaacatgctggggcgcgatatctaccagtacgacaggtcgatcgacgtgttgaaaaccgcagcggccaacgaaggcaatccggcggtgcaggccgggctggggctcggtgctggcctggggttggggcggggcatggcaagtcagctggatgcgctgacgccgcgtctgccggcacagcctcccttgcttcctgtcgccacgcagtacttcctggccgtggacggcaatgcgtcggggcctcacggccttgagcaggtgttgcgcctcctgcgtgagcgtcgcatcactgtggagacactggtctggcatgagggattgcctgcctggaaggcggtgcgggagatcccgccgcttgcagaagggggcatgccaccgatcccgggtggcccgccgccgctgccctag

SEQ ID NO: 510064 - DNA, 1233 bp, Stenotrophomonas maltophilia
atgagtgtgctcggactgctcttcgggagtattgtgtccaccactgcacttgctcagaagaatgtttccgagagtgagaaattggaggagctggatgaggagactgcggttgcggtcagctccctcctttccagagtcaagtctctatcggttgatgaagcaatcagacggattcagctggaggcggcagtggcacccagcatccaggacattcgtcgagagtatgccgggcgcttgacggaaatcagcatcgagcagtcgcctgactttcacgtttcggtgaagctcaagggagatggtgctgtagcagggcggcaatggacgacggcggctggtaaagcacgtgtcgagttctcctctgggcaccttttcacggaggaggagttcaccaagcaactgaaggaaattcggctggcagcacagtcagctatccctggtttcgttggattgaccggatatgccggagataacgaggctgaggtcagaatacgtggggatgaacaggacgccaagaagtacatgggaatcctgtccaagctcgaacgtgcctatcgcgtaaagctccgtttcaagacgtcggacgttcctgaaagcaattccatatatgcaatcggcggagccgtgctgcagtcaaacaattcatactgcaccaccggatttacggtgaagcacgtggctacaggtctaaagggaatcataacggcagcgcattgccccgacgatgtcatctatggcaactatgggagtagccagaacgggaccttggttacgttccccttgatattccaggatcaaaggaacgatgcgcaaaccgatgtgcagtggcatcgaattccatctccgcacattcctttgctggaggcgtacgcctcgtcaacggtgtcaacgcgatttattgcgaacgtttacaatgtgccagcgaaagacggtaccatctgcttccgtggttcgcgtagcggatatagctgtggaatagtcacgtcggttaagcatagtcctggaaacatttgtgggcccaccgagtctatgcaatgcgatgaggtctggttcaaggtagagggaagctcgctcgcgtgcggtggtggcgacagcggtgctgcaatgttcttccaggataccggttatggcattgtcaagtctgcgcgctcggacacgccgctgccgggcgagtgcaagtcgctcaccggaatgccgttcagtcgcgtcagggcttgggggttccagcccaactag

SEQ ID NO: 510065 - DNA, 1257 bp, Stenotrophomonas maltophilia
atgcgcacgccgcccgcaccgctcagcctgatggaacgcgaccgccgctgggcgctggcccgcgacatcatggccggtgagtgcctcgatgccctggttgtacatggcgaccgggaagccgccgcgcccgccggcttctcgccagactgctacttcaccaatgaccggcccggctcgatcgtggtgttcgtcggcgaccagcccccccgggtgttcacctttgcctcgctgatgattgccgaccacctgcaggccggcctgcgcggcgatctgcaatggatcgcacccgaacagctgtgggtgggcaaatccgggcaggaggtgggccgctggctgcagcagtgtggcctgcactcggcacgtatcggcgtgctggggctggagccgtatccgccgttctacttcgacggcgcgatgcctgcgcgcaccctgcagggcatgcaggcggcagtgccgggcgcggaattcgtaccggtgtatcgtgcgttcttccagcgcgcctcggtcaagagtcaggaggaactggcgctgatcgcgcatgccgcctggatcggtgaatccatgagcgaggcgctgcgtgccaccgctcgccccggtgtttccgaagccgaactggttgccgcagtgaccgccacttgtttctcgctgggaggctataccgccgaggtgctgctcggctcgggtcccgagtatgtaggctggggaccgcccgcctggcagtaccgtgcacagccgccgcgcattctgcgcgatggtgacctggtgttgtcggagatcttcgcactgtacgggctgatggaaacacagcatcaggccgcggttgccatcggcgaggtacacgacgacatccatcgcgccgccgctgtcgcccgcagcagctacgaagcgggcctgtctgcactgcgcgtgggcaataccttcggcgacgtcgtcgacgcgatggaagcgcccctgctggaggcggggggttggcacgtgcatccgttggtccacagcctcaacccctatggaccggttggctttggccgtgcgcagggcatcgaagcgctgccggaggccgcgcgctatgcgcacatcgcgccgctgccgactgtcgggcgcgaactgcccctgcaggccggcatgtgcttcgccttcgaaccgaactgtgcattcggccggcacatggccaacatcggcggtacggtcatcgtcggcacggatgcgggtaccgcgctgaatgaaaactcgacacggttgatgcaggccgatgcctga

SEQ ID NO: 510066 - DNA, 675 bp, Stenotrophomonas maltophilia
atgcctgagttcatcgcccacctgcagacaccggcacggcggcgcgcggccgagacgcgcagcgggcagacccgagcccgactgctgcacgcggggctgcagctgttcagcgcgttcggcgtggagggcgtgcgtacccgccagctggtggacatggctggctgcagccaatcggccatcccatatcacttcggcggcaagcaggaattgtatgccgcagtgctgcagcgctgtgcccaatccattgccgaacgactgccgctgccggcagcaccgccgactggcgtgcggcaggccgcgcagcagctgcagcaattgatgcaggtatttgtccatgccttgctgtcggcaccggatgcggggccacgcacgctgctgttggcgcgcgaacagatccaaccgacggctgcgttcgccagcgcccaccgtacgctgttcgaacccctgcacaccacgttggccgcgtgcgtggcgtgcctgcgtggcagcgaaccaaccagcgtcgagacgctgctgcgtacccacgccctgctcgggcaggcgatcgtcttcgccgtctcccatggggctctgcaggccagattgaaccagggagcacccttggcagacgtagagacgatcgcggcggtggtcagtggcatggcattggctgcagcgaaggcagcgcccacctga

SEQ ID NO: 510067 - DNA, 1299 bp, Stenotrophomonas maltophilia
atgctggcgctggcaagcctggtgctggccaccttggtcagtgtggcggtggtcggctggatgccgcggccgccaccgccgccgatgcgcctggaccaagccattcaggtattgcgcggtgaacggtcggccgcggcgctgggcctgcatctcgaaacccgcgcgtctgcgccggagggcaccagcaatgactggctcacccacctggttgccgcgcagctgcgccagccgctggagcatgtgaagctggtctggggcaggcggagcaaggcgccggaggtgcaggtcatcgaaggcggggccgtgcttgacgccaaagcgcgcgcggacgcgttgcaggcacaggtcgcggtgctgaccgcaatgcagtggacgccgttcgaactggcagtgcgccaggcagatggtcggtggcaggtggtgggcagcgaccacagcgatctggcggcatggcgccggcaggtcgtgctggcgctggtggcaggaaccgtgctgctggcaccactggcggcatgggcgtcaatccgcctcggccggcccctgcggcggctggccgaggccagcgccaacgtggacctgcaggccagtacaccgcttccggacgatggtccgtgcgaggtgcaggttctggcccgcgcgatcagtgccgggcgcgagcggctgcacgaacaggcgcaggagatgacccgcatgctggccgccgtcgcgcatgatctgcgcacaccgttgaccggcctgcgcctgcgtgcggagttcgcgccaccgcaacaggcggcgcggatggtggccgacatcgagcgcatggacgcgatgatcgagcaggttctcgactacgcgcgtggtgagctgcagcccttgcagatgcatccgctggatctggccgtgttgctggaggagtgcgtgcagagcgcactgctgcggggcatcgacatctccttcgacgggccggatacgttgcggtggcagggggatgcgctactgctgcgacgggcgatcgacaatctcatcgacaacgccgatcgctacgcgggggcggtacaactgcgggcagccgtgtgcggcaacgtggcgcaccttgacgtgatggatcgcggtccaggcatcgatgaggccgaccgcacccgcctgctgcagcccttccagcgcagcgagagctcacgcagccgcgccacgggtggggccgggctgggcctggcggtcgccgccaacgtggcgcggcggcatgcgggcgaactgcagctgctgcaccgggagggtggtggactgatcgcgcgcctgctgctgggaagcgcttgctga

SEQ ID NO: 510068 - DNA, 930 bp, Stenotrophomonas maltophilia
gtgcgcctcaccttgctgcccctgtttgctgccgccttccccacgctggccgccgacacccccgaacatgtgctgccgatgtggatgcagggcggccacccgacggtagcgctctcgctggatggtcaagccgagccgctgcgcttcgtggtcgacagtgcagccggggccacgctcatcgatgggcgtgtggcacgccgctacggcctggtcgatggaaaggccgacgtttccactgcccaaggcgccagtgcctcgggggcacagctgaggcgcacgcgcactaccacctggcagctgggtagctggcagctgcgggccagcgcactgcaggctgatctggggtcactgtccgggggcgacgaccctgccatcgacggcctcgtcggcaacgacctgaccgcgcgctgggacacccgctgggacttcgctcgaggtgagctatcgctgtcgaggaccggcactctccgcttcgacgatgacagctgccaggccaacgcgctgcaggaccgcactgaaggcctgcgcgattttggattcatcaccctcaccttggacggaacgaacgtcgccgctgttgccgtggtcgataccggcgcggcgcagaccgtactcaacaatgccgccgcgcacgcgctcgggttgcgtactgatggaagcgatccccgcctgcgcaagcgaagcaagggcaccgaaggcctcggcggcaagccgcacccgacctggctgtacaccctgcccggcatgcgcagcaccgcctggcagcacccggccatggaggtcaggatcagcgagctgcccgtgttcaaggccattggcctggacacccgcccggctctgatccttggcgccgatgccatgcgtggcggccaggtcgacatcagcacaggtgccgcgcggatctgcctgcgccgccaagcggccacgtga

SEQ ID NO: 510069 - DNA, 534 bp, Stenotrophomonas maltophilia
atgcaccgacgcctgcttgctcccctgctgttcctgctgctggccacgatcgcgccgacggccgtagccggcgagctcaccccatccgaatcggccgccctgcgccaggacgtgcaggtgatgctggccgcgttcgcccgcggcgatgccgagctgatcatcgcccgcacgcatcccagcctgaaacgcctggccggcggtgatgaggtatacgcccgatcaacccgcgacacggtcaaggcgctgcacgaggccggcgtcaccatcatcagcgacgaagctggggtaccgacccgtacctatgccgccggcgacgaggaggtctgcttcgtcccgcgctactcgttgctgcgcgtacgtgaatccccgatccgcagcacctcgttcatggtcgccgtgcgccgcgtcggcgccgcgcaatggagctatctggatggcgcggggttgctcgacaaccctgagctgctctggcaactgctgccagcgctggagcctggcgtgacgctgcccaagggtggagtggaaacgctgtag

SEQ ID NO: 510070 - DNA, 438 bp, Stenotrophomonas maltophilia
atgagcaccacgcctgatatttcgaccatgcagctgctgctgcggcaggggcgttggccggcaggcctgtcgctggggctgctgctggtggcgttgctgctgctcggcatcgagcccgggctggcgatgcttgccgccggactgatgctgctcagcgtggtggcaggcgtcgcccaggcctatcacgcgtggcgggtggcactcgatgccagcctgctgcagctgctgcgcgatgaaggcttgaatgatgaggccgcggcgcaacgcatcgaccggctgctgcatgacagtggcctgcgccgcacaccgggcgcggaaccgtcgcggggatgggatctgcgatgggccggcatgcgccgcctgctgctgcgtcagtacctgctgacggcggtgcagctggtgctggtgctgctggccgtgctgtggccgcagacgtga

SEQ ID NO: 510071 - DNA, 867 bp, Stenotrophomonas maltophilia
gtgtcgctgaccatgccgaacgtcgatcggcccgatacgagataccgcaatgcaaatggcggtgcagtaatggatagttttgagtgcactgccgggcagacggccttcaacatcgatgcgccgcttaccggactgacctacgtccgcgacatccagtacaacggctatgtttacaaggtttacagcactgggccgcgctcacccctgatcggattcggcttcagtgtgagggagagcgggaatgcgtatggtggcccacccatcacgattggtaccagcaatcgccatccgggagttccgctgacgacacccggccccatcagagtggatgtctacatggagatcttcttccgcggcggcgcgatggagagcattcccatgaccgacctgggcaccatcacttcatcggtggagggcgatccaagtcaatcgatgcagcaccacgtgcggctggagatcatcgtcccccccgtcacctgcaccctcgccaacgcttcccacaccttggacgacgttctcgccaacgaactcgctgccagcggcagcgatgcgaaggaatccagcttcgacgtcgtgatgaactgcccgatggacaacatcgacgtgcagctatcgctggccgatgccaatggtcccggcagcagcaacggccagctcgcacctgcccccggcaccaccgccggcggcgtgcaggtgcagctgctgcgcggtggccagccagtgcagttcggccaggcgtggtcgcacggctggtccagcaaggggcaacaggccattccgttcagcgcgcgctatctgcgtacagccgatccgctggtgcccggcgacgtcaaaggcgaggcggtgctgaccgctgactaccgatga

SEQ ID NO: 510072 - DNA, 2400 bp, Stenotrophomonas maltophilia
atgaaccgtcatcgcacccgcactgctcatcctcatcaacgcccgctggcgcgtggaatcgtcctcgcactctgcatgctgccgctggccggcgcctgggccggtgatctggacggtaccgtgggaacggtcaacgatggcgacccgattgaggaatggacgctgcgcaacgacgcgatattgaacgtgacgggtggccagaccaacaacatccgtgccgttgattcacgcgtgaccatatggaatgccaccatcaaccgcagcggctcccaccagcgtgcagtggaactggacgggacggcacgcttcgaatcagagttcagtacgatccgaggcggcggcatcctggtgcagggttcgtcgtcggcgcacctgatcggcagccgcattcttgtcaccgctgccgacggcctgttgccaggcaatccactcagcatcggcctgacgctgggcagcacccccggcggcattcccttgcctggcgcctggtccattctggattccacccatgtgcgcgtggaggacacgacaagcggtagcgatatgtccagtggtctgggcgtgcgcatggaaaacggccgggtagacatcgtcaatggctcggaaatcgacgccgacaacgtgggggtgttgatgtacggctcgatccatacgcccgacacgctacgtctgggtattgacggttccactattcgctccgggcgcggcgcggcgatccgcgtgggcgccgacgaggctgccgacttcgagatcaccgtggcaaacggtgcacggttgatcggggggaatggcaacctgctgcaggtggactcgcttaccggtagcagcacgccgggggccagccatgtgcgcttcaacgtggatgacgcgcgcctgatcggcaatgtcagcttcgatgccgcaacggttgatggcagcctggacgtcttcctgcgcaacaaggcgcagatcgacggccgcttcatcaacgtcaccagcgccaccatcgataccgacagcgcctggctgatgaccggcgacagcagcgtgggccatctcaccctgggcgccggcggtaccgtggcgctgggcaatggcagcagcttcaacaccctcagcctggacgagttcaccggcaacggcggcaccctgttgttcaacacccagctgggtgacgacgcctcgctgaccgacacgctggtgattgctggtgatgccaacggccaggccaacgtgcgcgtgctcaatgctggcggtgctggtgccaagaccgatcgcggcatcgagctgatcgatatcggcggcgcctccaacgcgcagttcgatctggtcggccgcgccgtgggcggtcagtacgagtatttcctggtgaaggacgccaacggcaactggtacctgcgttcggaactggcaaccacgccggatccgtgcctggctgacccgtcgctgccgcagtgcaagccgatcattgatccgattgatcccatcgacccgatcacccccatcccgatcctgcgcccggagaccggcgcctacctggccaaccagttcgcgctggaccagatgctgcgccacagctaccgcgatcgccagggcggcgccgcggcggcggagggcatccgtggctgggcccgcgtggacgccacccagagcaagctgggagcggtggatgaccagctggacctgcgcgtggaccgctcgcgcttgcaactgggtgcggacatcggcgtattcaatgacggccgtggccgcgtcggcgtgatgggcaccgccgcacgcagcagcgcgacttcgcgttcggacgtgaccggcttcagtgcacgcggcaaggtggaaggtggcgcgctgggtgtgtacggcaactgggccaatgatgcgatgtacgtggatgccagcgtgcagcgcggccagttccgcaaccgcgtgcagggcgacggcctggccgaggagcgttacgactcggatatctggcagtcgtcggtggaagccggttaccgcttcggcatcggccagatcggcggcaccgcgttgagcctgcagccggagctgcaactggtctacaccgatgcgaagaccgacgtgcataccgagaccaacggcaccgtggtgcgtgcgcagggcaacagcggtctgtccggccgtgccggcctgcgcctgcagggtgaatcgcgctcggcagcgggtgcctcggtcagcccttatctggcggccaactggtaccgcgatggcgcgggtaatggcatcgccttcgatgatgaagtgctgaaggccggcattccgcgcaaccgctatgaactgagcgcaggtgcgcgtgtggaattccgttccggtttcagtgcgtggggcgggtttggggtgatgcgtggtgacagtgggtatcgcgaggcgactgccaacctgtctgtggcgtacagctggtaa

SEQ ID NO: 510073 - DNA, 3219 bp, Stenotrophomonas maltophilia
atgcgtcgtgtacttccccgcccccatctgcttgccgtggggttgtccgccgccctggcgtcgtcggtcgccatggcacagcaggtcatcgccgatggcgacgaacagaacccggctgcaggcgattaccgcaccactgatccggtggagccgggcaatccgggtgggcatgcgttccttgccatcaacggtggcagcctcattccaaccgggccggtcaatttgattaccgaagggctgcgtgctgccgctgcacgcgccgagggtgcgggaagtcgtatcgaactgcaggcgggcagcgtcttgacctccggctatggtgctgccggcctttccgccgccaatggcggccaggttcacgccagcggaacgcatatcgaaacgcgcggcacggcagcgtcgggggcggaagcgctgtccggtgcgctgtcactggacaacgtgcggatcactacccgtggcgggttagcccatggcatcagcgtgcagcaggggcaggcagtagtgcgcgacagcgcgatcgagattcttggtgaccagtccaatggggtggacgtgcgtgatggaacactgctggccgaacgtctgcagattgctgtggcgggggcaggccatggggtgtgggcgcagggtggcagcgatgtcaccctgcgctcggcgcggatagatggcagcggcgccggtgcatcgggcgtgctggtggggctgggcagcaaggtggtgttggaagatgtcgacatcgatctgacccacgagcgctccggaatgggattgttcgtcggcggtgagcttgagatgcgcggcggcagcgtgcatgcacgtggcgacaacgccaccgcggtcagcttcgccgccggtggcggcgtgctgcgcctggatggggtggagctgtccggtcacttcggcatccatatgaccgaaggcgcggaccttaccctgcacggcagccggctcgacagcgtgtcgatcggcatcgacatgaaccagcgcgatgtggttgcgagtgtgaccgattcgttcatcaccactcgcaatggcgttggcattcgagtgacgaatggcgatctggtagtcgacggatcgaccatcacggccaatggcacctattggcaggcgatatcggtgctgggaggtaccgcgcaggttaccggcagccgattgcggacctttggccagaacggtcatgggttgtatgccgaaggcggtgtatctgctgcaccactagcgaacggcaacatgatcgatattcttaccgaaggcgacggcgccattggtgcaatcgcccgccttggcggcaccgtacaccttgcagacagcgtggtgcgcaccaccggcatcaattcatacggtgtgttgtcggggggcaggggcgaaatgacgctggccaatacccacgtgcgcaccgaaggtgaaggtgcctgggcggcggtgatcaacgacaacggcaagatgagcatcgacggcggctcgctggtgagtgcgcagcacggtggcatctggttgcgcagcagccgcgatccagtgctgacgttgagtaacggtgtggtggtgtccggtggcaacggcatcggcctggcgctggatgctgccgtcgccggccgcttcgacgtggcgctggaagggggctcgcagctgcacggcgatatcgtcatcacgcccgaggacgaagacgccggactggtgccgcagtccgaggtgcatgtgcgtctggcggatggcgcgctgtggcaggggtcttccaatctggtgcagacgcttgcgcttgaacgcggcagccaatggacgttgaccggcgatgccatcgtgggcgggttgcaggcgcgcgacagcgtggtggcgttgtccgatggcagcggccgcttcaatacgctcacggtggaaggtgacctgcacagcgagggcgccaccttcctgttccagggcgcgctggccggtgatgattcggccatcgaccgcctgcttgtgcgtggtgatgcctccggtgatgccctgattgcggtgaggaacatcggcggtgtgggggcgcccactgttgacggcatccagctgatcgaagtggacggcgcatcgctggccagctatgcgctgaccgggcgtgctgtgggtggttcgtacgaatacttcctgttccagggcggtctgaccgatcccaccgatggtcattggtatctgcgttcgcagtggttcgatgtctgcgaggacgacccggcggcgccgggctgtgcggtgaatccgggcccggacccgatcgagggtggcgaaggtgaggatggcggcggcatcgtcgacccgatccggccgccgcctgtgttgcgcccggaggcgggtgcctatcttgcgaaccagtcggctgcggtgaacatgttcgtgcaccggatgcatgaccgtaccggtgccctcacgggtgagcgcactgcatgggcacgcgtgggtcgtagcaatgcggacttcactgcagtgggggggcagctgtcggtggatggcaatacgtcggtgctgcagatcggcagtgatctgctgcgtcgtggcaacgccgcgttcggtgtgatgctgggcaacgggcgcgctgacagcagtgtgctatccgagctgaccggctacagcgccaaggggcgtgtgcgtggcactgcgttgggcgtgtacggcacctggctgcaggatgcagaaggaaccggcggtgcctacgtggacgcggccatgcagtttggccgcttcgacaaccgtgtgcagggtatcggcctggagccggagcactatgatgcgcgtgtggccactgcgtcactggagatgggccataccttcaatgtgtggcagggtgctggcagttcgctctacgtgcagccgcagctgcagctgacgtatgcggactaccgtgcggatcgccacgtggagacgaatggcacggtgatcgaccacgccgatgccggcggcctgagcgggcgcctgggcgtgggcgtgttcggccatggcattgcgggtggcaacaccgtgcagccgtacctgggcgtgaactggctgcgcggcagcggtaccagcacgttgcagttcaacgatgacacgctgggcgcggatgtgccgcgcaatcgctatgaaatgcaggccggtgctgagttgaagctgggccagcgctggggcgcatggggcgggctgagtgttcagcgcggtgaccatggctaccgcaacgtgggtggccaggtgggcgtgcgcatggcctggtaa

SEQ ID NO: 510074 - DNA, 708 bp, Stenotrophomonas maltophilia
atgactcgggattggcttgaatccaatccacgtgccgccctcgctctggtcccattcgtcggaatgccgaggtcgttggagagagctgagggccaaagcttcatgaccatggtcaaactaacttggcctctattgctggccgttgcctgcagttggttgaatgccttctcccagtggcaaagctattccttaggcatagttgaagatcaggttatagctgcgcaaggacgtacgcattttgaagcgctacgcagctacatggcccctatgccctatgtcatcggtgtactcgcagtattggtggtcgcgatctctgcggctcttcaggccttccttcatcggatagatcatgcagtcgcaaagtgggactggcacgagaagtccctgcttggctacaagtaccacctagttcaagtcgcttcagtggcaatgtactgcggtactgcaatgacgttcattggactcctcgcgaaccattggggcgtcgccgagccttgggtaaggcggttcgtcaactcggagctcatcctcattcctgcaacctgtggagtcgtcgctggccatctcattaggaagcgaagaagtagggccgctgatgaagtgtacggcagccgtttcagggccttcatcgcaagtatcgttgccttgtgcttgtccttcctactccttggccttgcaatcgttctccttgggttgcttcgtgcttag

SEQ ID NO: 510075 - DNA, 336 bp, Stenotrophomonas maltophilia
atgaatactgatgaattatccaagcggatcaacgacatcgtgggtcgcgtcgatccgtatttgagctctggtggtgtagtgaaagagaaagtccatattccggcgagtgtttggaacgatctcaagctgctggcgagcgatttggcgaccgggaccagcatcaagagcgctggtcagtcacaggcggcggagcgtgcacaggaggggggcgtgttgcttccggacctaatggaagatgccgttgatgcatcggacctcgatagcggctacgcgtcagggtggaacaacgctgtggaagagtgccggcggctcaatgcaacacgcagaaagatgtaa

SEQ ID NO: 510076 - DNA, 2220 bp, Stenotrophomonas maltophilia
atgatacgaactatcagcattcagggtttccgcagcttcgatccggcatcgagtactgcgatttcctttgatccaagtaggcgggtcgcctacttctatggtctcaatggcgcgggcaagtctgcgattggccaggtgattcagggctttgcgacgggtcagaatgcaattcccgattgcacagtaagcgtgtttccccaggatacaaagtacgaatacctggtctacaacgacaacttcgtcgagaccaacttccgcaaccgaagcgatatgccaggaattttcaccattggtgatcctgagtcgtccgcgctagaggcggctgagggcttggagcgtgagctcaatgtgtggcgcggtcagtacgaacacttggccgagcaggagcagttgcgccagacagaggcagaccaagcgcatgagagtgccctcaaaggagtgtggaagagctacaccgcgctaaaggatgggcctttcaagccatgggtaccttacggcaactccaagcagcgcttctttgacgtgctccaagccaagacaaagcttgcctatgatggcgagccgccggaactagagaagctcgagcagttacttactgagcttggcgacagcaacgcgatgcccaagcctcgcgttgccgttgacctacccaattttgaccgtatcgaacaagatgagatctggtcagaacccatccttggctcaagcaatagtgctctttctgcgctgatcagggacatcgacaactttgattgggtcagtcaggggcggccctatgttgagcatagtcgcgacttctgccccttctgccagcaaggtcttcctccgtctttccggcaagagctcgccaagttatttgatgcaagctttgaaagacgtgtagagcgtgcaaggctgctcgcatcctcgtatggcacctatgtcgccaatctcgagggagcgatcaatggccttctagggaccgagcagttcgcctcagaaaccgacgctctccggctcgcttgggcaaacgcaagtcagcttctaagcgagaacgctcagcgcatggcgacaaagtcggcgtcgccgcagagcgcaatcgagctgcactcaacccaagcgctgatggccctgctagctggtgggattgatgaagtatccaagcgcgtcgatgagcacaatcggcgccttagtcggcgtcaatcggagctaaaccgaatcgagaacgcattctggatgcgtctttgcgcggacaacgagggagtcctggcactctacaagaccacggcaaaggcggctgctgacgcaatcgaggcaatccgtgagtcgaagggcaacctccgacggagcattgaccaagcagagctaagtctggttgaacttcgtgcaaccagcggtggaaccgacgaagccgtcgttgccatcaatgcgcgactaaagtcgttgggtgtcgactccttcaagatcgaacgtcgcggtgacgatctgtaccaactggtacgccctggcaaggggccggacacgtacgggtcactgagtgaaggggagaagaccctcattacattcctgtacttcgtagagctgatcacgggttcgttcgcatcaaaggcgttatctccactggaaaggaagatcgttgtcatcgatgatccaatttccagtctttcgcacaatttcgtgtacgacattgcagctacgatctcccgagacatcatcgggctgaagaacgcgcagggtaagcgggtgaagcaggtcattgtgttgacgcacagcctcttcttcctcaatgaactcatcaaggtcaccaagaaggtagattccccgcagctgcagcgcctcgtaaagaagcggtactcggcagttgcgcctatgaaaattgaagatctcaagaatgactacgagtcttggtggcaggtcgtgaaggatgcctatcaggacttggtgagttccgccactgtcgccaatgcaatgcggtgcatcctagagcggttcttctacttcaccaagcagcaggattcgttcaaaaccgcaatggagaagctagctgcgcaggatcggtcattcctggctctaagccgttacttggcgcatcattcccacggtgatgccaacactttgaccgacttcggtgagtacgatgttggttattgcctgatcaagttcaaggcggtgtttgatgagcttggcttcgccgaaaatcatcgtgttatggcagggcttccggagcagacagggcggtga

SEQ ID NO: 510077 - DNA, 3663 bp, Stenotrophomonas maltophilia
atgacctcaagcactgacacgatccgccgacttaccgcaatgactgatgcgtcagagttcgaacgcattgccgcggcagtcctgcgagcggcgaacccttccgtctacggaaacatggctcatccaggggtacaacctggcggcaagaccgtgaaagcgccgttcgacaacgttggctggttgaatctgcccagcgggcggtcgcagcttgtttgtgccgcgcattcaactgatcaaacggatctcgccggaaagtggcttcacgacccgtcaaaagtaaaagtaaggaggcctgggcgcaagccgacaaagccggcgggcgacctagtaaagggcattgaagagatcgcgcgattgcgtacaacaatcccagatctcgaagtaacctacgcattgacaagcaacattgaagtctcccttgatttgcgtgctgccgttgagcagatggcattggcggcaaagattgaacttgatgtctggtcagtctcgaggatagcgcatttccttgacaccgagcctgttggccagctcatccgcggctcttacctcggtttggagatcgaactgctgtcacgtgagcttttgctggagatgggtcagcgcagcattcgagatcactttccattcttatccctgcaggatgcagtccatcgagaaagcttcgaccttggtcgcagcgatttgctggtggtcggcgattcaggaatggggaagacgaccgcgtgcgcggcgactctggcggcccgcatcgaaagcgggttgccggcaatcgttattccatcagaatttcttgagactgagccaactctagaagcagcgctagacaaggaactacggcgccagcatccacacctcgagccatctgctggagagaaggcggtggccctgtgtaccagctatgcgcccctcaatattctttttgaggacgtcaaccggtcagccagcccgggtcgccttttaaacaagattatctcttggacaaacttgggctctaaagaatccgaaaacgttcgtggatggcgcgccatttgccctatctggccgcgctacctgggtgctattgaacaggaaatgggctcggctgaggcctttgaaattgtacgagtagagaagtttagccagacagaggcgatccaagccctcttagctcgggcgaagtcactaagcgcggcgatggatgaggagcgcgcaggtttcgttgcctcgaggttggggtgcgatccactgctgattggactgcacgacatccagtcagatggcgcggtcgggaacatcatccagtcctatgtggacaagcgccttcgcttggtcgctagtgcgtctaatcacacgcatctggaaatgctcgaagccatccatgtactgctcaggtacgggctgcagcaacgaaatctgtctccaagttggcgcgagattcgctcttggatccaagacaaggatgtgctcgatgccctgagaagcgttgctaatgaaggtagcgtccttcggttagctagttccggtggggaagaggtcatcgcattcagacatgatcgagttttgcatgcgctagccagcggctcaatgaccggagtcttcgatgtaatgacgcctcctgaatacgtcgccgaccccttcttcgctgagatggtggcggaagccgcggtgagggccgctcttcccgcgaaagcattgctcgacttgaccatcgcaagtccaacagtggcagcgcatgcattgaagctagcgtccgagcaagatcacggctacaccgacatcgcggcgcaggcacttaaggactggctagtccggcccgagacagccggcattatgatggccagtcgacggtatgcggttgcctccgtcctcgcagaaacgacatctcgtcacgttctccacttggttgggcaatttcctcaagacgacactcattggtggcatccattgtgggcagctgcattcagaaacggcgatctccactcgggcctggcgcttctttcatggtctgcgattggctggactgtagaaggcaagcgaagcctgttgtcattggtgacgaggacgtatggcgagcgtctggttgctgcggtaagcaaaatactgcagcgagctgaattagacgctattagcaattccggcatgaagtcaggcgctcttcgcttagctggctacattggcgacagtaggctgggtcctgcggtccgcgcgtgctgggatcgggagacaggtgatgaccgtgacctaccctcctatctcttcgcggctgcgcgctgttgcggaaatgaggcggagtcaacgattgatcccattcttgctgcgtgggaagggcttcctgatgacccagaatcagactctggccagtcagtcgatcaactggcaaccgaaggattgtcttgggaattcaggcattacccaccacgagacgccttacagcatttcgtcgatagagcgaagtcttgcggaaggctgggatggcccatcacttacatgttgcggacgattgaccatcccattgccgtagaacatgtagtgcgctacgcagcagagctttcctacgtttctttgagcgtccttttgtcggagtggcagccgaactcaggcaggcctgctaggcagatgtcatcggcttcgaagtgccgtctcctggaaatcgccctttccgaggacgagaccgacgacgtacggaagcaggctttctccttgtgggatagatgctccgcatctacagacctgcaagacattaagcggatttcaaaggagagccttctttttgacagcgctctacgggctagggctcgacggcgtgattactcggtgacccccgagatacttctcaaagttaaggacgatcccgcaggttggctccggaccgggctttacatctggtcaagcccactgacggaagtgctggagttcctgcttgacaaactggtagcggatttaggacagagtaccgatagctttagccacgagcttggggacgcgttgatgtgcatccagccaaagcgccgtgttgcgatgctgagcgccaggtggtcaaagttgaagacggtgccagaaatggttcaggtggctcttctttcagttggttcagaagcgcttgccttggtgcgcgaagccgtcattggaacaaaggatccacgcacattgctcggacatttcgcggttacggcgaccatccctacaaacggaaagcggcggctcgagacaatcgagcaattgcaaaacctgcgtccatttctgcagcatctctctgagccggatatcgtcatcctttcagatgcttgcaagaagaatggatggcttgatttctcgcgccagcatcttgaaccactcatgcgagcaatgccggatcgtggcttcttcttgtcaggagattcggtcgatctttctcatctcgaccgtgctctgaatccagagcgcgggccgagagtcgtaatccatcgatggcttgagagttcaattcgtcgggggacagaccgcgaagcggtgtttctcgctttgatgcagtggctaaagaaaaatgatcaggaacgagcgcttgaaattgtcgcagatataattagtgaagaaggtggtcgaaaggagtttcaggtttttgaggaggcggtcaaacaacggccagattccgctgaaattatcgaatctgttcgcttcaacgtattcctcagagggcttacctga

SEQ ID NO: 510078 - DNA, 351 bp, Stenotrophomonas maltophilia
atgatcgtggcattgctcgagttcaccgaagtacccaacggcgaagtgctggagcaattgctcgtcattcccggcgtagaaacagccgccacgcagctgcctgcccaaagcgcctcggtcaatcgcgtccgactgtttgcgcaagttgaaagcgatctatgcggtgtgccgaccggagtctatgcacatctggagtgcgcggccctggcagggttgaaccaggttgaacggcagcgcactaacgcgaagcacgagaagctggccccattcatagcgctctggcacggaggcaagctgcaggagctgaacagcatttcgctcgctcatggcttagccttctggttgcgatag

SEQ ID NO: 510079 - DNA, 1038 bp, Stenotrophomonas maltophilia
atgggttttttcactgacgatgagcgtcagcagctgcgcatccaaaatatgatccttcatgtggtgggtgacgggcagttcgagccccagccagcacgagaggttgagcacgcgcaatttttcttgtcccgtattcgggatactgatgcagcccctgtacatgaattccggaatcgctcaaaaacccgcgattcattggcggaaattgccactggagaggttgaatttgaggagggtgcacaagcgctttcggatgcattctctggacagcaccgtaatactgcgcgtgacggtgctttcttcatttttgagctgcgagttgatgatccagctgtccgcatctacagcttgatcaaatacgactaccgcgaggcaattgagcaggcagtagaggaagatgggcagcagcgtctgaggcagatcgtacatgccttcatcgacgacaagaaggcaattcaaaagtcggctctcgtccgaatcgtggggggcgctgccgaagcgcaggtctcggctcgtgatcgaactaagacatccccggatattgctgactacttttctgctttcctggaggtggatcgtacccgcagtgacgaagagctgaatcgtgtgcttctggataccttgcgccaagtcatggtcgattccgctgacctgcttccgaacaatgacgccgcctccgccctaagtgcggcgaaggcccacctgcgtgataggcagcagatcgatcaggacgcgatcatcgagtctgtcattgcagcagctggacatccagatgaagaggtgcagaacgttctacgccatcgaattacgcgcaagctccagtcccagcgactggcaggtttggcctttccgccggaccgccaggtactccgccgccccccgatccggcggattcgcactactgagggtgtgacggtcacctatcccgatggagtgacagtcgctcgcgtacagcgcgaagatggcccgggtgaaataatcacaatcacgaccgacagaatcgtcgaggagacaattgtccgtgaaggctctcgctga

SEQ ID NO: 510080 - DNA, 1491 bp, Stenotrophomonas maltophilia
gtgaaggctctcgctgacgccattgatcatctcgtccagacgggcggtgtgttcgtgcgcgagtcttttgacagcgcgatggtatcgaatctgacagagcgcgatacggacgcgctgaaggcgctctgtagcgatatcgagtggcgctattctgttttggatgctgccggcgaacaggtcgatggtgatcgtccgacgcctgaagggctggggccttatcgtttgcatgtgagaaagccgccaagcgagcagggagtgctccgtctgctcactctttcgggacttcgcgatgccctgcgcaatgacgatcaaagtcccgtgtggtccgtagccggtttcactggtcgaatcgcaacaggtttgcgcataattcaaggctgggatgaagcggaacttccaaagcaggagccaccgacgaagtcaccccgccgtttggtgcgcgagtacacccaggctcgtacggtgccagttgatcttcggttgtggctctctgaggagcttgacgaacatacatttgagcagccggcggcaagggtgtgggttcaagctgcaatggctgcactgactgcttgtcttcccaatgagattgaccctgatgagggcacgctgaagttccgtggtcctccccgtctggagctttgcccgtttcgtgctgctgaagaaggcatagagcgaggcctcttcaatggcttgctgcgagccttgaggtggatctttgagaatggacgtgaggcggagctcaagcacacgttgctcgccggcgaactcgctcgctcaggcccgtccaacgaagacgttgtcgaattccttcgtacccacttggagcactccttggagagtgccgagattgcgtatcaaatgacgctctcggagaccggtcgcgacaccatcaagatcctcggtgagctgcggaagacagtctcggatgagacggcgaagcttgccgacatgagccgtcagctgaccggcgcggtctctgcggcagtcgctaccggcatcgggttgattgctgcacgcgtggcggcaaatgcgccgacacttttgatcatcgctgtcgtcggtgttgtgcttgtgtacatagcaatgatcatcgcctcgggaatacgctacatgctgctccagcgttctctgcgaggcgaatggcaacatcggctgtatcgcttcctacctgctagcgagtacgccacgctggtgaccttgccaacaaagaaggcagaggactccttccgaaccacggcttacttgggggcaattgcggttctgattctgagcgtggcatgcgcttggtttgccttctcgccgcagagcgacgtggacagcaagcccgaacaagggttgaccttgcccgaggtttcgagccaaggcggtggtcgccaggcgccacccgccaaggaggtcccctcaaaggtgccggtagtcctgcgcgatggcggtgatagggagcccgaggtgatgagatctgagacgggcgatcaagcgtcgccgaagtag

SEQ ID NO: 510081 - DNA, 591 bp, Stenotrophomonas maltophilia
atgtccgacgtctggcgaaccctctccgccctcggcgacagccgctggctgctgccgatggccctggtgctgctgatcaccctgccccgcgcagacgcacgcctgaaatggcgatggctgctggccatcgccgccaccgccggtgtcacgcttgcctcaaagctggccttcatgggctgggggattggcatcaagagcgtgcacttcaccgggttttccgggcatgcggcgatgtccagtgtcgtctatccggtcgttggtgcgctgctcgccggacctggcaagcgcgcacgagcgatcggcctggcaatcggcgtgctgttggccatcgccattggctggtcacgaatcccgttgcatgcgcatagcctttcggaagtaattgccgggctggcactcgggctgagctgcagcagatgggcactgcacgccgcgccaccagccggtcgtgcccctgcgatggctgttgtcgctgccgtactcgcgggaatggtcctgcccctcgccttgccggacgtccacacgcaccgactcgtcatcgccctggcaaagctcatctccggcagggccgagatcttccagcacttctga

SEQ ID NO: 510082 - DNA, 681 bp, Stenotrophomonas maltophilia
atgatgtgcatggatgtgcttcgggcgcgcagcaatctgcggcgcaccctccaatggatgatggccctttccgttctggcgacgctggcaggctgcaccacggccagccgtgcaaccagcgactcgttccgcctgctgttcaagcgacaggtggcggctacgcctgaacaggtcgccgcaaaccgctttccccaggcgcagttgaaggcccccgatctgtcagcggtgatggtgctgggctacgtcgatgcaggtcgccagagctggtatgccggcagcaatgccgtgttccagctcgacagcacgggactggtgacgggcgtttcgagcccgggtcggcaacttcaggcccgcatcatcggcgcttcgccgtttttcaggctgcaggcgctcaacgccagcaccaccgtgcagcgggaatacgactggatccccagctatcgcatgggcgttcaggccaccggcacgctgacccgcggcgacatcgagtcaatcagcatcctgggcaaggagcgatccctagtgcgctttgacgagcgcatcgagggcgacttccaggcacacaacatctactgggcagatccggttacaggcttcatctggaagagcaggcagcaactgggcccgtcctacaccgtggagctggtgcagctcaagccataccgccccgcaaaggattga

SEQ ID NO: 510083 - DNA, 774 bp, Stenotrophomonas maltophilia
atggcattgcgattcctgcttctgctggccgtgctgctggcatcgggcgctgccctcgcgaatggatctgccgcatcccgcaatctcgaggttgtcgccgaaggtgcgttgctggcaccaggaagctacaccgtggctgcaggcactcgcctgtcgcagcttatggccaccacgcaccccgcttcagacgcctacctgcccggaatcgcgctgtaccggaagggtgcgcgaccgcagcaggttcggttgcgagcgggcctgcagtacagcctggacctgctcgaagaggaccaggatccccagatcgcaacggccgcgacagcgttgtcgcgctggctgcaggaccatcccgcatccggccgcatgccgctccccatcaacgacatgcgcctgatgcaggttcaaaggagtagcgatccgatccttgagcaaggcgacgcactgcgcgtgccccgtcggcccaacaagatcaccgtgcttggcgcagtcgaatcagcctgcgaactcccccaccagccgttgcgcgacgtgcgtgactacctgcgcgactgcaccgtgaccagcgccgccgatcgcaatgatctctatgtcgtacagccagacatgactgtgcaaaaggtcggcgtcgcgccatggaaccgcactgacccgcaggccgtcgcacctggcggcgtcatcttcgtaccgcttcgccagcatgccatcgatgcagtcgacagcgccttcaatgccgagttcgcggcattcatcgctacccaggccccgcacccgtga

SEQ ID NO: 510084 - DNA, 2172 bp, Stenotrophomonas maltophilia
gtgatccgctccacccagaagcccacctgcgctgctcgtcctgctgctttcgccctgtcgctgctggcgctttccttggcgaccgaactgcacgcgcagcaggctccgcctgccaccgccagcgaatggggcggcatcggtctgctgcagacgccgaccgcgcggatggccgaggatggcgacatcgcgttcactgcctcccacaactcgccctacagtcgctacaacctcacgctgcagccatttccatggctggaaggctcgttccgttacatcaacgtgtccaatatccgctatggcgcaaacaaggtaagcggcgaccagaactacaaggacaagtccatcgacttcaagctccgcctgtggagcgagacaccctggacacccgaccttgccttcggcgtgcgcgaccttggcggcaccggcttcttctcgagcgagtacctcgtcgcaagcaagcgctttggacccatcgatgcctcactcgggctcgcgacgggctaccttggaaatcgcggcgacttttccaatccccttgggctcgtcagtgatcgcttcaaggatcgcaggcccatcgcgtccagcaacatccaggacgctggcaagttcggcatcagcaacatgttcaaggggcctgtcggggtattcggtggcgtcacctatcagacgccgttgaactcacttcttctcaaggtcgaatatgacggcaatgactacaggcgcgaaccccgccgaaacaatcttgcgcagagctcacccatcaaccttggcctggtctacacgccaaatcgcaacgttgaactgaccgccgcgtgggagcgtggcgaagccgcaatgttctcgctgacgctacggggaaacccggggcacgcatcttcggccccgaagccctttgacccgcctccgcagcggatcgttcaacactcatcacagcaccaaggcaccgcgccctccagccccgcacgcgaaccggcctgggccgggatcgcgaacgaactggacaacaacgcaggactacgcgtcgacagcatctcgcacgatggtagcgagctgatcattgaaggctatcagaaccgctacgccagcagcgccaagggagcgggaagagcgggacggatcctggcgaactccattgatggccgatacgactggtacaccttccggaccacgcgtatgggcatgcccgttgtcgacatgtcgttcaagcgcgaaacgcttgaggcgtatctcgatggccgtgcaaccgaggatgatctgcgccgcagcgtcgatatagccgcgccggccgaaagacaggtcgagcagctctatgcggccagcaaccggccatggggcggcggcttcagccttgggtaccgccagaatctgggtgggccagatggcttcatcctgtaccagatctcagccaatgcgagcggtagcgcgttcctcaacccgaacatgtgggtgactggaaccgcaagtgccaacgtcatcaacaactatgacaagttccgttacgacgcgccaagcagagtgccccgggttcgcacggacatccgcaaatacctgaacaccgctgaactcacacttcccaaccttcaagccaacgtggccggcaggcttggaagggacacgtacggtattgcctatgccggctatcttgagtggatgtacgcaggcatcggcggagagttgttgtatcgcccaatgggtgaatcctgggcaattggcgccaatctcaaccatgttcgccagcgtgactttgaccagcacttcggactgcgcgactacggaatcacgacaggccatgcaacgctctactactcattcgacagccagaatcgcgttgtaggcacgctttccctggggcgttaccttgctggcgactacggcgccacgctgaacgtcgcgcgggtgttcgacaatggcatgagcatgggtgcctacgtcacaaagacggacatgtctgcaaaggatttcggcgaaggaagcttcgacaagggaatctacttcagcataccgttcgattcagttcttcccaggtcgacgcgcggccaggcagccattacgtgggctccgctgattcgcgatggtggcgccatgcttggacgcaagtactctctctacacgctcaccggcgaacgcgacaggcgctccttctacgaaaatcttcaggatgtcgtcgactga

SEQ ID NO: 510085 - DNA, 822 bp, Stenotrophomonas maltophilia
atgactgcgcatgcgatcgaagatgttcagcaggtgatgctcaatgcgcttcaggagtttcacgaattctgcctgcggaatcagcttcgctattatctgattggcggcagtttgattggtgcggttcggcaccaggggccgatcccttgggacgatgatatcgacattggaatgcctaggtccgactatctccgattccagaagctgtcttcggagttctcgcccagttatcgtgtgtcgtatgttggaggagatgctggatacatctatcctttcagcaaggtctacgatgtcaggacgtcggttacggaagtgctgtgtttcgagtttacccggggggtctggctcgatgtgtttccattggatgggacattccaggggcgggcgatgcggactttccatctatggcttacccgcctgatgaagggcggctttgccacggtaaccggtgcctatgttccgaaggactgttcccgggccgttcgaagcgtgcgcgcgtgcatcaggtgggttgcgaagccggttcctgtgggctggattcattcagccctgcattccttcctggcgctgaagtcgtttgaggcttctacccatgtggcgaatctgctgggccgttggggcgcgagagaggtgtcccggcgcgaagtctttgaagcggccgtaccgatgcagttcgccaatcatgaattcctggcgccggttggttacgatgagtatcttcgtggcgtctatggcgattacatgaggctgccgccggaggccgcgagggttccggcgcattccacgggtcacatctcacttgtgaaatcgtttatcgactga

SEQ ID NO: 510086 - DNA, 1395 bp, Stenotrophomonas maltophilia
atgaaggacgtcaaaaacatagcggtcgttctcgcgggggggaagggctcaaggagcggcttcaacaaacccaagcagatgatgaagcttgctggaaagacggtccttgagcacgtgatccaggccttccagtcacatgaggccgtccacgagatactgatcgtttccaacctggactgcatcgaggaagtcgagtccgttgtcaccaacggtcggtttggaaaagtgaaggccatcatcggaggggggagtgagcgctaccagtcctcgctggctgccatcgatgcgacgcggcattactgcaaggatcacagggttcagctgatcttccacgatgcggtgcgcccgcttatcagtcgtcggatcattggcgatgtcatcgaagcgttgcggagctacaacgcagtggatgtggtgatcaagacgacggacacgatcatcgtcgcagaccccaggaccaacacgatctcagggatacccgatcgtagcctgctgaggaatggtcagaccccgcaggcattctcgcatcagacgatcgagcgcgcttatgccattgccctgaaagatccatcctttgtaaccaccgacgattgtggcgtcgtcctgaagtatcttcccgatgagaagatcttcttggtggatggcgatacgggcaacatgaagctgacttacgaagaggatctgcatatcctcgacaaactctgccagctacgttcgacgctcctggatgtaaaggagcgagttcagttctcgctttcggcgctgaggggaaaggtcctggtggtcttcggcggaacgagtgggatcggcaaggaaatcgccgatatcgcgactgcgtatcaagccaaggttgttgtggccggtcgttcgactggcgtcgacatatccagtcttgaggacgtcactggcttgcttgcggacgtcgcgcgcgagcacggccggattgatttcgttgtgaactcggcggcagtcctggttcgtcaacctctggttgatatggatcagctggatgtggccgaggcaatcaacgtgaactatgtcggtgcagtgaatgtcgcgctggcatctttcgactatctccgcgactcgcaggggcagctgctcaatttcacctccagctcgtatacctacggaagatcgatgtacagtctgtacagttcgtcgaaggccgcagtggtcaacctgacgcaagcgctcgctgatgaatggcacgcgcaaggcgtccgggtgaattgcgtgaatccagaacgaactgcgactcccatgcgcacgaaggcctttggaatcgagccggaaggctccctgttgagtgcggaagaggttgcagaaaagtccctgcttgtgctgctgtctgactacacgggccagatcttcgatgtgaagaagacgaaatga

SEQ ID NO: 510087 - DNA, 1230 bp, Stenotrophomonas maltophilia
atggatgcatctaccctcaagcgtttgtctggaaacgccggcgcactgctggccatccagttggccaatgcgctgttgccccttgtgctggctccgtacctgacgagggtgttggggcgagacggctatggcgcattcgcgttcggtgccgcattgattcagtttgcagcgatcatcacggactatggcttcggaatttcggctgtctatcagatttcaagagcacgcggccatcgggagcgaattcgccggatcgccggggcggtactgctggtaaagctggcgctctttgccctggtgagcgcggcggtgattggctacgtgatgaccgcagatcacgttccgggcggcagtgtctacatcgtactcctgctgatatcgatcctgggcctgacactgcagccggtctggctgttccaggcgcttgagaagatggccagcgtgacgatctacatcgtggcgtcccgcttggccttcgttctactcgtcctgctcttctgtcgcagcgccgacgatcttcctctggtggcggtcctcaatgggatggcgtacctgtttgcagctctcgctggcttgtatgtcatgcgggggcgcggcctcgctccctgctggccgggcctgaaacgcataagagtgattgcgggcgcttcaacggagtacttctggtcacggattgcggttgtcagctatggcgcgggcgcgaccatttttctgggtgtcttcggcaccgcaagccaggttgcgatcttctctgtggctgagcagttctacaggggcgctatcgccatctactcgccggtaacccaggcgatttacccgtatatggccaggtcccgcgacatcgccttgttcaggaagatattcgtcggtgcattctttgtggcggtgctgggtgtcgcatttggaatcatctgcgggccgatgctgatatcgatgatatttggagaaggctatcaggagagctacccggtgctggtggtgtttctgcttgcgctgcttgccgccatcccttcaatccttctcggttaccccttcctgggtgcactgggacaggcgaaggtcgccaatcgcagtgttttcctagccggcttcgttcaagtgctggcgctgggcgcaatttatttcttgggcgttggctctgcgttgacagtggttgtcgcggtgcttctggccgagtcaagcgctcttatctggcgcgcacgtgccgcttacccttacctaaaagcttga

SEQ ID NO: 510088 - DNA, 1179 bp, Stenotrophomonas maltophilia
atgagggtttcgagtgcgggctcgggcgtgagcagggcagtccttgcctcgaggatgtcgtcctggtcactgattgcacttgcaatcgctggtgtgatgagtccgttctcctacaacatgctgcccgcgggcggcatgcttgagatcgtgttcttcctcacagctctcgtggtggctcgtctgccgcgaaggaacatgatctggctcttcctgctggcgggtctctacgtggtggtctcattcgctctcatgcgggtgtcacacccagcgaacgtactggacttcatccaggcctacaaggcattcatctacatcgttccgctctgcatgttcgtccggtcgggggtcttctctgcggcggcgtctgcacgcctgctgaagctcctgatcgttctgttcctgatcaagtacggctactcgcttgcattggatttcaatgcccggatggggagtcgaccgggtatctatgtagagaacaattacgaactgatattcctgatcctggtcttctatgtgcttcgcaacgcgctcggtccgcgtcgaatgctatggctcgcattgctgtccgtgctggttgcaatatccggatcgcggagctcggtgctggcgctggtcgtgatgttcttcggcatctacatgacgcggctcagcctgaagaccttcttctacgcattggggttcattgtccttctcgccggagcggccttggtctttgtcgaaaggtctgcgggtggcggcgtcgaagatattgacaggtacaggtttctgatggttttcctttccgagaccagctcctggtcaatctggaactatgcattcgggacaatgccgctgacgcctctctcgacccatgcgtgcaatgcgctttcctactatgaaactctattcagcttctccggtgacggcagttgctactcggtaattctgcattcgtacttgcttcgagcactctttgatcatggcgtgcttggtctgcttttcctgctcttcttcatcgccaggtcgcttcgtgtgagcgggtacagcaaagtcgatgtcctggttgtgctgggagtaattctgagttctgccgtttcagtatcggcaatgaacagcgtcttcgtaagtcttgggctgatgcttgcgttgggaatgcgtagagagcctgcgcccacgtctcctgcggcgagtgggcattga

SEQ ID NO: 510089 - DNA, 246 bp, Stenotrophomonas maltophilia
atgagactgcatcaaggttttctggcatgtgcgtttgccgccgtgctggccgtggccgcactggctccggtcggcaccacgatggcggccgaagtcgtcgaggtccaggaggaatgcgtgcccttccgcatcgctggcaacgtattccaccagcgctgcacgtcgtacgtggtctacgacaacggcacccgcgaagccaccggtcattacaaccgtgacgagaacgggatgatctacgacccctga

SEQ ID NO: 510090 - DNA, 240 bp, Stenotrophomonas maltophilia
atgaaactgcaactggcttcgatggcggcactgattgtgacgttcgctggaatgatgtcgtccggcacggcgagcgcgggggtgccgaccccgcccggcagcataacccgctgcgaaccgtttgaagtggagcgttatcgcttccaccagcattgtatcgtgaccatgcccgacgtggacggtgagatcttcctcagcgagtactggatcgacgagtacggcaatccctatctgatgtaa

SEQ ID NO: 510091 - DNA, 1092 bp, Stenotrophomonas maltophilia
atggccgtttccgtcagtcctggcacgatgcggctgggatgggcaggcgtgcttgccgcagccgttctggcgacgcaggcatggcccgccgcagcgactgaatccccgcgcccgacggtggaggtgggctacagtcctacgctggacctgttcaacctgctcgacaacctgtcggattggttgcctggatacaactcgtcgctctaccagagggcctggcagcagcgcttcggtctggacgaacgggaccgcgcgctcctcgccgcctacgcggccttccgccggcgcacttccgccttggcacaggactctgaggcgacggccgcgcttgcggaccggctgttcgctggcgcagagatccgtgacggggatccttacaccagccatttcctgactgcaggctcattcgatatcgccgcggaggcggcgattgctaaccagagccggggagatcaagtgctgttgcggcagtactacgcacgcttcgtcccacgtgcgcggcagctgttggctgggcagatgcctttcagtgcgcagcagaacgagcttgtccggcaactgggatctgagcgggtcggagagctggcaggccagatgaaggccttcttcaaggtggatgctgcgcccacgttccaggtacgcttcttgtggtggccggaggcggcgcagacccaggccaagcttcggggcggatacatctttctgttctcgacgttcgatgccgaggaagactgggcgccgatcgtgatgcacgagtacagccattttctttctgctgggcagccgccggcgcagcgccaggtattggccgaaacctttgccgcgctatgcccagccgcgttgaccctgcgcaacccgctgaacgcccttgaagagcccctggcgatctattgggggcagtaccggttcgagcatgaggtgcgcggtggcatgctgtcggctgaatcgtcctggtacatccagccgcatgcagaccgtgcggcgaaggccctcgcggcagcgttcccggcaacaggtcccgcaccagggctacgggccgatccgttgttgaaggcagcggcatctgtctgtgctcaagtcaggccgcaatag

SEQ ID NO: 510092 - DNA, 255 bp, Stenotrophomonas maltophilia
atgacgcttgacgttgcagtaacggatgcacccagcgacgaagcgctggaggtgattggcactggcttggatcagttcaatcttgacgctgccggttacgccgatcggcgcacgctggcggtgctggtcaccgatccggccagtggcgaggtggtggggggcttaccgggcgaacttcactgggcctgtggttcgtggatctgttccatctgccagcggcctatcgcggcaacgggctgggatcgcgcgtgctga

SEQ ID NO: 510093 - DNA, 891 bp, Stenotrophomonas maltophilia
atgcgcgacatgatcctgcacctgcatttcgaaccgcgcatggcacctcgcgccattctgtgcggggcgttgactgcagccttgtccttcatcggcacggtatcggccgaagagtgccgcctggacgcgcccttgtccggcccgcaggcagcgccgacatcagctccgggcacgcaatggacctactccggcggagcgggtttcccggcgacgccaatgctgctgaaggtagcccagaacggtcagcgtgaactggagatcgcggagggaactctacggcgtgaatggatcgatacgtacgccgacgtcaatccgctgcgcaagggcgacaaagtgctgctgcgcttcccgctcaaggtgggtgaccagtggcaggacaggttcgaggagcccggagagttcaacgcgcgttccggccgttatcgttacgactacgaagaacagggccagagccgggtaacggccatcgaaaccgtgcgcactgcactgggagatatcagcgcctatcgcatcgagcgtgaagcgcgctggcggaagtccaatgcgcgcgcagttgctggagcggacaggcccaatgcaggtgatggcgtggtcgagggcctggagcgaagcatcagctggtacgcacccgacgttgggcgggtcgtactgcggcgtcgtgtcagcggcaatccggcgtttgccgcgtacttctctgcagaggacgacaccgacaatctgagcattaccgagctggtcggattccaccagcccggaggttgccggatcgagggtgtgccggtgcaggcacgcgtggcaggacaggttttcccgttgcactatccgctggtggacagtgatacatgggaatttcgtctgatgcgcgatccacatgtgcccgcggatcgttag

SEQ ID NO: 510094 - DNA, 2415 bp, Stenotrophomonas maltophilia
atgcagcaatacttcaatagccttgttaacgacattcgctcaaccagtaacgatgttgagctgcgcgtcaaagtaatcgctgccactaggctccttctgcagcaggcagtatttggtcttgccgaatgggttgggcagaaagtccccgatccttccgttgcgcccgccaggagtgtcgtcgattcgctttggcaacctgcagatggttctcttgttgatgcgttagacagtcttctcatttgcgcagagcagacgggatggtcgggggtatcaagaattctgatcaaaggcatcgggactcgccccgctgagcaaatttgtggagagcatcctaagaatttccttggacttctacgtgctctaatacaaattcggaacaatggcgccgagggtcacggtttgctgggggattatcgtccagaatgcgaggtggacgcgatcgcctatctggtggattccctagcgccggtgcttcccagagctacagcggagggcttggtcgtcggcagtgcccctgatgaagtctttctgcatttcctcaaggtttgggatgggagtccggcacttatccggaaaattcgccggatagcgtcggacagggtgagagtctattgccagctttacggtgaaggggggcgtgcagaattcaactacgatgcgtccaacccatttgctggactgggagtaaaagaacttcctgcgctcgtaaaatgggaaaatggctggtgcccagaagtatttatacccgatcgaaagactgactctttcgcaggtaggcaatcgcaagttgatgagctgatcgaatggtacgaggatgctgatgctcgggcctgcctcgtttacggtgacgggggctacggcaagacaacactcgcgatcgaatttatgcatcgtgtgttggaagaggatattaaggtttcctggcatcccaaggttgttatcttttacacggcaaagagaacacagtggggcctcgatggccttgagcctattaaggcagggcagcctcacttaattgagcttcttgcgaatattcatgttcttcttttcggagcatttcccgcgaacgatttctatcgactcgatctgtcctcggctgcgttgcagcttcaggggaagatccaggagttgaagggattgaagagacaggagatctggctcgtcatcgataacacggaaactcttatctccgacgagggcgagggccgacttgtaggtaaggagattaaagagattgcccgcaggatcggtagggtgcttttaacctcgcggcgaatggagcatctcgaagcctcaccaattgaggtccccgtgttcgagatgcgagaagcgatcgacttcgttagagatcgctcacgcctccttcagtgcaagctgggatatgaggcgtctgatgaggagctacagagggaaattgacaggatcgaaagaaggccgattgtcctggaagccttcgtaagcgctctctgcgatcccggtgttagaaaaatatcgcgcgctacggatcgtgtttcaaaaatgctcagcaaggatctcggtgagttcctctttgcagacgtgtgggcaaagttctcgttagatgagaagcgggtgcttctcctgatggcaagagtgggcgacgtacatcagtcttactctttcaagacatgctgtgaggaatttgaagtttcagtttcgtcgatggagcgagtcctgcagcagtcgagcgggattgcgtcatttgttactgttgctaatgacatacaggtaagtttttcaagaaacttcgttgcctttgctagtgggcaaaaagttagaattgcggatggaacggagtcgccgactgcagagaacgtctcgagagttactgcgcgcgtctcggcaatggttaagaattcttccagatacctggcaggaactgcggcggacgccgtacgaaccccactagccaaagctgctgagattgcgcggcgcgaaggaaagatagacgagagccagaggctatttgagcaggccgttgcctcggatagtatgaatgggcacttgaggtcgaagtttgcctatttcttgttttcggcgcggcaggatatggatgccgcgctacatcaagcaaaggccgcggtggatctgttgcctggagatgcggaagcttggttcctcaggggaatgattgaggcgcgaaaaggcgacgcgcgtgcttgcgatctgtcgctttccaaggctgaagagctcggaattccttggtacaggtgttctgtccagatgacctggggcctcttgaaggctcggccagcgcagctccccctggctgcgagggagctcgcgcgcctagatgcgtatctgaagtcaaaatctagtgatcgcagagtaatgggggaagttgatcttctgaagagaaggctgaagtcgctatccgaaaggcgtacaaaaaaataa

SEQ ID NO: 510095 - DNA, 684 bp, Stenotrophomonas maltophilia
atgcccgctttcgtttgcgaaactatcgccgacctcgtacatcaccgggatggcaacaacttcgacttgtatgagtgcctggatcgtgtgctcccggtggcaggcttcaaatatcacctttcgatccacttcaaccagtgggaggagtacgacaacgattggatagaaacggttagcggtggtgggcgcatcagcatgatgtgcagctacgaggagatcccgaagcccaacatccaggcacttgtccaagcctacgaaaaactttcgctgaagagtgacaagagatcgaggaaggcggtcatgctgcgaacgcgcctcaaggaagccctcgaacttgaggaggcttcaccgcgctatagcttcatgtcctactacagcatcatcgagatcatttccgacgacctggctgcccacaaggatgtcccttcgagcaatcgtgttgcagtcgacatggcccggcactcgctgagcaccaagggcagtcagcgaacaaagatctatttcctgctgctcgcctttgagaacgacttcgatctagaccagaaaatggcactttccgacaagcggaacgacctggcgcacggtcaatttgaattggaaagtcactacgtcgacgcatgcaaagaactagctgtatgggcgtctgaaaagtacgtgctgcaccttgcgtgcgaggagtcgtag

SEQ ID NO: 510096 - DNA, 1560 bp, Stenotrophomonas maltophilia
atggaccgacccgacacccaagtcatcggcgtcttggccgaagacgaagtcaagacgttattcatgcgctgggggtggaaccctggtatccaccgcatcgatcgcggttacgacctgtttgtcacccctggcgagccattcaaggatcgatccttctttgtgcaggtgaagggcacggcccgggagactttgggggtggtgtcggctccggtctccaagaagcgactacggcagtacgcagaggccagtcatccggtcgtactggtccgcgcgatcaacaatgatttctattggctcgatgcccagcagtggtgcgccactcatcaagaactgctgtccggcactggcgaccgatcgatccagttcgatcgcggacagctgctggccgaccgcgaacggttcgaggaatttttgcatcgtgctttcctggccactgctactcggcagatcgaagacacagcgggcttaggtcacttaagtgaaacactgacgaacctgttggcgcgggcatcgagcgaaacactagctccttccgtgcagagagttgaggaacccgccctacaagatctgacacgcgaattgcgcgtctccttccaggcgggtgaaggtccggaaaatcaaacccgattgcgggaggccattgcattaggacttcctagaaccgtcgatgtcaaagatctccacctaaccggtcagagcgtctgcggcaacaaggtaggccccttggccggtcaactgaccctgactccactgaacgccgaacctctgaacctgctgctctacccgggcgccaagccgtccatcacggcgctcgcgttgcccctacccgccgagcggttcaagggccttcaatatggggccgtcagcaacgagcgtttgaaaagcctgctcaacttttcaatgctgcctggcaagcagtatcccgcctgttcagatatcgacatctcgtttggacttaggtccaatgtcttgaccggccgtcctctacggcagttccacgaacttagctcgcttcctgcttgggcggaacagatgctctcgcatcgtgaggcgcatctcgaaatgcaagctgaggacgggcacggtatgctcgcgttaccggccgcatttgtcgatcacttcgaaggcgtcatccgcttggcgtgggccctcggtcgtctccacgctgtgacccgagtcctgcaatccgagttctcgctgccagacgatttcgagttaaccgaacgcgacctggacgacatcagcttcgccttccggctcctgcgtggtgatcagctttcaatcacgccgggcccgatagaagtcgagcctacggttgacatcgactactcgaagcagtttgagatgctgatcacaacgaattttgtcgtcgccattgcgggacaggaagttggccgcatcccagctatagtggagttgctaaactttaatattgttcccgtagctgggacaaaccgactgcgcctggagggcggctccgaaggccgggcgcttgtctactacgacgagcacgacgacaaagaaagcctcatgcgtcgcgccggtcaaacgacttcatga

SEQ ID NO: 510097 - DNA, 2631 bp, Stenotrophomonas maltophilia
atgggaagcccacaggacggcagagcgcctatcgaggtcgaaattttcttgaacggcaaggccagctggctgcgagcggccgcccgggggctggttgaaacccgacgcatgcccaccgatgcggagatcgccgctctggctgaccactgccttctggaggcgtccaagcaactcgcccagactgagccgccgctggatccgggcgccatcgcgggaactccgagccgggccggcctgcgtctcgagcgcgtgttcgacgttcgaggggtcaacgcgcttggagatcaggcgaagctggagcttgccgacgcagacctggcgatcgtgtatgggcccaatggatccgggaagtccggctacgcacgcttgatgaagcacctctgcggagcacggttggcgggtaccatacacggcaacgtgttcgatctcacgccggaggccccatcagcaaacatcgaagtccgggcgcttgaaactcacgggcctgcgaccgacacgaccatcctcagttgggactcggcgagagggcctttgggcccactcaaagccgtgccggtctttgactcggccacatccttggagttcggcgacagcgcgagtgcggccactcacacgccccggtcaatgcagtttgttggccgcctcatccagatttccgatcaggtggcggcgaacctgcgccagcgtgccgatctattggtcacccggatgccggtgctgccgtctgacctcattcagtcgcctgtagccaacgaacttcgccagctcctccgcagcaggacccaacgggcagccattgaagaagcatgcatcctatccgacgaagggcgagcggagcgcgtggccttggagaccgcgctggcgcaggccaaccccgcagaacttcacgccaaagtggttgccgaacttgaacgtctggcgaagcacaaggcggccgctgtcgaccgggagcatgcaaccggcgaggagaaggctggcgaaatagtggccgctcagctcgacgccgtaaacaagcgggcggctgcgaccgcacacgcgacgtcattcttccaggggttgccgctcgccggcgtcggagaagatacctggcggcggatgtgggcggcggccgaggcgtatgcccaagcgttcgcctaccccgatcatacccacccgaacaccgaagagggcgcccgctgcgtgctctgtcagcaggagctcaacgaggacgccaaagcgcgaatgcaagggttcgcggatttcatccaagatcgattgcaggcggaagcgaccgccgctgagctgcgcgccgtaatgctggtccaagcacttccggacattcccgacgcgcagacttggtcaacggtgagtcaggccgtggggctcaatcatcagacaagtgaagcacttcgcttggccgtcgccgcccgttcaagcgcgttgaaggtcgctgtcgatgtcgcgagcttgcctgtggtcgactgggcggaatggcacgctgcgcaagcatccaggacggtcgagttggaaaagcaacgcgacacattagcgggactgatcgacgtcgaaggacgcaaactaaaccaagcacggttgctcgagctaaggggcagggagtggttagtagcccaccgcgaacacgtcagtgcagaagttaaacgtcttcgagcgatcgagggaatcgaagcggctatccgcttgacgtcgacgaacgcgctaaccaccaagaataacgaaatagccggtgcagagctggccaaggggttctgcgatcgctttaacgcagaaatgtcgcgcctaggtgggcgcgggttgcccgtggtcatgacccatcaatccaaaggcaagggccgtttcacgttctgcgccgagttgaggggcccgcagcgtgccattcacaaccgcgaggtattgagcgagggcgagcagcgcgtggtcgcattggctgcgttcctggccgatgccaccggcagcgatcgttgcctcccgatcgtgttcgatgaccccatttcgtcgctcgatcagcgcttcgaggaggcagtggcggatcggatcgcggagctcgcagagacacgccaagtgcttgtgttaacccaccggctttcactgatggttctgcttaaaaatgcggtcaagaaacgagcggagttccatggttcaactgcccgagttcaggtcctatccattgctaaagacggtcgtgcggcaggcgttccagccacgattgacgcgttcgcgatgaagcccaaagaaggcctcgacaaagttgtacgtgatgcccgatcagcggcgaacctcgacggcgaaatcagacgggccgtgctgagaaacgcatgcagcaacttccggatcctagttgagcgctctgtggaggagcacctcctgttcgggatggtcatgcgctaccgccgtgaaatcaaaacgatggggcacctaaagaagcttaccgccatccgaattgaagattgcgagctcatagatggaatgatgagcaagtattcggcattcgaacactcgcaacctatggagactcccgcctggttgccagagatcgaagaactcatcgcagacgccagttcagttcaggcatggatcaagcccttcgaagcgcgggcgaaagcagccgcagaaggaaggtcatcgaccacgtga

SEQ ID NO: 510098 - DNA, 3093 bp, Stenotrophomonas maltophilia
atgtaccgaccgttgttcgcccgcagtcgcttgtctgtcgcgttgggttcggcattggtgctggtggccgccgcaccggccatggcgcagcaggccgccacgcaggaacaggaggccgagcccgccagcagcaagacccccgtgcagctggaccggatgaccgtcaccggctcacgcatctaccgcgccggcttcgacacgctggaacccgctgcggtggtcagccgtgaatcgatcgagaactatggcgacaccaacctcatcgacgcggtgacccggattcccggggtcagtgccggcgtcagttcgcgcggcgaccaggccggtttcggtgcgggcgtcaacttcgccagcaagttcggcctgggcagcaatcgcctgctgaccctggtcaatggacgccgcttcgtgacctctaccccgcccaccatcttcggtgccggcggcggctcgggcatccaggtggacatgaacgccattcccagcgtcatggtgcaacgcattgaaagtctgagcgttggcggtgcccccacctatggctcggatgcgatctccggcgtcaacaacatcatcctgcgcgacaagttcgatggcgccgaagtcgaactgggctatggcagaaccagcaagaacgacaacgagcgctactcctggtcggccatcttcggtaccggattcgccgatggacggggccacatcgtggtggcggcggaactggacaatgccgacggcgtgaacgcgctgcaacgtgatttctaccgccagggctacagcctgcaggccaaccccactgcagccaacgctggcaacttccagcccctgcgccggccaaccaatgatggccgcatcgacggcagcattcccttcaataccggaccggccgacggcatccccgaccaggtctggatccgcaaccggcgcatcgccagcatgaccttcggtggcctggtgatgccggcgaccggaagctacacgcgcaacggcctgggcgacatccttggcttcggtccgaacaaagacaaactgtggcagttcaacaacgagggcaagctggtcgagttcaatcccggtaccagctatgcgggcggcaacgcctccggcggtgacggcctgaacctgttcgagacggtgccgctgatcgccgaccttgaacgacgctcggtgttctccaccggcagcttcgacttcaccgacaacgtgcgcggcttcttcgagctatcgcgatacgaagcgaccgcccgcgaaaccctggaccagaacgtctacaacgccgtgtccttcggcaatgcacgcctggatggcggcggtaccgccagcggtgcgctgaccttcagcgccagcaatccgttcctgagtgcggaaacccgcaggatcctcgccgacaacggcatcacctcgttccggctgtcgcgctcttcgcgcgacctgtcgatgaacaacgccagcaccgagacccgcctgacccgcgcggtgcttgggctgaacggcttcttcgaggttggaaagcgcagcttcaactgggaagccagcgtcacccatggccgcggtgacttcgactacctcggcaccggccttatccagcagaacttcatcaatgcgatcaacgtcaccaccgacgccagcgggcgcatcatctgtgatcccacccgcccgggcaccacggccgatgcgaactgccgcccgctgaatctgttcggcgagaaccaggcgtcgcgcgaagccctggactacgtctccacccggaccgtggccaaggcgcagacccgccagaccgtcatcaacgcgtcggtatccggcggcctgttcgatcttcccggcggcgagctgtccgccgcggccggcttcgaacaccgccgcgaagaaggctccttcacccccagcgagtaccagcgcctgggccagggtcgttcggtgccgacccaggcggcggaaggcaaataccacaccaatgaagtgttcgccgaagtgctggcaccgctgttcaatcccgactgggacatcccgggcctgcatcgcctggacctgaccgccaagttccgccgcgtcgacaattccgtcgccggcgcgttcaatgcgttcacctacggcatccagtacgaaccgatcgccggcctgcagctgcgcggcaacaagacccagtcactgcgtgcgccctccatcgccgagctctacaccacccagcagccggcctactacaacatcccggaagtgtgctcgctggacaacatcagcggcggctccaatccggcggtgcgtcgccgcaactgccaggcattcttcgccgcctacccgggcgccgatccgaacaccttccgccagcaaccgaccaatacgctgggctcgaccaacggcagcacccgcctgcagaacgaaacggcgaagtcgtggacggccggcatcgtgttcgcgccggagtggatcccgggcctgcgcgtcgccgccgactggtatgacatcaagatcaacaacgtgatcacgtcgctgagcgccaacgacatcatcaccggttgcttcgacactgccgacttcaacgccgccaacgtgccaaacgccaaccgcttctgcggcctggtgacgcgcgatccgagcaccggcgtggctaccagcatcaagaccgagtatggcaacggcccggtactgatgttccgtggctggaccgccgaagtcggctaccgttgggacctgtcgcgcttcggcgtgctggacctggacttctacggctacatgccgaagaaccgtggccaggccgcgaaccgggacgtgccgttcgtcgaacaggcgggcagcttcaacgagcccaagcgccagttccgctggaccgcccagcatcgcatcggcaactggaactacggcgtggcctccaactacaccagccgcgcccagtacacgatgaccgataccccggaaagccgtcagtacttctaccgcgacagctggaccacctgggacgccaacgtcacctaccgcatcaccgatgccgcacgcgtgacgctgtcggtgatcaacgtgggcgacgacatcggtccgttcccctatgtattggatgcactgggccgtcgctatatggccagcctgcgctacaacttcaagtag

SEQ ID NO: 510099 - DNA, 1191 bp, Stenotrophomonas maltophilia
atggcaaagggtaagttcgagcgcaccaagccgcacgtcaacgtcggcaccatcggtcacgtcgaccacggcaagaccacgctgaccgctgcactgaccaagatcggtgccgagcgcttcggtggcgagttcaaggattactcctcgatcgacgccgctccggaagaaaaggcgcgtggtatcacgatctcgaccgcgcacgtcgaatacgaatccccggtccgtcactacgcccacgtcgattgcccgggccacgctgactacgtcaagaacatgatcaccggtgccgcccagatggacggcgcgatcctggtgtgctcggccgctgacggcccgatgccgcagacccgcgagcacatcctgctgtcgcgtcaggtcggcgtgccgtacatcgtcgtgttcctgaacaaggccgacatggttgacgacgccgagctgctcgagctggtcgagatggaagtgcgcgagctgctgagcaagtacgacttcccgggcgacgacaccccgatcatcgccggttcggcccgtctggcgctggaaggcgaccagagcgacatcggcgtgccggccatcctgaagctggtcgacgcgctggacagctggatcccggagccggagcgcgcgatcgacaagccgttcctgatgccggtggaagacgtgttctcgatctcgggccgcggcaccgtggtgaccggtcgtatcgagcgcggcgtgatcaaggttggcgacgaaatcgaaatcgtcggcatccgtccggtgcagaagaccaccgtgaccggcgttgaaatgttccgcaagctgctggaccagggtcaggcaggcgacaacgctggcctgctgctgcgcggcaccaagcgtgacgacgtcgagcgtggccaggtcctggccaagccgggttcgatcaagccgcacaccaagttcgaaggcgaagtctacgtcctgtcgaaggacgaaggcggccgtcacaccccgttcttcaacggctaccgtccgcagttctacttccgcaccaccgacatcaccggcgcagctgctctgccggaaggcgtcgaaatggtgatgccgggtgacaacgtcaagatggtcgtcaccctgatcaacccggtggcaatggacgaaggcctgcgcttcgccatccgcgaaggcggccgtaccgtcggcgccggcgtggtctcgaagatcatcgagtaa

SEQ ID NO: 510100 - DNA, 261 bp, Stenotrophomonas maltophilia
atgggtgcggttttcgaagccaacctcgaatctgatccagagcagatcgctgccttcttcatcaaacaagccgcaagcaagcggtggcgactacagaaggacaaacgacagcgctactaccgattgttggtcttttgcgaggatcgtctggcgcgctcggtagagctgacggtgagaggcagtacggtcaagctctacggaggtacctactgggactcggacaggaacggcgattactactgctctacgaatgcccggtag

SEQ ID NO: 510101 - DNA, 183 bp, Stenotrophomonas maltophilia
atgaagatcatctactggctgggcatcgcgttcctgtggatgcttccattgaacgttctcctgctgacgaccggcaagctgatgtcaggcgacgcgcttggagaccaggagttcgtcggcctgggcgtggcagtattcggtgcagcggcaggcggcatcctctatcgccgccgcccgcggtag

SEQ ID NO: 510102 - DNA, 405 bp, Stenotrophomonas maltophilia
atggattcccaggagttcatcaagatcaccggcatcctgacgggatacactccgtcatctgaagggatgccggaggtgctcgatgcacggctgaccagtggcagcgcgggcttcgcgtacaagggagactactggttgaccaattcagcggacgtcgaactacatcagccgcacgagcgcgatggtcggatggaagtcaaagtgacggctgtcggatggaacagctatcgaaaagaaggtcgttccttctatctccagttcacatgtcaactcaatgaaattccggtcgagaagctcagtgcctggcaaggcggcgacggcaatctctggcgatcctttgggccactcgataaccgagtggatcagcctacaagcaactacttctgcaacgactggctatgttga

SEQ ID NO: 510103 - DNA, 684 bp, Stenotrophomonas maltophilia
atggtcgaccgaatacccttgccaccgcagcggacggttgtaacctctacagctccgccgggagcagatggatcgctacaggcagcccagggtgatcggcggctgcccgcgcaggcttcgccgggattgctccctcacggcggcggtaggccctcctcgatgattgagtcccccttgcccgggacgccctcccacgcacgcgagcgtccattcgacagccacgccgccttgctgtgcccgttgaatgcttggacgccggcggaggctgatgttgatttccgtcctcttctgcggtcgccacttgaatatctggacctgctcccgattcactggaaacaaccctcaagatcgaggaagggcggtctggccccatctcattcccatcctcccatccaatcatcatgcagcccgattgaatccgagcacggcggatcacttattgttctgtacgaatacctgcactggatcgccaagatgagcatttggacgattgcccggaatccccttcaatctttgtaccatctcatacagacacccagaatgttctcacgaccagttccaccctccttggatgaaagcgcaagtctggacagaatcgcagcctggctttctacgtcaccagcatcagccattctccgttgccatctctgggcttcaatctcgtgcccggatacaaactcatga

SEQ ID NO: 510104 - DNA, 399 bp, Stenotrophomonas maltophilia
atgaagacctatatgaaggtgttcgccatcatggttgcttctttcgcgataggattctttgcttcgcagacaatgcagcaacgcggttcattggctgaagaattgaaggggcaagacacctatgcgcccacaggcatctccctgagtgactcccaactatcggatctggggatcaaggcagaaagcggcgacatacccgcaatgcgaaagctctacctttatcatgagtttgtatccgggcacgagattgaagcccagagatggcaacggagaatggctgatgctggtgacgtagaaagccaggctgcgattctgtccagacttgcgctttcatccaaggagggtggaactggtcgtgagaacattctgggtgtctgtatgagatggtacaaagattga

SEQ ID NO: 510105 - DNA, 723 bp, Stenotrophomonas maltophilia
gtgccgcagccgatcgcactgggcatcaacaccgatgcgtaccagccgatcgagcgcaagttcaagctgacccgccagctgatcgaagtgatgctggaaaccaagcatcctttttcgctgatcaccaagaacgcactggtcgagcgcgatatcgatctgcttgcaccgctggcggcggagaacctggtcagcgtgcacttctcggtgacctcgctggacccgcatctttccgcaaagctggaaccgcgcgcatcggcgccgcatgcacggctgcgcgcgatgaagcgtctgcatgacgccggcattccggtcggtgtgatggtggcgccggtgattccgtggatcaacgacagcgagctggaagccgtgctggaggccgcgcacgatgccggtgccagcaccgctggttacgtgctgctgcgcctgccgcttgaagtggcaccgttgttccgcgactggctggacacccatcatcccgatcgtgccgcgcatgtgatgagcaccatccagcagctgcgtggcggcaaggactacgacagccagttcggtacgcgcatgcgcggccagggcgtgtatgccgatctgttgaacaaccgctttaagctggcgcgcaagcgtctgggtttcaatgcgcagaacagccattggccgaagctggattgcagccggttcgtgaagccgttgccgccgaagaaggattcgccgcagggttcgctcttctga

SEQ ID NO: 510106 - DNA, 1728 bp, Stenotrophomonas maltophilia
atgcctcgaattcgccatttggccatccggaattttcggtccatcaaggcactcgactgggcgccagctccgggcatcaactgtttgatcggtcctggcgacagtggcaaatccaccatcctcgatgccatcgacctgtgcttgggtgctcgacgaagcatctccttcggcgacatggacttttttggcctcgatgtctcagagccaattcgtattgccgtgacattcggggaactgccagcatcgctgatggacattgatgtctatggggacttcttgcgagggttcgatgcggtatttgacaccctcgaagacgaacccgccgcgggcctggagacggtgcttaccctgcagcttcaagtcggggcggaccttgagcccagctggacgctggtttccgataggtcgcttcaacaaggcttggaacgaagcctgccttggaaagaacgaatcgcattggccccggcacgtataggcagctttgcaagctccaacttgtcttggagccgcggatcggtcctcaaccggctaaccgacgaacgcgcagaattgggagcccagctcgctctcgcagcgcgtcaggcacgcgccaactttggcgctcaagcgtcgccccacctgagtcaaacactcggaatcgtccaaacaacggcccagagccttggggttaacgtcgggtcgatgccgcaagccttactcgattcgcactccgtctccatcggcgaaggcgccatcgcgctccacagcgaggcaggcatcccccttcggtcacttggtacgggttcttctcgactcttggtgactggacttcaacgggccgcatcggagtcagcgccgattgccttggtggatgaggtggaatatggattggaaccccatcggctcatgcggctgctggattccttgggagccaaggagacgcccccgcctctccaagcgtttctcacaacacactcccctgtggcacttcgcgagctttcaggtgagcagctacttgtggttcgaccacgaccggctggccatgtcgtcatttccgctggctcaaccgacgagattcaaagcacgctgcggactgacccggaagctttcctggcgaagtctgtgattgtgtgcgagggagcaagcgaggtgggatttgtgcgtggcctcgatctatggggagtggccaacaaagaaccatcttatttggctttaggtggtgcatacgtcaacgcaggcggaggcactccggataacgcttttgcccgcgcaactgcgcttatgaagttgggttaccgagtcctcgtcttcatcgacgctgacaagcccgccgcgccaggtgttgcagaggcatatctccaatcaggtggcagcctcacgacttggcgggcaggaatgacgttggaggacgagctgttcctctgccttcctgacacatcaattgatgccctgctcctgaaggctaaagagcgtgtcggtgaagaccttgtgaaccaacagctggttgccaaatcgaacggtctaacaagcttggcgtccatcgaagcattgaggccgaagtcgccgtatccgctcgatattcgcgtactgcttggcgaggtctcgcgcaccaaaaagaagagctggttcaagtctctcacgacttatcagtcaatcgtcctggatatcgtctctcgcggctacgccgatgcggacgccagctttaaggcagtagtagaccaactctgggcctttacccgtgccgcctga

SEQ ID NO: 510107 - DNA, 513 bp, Stenotrophomonas maltophilia
gtgagcggggacctgcccgtgttgtggtcaccggcccagcaggcctggctgcaggccatgggctacaccgtgtatcacgacggccagctggccgccgaactggatgccgcgctgcagctgagtgtggccgaggccgaggccgaggcggcagcagcggtgacggagccgctgcgggcgcgcactgctcccgcgcgcgagcacgcgtccgaagccgcacctaccccgcgccaggaacgcccggcgccgccgcgtcgcgagaccccggtcactgcaccggataccgcgccggcaccggcccgcccgctgcccggcggcaatgcccggcagccggtggtgcggctgccggatcgcctgcagatcgccttgctgcgcgcgtccggctgcaaccccaacgatccggccacgcaggcgctgatggacagctggccgctggaccagctgcgccaggacccggccgccaagcgcgcgctgtggccgcagctgcgcaccctgcgcaagcggggtacgccatga

SEQ ID NO: 510108 - DNA, 1080 bp, Stenotrophomonas maltophilia
gtgctcgtactggacgccaacgtcccggatccaacccgcgattccggctcggtaagaatgggcaggatcctgcagttcatcagcgagctgggatggcgcccggtcttcatgccagacaacgggattgtcagcgccgggaacaagagtttcctggatgccatcggcgtagagctgatcggcgttcccggtcgtcccagactcgatcaatggctgaacgtccacagccatcgggttcgtgctgctctgctcagccggcacaatgtcgcgacagcgcacatcggactgatccgtgaccacggcgttggaaacgtcatctttgatactgtcgacctgcatcatgtccgcgagcagcgtgccgcacatctgcggcaggacgcgaagctgcaacgccaggcggtccggacacgacagagtgaaatcgccctgatcaaggccagcgatgcaacgctggtggtcagccaggcggagctggaaatgttgcaggccgaactgcctgacagcaacatccggctcctgtccaacatccatgatgtccgcgctgaaacacgtcgcttccaggaaaccgcaggggtgtacttcgtcggaggctactcccaccacccgaaccaggaagccctggaatggctgatcaacgagattcatccacggatcaaggcggaacgaccggaaatcgttctgcatctgattggcgaaatccccgaagctgttgctacacggtacgcacgcgaaggcgttgtcgttcatggacatgtggcatcactccagccatttcttgccggatgcaggatcgccctggctccgctgttgtctggcgccggagtcaaaggcaaagtcaacgaagcaatgagccatggcgtccccgttgtagccacgccgatcgctgccgagggcatgttcctggtagatggcaagaacgccctgattgcagctggcgctgaagaattcagcgctgcagtcctccgcctgtactcggatgaagcgttgtggtcccacatttcggaacagggctatcacaacatccgtgatcacttctccagcgatgccgcgcgcaggagtctggaagaactcctgcgcgactga

SEQ ID NO: 510109 - DNA, 1302 bp, Stenotrophomonas maltophilia
atgctgcgcattctgctgtgtgcccacgatttccatccgattccgtcaccgcaatcaatccgggtgacccagttggccagggaactggccaacctagggcacgatgtccgtatcctgacccgtacgtggggggcgggcgtgctttggacagatgacccgttgggtctccaggttcatcgcacgtcgccaggaggcgtggatgcagtcattgatgctgtcgccggcgtgctgcgccggctgcgtcgacctcgtgcagggtgcgacgttccttccacgccgatgacagcgagcgagggacttaactggaaaggacgtaccgtcgcacagctccggtcgatgctggacgcgggtgtgttccctgatggccgctcgcgctgggtcagcggtgctgtccgctttggccgcgcactactgcgtggctggtcgcctcaagtgattatcggatcacatgaaccggccgcaggcctcatggtcgcattgaggctgtcgcaggcatcgggggttccctttgtcgccgagcttggcgaccccgtgttgacttcttataccccagagcgctggaagggcgcatcattggagtttgaagggcaggtgtgccgccaagcggccgcgatcgtcgtcacttcagaggcgactgcagcgctgctccgggagcggcacggccccctgattgcgccgtgcagtgtcataccgcaggggtttcctgcgatggcgaaggggctgcctgaagttatccgcccagcgagcgggctggcgttggtgtacacaggacgcttctatccgttccgtgatccaatgccattggtccgtgcggtactggcaacgcctggttgcacgttgaccatcgcgggcccgggtctgccttctgagcttacggaagcatgcgaaaggcatccgcaggtgttgcagttcatcggcagcctaagccatgcccaggcccttgaactgcaacgtggcgcggatgtgctgatcaacatcggcaatgccggcatgacccagatcccgggcaaactgctcgagtacctggggtctggtcgtcctgtactccacctgcagccggacgcggctgaccccgcagcagccatcatccacaaggagaactgcggtttcgtcgctccccttgaaaaggaagcgatcgcgaaacttctgcgcgtgctggccgagaggaagcagcaggggaggctcgatgctgggttgcgactggggccggatgcattcgccgagtatcgctgggatcggttggccgtccgtctggagtcggtttgccgcagcgcgatcagatcggggcaacggcaggcctag

SEQ ID NO: 510110 - DNA, 1959 bp, Stenotrophomonas maltophilia
atgaatccaatcatcggcaataatcaggcagcgcatctggtggacctttccgccacgctggacgcagtatttgattgggcatcagggcagctggatggttcggttccgggctacagcaccgacctcatgggcagcgatctgacccgcctggtctcgcagtcggcgcgccgcatcggctggctcccttcttccgggcccgagcggctggacatcgcactcgtcgatggtgcagagccgggtgcttcgccggagggtgcgacacagcctgcggccgcaagccggctgcatctgttcttcgcgttttccggcctgctcgacagccaatccgacgagttgctggctggttactcgcagatgttcaagcgcgagatggttgcggcgacctgcgtgcaggcgtcggagggcgcagctgtggtgctggccgtgatcacgtcgtcgcgcgtggcgccgtcagcggaggcatggtggggttttgccgatgcgctcaacgcctttggttccttcaagctttcagacatgtcgcgcaagttgcattccgcatcggcaggtctgaagcatgctgcggtgttggccgacgagatggtcaacgaaatctccgtgctgacggctgaacgtacccgcgaccggcactcgttgtggcggatcgcccacaacctgcgccaggaaatcgtggagcatcgcattcgcaagacggagcgagctgcaattacgccgcgcgaaggctacttccgtagtacggcgggccgcctgctcaagactgcgggcatgatccaggccagtactcatggcgacaccagtgtgctgcagtcgctggcggtgagcgcggtgcgcacccgatgtgcactgctgattgccgaagaccatacttttggtggtcttgaacagtgggtttgtgatttcgcgcgtcacctgcgcatcaagaacttcgtgccttacctgattgttctcggctcgccttcgctcaacagtcgcatcgcccagcagttcccgggcgaagttgtgtacctggatggacaggcggcccagctgggcgaaatggtagcgcgaggacgatttgagtcgctggtggtcagccatgcctatgacggcttgcatacgatcgggccgggctgccgggtggtcgaagtcctgcacaacatctatttctggcaactggaagatcgttcgctggcacgggagcgtgcccgggttgacgagtacatcgcagtttccagcgaagtggcggagtacgcgtgcctctaccagaatctcgaacgttccaaagtggtcaccgtgccgcatggattgaatgtcgttgacctgtaccggccgccggccgactacatgcgtgctgtacgtcagcagcgcgacgtgttcaagatcctgttcgttggcaatctctaccctcagaagaacgtcatctgcctgcttgaagcattcgctaggctgcggaaggatgctcccaacgcgcagctgcgtgtcgccggtgcgcttgccgaatccgcaaatgcgtcgagggtggaagagacaatccgccgactgggcctttccggctcggtagtgctgctcggctcgctcaagcgccgtgagctgagccgggaatacgctcactcgcatatgttcgttctgccgtccttgttcgagggctatggccttgtgaacctggaagcagcgcacttcggcctgccgctggtgctgtccaacaccggctgcgcggcggaattgtcggcacgtacgcaggcatgtcgcgttgcctccattgcgatcgcgcacgacaggctcaaccacaaggaagtttcagagcggagccacacacctgcggaacaggatgtagcggccctgcacactgagttgtcgtatgtgatgcggaattatccggagttgatggaggccggcttgaagatggtcgaagaaccacccttcagtacgctccagcaggccggtgaagccatgctggatgttgttgcgcacacggcctga

SEQ ID NO: 510111 - DNA, 1104 bp, Stenotrophomonas maltophilia
atggccaagaagcgccaattaaccatcgtttcgccttatccggcgaatgaccgctacatggacggctggatgagccggatcaagaccatcgatggcgtgtttgaggaatatcccagaacatacatcgatttccaggagtggtacccggctgcgcaggagcccgaactggtgcacgcggacgagcgggtcaccgcctatcgggtcaatccgcactgcaaggcccattccgatttcgtggcccgtatcttcgacgcggcagacttcgtatatatccacaccatgcatcagtgcgagtacatgctgccgcattttgatgcggccaagatgtacgtggatatccacggcgtggttcccgaagaggagctcatgctcggctcgccggagcgctcccggatattctccgagatcgagcggcagataattggaaagctcaagcatgcgtcggttgtgacgctggccatgaaggagcactacctggccaagtaccccgaggccgcaggcatcgatttcatccacgtgccggtgttcgacttcggctccctcggccagtccgcagaacgcgttgcggcttcgcgcatcgttcgtcgacaggcgtccaggcccaccgcggtctacgccggcggtgcccagatctggcaacgggtggatgaaatggccgatatcatggcggccgcgaagttctgcaactacgagatctattcccatgacgtggaggcgttcgcaccgaagctctccagtcgcggaatcccggttgaagtcttcaagggatatgccagcaaggaaaagctggaacaggtttacagttactcgaactttggttttgctcttcgtgaggcatgcacggtcaatcgtgtggcttctcctacgaagctgtgcgactactttgcatacggcgtactcccggtcgttgacttccacctcatcggtgatttcgacgcttatggctatgcctatgtcgaccatgcggacttccgcagtggttacattcccgacctgcagacgcaggactggatggtcgacaggaatcttggatgcctggaaacgatgtattcggacttcaagaaggggattacggcagtcagggatctggtggagacggtatga

SEQ ID NO: 510112 - DNA, 1155 bp, Stenotrophomonas maltophilia
atgacaaccagcgatatcaatggacaggactattgggagtcccgattccagcgcgattggatccagaacgaaggtcagaggcagagccagttcttcgggatggtggcttgccgcctgttcccagcctggttcgtggaggacgtgaaggacaacggcctggagttgtgcgattggggctgcgccatgggcgacggtacgcaggtgatcaagtccgaactgggcctggaccgtgtcgcgggccttgacttctccgtatccgccatcgagcaggcccgcaggaactatccggacattgcgtttgccaccgatgacctcctggcagatggaatcgatctcgagtttgatgtgatcttctcctccaacacgctcgagcatttccacgagccgtgggacaccgcagcgacactgaccgcgcatgcgcgccagtacttcgtcatgctggttcccttccaggagccactcgaggagcgtcacgaggagcatttctacagcttccattggcacaatctgcgccgcgaacttcccaatggtttccatttggtgcatgcgggcgtcatcgatgtaggcctgctgccggatccgcagtacagcggcaagcagctgctggccatctatgcgtcgaaggtgccgcttcagcgcgtcatgcccgagctgatcgtgcacgggcaggatctgctgggccgctatggtcaagtgcatgatcgccttgttgccgtggacgccgagctggaggccacgattctccagcgcaatgaacttggtgcacggttggagcaggcctggcagcaacgtgacgaactgagtgcgaggctggaagatgccctgcgcttgggcgacgcgacccgtagagaggtggagcggctcgcggcagagcagtcccggcagcagggcctcatcaccgagctggaacagggacgtaatgatctgcagcatcgcgtgctcgacgtggagacgcaactgcgtactacccagatcgctgagcaacaggcctctttgcgagctgaggctggcgagaaaaggcactctgaagcggagaaggcattgcaggcgctgaaggccgagaacgaagacattgcacgccgccttgaggaggtctattcctcccattcctggcgactgactgcaccgttccgctcgatccgccgccttttctga

SEQ ID NO: 510113 - DNA, 1362 bp, Stenotrophomonas maltophilia
atgtcctttgatagcgtcttcgagcacgatcccgcacacgagatcaagcgcatcatccctccggaagaggtggtcattgccgcacatgatgtaggcaaggcctacgcaatgtatgggaaaccctccgaccggttgaaagagatgttcatgcctcccctcaggcgcgtgcttggcatgcgggaggtggcctatcaccgagaattctgggcgctgcgaggcctgtccttcgaggtgggtaaaggggaaaccgtcggcatcatcggtcgcaatggttcgggcaagtcgactcttcttcagctcatctgcggcactctccagcctaccgaaggcaccgtccgcaccaaggggcgtgtcgcagcactgctcgagctgggagctggcttcaatccggaattcactgggcgcgagaacctcctgttgaacggccaggtgctgggactgacaaggagcgagatcgaccagcgattcgatgacatcgtggcgtttgccgatatcggagaattcctcgatcagccggtgaagacatactccagcggtatgtatgtccgacttggcttctctgtcgccatccacaccagcccagaactgttgatcatcgacgaagcgcttgcggtgggcgatgccaagttcaatgccaagtgcatggcgcggatcaagaagctccgtgaatccggcctgtcgatcctgtttgtttcccatgacgtcggtgcggtccgctcgctgtgtgatcgcagcatctggttggacaaggggcgtccgcgcatgtctggttctgtgtttgcggtcactgcgcagtacatgcagaacctgttcgaagaggattcggcgcgcctcgagcacgagcgcgaagaggccgttgcaactgcgacccaggaaatcgcggacgacagggcccaggagcaactgcgcgcgcgcaagcccgtcaatcattggggcagccatgtcggctcgcttcttgcggtggagaccgaagccgccgatggccagcgtcgcaacatgttcttcaccggcgagaagctctgcatccgcatcaaggcgaagattccagcatcagccaatcgagactgcctcagcatggctttctcgctgaaggacatggccgggagtgatctggtggttggcaccacctgggactcgccgcgcctccgcctggatgtccaaggcgatacggtcgaggtcgcgtttacattggactgcaacctgcgggagggtgactacgtcctcgtagctgccctggaggatcgctcgtcggacagcatccagtacttcgagtacatcgaaggcgcgcagtacctgaaaatattcatgaaggagttccgctacggcaccttcatcgtgccgatcgagaagaaggtgctttga

SEQ ID NO: 510114 - DNA, 834 bp, Stenotrophomonas maltophilia
atgatgagcgggcgtatcggaaagttgttgcatacgctggtgttgggtccgtggacccagctatggcggaacaagacattcaccctttcgctgatcaggcgtgaaatcgaagggcggtatcgcggggcctatggcggtctgctctggtacatcatcaacaacctgatgttgctgaccatctacagcttcgtgttcggaaccatcttcaaggctcgctggaacattcctggtgcggagggtaatttctctgtgcctctgttccttggcatgatcatgttcaacgtgtttgccgagtgcatttcgcgggcgcccatttccattacgggcaatgcgaactatgtaaagcgtgtggtgttcccgctggaagtacttcccgtagtgaatatgggagcggcgctgttcaacttcgcagttggtgttgttgtactggcgtgcctggcgtttgcgctgggcgcgcacatccactggcagatcgtctggctccccgtccttttgctgcctgtggtgctgctggtgctggggctttcatggttccttgcggccataggcgtctatgtgcgtgacgtaacccatatcgtcggttttgtggtcatcagcacgatgttcatgtcaccgatcttcttccccggcagcgcattcccggaaaagttcaggtcgtggatgctggccaatccgatgacgttcccgatcgaggcaggtcgggccgccgcgctccaggggcagacccccgatctggtgatgctgggcatcatgaccctcgcgggtctggttgttgcacatatgggttacaccctgttccaggccaccagaaaggggtttgccgatgtcctttga

SEQ ID NO: 510115 - DNA, 858 bp, Stenotrophomonas maltophilia
atgacgctaccgagggagtaccgcccgaggaccgacgaacttctctaccactattgttcgccggaaacattcttggcgatctgcagtggcaagaagattcgtttttgcgacatattctcgatgaacgactatctcgagatgcattggggttacagcatgtggcaggaagccgctactcagctcgcagacagcttaggacaggaatttctagatcgagtggacgccgtcataagtggctcaggatttgccgcccttccacttgcctcctgcttttccaccaatggcgacacgctcagccaatggagagcatacgcaagcgatggcctcggcttctctattggctttgatgcaaggcggattcttgggctacctgcaaatcctctcgcggtcagctacagcgaagagcaacaggtcttcgagatcgctcagtacgtcaaagtcgctcacttggtgatgcagaaagaaccagagaacgatataaagctgttcgagcttgcgttccggctggcaatggatctgagctcctacaaaaaccccgctttcgccgaggagagcgaggtgcgtctggtccacttggcccgatatgaagaatcggcaaacggccgaaaattgatcgatttccagggaacagcattcggcgaggaatacgctccgcagccgatcaaattcttcatgaaacaaggatcgccagtggcatacatcgacctagacttcattggaccggatggcgagaaccccatccgcagcgtcatagtcggccccaagaatcaaagcctgaccacttcaatttctgtcatgctggagacgcttggactgcctggagtagatgtggtgaagtccaaggcgtcttatcgatga

SEQ ID NO: 510116 - DNA, 906 bp, Stenotrophomonas maltophilia
atgtctcaaggaagaatcgtagcgtggctttctatagccgcaatcgccggaataacggcttggtatgggatcacctctgtccgaaatgacacagtgtccaacagctcaaatgcagagccccttggcccacagcacctaccgatctcgccagtagcgagagaaagtacacccggcgcacttgactcgcagctttggagcaatgccgactctcaatcggtggcggcacatttcaacaccctgcgctcacgtgcagaagtcggcgatatggtggcgcaacgagaactggcaaagctgtaccaacagtgctcggtattcagtctgtctccagcgaatatgtattcgaccttggatgcatatgcggctgttcgtggcgtccctcaaagcacctacgacggaatcaagaagcgcttctcgaccatttgttccgcagtagatggtggccaagtaataccgcaagatgcatacaccaactggttcgagcgagctgcgaaccaaggtgacgcgtactccaaggttgcggtggcgtccaagaactgggcagcgctaaaagcagatgactatctatcgctagcgcgcgacgtgatccactcgggtgacccggaagccatcttctctctcggtgatcttcttgcgctcgctccagattctggagatttcgcagagttcaagcgcgccacaacaggaccatatgccaattacgcatggagcatagtggcatgccgattgggcgcagattgcggccccggatcctatcgattggattcgctctgcatcaatacaggcatatgtggagcaggagattttgaagacgccattaggaacaatgtggttcctgctggacagcaagaatcgctggacagagcgatagtagaagtacagagagcagttgggaagaagccatcttaa

SEQ ID NO: 510117 - DNA, 306 bp, Stenotrophomonas maltophilia
atggctcatgggattgtcgtcgttgacactgtcaggtcgcatgccaagcggctagcccaggagttgcgggaagagctcgggatcgagcctgttgatgatgagcaggaggatgcaaagttcctgctacacctgtcctgtgatgtggaacccgtggacgaatacggatgggtggactactacgttcacagcgacacctccccggtggatgccatggacgcaaaagagttcgtttgcaaggcggtccgtcaatgggcggcggcggggaggcctgattacttcgtggcccagctgccctcccgtcggtag

SEQ ID NO: 510118 - DNA, 222 bp, Stenotrophomonas maltophilia
atgaagatccaaagtgtcttgcttggtttgatcgttgcggctgccggagcagccagtgctgtaggtgtcattcccactgccaatgccgcatcgttccacacgtcttgtgtcccgatcggcggcggcgtcgcccagtgcactcagaccttctgccatgaagggcaatgctgggtcaccgacacctggacgcagcccgtacgcgaagcattggtcctgcagtaa

SEQ ID NO: 510119 - DNA, 576 bp, Stenotrophomonas maltophilia
atggagcggcgtataggggagtggcagggggaatctgagcggttaagaccgaccattgagcgaatcgcagcgattggggcgtccagccgtatgctctccgccatgcttccctcgcacggctaccaaggcttccgcgcagcaccgccaccctctggctgggtccagatgggggagagctgggtactgtggtggagtggacgacagattgcccaggtcatgccggccaaggaccgtgacgtgcgtgttcacctcgatgcccggaagatgtggcagaccaaggacgagcgcgccgccagcatcgcccaaggcaagcgctacgccgaacgctggtgcgcggctgaggcctggctttgggacgccaagccgagcgaaccgctcgaaccgctgcccggcctaccgcctacccgagagcagcagcaacaggtccggcgtctggccgaggccggggctgtggaattggtgcgaatcaaggaagcgctggaaccgcgccgaccgccgaaggagaccaagccccgcctgaaggacacccgcaaggcgtgggtgagggcagggctgcagcagctacggcgcgtttga

SEQ ID NO: 510120 - DNA, 411 bp, Stenotrophomonas maltophilia
atgaagaaccagaagggcttcaccctgatcgaactgatgatcgtcgtcgcgatcatcgccatcctggccgccatcgcgctgccggcctactccgactacacaaagaagtcgaaggtgtcggaagtgattctggctgcttcgtcgctgcgtaccgccgtggctgaatatgctgcttcgaacaatgcactgccggctgcgagctggagcggttatgaagcgcagtcgtctaagtacgtcaagagcgtggcgtgggaggatggcaagatcgttgcgactgcccagggtatcgacgcggccattgatgaccagactattgagctgagcgcatcgctgaactcgaccaatggcaccgttgcgtggacctgtggcggtggtatcccggcgaaattccgcccgggtagctgccagtaa

SEQ ID NO: 510121 - DNA, 1962 bp, Stenotrophomonas maltophilia
atgaatactctgcgcaggatagcgccatggtgttttgcattggcgctgattgtctatttgaggccgtacacgggtattcgtcacgacgccactttgtatcttgcgcaagcgctgagagtaatctcgccggacgtattcaatcgtgacctcttctttgttgctgggagccaggccgactttacggtctttccgcaactcttggctgccttgcttcgctattttccagcgggcgatgtttttcttgcgtttactttctttactaggttgtgcttctacgccgcaagttggtatctgatccgagtgctttttcctgggaaaatgcagtggcctgcagttttctcactgatcgtgatgcccaccggatatggctcatacagcatatttgcgtacgcagagccttttctgaccgctcgccccattgccgaagctctgtctctgattgctttgggtcttttgattcgtcgccactcgatatgggcaatcattgccttgggcatcgcagggggccttcatccattgcaggcgctgggtgcggcgattgttgcgtggtgctggctggttatgcaggacagacgatggctatgggcgctgctggcagcgatccctgtctgcatcttgggtattgccaaagtcgggccgttctccggattgttcactatgatcgatccggattggatggaactgctgctgcagctgagtgacaatattttcctctcccactgggaggtccgggattggtgcattgtcgtcacggatttttatattgtgtatcggctttcccgttgtgttcccatcgatagccctctttccacactctgtaaggcggtcatggcggcattcgccgttggactcacgttgtcccttctcttagccgatatgctgcagttggcgctgcccgcaggcgcccagttttggcgtgtgctctgggtggttcactggtttgcgatggcaggtttgccatgggtgctatgggatcagtggcaacgccagccgaaggattgggtcgcgattattctgatggtggcgatcgtcgggacaggtgcgagtgtctcccgcacgactttgccatgggccgtgctcggtctgatccctttgagcattgcttggccttatgtttcagccaaggtgggaagatccataaggggtttcatgctggttggtctcattgcgattcttgtggttgcattgtttcgctatcagttcagtgcgtggctggttttcaaggcgctgggtagtagtctggaacgcgtccgtcaggatgtagtgatactgggttatccgctaatagctggttcacttgtagcgcttcttgcttggatctattcccgctcagggaggaacctcggcgctgcattgggagtgctttctttgattgcattgggaggagcggtatacctttgggattcgcggagtccttggtcgagggtggttgaggtatctgctggccaagatgtgttcggtgagcatgtgccacttgactcgactgtctactggtactcggcagagccctccccgttaggaccatggctcgtgctgggacgtgcgagctactttaatattttccaaatggcagggcaggttttcaatcgaggcacatcattcgctggcatacagcgccagctccagattggaccggtaaatgttcagggtgagatctgcgacactgtgaacgcggttaacggagagcctgattcctgttggatcggggacgcaggcctgcgctacatgtgtacgccttacaaggacgtcgctgcgcccgactattttgtcctgcctttccgacagacccgccatgtacggggaacatgggaggctcgtcacccggacaccggtgagcttctcggtagctactacctgtacaaatgcagtgactggggagacccttccggtaaggcacacattgatcggcagtcttggaactccgtttcggttcgcggtggggagggggttgagaatgaatag

SEQ ID NO: 510122 - DNA, 447 bp, Stenotrophomonas maltophilia
atgaatagatcctcgcgcggcacaattcacgggaagggaatagtcggcgaaggcatcggctatctagcgggatctgccatcgcgttggcggctgatttgggatcgtactatctcctctcatggtggattggcggctggtactgtgcagctgccgggggcttccttgtcggtagtgtcgttgcctacgtcatcagcgtgcgttgggtattcgctcggcgcgtggtcagctctgcttcggccgaactggccatattcgtgctgatcggttgcttcggcctgctggttgtccaaggcgtcatgtgggtctgcattgagtggtttggtttgcccggtggcattgcaaggttggttgcagtcggattctcgttcacatcgaatttcgcgttgcgtaagttgattcttttccggtcgcgggggcgcgaacgggccatcggggaggtggcatga

SEQ ID NO: 510123 - DNA, 1191 bp, Stenotrophomonas maltophilia
atgcaaatgcgaactgtccacccattccccgctcggatggcaccagagctagctctgaactcactggcctcactgccagcgaacagtgtcgtccttgatccaatgatgggatcaggaacggtacttcggcaggcgctgaccatgggacatcaagctatcggctttgacatggatccattggcggtattgatgagtcgagtctggacctctgctgtggacgagattgcggtccgcagagaactggaagccttgttggcagagagtgaaggtgtcgacctcaggacagaaagacttccctggcacgacgacgagacccagaaattcgtccgctactggtttggtgatgaacagcgaaaggagctcacgaggctggccgtagcgatggatcgacgccgccgctcttaccgatcggcgtccaagcgtgccgctctagacgtacttcaggtagcactgagtcgaatcatcgtcaccaaggaacagtgcgcctcgctggcacgcgacacctcccacagtagaccgcacagagtgacgcttacgtcggactacaatgtagtcgacggattcaagcgctccatcaaccagctgatctctcgcttgcaggccaaccaagcaccccaccatgaacagggacgcgtcagcgtttcactgggtgatgcaagagcaatcaagctgagtgatgcgagcgtcgactccattatgacctctcccccatatttgaacgcgattgactacatgcgggggcaccgcctatcactagtgtggctcggccattctatttcagagctgcgaacgattcgttccaacacgattggcgccgagcgcggctacgatgcagagtgcggcatcgcagaggacattgccggagccatgtgcgatttggaacgtttagcacccaatcatcgtaagatggttgttcgatatgcaggcgaccttcagcgcatgatgcggcaggcagcgcgagtacttcgcgccaatggaagagcgacgtatgtactcggtaactcgtgccttaaggaaacctttatccagaactccgaaggcgtcgctagagcggggcgccacgcaggcttagagctggtcgtagttgccgaacgagaactgccggtgtccagcaggtacctcccggttactcagacaggttcgctttctaagagaatgcgcactgagactattctcaccttcgcccgctag

SEQ ID NO: 510124 - DNA, 1179 bp, Stenotrophomonas maltophilia
atgcacaggatccactcgtatccggccaagtttcctgcgtttctggctgagcttggcattcgctacgcggcaagctcgggtgtgcgtgtgcgtacagttggtgacatcttctgcgggtgcggaacggttgctcacgaggcgcgcaggttgggcctgaagttctggggttgcgacatcaacccagtggcaacgctaatcgctcgtactaaaagtgcagacattaagctggacgaatttgctcgggcctatcgtgaggtacttggttcgttccccagtgcatcgaatgagcttaagcttgcggattctgcctgcggacgattgaggcgatggttcaggcccgatcaatttgaagaccttgctcggctgctcaatagcattcgcctggcgaccgaagggagtacggcgctgcgggatgcctttctttgcatcttttcttccattctcaaatcttgctctcaatggcagcagcgagcgatcaagccaacgctcgatgtgagaaaggtgcctgccgatgtacgggaggcgtttactcgccaagccgaagctttggctcgggcactggaggaggctggcgatctttcagcgcagcctgcagcagttattcacttaggcagtgcgttaacaattgacccgccgaagggcgggctcgatttactcgtttcaagtccgccctatgtgacctcctacgagtacgctgatctgcatcagctgtcttcgttgttccttggctacgccgaagatcaccgtcatttgcggtcgggatcaatcggaagcacgcagcacgagttccgtttgaagcgaggcatgaataagctcaacagcacggcaacaagagtggtcttctcactgtacgagcacgacaagcgtgctgcccaatcgatcgctaactactttgtggacatgcaagagatcgctgttagggccaggcgcctagtacggcgaaagggtatcgccatgttcgtgatcggaaacacgcagtaccgcggtatcgacatcgacaacgcaggtcacctcgccgagtctttgcttagagcgggatttagtcgtgttcgtgccgtaaagcgcgtcatatccaataaggctgctaccccctatagaacgccgaccggtcagttcagccggacgaaaaccacaaccaatatctactcgcacgagtacgtgctaatggcccatcgatga

SEQ ID NO: 510125 - DNA, 2280 bp, Stenotrophomonas maltophilia
atgagcaagtcgcgtcctaaatcactgaagttccgaccgtatgcccggcttttgactatgctgggtgaccagctgatcaagaacgaaagggttgcattggtcgagcttatcaagaactcctatgacgccgacgcaagctgggtcaaggtaacgttcgagaatttcaacaaggatttccatgcccttgggggcgcgaagatcatcattgaagatgatggtgtcggaatgaatcgcgacatcatcgagaatcattgggtcaatccggcgactcccgccaagctaattggtaagcaacagaagaagcggcgagttacgaagaaggggcgtgtgatccagggcgagaagggaattggaaggttcgctcttctcaaacttggtcgctgcgttgaaatgacgactcgcgccaaaggggggtcttctgagttgaccctcaagctggacgtctccggttacgacgagaatttcttgagcggagataaggggttgttcttggaggatctcacgatgtccttgtcagagaccgatccggctgaactgattgaccgtacaaaaatgagcttcggtggagtgagcttcacgcgaaagcctcatggcacccgactggagataagtcagctgcaaggcgcatggtcgcgcaatcgagtcaaggatgtctacaaggacctcatgcggctgcagtcgctatttgacaggttcatggttgatgggttgcccgaagattcgaagcctggattaaaggcctctgtaaagcctgaggacgaatttgatatctacattttccgggatgcggaactggagcccttcgctggtgacacagaggaggctttgcacacgctgctgcgtgacaagacggtcttccgcattgagggaagatataaagagtcagagcgagagtttgattttactataaatgacaagagtcagaaaatcggcttgcttgaccctgtgctgacagggctgaagatgtatagggacgcattctttcatgaaaagaagaatgagcttgaagagcggtcaacgacctgtggctcgttctcgttcaagttctacatcttcaatttcgcctcagatgcggctccccagcacttaatcacgtccgccgataaggatctcattcgcgagcaccgtatctatctctatcgagatggtatccgggtgtacccgtacggggataaggaggacgattggctgaatattgacgtgcgccgaggcaccatcaaggccagtgaatttgtcagtaatgatcagaccgtaggtgtggttgagatcacacaagcagaaaacccggacctgcgtgataagacgagtcgtgaaggcctcgtggaagttggtgccgctacagatgatttccgctcgctgattcaggtctttcttgcttgggtgcgtagtgatccctatgacaagcggatccgcatccaaaaggaaacaagagacatcgctgtccataagggcaatgtcgtggagcgtggtttcgaggaagtctcggaggcgctggaagaggacgaccgcgacggcgcagctaacaagctcaatgacaccaagcgcaaataccaggctgaacggcgctacttggtaaagcgagccgaggacactgaacacttggctggcgtggggctttcggtcgaggcagcatcacatgatctgatgctgagcatcgaatcgatctatcgttcggttgatggcttgattgctcagtcgcgacgtggaaaatcgcttgatccggactacctggttcaagagttgatgtcgcttcgcggcatgatctccttcattgaaggaaacatgcgtgacatgcagatgctgtttcgctctacgaaacagcgcaaacgacctgttcgagtatccgatcttcttgaaagagtgcataaactctacgcaggcctcttggctaagaatggaattgactacgagctggagactttgggttcccctctgatggccagtacaaccgacgcggtgttgcttcaggtctttctgaatctctttgacaatgcctgctattggctagagggtcgaaaggctccgcgctctataaaggtactgctggatggagacagaggaataatgacgttcgcagattctggtccgggattccgcgacgacgacttgccatacatcttcgagccattcttctctgggaagggggatgagggccggggtctagggctgtacattgctaggcagcttctttcccgccatgagtacgctattgatgtctccgagaagcaagatcgtctgctgcccggtgccaaccttaccatctcgtttgtaaaggaatag

SEQ ID NO: 510126 - DNA, 1350 bp, Stenotrophomonas maltophilia
atgaatgctattcaacaagatgcggccccggttgcatcgcaagggttgttcagaggcatcgcggtggtcatcgatgaccaggtgaagcaagccggtaatggagatccggatgaaattgaagagatactatcttcgatcaagcgcgcaggcggccacgcagtggtactgccatcgttgcctgccgaagatgacaatcttgatggcttcgccaacgcggccttctttatcatggattggaatctgcaagggacgaatgttcgggaggcgctccaagacgtgccgggcctagacctcggtggactgcgagacacttacgaggagcagaacgtccgattccttaagaagctgcggtcgcgccgtcacgcgcctgttttcatcatgacaaatgaatcagtagatcatgtcacgaggtatctccgcgataatggcgtgatgggggctgaaagtggcgctcacatcatggtcaagagtaagactgaagttgggtctgatctatatggcgttcttgatagatggttgaaggaaacgccatcggcgtggctgctgaagcaatgggagcagaatcagattgaggcgatgaactcgctgtttaatgaattctacgaccgcaaccagtattggcctgtgatcttctggaatacttataaaaaggatgaggtctcacctcatgccgaattgggggagctgatcaaccgacttgttgatgctagaatgaagccgcttaccttggatctgagtacattcggcgagcaagcagaggctcactttggcgttaatgcacagggatacaagcaatctatttacgcggtcctacagtctgagcgcttgctgccgaacagcgccttggatccagatgagtacgctccaggtgatctgttcttggatccaaacaataactctccccggctcttgctcaatgtccgaccagcatgtgattgcgttcagcgtgaagggttcactgatgacaagatgtactgcatccgcggtgttgaaattgatgagcagaggcttgccggtctgatcgacgatcaaaacggtaatattcgcgagaaggacggcgagacaatcgtgttcgcgctcaaggatgggaagagcgtctgtttcagctatcgcaatatttatcaagtccgttttgctcaccagagggctaatcgtcttggtcgggtccttcctccgtttcttaccaagattacgcagcgctatgctgcgtacagccatcgcgcaggtttgccgcgaatccccttggcgctgatgccgcaaggaatggttgccattgccgatgcgccggagaacgtggcgtgcgactgtgaccttcagcccgcgaatgctgaacaaggggctgcgggttaa

SEQ ID NO: 510127 - DNA, 231 bp, Stenotrophomonas maltophilia
atgctttttgattttctggtacatcagcggctgggttgcgcttggctcgtcggcttcgttgtggccgtgacgacggtagcaaaccagatcgatgaacacatcgcgtttaaaggtattacggaagtccagcgccaggcgggtcacgaaagcaacggcttccgggtcatccgcgttaacgtggaaaatcggcgccattaccatcttaccgatatcagtacagtatggcgttga

SEQ ID NO: 510128 - DNA, 2553 bp, Stenotrophomonas maltophilia
atggaacatcggctgccggtgggcacgcccggcgagccaggcgacatcccgctgccgtggggacgcctgcatttcgaacaggtctgcgcagcgctgctggccgatggcctggtcgccgagcacgacgtcgagcgcatgcggttttccgcacagggcgcccgcaatgccagcgaagtgcacccgctggtgctgctgtccaacctcaagctggccgcccacgacggtggcgaactgaccctggaacgcctgaccgaatggctggcccggcgcaccggcagccgctacctgcgcatcgatccgacccgggtcgacgtcgccgcggtcaccgcgctggtctcccacgcctacgcccgccgccatcgcttcctgccgctggcggtggatgccgaacgggtgctggtggccaccagcgagccgctggtgcaggagtggcgccgcgacctgcagcacctgacccgccgcagcatcgagctggcggtggtcaatccgctcgacctgcaccgctacaccatggagttctacggggtgacccgctcggtgcgtggcgcgcgcggcgatgtccgcggcgaagccagcaccaccctgcccagcttcgagcagctggtcgagctgggccgcaccggcgacgtcaatgccgacgaccagcacatcgtgcacatcgtcgactggctgctgcagtacgcctacgaacagcgcgcctcggacatccacctggaaccgcgccgcgagatggggcgcatgcgcttccgcatcgatggcgtgctgcacaaggtgttcgaggtgccaccggcggtgatgaccgccgtggtcagccgcatcaaggtgctcggccgcatggacctggccgaacgccggcgcccgcaggacggccgcatcaagacccgctcgccgggtggccgcgaagtcgagatgcgcctgtcgaccatgcctaccgccttcggcgagaagtgcgtgatgcgcatcttcgacccggatgccgccttcaagagcatcgaccagctcggcttcagcccgcaggaggccgccggctggaacgccctggtcgaacgcccgcacggcatcgtgctggtcaccggcccgaccggctcgggcaagaccaccaccctgtattcgacgctgaagcggctggccacgcccgacgtgaacgtgtgcacggtggaggacccgatcgagatgatcgcgcccgagttcaaccagatgcaggtgcaggccaacatcgacctggatttcgccagtggcgtgcgcacgctgctgcggcaggacccggacatcatcatgatcggcgagatccgcgacctggaaaccgcgcagatggcggtgcaggcctcgctgaccggccacctggtgctgtccacgctgcataccaacgacgcgccgtcggcggtcacccgcctgctcgacctgggcgtgccgcactacctgctggccagcaccctcaacggcatcctcgcccagcgcctggtgcgcacgctgtgcccgcactgcaagcagccgcacacccttggtgctgccgactgggcggtgctggctgatagccaagctgcatatccagatgccgccacgccctgtcgtccggtcggttgcctggagtgccggcgcaccggattcctcggccgcatcggcctgtatgagttgctgccattgggctcgcggctgcgtgggcagatccgcgctgacatggatctggccggtttcacccgtgccgcgcgggctgaagggctgcgaaccctgcgccaggccgggcttgaaaaggtggcgcaggggctgactacaatcgaggaagtcctgtcagtcctgccgccccggatgaacccagccccgttcctgatccttgaaaccggccgcccggtgccgtcgctgcgccgctacgggcgctttccgcactggatccgcgtggccgccgggctggaagaacaccagaccgtggtggtcgacgtcgaacacggcggtgcactgcccgatccgcacgccttcgccggcgtgctggtgaccggctcggccgccttcgtcaccgaccacgccgaatggagtgagcgcagcgccgcatggctgcgccagaccgcccatgccggcctgccggtgttcggcatctgctacggccaccagctgctggcgcacgcgctgggcggggaagtggcctacaacccggccgggcgcgagtccggcacgatcgaactggagctgcagccgcaggcggcgcaggacccgctgttccagggcctgccgcagcactttgccgcccacgccacccacctgcagactgtgctgcgcgcgccggacggcgccgaagtgctggcacgctcgccgctggatggctgccatgccttccgctgggggcgccaggcctggggcgtacagttccaccccgagttcgccacccaccacatgcgcggctacgtgcgtgcccgcgccgactgcatcggccgccatggcggctgcgcccgcagcatcgagcgcgcggtcagcgccgcaccgctggcccgccagctgctgcgccgcttcgttcgccaggcgcggctgtcttcagcccagccggcggcaaaacagggataa

SEQ ID NO: 510129 - DNA, 288 bp, Stenotrophomonas maltophilia
atgagtgaagcggatctcgtatgcgaaagcgtcgagtgggtgaggcgcgaactgcgtgacctgatgggtaagcaaaggaaggaacgtccgtggctcaactgtcctaccgagcgggagtgggccattgccaagctttgggatcgggaaatgtctgagacggagtgggcccacgttctgaaggtcctccgcccgatccttgctgaaccaaagcgacagcggaagcgcctctcggaggtggccggtggtgccgctgcaaatccaagtagcaagcctcgtcgaaaaatgtag

SEQ ID NO: 510130 - DNA, 3246 bp, Stenotrophomonas maltophilia
atgatcgagcaagtactcacgggtgccgtacggcaccgctggctggttctgttgatcacactggtgattgcggtgatcggcgggtggcaactgaacctgctaccgatcgacgtgactccggatatcacgaacaagcaggtccagatcaacaccgtcatcccgacgctgagtccagtggaggtcgagaagcgcgttacctacccgatcgagaccgcgatggcaggacttcggggcgtcgcgaacacccggtcgttctcgcgcaacggcttcagccaggtcacggtgatcttcgatgagagcgcagacctctacttcatgcgccaacaggtcaccgagcgtctgactcaggctcggccccagttgccggagggtgccgaaccactgatgggcccggtttcgaccgggttgggcgaagtattccactacagcgttgaattcacccacccagatggcaaagatgccccgcgaaatgatggtaagcctggctggcaaagcgacggttcgttcctgactgatcaaggggaacggctgacggacaacatggcacgtctggcctacttgcgcacagtccaggactggattgtgcggcctcagctgcgcacgacgccaggcgtagcagacgtcgacagcctcggcggctacgtcaaggagtatgtcgttgagcccaatgcgagcaagctcgcggagtacgggttctcctataccgacctggccgacgcgttgcaggatgccaatctgtcggtcggagcagactacatccagaggtcgggcgagtcctatctggtgcgcgcagacgcccgcatccgctccgtggacgagattgcccgtgccgttgtgggcaatcgcaacggagttcccgtaacggtgggtgacgtcgcacgtgtggtcgttgacggtgagctccgccgcggtgctgccagccgcaatggatacgagactgtcgtcggcagtgcactcatgctggttggcgccaacagccgaactgtggcggcggcggtgggtgacaagctgcaggagatcggcaagaccatgccgccgggcgtgacgattgttcccaccttggaccgatcccagctggttgtcgcaacgatcaagaccgtcgccaagaacctggccgaaggcgctcttctagtcgtggtcatcctgtgtgcattgctcggaaactggcgagctgctgtcattgctgcattggtgattccgttgtccctgctgatcaccgcgatcggcatgaacaagctcgggatctctggcaacctgatgagcctgggtgcgctcgactttggcctgatcatcgacggcgcggtcatcatcgtcgagaacgcactgcgccgcctggcagagcgacagcatgcacttgggcgcccgctcaatctatcggagcgcctgcatgaaacgatcgcctcgtccaaggagatggtccgcccgaccgtatatgggcaggcggtcatcttcctggtcttcgtgccctgcctgaccttccagggcgtcgaggggaagatgttctctccgatggtcattaccctgatgctggcgctggcctctgcattcgtgctctccctcactttcgttccggcgatggtggcggtcatgctcaagggccacatttccgagaaggaagtacgggtagtagctgctaccaagagccgctatcagccgatgcttcgcagcgcaatccgccaacccatgccctacctggccggtggtcttggcgtcctggtggccggcgttgtggcctttggctttgtgggtcgggagttcatgcccacattggatgagcagaatctcaacctgtcctccgttcgcatcccgtccacatcgatcgagcagtccgtcgccatcgaccttcctcttgagaaggcactgatgacgttgccggaggtacagacggtgtactccaaggccggtaccgcaagcctggccgcagatcccatgccgcccaatgcgtccgacaactacgtgatcctcaagcccaaggaccaatggccggatggagtgaagaccaaagagcaggtgatcgagaggattcgagaaaagacagcctttcttgttggtaacaactatgacgccacccagcccatcgagatgcgcttcaatgagctgatcggcggcgttcgtagcgacgttgcagtcaagatctatggcgaagacctgacggcgcttgccggcagcgctgacaagattgcggccgtcctcaagaagattccgggcgcatcggatgtccgtgtggcgcagacgggaggcttcccgacctttgacatggcgttcgaccgggccgcgatcgcccgttacggactcaccgtcaaggaagtggccgacacagtgtctgctgctctggcaggtcgcatggcgggccagatcttcgaaggtgatcggcgcttcgacgtggtggttcgtctgccccgtgtggaccgcagcgatctcgatgtactaggagccgttccggttatgctgccgccaggcagtcaggaaggccgtcagtctgttccgcttcgtgaattggtcagtttccgcttcacacagggtctgaacgaagtgagccgcgacaatggcaaacgtcgaatctatgtggaagcgaatgtggtcgggcgtgacctgggtagcttcgttgacgacgccaaggcggctattgcccagcaggtgcagttgcccacgggttcctggatcgaatggggcgggcagttccagaatctgcaggcagcaacgaagcgactggcgattattgtgcctctctgcttcattctcattgcagccgtcctctacatggcgattggcaacggtttgctgacaggtacggtactgactgcggtgccacttgctctggccggtggattcttcgcattggcgttgagaggaatccccttctcgatctcagctgctgtgggcttcatcgcggtatctggtgtcgcggtgctcaacggcctggttctgatctccgcgatcaagaaacgcctgcacgaggggcttccgccagatgaggcggtcgaactgggtgcaatggagcgcgttagaccggttcttatgaccgcgctggttgcctccctgggcttcgtcccgatggcgattgcaacaggtacgggcgccgaagtgcagaagccactggctacagtggttatcgggggtcttgccacggcaaccgtactgacgctgttcgtgctgcctgcgctgtgcgggctggtactccgaagaactgcgcgcaggaaggccgcgggcattgaagaccccttgccggtacccgaagtcgattga

SEQ ID NO: 510131 - DNA, 1422 bp, Stenotrophomonas maltophilia; identical to SEQ ID NO: 501245

SEQ ID NO: 510132 - DNA, 657 bp, Stenotrophomonas maltophilia
atgccctgtgctgcaacggccttgggatctggcagaaccagttaccgccatagttcccgccactatggcgctgcattgcacgctcgcaggttagatcgcgcgccatcgatggagctggcttatggagctcggcacgtggcgcgcacagcgccccacagagggcacctggggggagagccagccggcgccagcggaagcggcctgtgcgggccaccgcgcaggccacagcgatgcattccatggggtgacgggcggggatgcagttcgccgcttgcgtaccccggcgtgcgcactcgtctccccgccacgcctgcgcacttcatagggtgctttttctgcactgcctgcacacggctccggaacaggcccagcaaggctatgcgaagtgctgatggggcctcaaagaacctgcgaatccctgcaccaaaggggtgtttggcgcggcccgccaaggccgcaaaagacgtcccaccagggagaggaagatgggacgacaaatgcactgtctcatgtggtgtcagacaatttgccccacaactgaaagtgtttcaggaaggctatgaattgagggcatgtatcgcaattggtgttgcggcctacatggttcgaggcgctccggcaaatccttccaaaacccttctacgacagggtttttga

SEQ ID NO: 510133 - DNA, 1191 bp, Stenotrophomonas maltophilia
atgtcgttgactgatctatctatccgcaaggccaagccgtccgaacgcactcagaagctccgcgacggttcggggctttacctacttcttcgccctgacggcgccaaatggtggcgatgggactatcgccgtcccggtacagggcggcgcaacacactttcactgggcacctatcccaaggtctcgctagcacaagcgcgagagcgacactccgatctatgtaggcagctggcagcgggcatagaccccggtgagcagcgaaagtcggagagagatgagactcgcagccgcgcggaaagcacctttggagtcatcgcaaatgagctctttgaaatcagatccaagaagctgacggctaagagcatgtacagcgagcgcggtctataccggctgcacatcgagccctaccttggaactcgtcccattgattcgatatctgcacgcgatctactggccgtctacgaaatcattcagcgctatgggcgcatcaacacagctcatcgagcgagggagttgacaagtcgcgttttccgccacgccatcgttaccgagcgcgcacaacgtaaccctgccgcagacttggccggtgctcttgggcgtgtagaaaagggtcactttgccagcattacagaccctgcacgtgtcggtgcgttgctacgcgccctttccggctacagtggctcgccgatggtaagagctgcattgcagctggcaccactggtgtttgtgcgtcctggcgagttgcggcaagcacgctgggaggatatcgacctggacgctggcatgtggcgatttgtcgccagcaaaacccgtcaggcacatgtcgttcctctctcggtgcaagcagtggagatctttcgatggttacagccattgacagggcgaggggaacttgttttccccggctatggaaagaaagggcttccgatcagcgagagcacgctctcgcatgcgctacgtgccctgggctatgacagaggtgtaatgtccatccatggatttcgcgccatggcacgcaccctgctcgacgaggtgcttgggttccgtcctgacttcattgagcaccagctcgcccatgccgttcgtgatcccaacggacgcgcctacaaccgaacgtctcacctccctgagcgggtcaaaatgatgcaggtgtgggctgactacttggatggtctgaaagcctctccctga

SEQ ID NO: 510134 - DNA, 264 bp, Stenotrophomonas maltophilia
ttgactctctcgtcagtctctgcactgcccaacatgcttggaacccccgccctttcggccacgcgccccgagtgcttcctgcgcaaggccgacgtactggcccgcaccggcatctcgcactcccacctgtaccggctgatgaagcaaggccggttcccccagtccatcccgctatcaccgcgcctgagcgtctggcttgaatcagacatccacacctggatcgcctctcagattccatccacccacaagcgagcacaacaatga

SEQ ID NO: 510135 - DNA, 213 bp, Stenotrophomonas maltophilia
atgaaagacgccatctgcctgaccatcgcccaccagcgcttcaccctgagcaaggacgaggccaagttcctcgccgagcatttgcgcacagctgtggcacagccgaatctggcgctgaacttctcgcacaaggatccgggctcttttacccatcgtattacggtggcccgtggccccggcgtggtcgccgatgacaccatgaccgactgctga

SEQ ID NO: 510136 - DNA, 288 bp, Stenotrophomonas maltophilia
atggccccttccaaagcgttcatgcgctgcccgcattgcgacacagccgccatcgtgcgcaccagcgtgctgcattccaaactgctgcgcgaatctttgcttcagtgccgcaatgcgctgtgcggccatacgttctcggcctacaccgaaatcgtgcgtacgcacactcaaagtgcgtgcccgaggggtgacgtgtgcctgcccatcagtagccccgctgaacgtgccgcgctcagtgcgcaggccgcgcaagagcccgtcaccacaccttgcaaggcacggcgatga

SEQ ID NO: 510137 - DNA, 210 bp, Stenotrophomonas maltophilia
atgtctcacgacaccctggccgcgccgtcgcgctttgccgcccgtattgctcaccacctcggcgaaatcgccgacactctcgactgggatcattcccgatggctggcgctgactgcgcgcctgcaggccaccggcaaagcgcccgaggcgttgacgctgggcgagatgcagcacgccattgccgccaccgtgcaggaggccgcgcgatga

SEQ ID NO: 510138 - DNA, 216 bp, Stenotrophomonas maltophilia
atgaacgctctcgccctgaatgcagccgtcgccaacgacgatgcggccacgcatgacctgttcagcgctgtgcgtcagttgcagcgcatccacacgatgccgatcgtggcgctgtcgcagctggtagccgccttggaatgccgccctggtgcactggaagcactctccctaggccagctgctggccatggtccgagacgcggaagtggctgcatga

SEQ ID NO: 510139 - DNA, 654 bp, Stenotrophomonas maltophilia
atgaacacggaaaccgtgagtgtgtccggcgtgccgggcgtggccgatggcgtgctcagtgccaccatcaccgatacctggttcgatgccgagcgtaccgcccatattgtcgaggtggctcgccgcatcgagcggctgcacaacaaggcctcgcggcgtcttgccatcctcagtggtgaattggatgaggcgctggaaggccatccgttggagaaccgcctgcgcgagcgcctgctgtggccgttggagcgcgattgcgtggagctggccaccgtcgcggcgcgggtgcgcgtgcgcctgttgctgttcgcccctgcacagtcgcaggagcagttcgaccgaggcatggccttgcagctggccgacctgcaagccgagcaagccgcacctgtagcgccggcgcaagcgcctgcgcccagcgctgcacccatgcccttcggctactggatcagcgaggaaagcttcaatcgcgtggagcgcgcacggtcggcggcactgttgctgtccagcgtgggcgagggcatcggcgaatccgtagcgttgtcgttcgatgccgtggcggccagcgccgcctacgtgcatgaggacctggctgccgtggtggcctgcgcccggcacagcagccagctggaggccgacgatgccgcggtctga

SEQ ID NO: 510140 - DNA, 852 bp, Stenotrophomonas maltophilia
atgccgcggtctgaaggattcattgcggcattgcgtgcggcaggtctatgcgtgggaatgggcgatgctgtcttggccaatggccgtctgtgccgcgtacgcgccgagggcgatggcagcggccagcgcagtggttggtatgtgctgcacgcaggcccgccgcaggccggtgcctacggaaactggaagaccgggcttaatgagtcctggtgcgagggtggaagcgaggcgctgagtgaggccgaccgcgtgatgctgcgcgaggccgtggtgcgcgcacagcgccagcagcaggccgaacgcgcacagcggcaggccgtggcccgacagcaggcgcgtgagcgctggcagcgtgccagcgccgctacacccgatcatccctacctggtggccaagggcgtgggcgtgcacggcctgcgacagctggacggcttgctgctggtgcccttgcgcgatgcgcagggacggctgtggagcctgcaaaccatcgccgccgatggcagcaagcgcttcctagccggtggccgtaagcgcgggctttactacgctgtaggccgcacggtcagcgatgtggtgtgtatcgccgaaggctatgccactgccgccagcatccatgaggccacgggccaccccaccgccgtggccttcgatgccgggaacctggagccggtggcctgtgccctgcgcgccaagttcccctctgcggtgatcgtggtgtgcgccgatgacgatgcggccaccgccgcgcggctgggcatcaacccgggcgtggccaacgcccagcgcgccgccgaggccgtgggcggggtggtggccatgccgccgcggccacgccatgaggcaacctcctga

SEQ ID NO: 510141 - DNA, 1857 bp, Stenotrophomonas maltophilia
atgaacaacgtcacctctgtcgatttcaatgatgccgcaaaggacgccggtaccggcgctgtgcgcggctcgattcagcgcgccgtgcgcaagggcaccaagggcaaaacccagggcgacaagcgcgccaccgacagcggcagtagcggtgctgcgcgggcccactatcagctcaacgagaccggcgtgtactacgtcggtgtcaccgaggatggcgacctggccgaaccggtgttcgtctgctcgccgttgaaggtcgaggccaagacccgtaacagccagagcgaggagtgggggcgcctgctgacctggactgatgccgatggccatccccaccagtgggcggcgcctgcggaaatgctggtgggcgatccgcgcgagttcgtgcgccagctggccgctggtggcgtggaaatgtcggcccaccgcaacacgatgcagcgtctgctggcctacatcatccaggagcgcatcgacacccgcgcccgcaacgtggccgtgccgggctggcatgagggccgctacgtgctgcccaatggtgagagctacggcaccggtcaagaacgactggtctaccagcacagtggcggattgcagcatcactatgcggcggtcggcacgctggacgattggcggcgtgacgtggcccggcgttgccaagacaattcgcggctggtgctggcggtttcggcgatgtttgccggtccgctgctgcacttcaccggcgctacgggcggtggtttccacctggtcggtggcagcagcagcggcaagagcacggcgctgcgcgtggcggccagcgtggtcggtcccccggaatatgcccgcgagtggcgcagcacggccaacggtctggaaggcgtagcggtgttgcacaacgatgccacgctgattctggatgagctggcgcagatcgatcccaagcaggccggtgatgcggcctatctgctggccaacggcaatggcaagagccgcgccaaccgggccggtgaggcccgtgcagcagcacgctggcgggtcctgatcctgtcggcaggcgaggtcgggttggcccagcacatggccgaggtgggcaagcaggcacgggcgggccagtccgtgcgcctagctgacgtaccggctgaggccgagggcgggcatggtgtgtttgagcacctgcacgatgccagcgatggtgcagcgctgtcggccctgctcaaggacgccgccgcgcgcacctacggcgcaccgtggccgctgtggatgggttacctgacccagcaggatagcccgacgctaaccgcccagctgcgcgaatccacggaccgattcctggccacctatgtacccgacgatgcctccggtgaggtgcgccgtgtggccgagcgctttgctgttgtcgcttttgctggggagttggccagcagctgccaccaccgcatcaccggctggcccaagggggaggccacacgcggtgtcgccgcgtgcttccaggcttggctgcaacgtcggggcggtaccggtagtgccgataccgatgcactgctctcgcgcgtgcgtgcgttcttcgaggcctacggcgagagtcgtcttgagccgctgcgctgcgcgcaggaagcgccaccggtccgcgatcgggcgggtttccgccgtttcgatgaggtgggtgtcactgaatacttggtgctccccgaggcgctgaagagggagttatgcgcgggcttcgaccctcgccaggcaacccgtgagctgctcgcagcgggctggctcaaacccggctccgatggcaaggcatctcaatccgtgcgtgttccaagcctgggctctatgcgtctgtatgtctttgacagtcgcaaagttcatggcggcgaccagtag

SEQ ID NO: 510142 - DNA, 741 bp, Stenotrophomonas maltophilia
atgagcaatagcaccaacatcatcagcgaagcattgaccgaggccgagggcaatacggttgcggtagcgtcgtctgagaatcgccagcgattggccgagctcactgagcagctgttgcatgccagtggacgtaagcgcgcggttctttctaaagtagagacgatgcgccgggccggagaggtggccaagagtgacgcggccaccgcacgccaacagtggagtgcgcagttgcgtgacggtgatggcacgctgacccgatccatccagaaactgcgcgttaccgagcgctcagccctgtcgctggctgaggaatatgaagcgctggccaaagaggtggcttcaccgctaccgcgtctggatttggagttggccgagatcgccagtacctgcatgacgtaccgtgatggggtgatcaaggaagtggccgcacaggtctatcaggaggtgctggcacaggccggtgatcatctggcagtggccttggggctatttgcaaaggcggagagtgctggaatccatcaccgccaacaggccagtgatgacgaccttgccgcgcgcttcttccatcgcctgagcatcgatgtgagacagtgtgtggatagcttgaaggtgcgcgagcatatccagcagcagctggcgctaccggcattggacctgggcgtggtcgatatgaaactggcaaccagtccatccacgcgaagcatccgggctcgtgagcttaacgaaggtcccgctcagtga

SEQ ID NO: 510143 - DNA, 1038 bp, Stenotrophomonas maltophilia
atggcgacggacattcaaagcggagcaggccggaaattgctcgaagatgcggcaagtgcccccgactcgattaccgcgttcaccttcggagacccgacgcccgtactggaatcgcgcggattgctggattacctggactgttaccgcaacgggctgtactacgagccgccggttagcctgtcgggactgtcgcgcaccactcggtccaatccgttcctatacagcgggctggtcttcaagcgcaacatgctggtacgcacgtttgtgccgcatccgctgctaggtcggtcaagcttcggtcagctggcactggactacgtgacctttggtatgggctacctggaacgacaaaccaccctgtcggggaggttgcttcagcttcgctcgccaatggcacagtacgtgcgccgtggcatcgagccgggaacgttttatcaggtgcgcacccacaaggtcgagcacgcctttacgcccggatcggtgtatcagctgcgggaggcagacaccgatcaggaaatttacggcctacccgaatggttggcgaccgtgcaatcggcgctgctcaacgagtctgccacgttgttccggcgcaagtactactgcaatggctcgcacgcggggttcatcctgtacctgaccgatgcgcagacggagagtggcgatatggacgcactgcgcgaatcgctgcggcagtcgcggggccctggcaacttccgcaacttgttcgtgcattcgcccaatggcaagaaggacggcctgcagctgattccggtcagcgaggtggccgccaaggacgagttcaccggcatcaagcgagtgacgcgcgatgacatgctggcctcgctacgcataccgccgcagctgctgggcatcgtgccgcagaacgcaggcggattcggctcaattcgtgacgcagccatggtgtgggcggaaatggagctggcaccgctgcaatcgcgcctgacgatgctcaatgactggatcggggaggacgtcatccgcttctcacccttcgagcttgccagccggacgggttga

SEQ ID NO: 510144 - DNA, 441 bp, Stenotrophomonas maltophilia; identical to SEQ ID NO: 495205

SEQ ID NO: 510145 - DNA, 237 bp, Stenotrophomonas maltophilia
atgagcaaacaaactgtaacgctgtatcgaatgaccgccgaccacaccggcgagcacctccatgtcctgttccaggacgaccatccaacgcttccatcggtcttggggccgttggaaccggttgaggtggcagccgaccatcccgtgaggatggttgaaagagaacgctggctgcatcgatgcaacctgatggaccgaggatggaccgtgctggggtcagagcataccttcggatga

SEQ ID NO: 510146 - DNA, 474 bp, Stenotrophomonas maltophilia
atgacccacgctgcccctccatccacccttcaggctccggcctacggcctgctgctcggccacaccgagtgccatttctgccacgccccgacccccaccgccgcgatctgggtgccctcgttcgaggagcacgacgacgagggtctggtggatcagggggagggtgccgtgttgcgctacatcgagcgtttggacgaggacactgtcgctttcgtggcgggccacgcgccctggcttcgtttcgccactactcgaacgtcagggcaaacctacctggcccatcactgcaccacctgtggggcccttcaaggggaccacttcgtgttctcgccggatggtccttactggccccagagcgacgtcgagcttgcacgcctgacgtttgtccagggccttggcccgctcaccgcccaagcatcggcagggcagagcacctggatggaccgggtccctctggcctgcgcccaggcctga

SEQ ID NO: 510147 - DNA, 441 bp, Stenotrophomonas maltophilia; identical to SEQ ID NO: 498322

SEQ ID NO: 510148 - DNA, 282 bp, Stenotrophomonas maltophilia; identical to SEQ ID NO: 364321

SEQ ID NO: 510149 - DNA, 852 bp, Stenotrophomonas maltophilia; identical to SEQ ID NO: 364322

SEQ ID NO: 510150 - DNA, 129 bp, Stenotrophomonas maltophilia
atgccgagagtgaggaacatccatgccgcctgggtccagggacgcgaccagcgcgcccaggcagtatccagccggcccgccagcagcgaggcgatggcgaaggcgaaggccaccgagaagccgacataa

SEQ ID NO: 510151 - DNA, 2169 bp, Stenotrophomonas maltophilia
atgcagttcatcgtcgacgggccagacatcccagaagcacttctacaggcacacgaagaaggacgagtagtcttcttctgcggcgccggagtctcctacccgtcaggactacctggtttcaaaggactggttgagcaaatctatgcgtcgaatgggacatcattcacggacatcgagcgtgccgccttcgatcattcaaagttcgacgcgactctcgatctacttgaaaggcgactgcctgggcagcgattggcggttcggcgcgccctagcgaaatcgttgagacccaagcttcgtcggaagggagcaattgacacccaagcagcgcttcttcggttagcacgaagccgggatggcgcgttgcggttggtgactaccaacttcgatcgaaccttccacgcggcggcgaagcgcatgggccaaccatttccggcctatcccgctccaatgctgccgatccctaagagcagccgctgggatgggcttgtctttctgcatggcctgcttccggagagtgaggatgatgcagcactccatcgactagtggccaccagtggtgacttcggcttggcttacttgaccgaacgctgggccgcgcggttcgtcagcgaactttttcgcaactatgtcgtttgcttcattggatacagcattgacgatccggtcctccggtacatgatggacgcattagcagcagatcgaatgctcggtgaggttaccccgcaggcgtgggcgttcggagattgcgaagccgggaaagagcatctgaagactattgaatgggaagctaagggcgttagacctatcctctacagggttcagcctgctacccatgaccactctgcgttgcacgacacaatcaggacttgggcagatgtctatcgcgatggagttcaaggtaaagaggccattgttgcgaagcacgccatggcccaacctcaggacagcacgctccaggacgattttgttggacgaatgctgtgggctctttcagacaagtcaggcctccccgcgaagcgcttcgcggagttcaatccagttcccccgcttgagtggctcctcgaggcattttcccatgagcgattcttgcagagggatctagcccgctttggcttctcctcggttaaggaggaggatgcagaactcagattcagcttggttcgtaggcctgcgccttatgatcacgctcctcctatgacactggcgtcttctggaagtatggccagccgatgggatggattgatgttccagctcgcacgctggcttgtgcgtcatctggacgatccacgattgatcatatggattgcagagcgtggtgggcagatggatagtcgctggatctctctagtcgactccgaacttgagcgtctggccacactggaacgggatggcaaagtctcggagctggatcttattcgcctggacgccccaaagggtgtgcccgatccaaagatgcgaactctttggagaatcgtgctcggtggccgactcaagaccccactgtcaggggggctgctatatcgttggatcaagcgtcttagacgtgagggactgaacacgtctcttcggatggaacttcgtagccttctcagcccaaagatcacactaaggcgtccatttgtttgggacggcgaagtggccgatggtgcagacgagacagtgcgaattaagcagttggttgactgggaccttgtgcttgcggaggacaatgtacatgcggtcctccaggatcagtctaagggtgagtgggagaaggcactcccgctcctgcattcggacctacagcaactgctctgtgacgcgctgggccttcttcgagatctaggagaggcagatgaccttgtcgatagatcctactgggaccttccatcaatcacgccccattggcagaaccggtccttccgagactgggttagcctgattgaactgctacgcgacgcttggttagcagttcgagctacggatgagtcgagatccacgctcatggctcaggcatggttcgagatcccgtatcccacattcaagcggctggcattgtttgcggccagccaggacaattgcatcgagcaggagcagtgggtcgattggctgctactggatgaggggcggtggctgtggtcgcagtgcaccgcacgcgaagtgctgaggcttcttgttctccaggggtga

SEQ ID NO: 510152 - DNA, 216 bp, Stenotrophomonas maltophilia
atggccgcagcgatcatgtgcatcccgctgcaggcactacacccgtacggcatccatcagcaggaaccggcacggcgcacactggaaggcattgatctgtggcacaaggcgctggaagtgttcgctggcacagtgcaggtcgagcgcggcgcggtcgggccacagctcgatgaagatgaagtggccggatccttctggtcgacgaacagttcatag

SEQ ID NO: 510153 - DNA, 1503 bp, Stenotrophomonas maltophilia
atgcacggtgccgcgctgtgcaagcgtggtgctggccacggccacaccggcctgctcgacgctgcgtccggccagggtcacgtccccctcgagtgcgcgcagcaggccggtattgcgcacgctgccagccgtgctgccagcgataaagcgcggcgcgatttcattgccgcgggtggtggaactggtgttggcggccgtacccacgccgcgccggatcacgaaactgtcaccggctgcgagctgcacttggcccttgcgcgcttcgatctggccagcattgtccacgctgtgcccggccagcagcacgtagccaccgccgcgcgtcgcactggtcggctcatgggtcgcgatgcgggcgccccgctgcaccatcaccttgccgaatgcatcgctgagcgcgctgctgctggcgtcggggctgtacaggccgttgtcgcggaactgcgcatcgctgatccgtgctgcagccgccagcagattgcgtacattgacctggctgttgttgccgaacaccacgccgttgcggttggccacgaacaccgtgccacttgccttcagctggcccaggatctggctgggccgcgcctgcggatcgttgacgcggttcagtacggcccagtcagggttctgcaggaaattcagcgtggtgttgccgccgatgttgaaggtctcccagttcaggatcgccttgtccgcggtctgctcgaccgtgacctgcaccctcccgtcgctgccctgcgactggatcgcgtcgcgcgcattgagccagccacgggtcagcgggttctggtcgacgctcaggccgtccttgccgaggccatcggcaacgatgaagccagcctcgcggcgcgcctgccgggcttgttcctgcaggcgctgctgcagggcaatcgcctgcgccgcagtgccaagattgtcgatcgactgctgcagcttctgccgtgccgcatcctgctgctgggccggcaactggaactggatcggcacgccgttgggcatccggccactctgtgccgcgctgccctgggccgcgccccgttcggcgaaccagcccggactgaacgcctgctgcgcctggctggccggggccaccatgctccccagtgcgaccgcgatggcccacgccatcggatgattgcggcgcatcgacgcggccggatgaacagcggacgggagcgggtgcgacatcggaacctcatcaacctggtgggccgcagctgcggcgacgatcggggaggcacacgcaacgcatgccctgccactgatagacggttcacgcgagacgaagccgacagccaaacgctgcaaccgcggcaccgtcgcggaaatggcgacgccggcccagaggccggcgtcgggtcaagcaggattcaacccgtgctgcggattacagcggacggccgatgccggcgcaggtgctggggttgttcaggccggcagtgctgctggccagcacgaagcggttgcggatcgcatcgcgccaggccttggtcagcgggatga

SEQ ID NO: 510154 - DNA, 1341 bp, Stenotrophomonas maltophilia
atgcccaggctcgaagtaccctggccgtggatgcgcaggctctgggccaggcgcaggtcgacgtcgccgaccgcgcggatgtcaccgaacacggacagattgtcgaaaccgccagcctgcagctgctcgaccgacaacgcggcgtggccatactccaatgtggtcggcagtggctgccccggcgcgctgtgctggctgagggtgatcgcacgtgaccgcagtacctcctcgctggcgccacgtgcatggatgctgccgccaaaggccagccccagggtgccgccgcgtgcgccggcaccgccggcggccgcatccatcccgccgtccaggtacagcgcattggccgagcgcagcacgatctgcccgccatcgctgtccacgcgcacgcggccctggccgtcgacgtccagctcggccgacgcaccccgcgcctgcaggcgcgcaccgcgttcgaccaccacgaaggcttccggtggtcggttgtcgacgaatgctgtggtctcccagtccagcgccccgccgatctcgatgcgtccacccgcgcgcacctgcccgcgcagacggccgctggaatcgggcagcgaaatcgcgtctgcatcggcatccagcagcgcgccttcggcgaaacgccaggtgcgttcggtgcgctgcccggcgtacagcgcgttctccgggcgcacatcgtcgatcaggatgcgtccgcccttcgcgcgcagcgtgccttcaacatcgatgttgcccgcaccaagcagcgagatcgtctggcctggatcgaccgccaccagtgcatccttgccgacccgcaggtcaccgcccacgctgttgcgctccgaacgcaggctgatgctcgcacccgcgcgctggctgacgcgcccgctcgacggatcggcgctgtacagcggttcgtcccacgccgccagtgcggacgcccggtcggtcgccatcggcgcgtcctgggtcaggcgcaggcctggcagggcagcgaccagccgcgcgccatcggccacctccacgccgtggtggccattgatgtcgtactgcgcgaagccactgccgaacaggccggggtccagtcgcagcgacgcgcccgccaggtccgcatcgcccacccgcacctggccaccggtacccagcgagaaagaaccaccgccctgtcctcgaccactgaaccggcttccctcacccagttgcacccggccactgccgtcggtcgtcaccgtactgctgttcgcctgcagggtgacgctgccgcctttgccgatatgggccttgccgcgcaggtccagcgcagcaccggcctcgacgtcaaccgttgccctggcgcccacggccacgtcatga

SEQ ID NO: 510155 - DNA, 156 bp, Stenotrophomonas maltophilia
atgtcggtgagcaacggcgagattgccgcgcccagcgccgtgcgctgctgcccggacacacgccaggtgccggtgccggtcgcaatcggttgcacgatgccggaggtgccggtggcgcccagctccacccggaatgcgccgggctgcagcgcatag

SEQ ID NO: 510156 - DNA, 1446 bp, Stenotrophomonas maltophilia
gtgcggatcgaccacctggtccagccactgctgggtgaccagctgcgcgcggttgccgcgcacgtcagcggtggttgccaggggcgcatcgtcgtagcggcgaacaccattgagctggatgtcggccgcgccatcgatgcgcaggccggtggccgcggcaatcgccgcgtcgttgctgcccagccgcggcacatcgatcttcagcgtgccgcgcggggtgccatcgttctggccaggacgtccaccgacggtaacgtcgctgcccgcacgcaggtccagctgcgccgcgctgcccaggccgacggcaccttcggcgctgcccagcgtgatggtggcccggtttggactgtcgatgatcttgccatggctgtccacgcgcaggccggtaccgtgcgcgtccagcgtgccgtccacctgcaactgatcgcgggcgtacaggcggatgctgccgacctgctcgccgctggcatcgatgcggccggccacggtcaggctgcccgcgtcgacgctgatatcgacccggcgcgccttcacttcgtcgccgatccgcagatcgccctcaccgatctggaagctgcgaccgccgacgacgccgccggcggtcaatcgctggttgaggccggcgaagtcctgcagctggcgtgcccgcaccaccagttcgccaccgtcgtagggcaccagcgtgccaccggcatcgtagcgaccagtggcggcaccctgcagaacaccggccagatcggctcggccggccattgcggtgaccgtcaggcgtccgccgcggttgttgcgtgcggaaacatcgatgcgggaggccgcatcggcgcggatgtcacccgtgtcgctggacagcaggacatcgccgccccagctgaacttgtccacgtcgtacagcgagaccttgcgcccggccaggtccagcgcggcccggctgccaagcgtgatgccctggcgcgcgttcgccgacagccgtccggacgccagcgcgatcgtgctgtccagcgcgatccggttggcgtcgatgctcaactcactgcccagtgcatcgccacccgtcttgccggcgcccccctgcaggcggaagtcgccgccggtgcgcacgcgcagccgcgcggcgggatcggcggccaacagcggtgtatcgataccgaggttgcctccgctgtactgccaccccttgtcggccagatagtcgccacgctgctggaatacgtccagcgtgccctgcgcggagaacgacagctgctccgaggcactcaggttcagcgcactgaagccgagcacctgccggttcgcaggtacttcagagctgggacggctgaatggcgcccgccccagctgcagctgccgggtgacgatgtccagttgcccggccccgagccggtccaccatcggctcggccggcggcaccgtcgcgtcgctgcccggcgcctggcccgccgccaatga

SEQ ID NO: 510157 - DNA, 1158 bp, Stenotrophomonas maltophilia
atggtcatccgggaagctggcgaacaccgcctgcaggcgctgcccgtagtcgccaccggtactgccttcgccaccggcatcgcgtgcctgcgacagcagctggtcgtacagcgcgcggcccttcggggtgagcgcaaggccgcgttgttcgatctcgccgaagcgcgcggtatgggtgccggcatcgccaccgtccgcatccgggaaatgcacggcctcttccagcgccttgaagctggtctggcgcagcaggatcgggcaggcgcggcgcggcggcccttcgatcaccgccttggccgccatgccgtgctcgatcattgccgcctgcgccgcgtcgatgtccagcgtgcgcggggtcaggtggttgatgtgcgggccacggaaactgaccacgtcggccaccaggcggtgcgcattgtgcagcgcgtggtaggtcggcagatcgaccgtggcatcgccgtgccagcggaaggtttccagtgcttcgtcgacgaagcgctcggcgtcggcctgcgacaggccaccgtcacgctcggcctggtcgatcagcgccagtgcgccgtcggtgaaaatgcggcggcgtgccaggatcttcgccgactcggcacgcagggtttcgtcttcgatcagctccaggcgcagcagcgaggtgaacacgcggaacggattctgcgccagcgcggcgccggtcagcgggcggaacgcggtggagtgcaccggcacgccggctaccgacaggtcgtagtagccgaccgggtacatgcccatcaccgcgaacaggcggcgcagcgtcgccagctcctgcgcggtgccgacgcggatcgcgccatggcgctcttcgtccaggcgcgcacgctcgtcgttgcgctgcagctgcgcggccagtgccgggtcctgggcaagcacctgcgcgttgatccgctccaccagttccaccagcgtgccgtacagcggcacttcggtgcggtacatgcgggacatggcctgcgcgaacaggcggcggatcacatcaggcgaaacgaaagaggcgctcatcagtcactcgattacgggaacggggaacagctcggacccgtattgtcgccggagcgcgcggcggcggcgatacgcagagcaacatggccgggtagtgccggccgctggccggcaacctcctga

SEQ ID NO: 510158 - DNA, 2352 bp, Stenotrophomonas maltophilia
atgggcccgaacctccacacccacaacctgctctacaacctttccttgggcaacgacggcaaagaggccagcctctctgctgaagaaatctaccgctaccgcaaagccatggatgaggtctacaagaccgagctctaccagggcatgaaggcgctgggctatggggtggaccgcatccgtgaactggacgacgacggccaggaaaccgggcgcgtctacgcgcggatcgcgggcctggacgaggaggtgacggatcgctatggcaaccgccgcaaggaaatcctcgcttacgcggccaagcacaacgtgtctaatcagcaggccacgttggccacgcgcaaagacaaggacgagccgccttaccaggagctcatcgcgcactggcaggacacgctgaaaggcttcgacgtatccacggaaagcctgaagcaggccaagggcaacgcgcacgaaatggagcaaaaatccccggcagaactgctggagcggctccatgagaccgacgccatcttctgcgaccacaacctcttggaggtcttgggccaggaatacgccggcagcgtgaccgtgccagagctctacggcttggttgaagcgttcaagaaggagcacggcctggtgctggtcaaccccatgcgcctgcacgacgacgacaagggcgactcgctggcaaggcggcatacccaggagcgctactgcgccccgtggatgctccagatcgagcaggaggtggtggccttcgcgattgaccgagccaaggaaacccatcaccacgtgcccctggccgacgtggaccgggtggtgaaagactacgagaaggccaagggctttcaactctcccaggagcagcgccacgcgttggaccacatcacccagggcagcgggggcgtggtcaatctttctgggctcgccggaaccggtaaaacgacgatcagtgagtgttttcgggcagcttacgaaacccaaggattcgagttgctgggcgtctgcgtttccaacgccgcggccgagaagctggaggcggaaagcggcatgtccagcgtgagcatggcgcagatgctccatgacctggacaaaggaaagatgcagttccgcaagacggacgtcattgtggtggatgaggcaggcatggtcgatgcgcgcaacacccacaagcttttcagctacgccgccaaggcgggggcgaaggtcatcatgcagggcgacgtggaacagcttcagcccatcggagctgggtccggctttcagttgaccaagagcgcggtgggtgatgccaaactcacggagatccgacgccagggcaaacaggaagaccgagaaaccgcgttgtcgttctacgccacggacgaaagcggccagatcatcgatctgaaaaaggccagccgttcccgggcgcagaccctcgacaagggcaacgaaatcaaggcccggttgctcggcaccatccgcgaaacggccacggagaaggactcccgcgagcgcttgctgcacgaatacttcgaagacccaaccccgatgcaggagaagttggtcatcgcccacacccgtgcagacgtggccgcgctcaatgcgggcatccgggctgggttgaaagaacggggagagctgggccaggacgaagtggtgatcgaggcccgggacaaggggcgcaagttcgacttggcgttgtccaaaggcgatcagatcgtcttcaccgcgaagaacaaggacctgggggtcatcaatggcacgcaggcggtggtggagaacatcaagccctcaagggcgggcggctacgacatcagcgtttccattcgctcggagaccaaggccgatggccggcgattgacgttcaacagcttcgaaatgaaagcactgacgcattcctatgccgggacggttcacaagagccagggccaaggtaagcgggagatctaccacctggcgaacctgggcatgctcgacgcccacagcgccctggtggcctacacccgactcacgaagggttcctaccgcatgtatgcgacgtccgatgacgtggagcggttgagcgaacgcctggggctggaacgcctcaaagagaccgtgctcgacgcgggactgaaagacgatccgcaacggccggttgtccagggccttggggcggttgcacgccccaacactcaacgcccagccgctcagcgaacgcgcatccagggcaagctcgacgcactgctgaaggagcacgcggaacgcccaaaaccgcagatgagcgagggcgagcgcaaggcccgttggctgctggaagtgctggagccgttgcggcgggcgcgaaaggcctctcccaagctgccagcgcagtccccgaaacacaggcagggcttctcgttgtga

SEQ ID NO: 510159 - DNA, 549 bp, Stenotrophomonas maltophilia
atgaatggcaaaccgaccgattccgaatgcctttttagagcctctgcgtttggccacgcttcgacggtttccgcgctgattgccggtggcgctgaccccaacctcgcgggcaatgagggctgggcacctattcaccacgcggccaatctgttcgataaaaacgtggtggcttcgcttctggccggtggcgcgaacccgaacgctcggctggatgatggcagaactcccctgcacctggtcgccacgcaaaaaaataccgacgtcatggaggtgctcctcgcgggaggtgccgacccaaccgcgcgttgcgagcgtggccgcacaccacgcgattgtagccatgggctacggggccacgcactgctagacgctgcatatcgtgcggctgaactagatgcagcgttgccgcctgccgtgtcgcgcctggaagcgttggaggcggaaaacgcgcaactgcgccagcagcgcgacgcgttgcgcggtgccctggaaggcgtgctgtcgagcgagccggccccggtcgtcctcccgcccaagaagcggttttaa

SEQ ID NO: 510160 - DNA, 618 bp, Stenotrophomonas maltophilia
atggtaggcccagcgaggccggcgcgccaattccgtcgtggaatgatgggttccagccaacggcggggcccctcgtggctgggggggggcgtcaaagcagctttatcggagtgggccggtcgggatgggctgcgcaggacacgccgtaaacccatccctgggggctcgatggcgccatccatggcgccaacggtcctgcgcagcccatcccgaccggcccctgataattccttgcgcgtgccagccacggaaaggaatcaaaggatcaaaagcaaaagcgggtcgcttcgctctgagccgagcatggctcggctctacacgaacaattcgatcatttccacgctatccacgcagggcgtggatctaccgacagattgcaggaatctgtcgaaggtgggatgggtccggttgcgggggtgtccgcggcatggatgccgcggccaagcccccagggacgggtttacggcgtcccccgcgaccggacccatcccgccatcccacaggaaaccagcttttgacgttgccgttgaggttgccggccagcggccggcactaccgcgggtgccgggtgcaacccggccgacgcccccaacccgtacaatatccggatgcctctga

SEQ ID NO: 510161 - DNA, 357 bp, Stenotrophomonas maltophilia; identical to SEQ ID NO: 507082

SEQ ID NO: 510162 - DNA, 285 bp, Stenotrophomonas maltophilia
ttggcgcttcgcaaggccgcggctgaaacgctgaaatacagcgtaaagccgtcggacatgctggccgaccgcgaatggttccttgagcttgttaggcaaactttccgaacgcgtgccatcgcgtcggggggtgtgctgaaagacgtcttgcgggaagaagaagaaacccaacaagatttgctcctgggcgatgacgaaaaaccaccggaacctgagttgccggtgttgaggtttgactacgctcaggaggcaaaacgctaccggcgaaagcgctctagcgcgtag

SEQ ID NO: 510163 - DNA, 1575 bp, Stenotrophomonas maltophilia; identical to SEQ ID NO: 494109

SEQ ID NO: 510164 - DNA, 570 bp, Stenotrophomonas maltophilia
atgagcctcatgcagtgcgatgctcccgctccgaccccggtgaccgtctggaccatcgggcattccactcgaccttgggacgagttcttacacctgctgttcgcacaaggcatctcggcgatcgcggacgtgcgtcgtttcccaggatcgcgtcgtcacccttggttcgcatccgagcagatggctaaaacgctgccagcgcacggcgtggagtatctttggattcctgaactgggcgggcggcgcaaggtgcagccggattcgcccaatggtgcgtgggacaacgccgcgtttcagggctacgcagaccacatggcgaccgccgagttcgccggcgggctatcgaaggtgcttgcactggggggcgaacatcggaccgcgctgatgtgcgcggaggcaccgtggtggcgttgccaccgacgtctcatctccgacctgctgacgcaccggggccatgaggtgctgcacatcgtgtcccacgccgaacccaaaccgcatccgctgaacccgatggcgcaggccgtcgggccagcgcttgtctacccaccggctcagacggagctgttctga

SEQ ID NO: 510165 - DNA, 930 bp, Stenotrophomonas maltophilia
atgaccagtccaagcccgccaacctcgcaggacctgcctgccttcgacgccatcgtgatcggcggaagctatgcgggcatgtcggctgccttgcagttggcgcgcgcttgccgcacggtgttggtgatagaccacgggcagccccgcaaccaacgcgctgggaaggcgcacgggtgtttggggtgggatggggtgagccccgcagccatgcttgagaccggtcgccggcagttgctcgcctacgagcgagtgcaatgggcgaccgatgaggccaccgacgccgccggttcactcgaggcagggttccgtgtcgattgtgcatccggcgattactaccacgcccagcgactgatacttgcgcacggcgtggaggatcggttgcccgacgtcccggggctcgcggagcgatggggaaaaaccgtcctccattgcccctactgccacggctatgaaatctgcggaacagccatcggcgtgcttattgcgtccagatccgaagcgatggaccaagtcaggacgctttctcagtggggacagatcacggcgttccacgacggcgcgctttctgcgtcggaggtggaagagctttctctgcagctgaggggcatcggtgcgaccctggagaaggaggccctggctggcatgaccggcaaagcgtccttgactctcgcagacggcagctcccgcgaagtggaagccttgttcgtccacccggaaaccacgttggcctccggcttggccaaatgcttgggttgcgcaaccgaggacgcgggatgcatcacgaccgattcggccaagcaatccaccatcccaggggtgttcgcgtgcggcgatgcagcccggtttgcagggaacatcgccctggcggtgggggagggagccttggcgggcgtggccgcacaccgatctttgcttggcttgctcccctaa

SEQ ID NO: 510166 - DNA, 591 bp, Stenotrophomonas maltophilia
gtgagctcccccgccctcctgatcatcgacctgttcagcaagttcgactttcccgatgggcagcaacttgcaccgctggcccttcgggccgcgaaaaaagccggtcagattcgagcggcgtttgacgaaagggattggcccgtcatctatgccaacgacaactttggcgactggaagtgcggctttcaccagctggcggaggtgtgtcgccatgaggacggtccggccggtgacattgcccgactccttttccctggcccggatcattacacggtgctcaagccgaagcactcggcgttcctggcgaccccgctggccgtgcttctcgcaaagctggacgttcgcaccctggtgcttgtaggcatggccttggattcctgtattcacgccaccgctatcgacgcacactcgcgggagttctctaccgttgtcatctccgacgccacggcgtgcctgccaaagcgcaggtccgccgcgctgacgctgctgcgatccacaggaagcgtccaagtgcgcacgaccggagcgctgcttcagtcactcgagagcggccctcgccgttcagcgattgatcctattggacggaaatag

SEQ ID NO: 510167 - DNA, 504 bp, Stenotrophomonas maltophilia
atgtggcgtcgcaatggcctgtcgatcgtgttgttcgcgctgatggccgtcttcctggtggctcaagcgctgaccggatggcaggtccataacgaggaactggcccagcacggcttgaagtctctgccgttttggagctacctgaccacgggccacttcagcagcgccaccttcgagaactgggaaagcgagttcctccagatgggcatgtatgtcctgctcaccgtccggctgcgccaagccggctcggcggagtcgaggcccctcgacccagcagaagaagagccccgtgtaggatcagggccggttccttggcccgtgcgcaagggggacgtctggaagagcctctacggccactctttggccattgttttctttctcctgttcttcctctccttctcgctccaggcagtgggaagttggagggccaagtctcaggacaatcgacgggttgctgcccccatcgtttaccgatcacctctccagcagcgacttttggtttga

SEQ ID NO: 510168 - DNA, 498 bp, Stenotrophomonas maltophilia
atggctatcaagaccgctgaagaactgtttgtgcacgagctctctgacatttacagcgctgaaaagcagctgaccaaggccctgccccgcctggcccgcgctgcggagaatccggacctggccgccgccttcgagacccacttggaagagacccaagggcagatcgaacgcatcgatcaggtcgtggaggtgctggggatccgcctgaagcgcatcaaatgcgcagcgatggaaggcttggtggaggaaggcaaggaagtgatcgattccattgagaagggcccggtgcgcgacgccgccctgattggcggtgcccaaaaggtagagcactacgagatcgcctcctacggcaccatcgcggcgttggccaaacagctgggctacaaggacgccttgccctaccttctggagacgttggaggaggaaaaggcgacggacgagaagctgaccatgctggccgagcaaggcggcaatcagagcgctgccagcaaaaagtaa

SEQ ID NO: 510169 - DNA, 414 bp, Stenotrophomonas maltophilia
atgcgcttgagcaaactggacatctccatcggccacttggaagccgcgtgcgtgctttatctggcgcgacttcaccccgccaccgtcgtgcttctggccgggacggcagaggacatgctccgcgcgctgcccccggccaacgacacccccaccgttggcgagcacatgctccaagtggccaggcagatgagcgctcgccaagatctggtctaccgtgacatcaaagaggacatggtggggctgcggaatgcagtgaaacacgcgactcgagagggcgagcatcacgtggatctgttccccgtcgacgagcatcgctacctcttgggcgcgttgctgaatgcgtttcgctgcggcgctcacttctctgcggcgatgacagaagcgtatgtgcggatcgccgatgccgaaggatga

SEQ ID NO: 510170 - DNA, 996 bp, Stenotrophomonas maltophilia
atggatacccccgacgttcctgaaagtggcttgaccatcaagctttatcgcgagaagggcagttgcacgcttcgattggaggaccttcctggcaatcctccgagcgacgacgaacttctttgggtggatctatgcggggctcccaatcagcaagccgaacaggtgtggcgcgcgctgaagttgaatcccgcatccctgccgagcagtcccatcgccaccaatccccggcttgaaaagttcgccgaccatttcatggcgcgtgtagtggcagtgttgcgtgggaaggggctgaagttccagggcgcggtgttgaccgtcgtggctggggcgaactttgtggtgacccaccacgacgaagacattgccttcttggccgacctgcgggagcgggagcccgagagcgcccgcgacatcgggtgcttgggcgaggcgagtttcgtcgcggcattgttggattggcatctttccacgtatttctccgccgtcgcgctgtttgaggtggagatcgaacggttggagagccggattctgtccgaccagcccccagggcgctcggccttgcccgagctctgcgcgcttcgagccgccgcctcccggctccgacggatgttggcaccccaccgcgccgtctttgacggactgtctcggcccgactttgtgcccgatggggccgaagaggtggcgcggcacttgcgcgatctggacgataggttcgagcgagcgttggacgtggtcgagaacgcccgagagctcgttgttggcagcttccagctcttcagcacccagaccgagctccaaaccaacgaacgcatgaagctgctgaccttcgtgacggtggtgaccggcttgctggccgtcatcgcgggcgcgttgggaatgaacttcgacgcgaacttcttcggcatgaagaccgaaggtttttggattgcggtgggcatgatggcggggttgggcgcggcctccattttcgtcgggcgaaggcgcgggtggctgtaa

SEQ ID NO: 510171 - DNA, 1098 bp, Stenotrophomonas maltophilia
atggccggtgaacgcgcggtgctggccgggtcgggactcccctcgtctaacaggggagtcagtgaattcaggaacgccgatggaaccctgacggtcggcatcgactggttttccgcctcggtcgacatgttcgcggtcctcaacgaactagccttccgcgacggcgactcgtttgaagaggtccgcaactggatcgactacagcgccgataacgcccgtgtcgtggcgctgcagatgttctgctggttcttcgctgggctgggccttgaactggatgaagtagccgggggagggcgcttctacctgtggcgcgtcaagatcatcaatgccgaaaagaagttcgtcggcatgatcgagttgggtggcgacaactgccgtcgcgccgatggcacgtatacggcccgcatcgagctaactggcgaagggtgcaaatcgatagccgcagcgcgctgcggccatgcgcagcggtggctggagcttcgagcgaagctcgaaagctgcggcggaaggatcacccgtctagacgtatgcgccgacgacctgatgggcaagtaccccttgcgcctggcacagaagtggtacgacgaaggcgagttcgacaatcgtggtcagcgtcccaaagcgcagctggtggacgactacgacagtggggacggcaagaccctgtatgtcggcggcaagaagtcggaaaagcagttgcgcgtctatgaaaagggtcgggagctgggagacaagtcctcaccgtgggtgcgctatgaagcacagttccgcgcgtccaaccgcaaggaattgccgctcgatctgctccgcgatcctgccgcgtacttgttgggggcgtatcccgtgctgcgcttcctgcgctgcatttcttcccgaattgacgtcaccaaagcggcggcggttgcgacgttcaagagcgcatgtcgtcacttcaagcgccaatacggcggcttcgtcaatttcgtgttccgcacctgcccagatgaagaagtggcagtggcggtcttcaaatcctgcacttcgccaaagctgccgaagtgggcaacaggagacgtagcagcgaactgggccacaagcgtggtcatacaaccaacctga

SEQ ID NO: 510172 - DNA, 864 bp, Stenotrophomonas maltophilia
gtgcgtgcccttcattgggtacaacgaaccagggggctgggaatcgacacgtctgttggaaattttttcttccgcggaaagcgcgccttcggcgagggtcggcgaacggcggagcccctccgtggtggggttgggttggtcgctgaaagctcgggttcatgggtttggccgggtggggaggcagggcaggggacgctgcaagtacgtccatgtaagctcggtcgccgcatccatgcggctcacgcccctgcgcagcccatctacccggccacggacaggttccgtgcgcgtctacccacagagaagaaagagaagatcaaaagcaaaagcggcttggcgggtcgcttcattgccttgtgtggagccgagccatgctcggctcacaagcaagcgcagcgccgcgacccgcttttgattttctctttcttctccgtgggtggcagaccgccaaaatctgtcagagggcggtcgggttgggtacgcgggggtgccagccgcatggatgcggctgacaagcctccagggacggattcacggcgtcccccgcgtacccaacccgaccggcccacccgcggcttctgctttccgcgaccacccagacaccacccacgaggggctgcgccgttggctggaaacttcctgactctgcgcaacgctcgctgtggaagcgttctcataacgatgcaggacagcacactcgctgaccaaagtccgcaaaaaacgttagctggttcacacttttacgccgcgttgatcttgatcaatggacttgtcgtaatcggcctgcacaatggcggcccgttcggcacggcgcgccgtctatcgttgcagcgcgagggggcgtcgggcgggaagcagtactga

SEQ ID NO: 510173 - DNA, 345 bp, Stenotrophomonas maltophilia
atgccgctcccccccgacttcaactggacgaccaggtccgccagccgcccggatgaacccctgaccgtgatcgcctgccacggggtgtgggtggtggccatggcccaacgggtgaacgacggcatctggattgcctcgctggatcgccaccggcatggccctggcggtccgttccgctggtgcagcagctacgagcagggccgggcaggggccgagctgtgggtggccaggcacgaggtacggctgcgcgaggacgtggccaagatccgggagtaccgggacgcgatcgccgagaaccgcctgctgagggacagcctgaagccgccgttcgagtggatggaatag

SEQ ID NO: 510174 - DNA, 1794 bp, Stenotrophomonas maltophilia
atggccgcgcgcatctacgaccgcccggacctggaccaagacgtctaccagccggcgctctacgtcaacggcaggttcgcccgcgccaagccctcgctggcctacgaaggccgcctgcagatccgcaacagtattggtggctgcagcgtgctgcagatcggtggcgacaagctacctgacggtgcccagctgcgggtcgatcaggcgaccaaagaggtggtggtggcctggcctgcctatcagaccgcacaggcgccgattgccaatcccggtttcgaggaaggcaagacgggctgggagctgggaccaggctggaacatcgacaccgagaacccgccttccggccagtgggccgccggctactggggcaattggggcacctcgcggatctcgaacgctgcccgctacacggtccagcccggccagatcactaccgcgaagtgcgacgtgcgccagggggcgtcatcggaaggcaacgccggcgcctcggtcatgctcgagtaccgcaacgccgccggcgaagtgatccacaccgtcgagggcaaccaggtcatgtcggccagcaagaaccgcgtgtacccgtcgtcggtgttcggggctgctccgcccggggctgcgaccatcaacgtggcaggcaacggcatccggtaccgcgagaacaagattctctttgtcgacaacttccagtgggaccacacggtcccatcggcgggcatcaacttcgaaacagtcctgaacgtcgttcttcgggtcaacgatgcaacaggacgctctttcatatggagcggcccgatcaccgttgcggccaggccggcgtcttacaagttctttgcgagtttcatcaccccgtatctgctttgcggtggatacaggcatgctgcgaatgcgatcgacgttcttggaaggtctaccacgaccgacaagagcaacacctacctggtgggagcaagtgacgacgccaccttgggcgcttcgacctacaacgtggcccctggcgtttccatctatccggtcagccaggatggtgccatcggtcaggagtttccggcgatcagtccggcgctcccagggcaaggccggtgtgcaactttctcccggtcagccgcggcggtcatcatcggacacacgacggcgccctttgtgcgagcgcagcgtgtaagtccggctgggatcggcacgccctacgacccgcctgccactgcgttgaacaacaccgtgatcttcgtcgccttcaatcccaagggcgacattgtgtatctggtgaccgagcaatacccctacatgttcgcgtatcgatgggatgacgtgaacggctttggcgcacggctagacggtccacccgctatccctgcatcgagcgttcattcaatttccatcaacgaatccggtacgcaccttgcggcgatctgcggtgcatccccgtcctgccacatttataagatcggtgccaacggcttcgagagccggatcgcagcgtttggcgataacgcacaggggatggtggcgttgtccgacgcagcccgagcggtggtcttcggaagttccttcatgcaacggattcacctctacctatgggatccgaacaacggaccaggcgctgcctacccagtccctccaaacatcgccggtttgagccgtggcgttgcattctctaaagacggtttggtgctgtacgcgggcagcaccaacaccacgggcatccaagtctacgaatggacgcccggagtgggcgctactcgggggccggtcaactatgggtccacagcctcttcgcagaccatcccgatcgactga

SEQ ID NO: 510175 - DNA, 324 bp, Stenotrophomonas maltophilia
gtgaccggcctgcgcgtgcgcgcgacccagcgcggctacttcgggcaggaacgtgccgtcggcgacgaattcgagatcgccagcaaggaacagctgggctcctggatggagcagatcagcggcaaggccgtggccgagaagtcggcgccgccggcggacccgttcctggcccgcaacgctgaccagatcaaggcggacctggccggtctggaagtcgagcagttggccgcctaccgcgagcaggaggctgccgccgagaagccccgcaagggcgtgatcgaggcgatcgacgcggccgtggccgagaagtcggcgaacgcctga

SEQ ID NO: 510176 - DNA, 1500 bp, Stenotrophomonas maltophilia
gtgagcgcgcagctggccgggagtcctgagcagcagctggtcgaggcgatcggctcgttccagcacgacccgctgggctatgtgcttttcaacttcccgtggggcgtcaagggcggcccgctggatggcaagaagctgcgcgcctggcagcgtcggcagctggagaagatcggcaggaagctgcaggccggtgccgctgatgcgggcgaggtgatccgccaagccgttggctcgggccacggcatcggcaagtccgccctggtggcgatgctgatcaagtgggccttcgacacgttcgaagacacccgcggcgtggtcacggccaacaccgacaaccagctgcgcaccaagacctgggcggagctgtcgaagtggcacggtatcagcctgacgaaggactgggccacgctgacggccacagcgctgatcagcaacgctccgggccacgacaagacgtggcgcatcgatgcggtgccgtggtcgcagaacaacaccgaggcgttcgcgggcctgcacaacgagggccggcgcatcctgctggtgttcgacgaggcctcggccatcgccgacaaggtctgggaagtggccgagggcgcgttgaccgaccaaggcaccgagatcatctggaccgcgttcggcaacaccacccgcaacaccgggcggttccgcgaatgcttccgccggttcaaggccagctgggacaccgagcagatagacagccgcaccgttgagggtgtgaacctggtcgaggccgagcgcatggtgcgcgactacggcgaggacagcgacgtggtgaaggtccgtatccgcggcctgttcccgtcgatgtcggcccgccagttcatcgcggaggcggatgtggctgccgcctatgggcgacacctgcggccggagcagtacaactgggcgccgaaggtcatcaccctggacccggcgtgggaaggcgacgacgagctggtgatcggcctgcggcagggcctggcctatcggcagctgcgcacgctggccaagaacgacaacgacatggcagtggcggccatccttgcccagctggaggacgagcatcaggccgacgctgtgttcgtcgatggcgggttcggcaccggcatcgtgtccgcaggccgaaccatggaccgcgactggcgcctggtgtggttctcgggcgagtcgggcgaccaaggctgcctcaacaagcgcgccgagatgtggaaagcctgccgcgactggctgaaggaaggcggggctatccccgaggatccgcagctgcgcgacgagctgcaggcaccggaaacggtgccgcgcctcgacggcaagctgcagatggaatcgaagaaggacatgaagcgccgcggcctgccgagccccaaccgggccgacgccctggtgctgtcgttcgcataccccgtgatgcccaggccgcgcttccccgatgggtcgccgatggagcatcgcgaccacgccgaccagcaggccggcgagccctacaacccgctgtcctga

SEQ ID NO: 510177 - DNA, 456 bp, Stenotrophomonas maltophilia
atggcacgacccagcaagtacagccagcagctggccgacgcaatctgcgacctgctggtggatggcaagagcctgcgcacgatctgttccacggcaaagatgccgagccgttccacggtcattcgttggttggctgataacgagacatttcgaaaccagtacgcgcgtgcacgcgagctgcaggcggacacgctggccgaagagatcctggacatcgccgacaaggcggtgctgggcgagcggctgaagaaggacggaaagggcaaggtgctggaacggcagaccggtgacatggtcgaacgctccaagctgatgatcgatgcccggaagtggtacgccggcaagctgcagccgaagaagtacggcgagcgcgtcgctctggaccacggcgtgcaggacaacctggccgacaaactgagggccgcccgtgagcgcgcagctggccgggagtcctga

SEQ ID NO: 510178 - DNA, 249 bp, Stenotrophomonas maltophilia
gtgagcaacgtcctgcagctgatccccaacaacgcgttggcggtcgatcagcaccagctggctgcgcgcattcgtgagttcgccgaccgtatcgaggccgggcagttcggggacgtggaaaaggtggccctggtggtggattgcgctgcaggcgtggatcaccgcgtctatgggcggcagtgcagcgccgccgagctggtggggctgctggagtggtccaaggccaggatcatcaggggcgattactga

SEQ ID NO: 510179 - DNA, 471 bp, Stenotrophomonas maltophilia
atgatcctcacccgcgccctgctgatcgcgctgccggtggttggcctgatgggctttgcggctggctgggtgtggcgtggtgatcgcgctgagggcaacgaagcccggcagcaggccagtgtcagcgccgcccaggtggcgcaggtcaacgaggcccgcgccaccgagcacgcccaagccgaggcactggccaccatcggagcgaagcatgaagaagaccgcactgcggccgcgaccgtccctgctgctgttgtggctgacctgcacgctgggcgtctccagctgcgcgacgacctcgccacctgcagcaccagcctcctgtcccaggccgtcgccggcgccgtcgaacgtgatgcgcacgccgaactacgagcagaggttgcgggagctgctgttcaaatcggccgcgacgccgacgaccacgtccgcgccagccaagccgtgatccgggcggacaggggcgagccgtga

SEQ ID NO: 510180 - DNA, 246 bp, Stenotrophomonas maltophilia
atggaaaaccagcaccgcaagatcaccggctaccgcgaactgagccaggccgagatcgacctgatgaacgagatcaaggcgaagggtgaggagctgcaggccttggtcaacaaggtcaacgacaccaacaccgcgatcgagggcgacaagggcgattgctaccgttggtcggccatcgccaaaacggacttccagaccggcctgatggcgctcacccgcgccgtggccaagccgacgagcttctaa

SEQ ID NO: 510181 - DNA, 174 bp, Stenotrophomonas maltophilia
atgcaggggaagtgcccgaagtgcgataggccaactgtccgcatcaatactgagaagcagaccaccgtggtggccggaatcacgacccacattctggtgttcagcaccagctgctgccacgtgatcgtcagcgtggcgttggatccaaaggagatcgccaagcgtatcggttga

SEQ ID NO: 510182 - DNA, 204 bp, Stenotrophomonas maltophilia
gtggagcgagactgctacttgatgggtgaagccggcggggatttcctgacagtaacgaactccttcctggaagcgcagtctttgattaagggagacattcttcttaaaaagcacgagcgcgctttcattgagcatctgcaaaatgcacagaacatgagcaatcaggcgcttaagaagattcgagagcctctctggagaaaatag

SEQ ID NO: 510183 - DNA, 621 bp, Stenotrophomonas maltophilia
atgaccatgaccgcggcagcgaagaagatccgcgccaagcgcgctcgccggccgatctacctggtcgtggccaagctgatcgacccgaacaccggcgagctggtgggcgcgttggtgccggcccatgaggtcgaccagcggctgctgcgtgatcgcaagttccgtgtcggccggcagatccgcggcgagctgaagcagccgcgcgaggaatggcagcaccggctgattcacaagatcgggcacctgatggtcgacaacgtcgagggctgggagcagctggacgcgcacgacgcggtaaagcgcctgcagctggacgccggcgtgtgctgcgaaaccgtcgaaatggacgccacgccggtcattgccgcggtgctggacgcctgcgaggcgctgctgggtgcaggcgcccgcaaggtgctggccggtgtgctgccggagatccgcaccatcccggtcaagcgtgccgagagcctgtcattcgacgagatggaacaggcccggttccaggagctgttcgacggcctgaccgagtacataggccgccactacacccacgtgatgctcgacgacgtgcgcgccgagttctggaacatggcagggcagaacaggagggtagcgtga

SEQ ID NO: 510184 - DNA, 1473 bp, Stenotrophomonas maltophilia
atgaacgcggcccgtgacgaagtcagccgcctgtcgggcctgtatggcgaccagcaggcactgcgcctcccgccgcacagtatcgacgccgagcagtcagtgctgggcgggctgatgctggtaaaccgggcgctggtcgaggtgcaggacgtcctggtggaaggtgacttctaccgccgggaccaccagctgctgtggcgctgcatcctgcagttggccgagaagcgccagccgttcgacgcggtgaccatcggtgaatggttcgaagctgccgggcagttggagctggtcggcgacggtgcctacatcatcgaactggccaacaacacgccgtcggcggccaacgtgcgggcctatgccgaaatcgtggcggagaaggcgaagctgcgtgcgctgatcgatgctgggcacgacctgatcgacgctgcgtacagccccgagggccgcagtgcgctcgacctgatcgggcatgcgcagtctcgcatcggtggactgttggacagcgagccgtgcgacctggagccggtggcaccggtgatggctcgcgtgttcgaccagctgtcccacgctgccgaagccgtcgacggtatcaccgggctgtctaccagcctggaagatctggaccagatcctcgacggtctgctgggcggcaggctgtacgtgctggcggctcggcccaagatgggcaagacgaccttggcgcagaacatcgccgagcaggtggccctgcgcgccggcaagtcggtggcgttcttcagcttcgaaatgaagccggaggaactaggcaagcgcatgctggccaacctggccggggtaagtggcggcaagctgcggtcgggcaagctcgacaacgccgactggcagaacgtcaccctctggacccgcaggatcggcgaggcggcaatgcgaatcagccggccgcgcatcgccaaggtgcagcacgtctgcgcccaggtgcgccgcatgaaggcgcaggacgacaacctggtgctggtggtgatcgactacctgcagctgatgcacgtctcgggggacaaccgtgccgccggtatcggcgacatcacccgtgcgctgaagctgctggccagcgagctggacatcgcggtgctgctgctgagccagctcaaccgcgacctggagaagcgccccggcgacaagcgcccgatcgtggccgacctccgcgactctgggtccattgagcaggacgccgacgcggtgatcttcatctaccgcgacgagatctatcaccccgacagccgttgggctggcacggccgagctgatcgtcgcgatccagcgcgacggcgccccgggcatggcccgcgtgtcctacgagccgagctacttccggttctccaacctgcccgaatggtgggagccgaagcagaacagcgcgtcggcgcctgcagctgggtctgcgccgaaggctcgacgaggcctcgccgcagcattgccgatgggggaccgagaatga

SEQ ID NO: 510185 - DNA, 369 bp, Stenotrophomonas maltophilia
atgcgacacctcaacatcacgtatcagggtggcctcacccacacatccaggagcctgcgggagctgatgcaggtccaggtgcacaacaacggcggcgtggttgccgtggccggcaaggtagacctatccccgtcgaagctgtcagagaagctcgctggcggcgatggtggcggacggcagcgcggcctgaccatcgacgagttcgagcggtacgtgaaggagaccggcgatgtcacgccgatccactacctgatcgagaagtacctgacctgcccagaggcccagcacgccgaggccatcgcgcagttcaccaacctggcccgagccatggcacctctcgcgcaaagcctggggatcaagtggccatga

SEQ ID NO: 510186 - DNA, 180 bp, Stenotrophomonas maltophilia
gtgaaaaagactcagccggccttggccgacgtactgacgctcacgcccatgtgcggaaagctgtttgtcctgaagaaggtcggcgacgaggtgcaggccaggccgacgcgcaagccggtgccgaagccacccggtgcgcccagcgtggtgatccccttccctgctcggggaagccggtga

SEQ ID NO: 510187 - DNA, 276 bp, Stenotrophomonas maltophilia
atggaaatggatacggctacgctgacgcgcctggcctcggttcttgcggccactgcgaaggccaacgaagccctgctgtcggtactcatcgccacgcaccccgaacccgatgtgctgcagcacgtatggcagcagtcaaagcccgaatggatcgacgaagcccacgagcaggctttcgcccagcacggcacgtacatgcagacctttcttgcccggctcgcggggatctccggcgagatagatggggcggccacacaatttttacggggcggctaa

SEQ ID NO: 510188 - DNA, 204 bp, Stenotrophomonas maltophilia
atggaaatcacctgggcagaccgaatcaaagcgctggaagagcgcggctggacgctgactgacatcggccgtgccatcggcaagtcgccgcaaaccgtcagcgacctgaagcagggacggacgaaggagccggggggcatggctgccgttcaactgcaccacctgtacgcgaccggggcgaagccggctggggccgccgcctga

SEQ ID NO: 510189 - DNA, 720 bp, Stenotrophomonas maltophilia
atgacccgtcaacggcattccgttacggcattccgttccaatgtgaacatggaaaccattggcagcagaatcagggcggaaagagaggctcagggcgtttcccgggcagaattggcgaggtctgccggcatagccccttctaccctctccgatcttgagcttggactctcgaagtccacgacggcgctgcacaagattgcgcgtaggttggggctgcgcccggagtggctggagactggtagaggatcaaaggatcctgcctcagacccttctgaaagcgactgggccgatatcgacggctacgcccaagccataggattgggcggcggccccgaggcccaggagtacgccgagacccacaagctgaagttcagggccgaatcactggcccgtaagcgcttgcggccaaacaaccttgccgtcatgtacggcaagggcgacagcatggaaccgcgcatccacagcggcgacgccatcctatttgacaccagcgacaccaccccacgtgacggtcagatgtacgtggtgatggtcgatggcggcggcgcggcgaaggagtaccacgtaaagcgctgcgaggtgatcgacgacctggtgttcttcaaggcagacaacccccgcggcgatcacaactggcggaagccgaaacgactggatagcccgaagcacccgattcaagtgatcggccgggttcgatggattggaagctgggagggatga

SEQ ID NO: 510190 - DNA, 396 bp, Stenotrophomonas maltophilia
atgagggtgaagacgattcagacggtgatcatcggtatcctcggggttctggcggcagtctcagctgcggtggccgttgacagcgccatcagagtgaactccctagagagtgacttagagcaaaggtccatagagattgcatcgcttcatagcgatctgcgcctcttacgcgccgaactgtcaattcagccggctaccgttgaacaggtggccaatgagtatgacgactcgaagctcaaagacgagcttgactctcttcgcatgcgtgtggattccgtgagcagctatgttggcaatccgcccgaggctttcagcagcaccagcctgacagaccgcattgatcgcggtttccgcgatatctgcctcagcacgtcccacaggatttgcccgaactga

SEQ ID NO: 510191 - DNA, 384 bp, Stenotrophomonas maltophilia
atgaacgccctgtctgtgttctctggcgagtgcctgaaggccgtttgcggaatcgacaccggtcacaaggacatgcacggtaatccgctgcacaccggcgacattgtgcaggtctacaccgagaattatggccctgacgagcttacggtcgttgttggggacgagtggacgacctacagcaacgggaccatcgagcgaaatgctgggccggttgagtacttcgtcatgggcatcaagggtgtcccgctggaagacaccggcgaatggcgagttcgaaagctcaaagggtttgaggaagtggtgctgggcgagcattggcgcgcctacggcttcaactaccgcgccaccccggatgccgtcatcgcccaaggcggtgccgcatga

SEQ ID NO: 510192 - DNA, 297 bp, Stenotrophomonas maltophilia
gtgagcgccaaccttctggccatcggcgtggataccgcgctcgacaactgcgcgcactacctgcgcgaggaacagggcctgacggacgccgccgcacagatcgacgcagtgcgcgtggccttcgccagcgtccgcgccgccgcccgcgcctaccgggcttccagcgacttggtcgacgtgatcctcaccggcgatcgcctggatgccgctctggccgcgtgcgaaccaaccgacaccgatcacaaccgcgaggccgaggacggcctgtgcgtggaggaatccgacgatgcgcgctga

SEQ ID NO: 510193 - DNA, 291 bp, Stenotrophomonas maltophilia
atgcgcgctgaccgctacggcgtcttctccgtctgccctgttacccgcaccgagcagctggtgaccgtccaccgctgggcgtggctcgcctcgctgtgggctgtgcagctcaaccacgtgggggtgctgttcgtgcacctggtgcggccggtgcgcgtccccgtccgtcggcgtcgcctgctcgcgcgcattggctgccgcaacgccgccgacttcctcgccttcctgggctgcgtcgccatcgtcctcggccttggctgggcgatgtgctggccgctggcctggtcctga

SEQ ID NO: 510194 - DNA, 948 bp, Stenotrophomonas maltophilia
atgagcaacatcgcacccatgaagccgcgcgccggggatctggtgacggctgagcaggccgaagccattcgcactgccctgaagaccagtctgtacccgggcgccactgatgattccgtggacatggtgctggcctattgccgcgccggcggtctggacccgatgaccaagcccgtgcacatcgtgcccatgtgggttccggagaagaagcaggggaaccgggtcatcagcccggcaggcatgcgcgacgtgatcatgccgggcatcgagctgtaccggaccaaggcgcaccggaccggcgagtacgcaggtcaggatgaagccacgttcggcccgaccatcgaagacaccctcaacggcgtgcgtgttcgctacccggaatggtgcagcgtttccgtctaccgcctggtgaacgggaaccccgtgcgctactcggcaaaggcctactggctggagagctacgcgaccgccaagcgcgacagcgatgcaccgaatgccatgtggaagaagcgccccttcgggcagctggagaagtgcgctgaagcgttggccctgcgaaaggccttcccggaagcggtgggcgcccagccgaccgcagaggagatggaaggccgcgttatcgagggcgaagccgcgcaggttcggcaggagccgccgcagcagcagcagcctcgcgagctgccgccctacccggccgacaagttcaaggagaatctgccggcctggggggcactgatcgccgctggcaaaaagacggccagccagatcatcaacatggtcaagacgaagggctccctgaccgaggagcagatgatcgccatcgaggattacgagcaggtggacgacgtcgccactgatgccaccgatgccgcctcgaccaccaccagcaccagcgaagacaccggccccatcgactgggatgcgccgggcgaaggagagcgcgcatga

SEQ ID NO: 510195 - DNA, 237 bp, Stenotrophomonas maltophilia
atgaccaccgacaacaagaccctggctgttgatgtgctggcggtgatggaccatgaatcggatcgcatcgaggaaaggatcggttatggacttgcggacgacctacgtgacgcccgcgccgcagtcgccgagctgatcgaggcactggatcttgccgcgtacggcgagtacttgccggaatcggtagagcagcaaatccgaacttccctcgcccgagtcaaaggagaatcagcatga

SEQ ID NO: 510196 - DNA, 174 bp, Stenotrophomonas maltophilia
atgaccaccaccgccaacaacaccgtttcccgcgacaacgaagacaagatcatgctggatctcgccaacttcatcgcgaagagcgcacatccagaagatccgcgcctggaagtggcttatgccatcgcgcgctacctgaagctggattggccatcctcctatgaagacgcctga

SEQ ID NO: 510197 - DNA, 216 bp, Stenotrophomonas maltophilia
atggccgacagcccctacctgtcccgtgacgatatcaaggcgctgtgccgcacaccgcggcgcaagggccaggccgagttcctgcgcaacaacgggatccggcactatctggacgcccacgggtggccagtggtgctttggtccacgatcgagggcaagccggagccgaagacgccgccggcggcggactggaaaccgaacaaggcagcagcgtaa

SEQ ID NO: 510198 - DNA, 1029 bp, Stenotrophomonas maltophilia
atgggaaggaaaccgaagaagccgggggctatcccccggttccgcccgcggaagcagaaatccggcgtggtgcactactactacgaccatggcggcaagccgcgcaaggaaactgcgctgggtagtgattacggcctggccatccagaagtgggccgagctcgagcgagcggcgacgatcccgaccgatgcgaagctgacgttccggcaggccgccgagcgctaccgcgtggaggtgatcccgacgaagtccgcaggaacgcagcggaacaacaaccgcgagctcgattcgttgatccagtttttcgacgacccgccgggcccgcttgacgcgatccgcccgacgcacgttttcaactacctgcagtggcgccgcagtgcgccagtggctgcaaaccgtgagaagtcgctgctctcccacctgtggaactggtgccggcagaagggctacacggacctaccgaacccatgcgccggcgtgaaccgattccgggaagacggccgcgacgtgtatgtggaggacgacattctgcagcgggtgtacgacgccgccgaccaggtgctgaaggatgcgatggaccttgcctacctcaccggccagcggccgaccgacatgcgcgaactggaccgccgcaacatcaaggacgggacgctggtgctgcgccagggcaagaccaagacgccggtgcgcatcgcgatcaccggcgagctgaaggtgctgatcgatcgcctgctgtcggtgaagcgcccggatgacgcacccatcagcacgcgtctgctgctgggcgaggactggctgccgatcgggaaggatgcgctgcgctaccgattcgacaaggcccgcgagcgcgccggcatcccgaagaaggaattccagttccgcgacctgcgcgcaaaggcaggcacggacaaagccgattcggccggcgacattcgccaggcgcagcagcagctgggccacaagtcggtgaccacgacagagatctatgtgcgaaagcgccgcggtgcgctgaccagcccgacgaagtga

SEQ ID NO: 510199 - DNA, 345 bp, Stenotrophomonas maltophilia
atgccgctccccgccgacttcaactggacgaccaggtccgccagccgcccggatgaacccctgaccgtggtcgcctgccacggggtgtgggtggtggctatggcccaacgggtgaacgacggcatctggattgcctcgctggatcggcaccggcatggccctggcggtccattccgctggtgcagcagctacgagcaaggccgggcgggggctgagctgtgggtggccaggcacgaggcacgactgcgcgaggacgtggccaagatccgggaataccgggaggcgatcgcgggtaatcgcctactgaaggacagcctgaagccgccgttcggatggatgggatag

SEQ ID NO: 510200 - DNA, 372 bp, Stenotrophomonas maltophilia
atggtccggcagacggcgcgggaacgccgcgtgctggcgttgggtcgcctgaagacaggcgagatgaacaagaccgaggccgcgtatgccgaacggctacgcgcgctgcaggctgccggcgagatcctgtggcaccggttcgagggcctgaagctgcgcctggcagacaacacgtttctcactgtggattttgcagtaatgcgcgccgacggccagctggagatgcacgacgtgaagggatcaaaggccatctataccgatgatgcgaaggtaaagatgaaggtggctgcgcagatgtatccgttcgtctttgtcgtcgcttacccgcgcccgaaacgagagggtggcgggtggttgctggaggatgtgtga

SEQ ID NO: 510201 - DNA, 240 bp, Stenotrophomonas maltophilia
atgtcggaacgctctcagaacgaactcaattccttcgagcaaggcattcttctcacgctcagtactctcgtaggagaactgagagaaaagggcttggttgactcagaaaagctcaacagaatccacagaatcctgttggagtcgccgtcggcggaagcctcagtcggtccgctagagaagagccgctgggaatggggcatcagcccgctactggcgaatgtggagataaacggccagtag

SEQ ID NO: 510202 - DNA, 414 bp, Stenotrophomonas maltophilia
atgagccgcagcggctacagcgacgactgcgacacctggccgctgatctgctggcgcggcgcggtttcttccgccttgcgcggcaagcgcggccagaaattcctggtcgaacttcgtgatgcgctcgacgcgatgcccgaaaagcgcctcatcgccgaacagctccaggacagcaccggctgccactgcacgctgggcgtcatcggcgccaagcgcggcttggacatgaccggcttggaccccgacgaccgcgaggccgtgagcaaagccttcggcatcgccgaagcaatggcagcggagatcgttcacgagaacgacggcgagtggcgctgggacaacgaaacgccggagcagcggtggacgcgcatgcgtgcatgggtcgagagccacatcgccgaaggaacagccgcgtga

SEQ ID NO: 510203 - DNA, 1173 bp, Stenotrophomonas maltophilia
atgagcaacaacgacacgacccatcttccgcagaccaaggcgcggctgctcgtgaaccagcacggcctgatcagcggtgtccgcttcaccagcaacacccccgacgtggtgtttggggaacccgaggtggttcgaatcaagcccagcggcgaggttgtgatcgcggagggcgcgaatctggacgatgcagcgcgcgccttctggaatgccatcaccgaatggcgcggtgacggttctcgccccaccctggcggacgtgcggcccggtgggagggtgaggctgggggatcaggccgagctggatcggcttgaatttcaggcgtgggcacacgagctgctcccctgtccgttctgcggaaacggtgccgagttcgtgccgtacaaggacaacgggctgaccctgaagtgcaagagcatgggatgcatccagcggaaccagcgcaccctccgctacggaatcgattggctgcggacctcgatggcagaacactggaatacgcgcgccctctccgcccagccctccccgggtggtcaggatgcgctgctggatcaagcacgcaagctcttcgatgagctgggagcgattgccgacgactacagatgcgtcgcgatcttggccgccgccctcgccgcccgccagccggtgggggagccggtgtgtagcggtgggttcgtgattgccaacggcagtggcgagaagtacatggcatggggacaggttggccccgagtggaccgcagacaggtccgccgcgctgtggctggttcgtcgcgccgacgccgaagcactggcagcggagaacgaggacgcatggtccatcctgccggtcgagcgttgcgcgctgccgccgaacggctgggcgtgcacgctggcagcggggcatgagggtccgtgcccgaccatcgccgccccgcccgcgcaggccgtggacctggcgcccgaccatcgcggaatgcgggtgagctgcagcggcctgctgagccaggtgcggggtgggctgaagagcaaccccgagctggcagagatggtgcggcagctccacggccacctcaacgagctggggaagcggtggtatgccggggaccggaaggtggtggacgagttcctgcagctctacgtgatcgaggacggcgcccggcgcgccctgatcgacagccaggcggtgggcaaatga

SEQ ID NO: 510204 - DNA, 261 bp, Stenotrophomonas maltophilia
atgagcatcgacagcgcaaacgagcgcaggaagctgcagcggctgatagatcgcacagccaaggcagccagcgcgttctacctcgcgaacaaagagctgtgcgagttctgcgtcgagaagtacggctgcgagccggccgacgtcgactgcgaccagatcatcgacgcggtccagggtggcgcggggatgtcagccggacttcctgccgatgacttcgatgaggcgatggtcgaagcgatggagctggcaggccatggctga

SEQ ID NO: 510205 - DNA, 234 bp, Stenotrophomonas maltophilia
gtgtcggcggctgacaagatcatgcgtcctggcgcacacggcgatgtggccgatctgaccggggcgcacacaaagcgcaggcagatccagaacctcgctcgcaacggcatcccgcatacgatcaacgctgcgggctggccggtcgtgatgtgggcggccgttgatgggtcagcgaagaagccgccagaggtcgagggcggttggacgagcaacgcactgaggtcggcggcgtaa

SEQ ID NO: 510206 - DNA, 702 bp, Stenotrophomonas maltophilia
gtgaacgagctgggggctgctgcgcgcctggccggcgccaagggcggcgtgctgctgaccgaaggccggatggaacgcgacgggcgcagcgctgccgagaagcaggcggtcgaggtgctggacggtccgcgcctgtggccgctgctgcagccctacctgccggcggaaatcgaaacccgtgtgcgtgccagcgcccgccatgaagccctgcgccggatcgccattgccgcgctcggcgcggtcacgctgggcctgctggtgggattgagcctgcaaggcttgcatgtgcaggacaccgcgcctgttgccgaggtggcggatacccccgcgccggttgcacctgcggttgaagcggcgcccgaaccggcgccggcccccgccaccacgccgccggccgctgcgcctgcaccggccgcgccctcagccgacgcgcgcagcaaccccaacccggatgccgccacgctggagcgcttccaggccgatctgtcccgcgccttggccggcaagcccggtatcgccagcggggtctggctgacccggcagacgctggcgatcaaccgcacgggcgagctggacgcggtctggccgcaggtctgcgaggaagtgctgcactaccccgccctgcgcaacgtgcgcatccagctcaacgcccgccccggcgtggatgagccggtgcgctggcggcagtgcgccacgtactga

SEQ ID NO: 510207 - DNA, 882 bp, Stenotrophomonas maltophilia
atgaatgcacttgtgcagcagcccagcgcgctccccgcgcagccgcgccagcagttcgacctcagcccgcagacgttcgagcaagccctgaccttctgcgactacctggccaacagcgacctggtcccgaaggacttcaagggcaagccggccaactgcctgatcgccatccagtggggtgccgaactgggcttgaagccgctgcaggccgtccagaacattgccgtcatcaacgggcgcgccgcgctgtggggggacgccgtcctcgccctggtgcgcagctcgcccgtgtgcgagttcgtcgaggaatgggacgagcacgacacggcctactgcaaggtgaagcgcaagggcgggaaggaagcgctggtgaccttcagcatggaggacgccaagaaagctggactgatcggaaagcaggggccgtggtcgcagtatccgaagcgcatgcgccagatgcgtgcacgtgcgttcgccctgcgcgacatgttcaccgacgtcctgaagggcatggcgatcgccgaggaaatcatggatgtcccggccgcgagcactgaggtgcatcgcaccacggcaacggtggttgcctccgagccggccatctacgcggccgaagagttcaccaagaacctggcgaactggaagacggtgatcgaatccggccgcaagagcgctggagacctgatcgcgatggttgaggccaaagccaaggcgcgtatgaccgacgagcagcggaggcagctgcgcaagttcgagcccatcacggaggccgaggaagttgccgatccggaaacggatgccgctgaccccgtcaccgctgccgccaccgctaccgaggctgcggatcccatcgactgggatgccgaaggagaccgcgcatga

SEQ ID NO: 510208 - DNA, 423 bp, Stenotrophomonas maltophilia
atgaagatcaagatcaccatcggcggcaacgaccgcaccgccatcatcctgcccagcgaatgcgccgggctggccgccgaactgatggcgcgcgcagccatctttgaacgcgacggctaccacagcacaagcggttggaagcggaccgaagaaggggtccgtatcgaatacaccgaaggcagcgagctggaaccgacccatcccctggtcgaaaaggcccagaaggaagcgtcggagaagaacagccagtggtgcgcggagtacacgaagaaccagaagctcgcgaaggagctggacgaactgaaggccaagctggccggtatccagtcagtaaccagctgcacggtcacgcccgtccagccggaagccgaggccatcagcgaagaagcgaccactgcgcccgccgaggaaattctcttctga

SEQ ID NO: 510209 - DNA, 327 bp, Stenotrophomonas maltophilia
atgagtaagcacaccgcggggccgtgggtcgtaaccccgcatccaatgacgaatgtggacgtgtttggcgtcggcgtgatcatggacgacaaggaaatgcagtacgggctttcgcacaccgtctgctaccagaacgcggaagccaacgcccgcctgattgccgccgcgccggagatgtttgaggccctggacaccatcggcggcctctcgcgtgcgcgtcgccaaggcggcccggatccgatggatctgcaagggctgtccgatgcgctggaagaggcagtcgacctggcaaacagcttggtcgcacagatcgaaggccgcacctga

SEQ ID NO: 510210 - DNA, 282 bp, Stenotrophomonas maltophilia
atgcgagcattgttccctgccctacttgttggcgtttcgcttatgggatgtgcacgccagcatgaaagcgaagcgatggacatcgcgtcgagcgctcatgaagcggccgccaaggcgaaccgcgccctggacgatggagtagcttctggcacaaccatgggcaacgagatcgaagaactgcaaaaccggcttgatgcggttgaacaggagaaccgccaacttcgcgcagatgtcgatgaactcgagcacgaagttcgttctctgaagatccaatcctactga

SEQ ID NO: 510211 - DNA, 732 bp, Stenotrophomonas maltophilia
atggtaaagtcaagtcaataccgtttggtaaattacccttcggtaaccgaaactcgcgcgatgaagaccgacacccccgtggttgccacgcgccgacgacgcctcaaacagtggattgacgagaaccacgggggcagtcaggcctcctttgttcttgccactgggatcaaccagggcgagctgtcgctgctcctgaaggacaaatcgttcggcgagaagaaggccgctgcgattgagtcctccgctcggatgccacccgggtacctcagtgacgagtccgtctcaggagtcttagagactgagacagcgccgggatacgttcgcttcgaactattcgaggggggcgcggggatgggaccaggtctggtgaatcaggacttcccagaggtagttcggacgattgaagtcgccgaatgggaggtccgccgtaagctcggctacatgccgaagcctggcaggatccagttgataactggccgtggcccgtcgatgcgaccgaagctcgaagacggtgacatcgtatggatcgacacgacctgcgatttctacgacggcgacgacttctacctcatcaacgtagatggggagactcaaattaagatgctgcagaagcgcggcgatggactctatgtcgtcagcgtcaaccccgatttccctgcttaccgggtacggcaggacgaactggtcgtgctggggaaagcccttatccacgcgggattgcgacggttctaa

SEQ ID NO: 510212 - DNA, 246 bp, Stenotrophomonas maltophilia
atggacaccctccgtagctacctctcgactctcaccccgtcccagcaggccgcatacgccaagcgggcgggtacctccattggctacctgcgcaaggccatgagcaaaggccagcgctttgacggcggcttggtgcggcagctgcacctgcagagccgcaaggcagtctcgctgagcgaactgcgccccgacatttggccgccggaaggtgagacgaagaagaagggggccagccgtgcagcgtga

SEQ ID NO: 510213 - DNA, 414 bp, Stenotrophomonas maltophilia
gtgcagcgtgatgacaacaagaccatccacctcggatggattgcgttgagagtggtcgcagatgccgacggcaacgctatctccgcgcatgtggtgttgcacgcggagaaggatctgagccctctcggcgcgctgaccctggcccaggtggctgaggttgcagaaatcgacctattgaaccgcgtcctcggccacggcgagtcggacagcacggccaccggcaaagccccttgcaaggggcacgccgccacctgcctcggtagcggcgacccgggtgcatgcgggtgcctgacaagcgagaccgctactggggccgccttcaatcccactgagtacgcggggatggagacggctacaggtgcaccggcggtccacgtgcacccgtatgcgcgtaccgctactgggaacgactga

SEQ ID NO: 510214 - DNA, 195 bp, Stenotrophomonas maltophilia
atgagcgtgtgtccgcactgcaaggccgagttcaagcaggtaaaaatgaatgcgatcagagccgcaaacctggtcaagagctgggaggcgatctcgttcgattgcccggcctgcgatgcgtcgctttcggtctgcatcgacccggtggtcatcaagaacatgacggtcgaccagatcatcagtcgttcccagtag

SEQ ID NO: 510215 - DNA, 387 bp, Stenotrophomonas maltophilia
atgagcgagatcgaattgaaggcgtgtccgttctgcggagggagcgccttcatggttcaggagggtacgcatgcccaatgcctgacgccagggtgttgcgttggccccgtacgcgggttggatagctggaacacccgcgccccgcaatggcagccgattgagtcggccccgaaggggcaggaggtgctggtgtggcggccagatcagggcgtcttcatcgcaatgattgcaacgcccgacatggtgatgtccgagcgcgaaatcgaagaatgttgcctgcccgaggacttcgaagagtggtactgcgaggcgtggggctggttggaggacgatctgcggccgacccgatggatgccgaaacctgccgagccggaggtggagggatga

SEQ ID NO: 510216 - DNA, 225 bp, Stenotrophomonas maltophilia
atgaaagtcttctggggtttggttgcctatatggcaatcggcggtgtgttcggcggtatcaccttcaactcaatgtcagaccgttgcggcggtgccgtgaagatgagcatcaccgagtttgcagccggtgcagcgtcctggcctgcagtgttgatcgcggccttcgtagttcgcggcaagtacctcgaaggcgaatcagagtgcgtcatgcgggaggcagcatga

SEQ ID NO: 510217 - DNA, 324 bp, Stenotrophomonas maltophilia
atggacgccatcgagaagcgggcgcgggagtggttggctgatggtttgcggagcaaataccccgatgacatagccacgcgtatggtgatttcgcagctactcaatgatgagctggacctcataaacgcaagagtagcagtcaaggtattggccgccgccctcacgccacccgatggttacgttctggtccctgtggaggttcgcgacctctacgacttcatggcgatcactttcactccattcacgggccagcatcagcagatcaagatccagttggaattggcgcggcaggcagtgctagccgatagcccggaggtaccgtga

SEQ ID NO: 510218 - DNA, 141 bp, Stenotrophomonas maltophilia
atgggcagctcactggactacgtactggcccagctctgctaccttggccgctctagagtcgttgcccgcatcaggttgggggtgatcgtctctctggaccgcgccagggctcggttgcagcacgcggagcgccgccgatga

SEQ ID NO: 510219 - DNA, 312 bp, Stenotrophomonas maltophilia
atggctaattctctctccagccgcgagaaagagctgctggtcaaggacgtgagcgcgtgcgtgcgtgctggcggcggggtctatgggatcattcgagtctggtgcgatgggtctgctccccgcgatcagcagatcattgagggcgctctctacaccgccagagtggtggccgagcaggtcgagaaggagaaggccgagatggctgcccgagacgccttgctggctgacgacatcgccatggtggaggagctgatccagcgcctgcccaaggtgttggagcggctgagggcggcggaggtggccagtgagtag

SEQ ID NO: 510220 - DNA, 306 bp, Stenotrophomonas maltophilia
atgaacgacaagaccatcgagcaggaaatccaggacaagggcctgaccgcaccgcgcgtgacgccggcacaggttgaggccgctatcgtcggcgagacctacaccgtcctccccaacggccgcagcaccgtttgccagctgacgctggacaacggcttcaccgtcgaaggtatctcggccgccgtgagcatcgagaacttcgatgccgagctgggcaacaagatcgcgcgacagaacgcggtcaaccagatctggccgctgcttggcttccgcctgcgcgaccagctggcccagaaggagggctga

SEQ ID NO: 510221 - DNA, 1251 bp, Stenotrophomonas maltophilia
atgcgcgcaggcgcggcactcggcgatgcactgttcgggaacggccgggcggcctacaacgatcagctggggctggagtacaagcacgctctggcgctggagcaggccaggcaggcccggaacgctcgcgtgatgggggaccagaacgtggcctcccggcagggactgacggccgacctcatcgggcgcgcccgcgccggcgacgtggatgctctcaaccagctgactgcgtacggcctcacctcgaacgaaaaggtcgatctcggcacccttggccagtcgcaggacttcgcgatgcgccaggctgtgtacgaccgggcgacgctgggtgacctggccggtgccggtgccgcatcgctcggcctcacgacaaagccgctggagatgaccaagatcgccggcgacgtggcctacaacccctacgcgcagccggaccagacggtgaacgtgacgccactgggcgaagccaccatcggccagcgcagggcatcggctgcgtcgagttacgccagcgccaacaactcaaacgccagtgcggcgcgcacccggcaggcggccgggatcgacgcggccaagttcgggctggagcgcagcggccagtggaaccctggcggcaagtctggcggcggtacgctcggcgacggcggcaagcctgctggtagtgctgacgggggcgtgctgggggacctgaacccgcggcagaagaccggcgcacagagcgtgcaaaggaatctgctctcgtacgcctcagcgcttaccggaacgccggaggcggaactgcgcaagttgagcgcagaccaaatcgcagcgttgatggagcagaaggggtcacgaggtttccagggtggcatcgcgcgatttttgcgaaacctaccgggcggtcagacgctcggcgacgtcctgaactctgacatcttgtcctattcgcagggtgccggcgccggtctagccgcctacgagaatccgagcggtccgatcagcaatgcggaccgggagacgtccacgttgcagatgcccacctatcttgatccggtcggcgtgcaggcgaacaagacgcggaacttcctgaactcgaccggctaccagccagtgttgggtgagagtcgcagccggttggaatcaggccccggtctgccgcccgcagcgccgcctccggccgctgtacaggccctgcgtgcaaaccctgggctcgcccgccagtttgacgccaagtacggcgccggcgcctccgcctcctatctgggccgctga

SEQ ID NO: 510222 - DNA, 2550 bp, Stenotrophomonas maltophilia
atggacaatttcttcgaccagtttgaccagccggcgcagcctgcaacgccgaagcttgcccgcggtcagctgcaggccggaaacatcgacctgaacaaccgtcctgtcgtgcgcaacccggacggctcgatctcgatcgtgcgctcgatctcggccaattccgatggccaggaagtactgatcccgacggtgtcggatgatggccgaatcctcagcgacgacgacgcgattgcccagtaccagcggaccggccggaacctcggaatcttcgatacgcccgacaacgcaaccgcctatgcgcagagcctccatcgcgaccaggagcagcagtacgtcccgcaggctgatggcggcaacttcttcgatcagtttgatggagcggccgcgccgtccactcttggcgatagtcccctgcgccatgccgacggccgcctgaccgaggccggctggcaggcggagcgcgatgcgctggctgcggcgcagaaaaaggaggtggaggaccggagcttcttcgacaacttcgtgactggcctgggccggtcgctgcccaacctggtccagggtgccaagcaggcctacatcgactccgttgctggtctcagccaaggctcggcggatgtgcttggcgacttcggcggcaaaaccttgggcgatgcccgccgaagcgctgccggctatttcggagacctctccaaggaacttcagaacgacacgaatcaggagcgtagagcgacgcaggacctgacgggttcttggggtgggggtattggcgggtttgccggcgatctagcctacaccttgcctattgcttcggtcggcgtcgctgcgaagggggccggcgctgcaaaggccatcggccaggcggccttgggtggtgcgttgcaaggtgccgtgcagcccgtcgccaaggaaggagagcggctcgacaacactctcttgggaggggcgcttggcggcggcctgtcaggcttgggccgcggcgctatgacccttggcgagaacgtcttgccgcagaacgtgacggctcgcgtgctcaactacttcaacgaccgcgccaatgcgaagccgttcgcagcacagggtgaggctctcgcacagcggactggcatcgatctgacaccaggcatggtcagcgggagcaagtcccagactgcaatggaaaacatggctcgtcagagcgtcttctcggcagacaccgcgttcaaggcggacgagaagatcgcaaaccaagccattgccaacatcaatcggatcatggaccgggtatcgccggatagcgtctcggttcaaggtattgggcaacgtgtccaggagtccgtcgacaaggcggtgaaaagcgtcgttgaccgtcgcgaggatgtggccaagcagcagtatggggcgatccgccgtatggtcggtgacgcgccggtggttgactacgccaagacccggcaggtcctgcaggacatgattggcgagaacaccgacgttattggtgcggacgctcgacgtgttcggacgcaggctcagcgaatgctggacgagctgggagccaaggacggattcagccttgattcggcccgcaagtcgcgtagctcctacggtgcagcggcgcgcggccaggcaaacctgctcagcaacgtggatcggaacgtcaacaagaccttcgccaagcggatgtacgccgcgatcagcgacgacatcgaagcggccgggcagagacttgacgaggcggcgggcttcggtcaaaacggggtggtgcctgccggtaccaatgtcatgcggccgagcgagatgctcaaggccgccaatgaagagtaccggaaccatacggacctgctgcggaagattgagcggagtccgctccgccgcctgctgggcgacaagttcgatgtggacggtttcaccgagtactcgctgaaaccggaggctgttgtccagcgcatcgatgcgatgaagccgtccgaacttgcccaggtccggtacttcatggagaggaatgaaccggaagtgtggggccagtacaagcggatgatcgtggaggacgctctcggggcggcccagaccgccccggcatcggctggcgccaaccacgtgccattcaacgccagcggcttcattagatcgatcggcggcgataaccctcaaaagaccgagcgactgcagcagatattcaaccccggcgagatggccgagatccgcgacgccatggaggctgcccgtcgcatgggcgacagctttggcaggaacttcagcgggaccggaccctacaacgaggtcatgcaggcttcgaacgggttcatcgacgccttcaagaacgccagtctacgggccgccgcaggcaccgcggcgccaattgccgggttcaacaaggtggctcgcatgatggtcgactccaacgggcgcaaggcgctgatcgagctttctcggctcccacctggttcccgcaaggcgaacgacctggcggcttacctcgccgcgacagctacggtggggagcgataagcccttggacatcgacatcgtcggtggccggcgggagggcgacgcgactcaggagactctgtag

SEQ ID NO: 510223 - DNA, 336 bp, Stenotrophomonas maltophilia
atgacaacgtcaaatcgcaccctgtccccaccgattacagttggccggtatgtacgagcggagttcccgcggctggccagatacattgcgtccgccatggcgctatctctgcctgtgattcttgcgattcgaatcaaggattatggcttcagctggaagctggtagcggccgcggcgggtggcttgctggtcgctaccctcctcgcttgcattgcacttgccatcattctccctatagctggctggtggaagctgcacaccaagatttctccatatgtgccggtgacgattgccttgatcgccaccatggcactcctgatctacagagtctcctga

SEQ ID NO: 510224 - DNA, 507 bp, Stenotrophomonas maltophilia
atgagcgacgaagtccaaggatggcgaacgcggctggaccgggaagcgcagcgtaggattcttgcgcgcttggctgaggactatcctcaagatgtagccgctgaattcctctatgagcacatagagccgaacctacttctgccgaacatctcctatctagaggagcatggactgatcactgctgagtactttgggccgaagtggcaaggcaatcccgtgttgacggcgaccttgacccacaggggctatgatttcattcaggacgacggcggtttaggcgcaatcctcggagttttgacggtcaggatccatgaagacttcatcaaagacctgatcgccagcaaggtcatggcatctgatctatccgagcctgataagcagaaatttgtcgatcagcttcgagagctgcctggcgagaccaccaaacacctgatgctgcggcttgttgatgcgggtctagagaactggcatcgagtacttccactgctccaaaacattctggcttga

SEQ ID NO: 510225 - DNA, 279 bp, Stenotrophomonas maltophilia
atggcatacaacctgttcatcgcatacgacctgatgcagccagggcagcactacgacagcgtcagggacgccatcaaatcgctagggcaatggcaccagttccagtactcactcttctacgtgaataccctgtatcccccggacgctgcctacgatgttgtcctcgctgcgatggaccccaacgaccgccttgcggtcattgatgcccaagcaggcatcgtgacaacctgggaccggccgccgatcgatgcgatcaacgcgatctggcatagccgatag

SEQ ID NO: 510226 - DNA, 453 bp, Stenotrophomonas maltophilia
atgagcgccctggcatatgcggtacagctggtgaagaagtgggaggggtgccgcttggaggcctaccccgaccctgccaccggcggagcgccatggaccatcggctacggcgcgaccggtcctggcgtcgaaaagggcgtccgttggagccaaaagcaggccgacgaccgactggccctcgatctggaccggttcgccaagggcgtgcggtcagcgctgcgacggccggcaaccgaccgccagctcggggctatggtcagcctggcctacaacatcggcgtctctgcatttcgcagctcgaccctgctgaagctgttcaacgccggcgatgtagcaggggctgcggctcagtttccgcgctggaacagggcaaacggcagggtcatgcagggcttgtccaaccgccgcgccgatgagcgccgcgtgttcgaaggccagggcgggagcgcatga

SEQ ID NO: 510227 - DNA, 243 bp, Stenotrophomonas maltophilia
gtgaaggaccgattcaactggcagggcgtggccggtcgcgccagcacctggctggcgatcctttcggcggccgcgacggccggccttggcgcctatgcgctgatgcccgagcgagcccagaacgcattccctgagtgggccttgatcggcatgggggtgctggccgtggggtcggcgttcctggtcccggtggccaccagcttcaaacagaaggcgaaggcggcgcgccatgctgatccctga

SEQ ID NO: 510228 - DNA, 264 bp, Stenotrophomonas maltophilia
gtgcagctcaattcctttgctctgatcgccaccctgctgctggccggctgcgcgcaccaacccgagcggccgaagctgcccgagaaggtccatgtgaccgtggagaagctggtaccggtcgatgatcggctgacgcagccgtgcccagccacgcgggcggcctcgcgcacggtcgaggcggtggtcagcgcctacaacgccaacctgctcgccctgcaggactgcaacacccgcatgggcgagatccgcgcgctggggcggtaa

SEQ ID NO: 510229 - DNA, 726 bp, Stenotrophomonas maltophilia
atgaaaatcacactagggaccggccgaatacactcgggtgaaagagatatggtaatcacccctgcggggtacgccggggggagttatgcatgcatcatggtgcacggcgttgaagcctccggcggtgcttgggactggatgatcgccagcccccagcgctggcccatcgtcaggacgctggttgacacctgcaagctgtgcaccatcagcgccgatcttggcggcagtgccacctggggaaactccactctggtttcccggatggacgaagccttcgcttatacccagacgctcccgcaggtgaagaaaggcaaggtgatactggccggccagtcgatgggcggcctggccatgctcaactgggccagggcaaacaagtccaaagtggcggcggtggttggcgtcatccccgtgaccaacatgaactccgcgatcgccaatgggctctccacccaggtcgctgcagcatacggcgggtcctacaccgatgcggcgtatggcgcgcagtacaacccgcgcgtctacgcggcgacgctggccggcatccctgggcagctgtgggtcggcgccaccgatctcatcgcgaatacgacggatgcaggcgctgtggccaccgcagcgggaacgatccagatgatcaccatcccgggcgcccatgcagaaacgacgctgtcgggcatcgacctggacgtgatggcagcgttcgtccgcgcgaactcgacctga

SEQ ID NO: 510230 - DNA, 702 bp, Stenotrophomonas maltophilia
atgaacaccattcttgccgctgccgccctcggcctctcggcactccttcccgcccctgcgttcgccgccgatgcgtgcctggcccgggtcgtgtccgacctgcaggtgcagtggcccaacaacgcgacagtgaacatcgtcgctttcggccacagcgtcccggccggctatggactgacgccgaaggtccagaagcgcgacgcctacccgcgccagctggaggatgctttggcggatcggttcccgtatgccgtgctcaacgtcatcacggccggcgttggtggggagaactctgccaaaggcctggcgcgggtccagcgcgatgtcgtcgaccaccatccccgggttgtgctgatcgactacgccctcaatgaccgtagtctgccgctggcccagtcccgccagaacctcacgacgatcatccgtaccgctcgtgccgccggcgcctgcccggtgctgctgacgcccacctgggacaccgatgcctccccgaccgccccgggtgacaagctcggcgcgcaagcggcgatgattcgatccctcggcgctgccgagcgcgtgccggtcgccgatagcctccaggcgttcgtctcgttcaagggcgacaggaagacgctgatggcgcagtccaatcaccccaaccgcgccggccacgcgctggtggtgcgtcagctcctgctgctgttgaatctcacgccctga

SEQ ID NO: 510231 - DNA, 360 bp, Stenotrophomonas maltophilia
atggagccgtcgcagatcccccgatatgcggagcgtgacccgaccttgcagggctgggtcatccgcaatgggcggtgggaactgtggtggtcgggccgggacgtggcaatcgtccagccggatcgggacggggctgcggtcattctggactgccggcgcttcttccaagagaagcacgtccgggcggccagcgcggagcagggcaagcggttcgccgagcggtggtgcgcggcgcggctgatgcccgagttgcggctgcgcgaggcggtggcgaggctgacggccaagcccaagccgacccgattggagcgccagcaggccgagcgactggcggcgatcaggccgcccaagatcggatga

SEQ ID NO: 510232 - DNA, 756 bp, Stenotrophomonas maltophilia
gtgaggctgggggatggctggtccggctgggccacccagtacccgaacaagatgccgaagctatgcggtgcacgcgagatcgccgagctgaatcattacccggaggaagggcagcgcctgatcttcctggcggagaatccggtgcatgtcggggatctggttgatgcagcgcgcgccgctctcccgtttgtggccttcgcatactcaaagggcgtggctggcgccgaggaagctggccgtgccattgaagccgccctctccgcccagccctccccgggtggtcaagggggattgaactacgagcgcatgttcgttgacgcctgcgccgcgctggccgaggtttcgcgggagctgggctgcgatccggagcagggtggcgctgagccgatccttgcggccatcgcagagcttcgagaatcagtcgccgcccgccagtcggtgggggagccggtggcagaggctatcgaacagctggccgacgacgttgaaagctgcgtttccgatgcatgtggatacctggcttccgacagcggctgggacgattacgggatctatcgagacgatgctgcggcgcgctaccgagcattgccggatcggattcgcgcactcgccgccgcgcccgcgcaggtcgtggacctggaacgtttccgccccgcagtgatgacggcactcggcttgtcgtcgccgtacggactcgaacgggaaacactgaatgaactgctggacctgatcgatagccaggcggtgggaaaatga

SEQ ID NO: 510233 - DNA, 528 bp, Stenotrophomonas maltophilia
atgttgaagaacgagggcgccgtgcttgcggccttgttgacggccgtggtgctgggcgaaggcgtgctgcgtgagcgtcgcctgggctggcgcatcctcctggctgcggttgtggccctgctgccactgctggcatggaagctggctgtcgggcaggcaggggtgggcaatgacctcgcgggaagcgacctgaagacgcagctgttggcgcggcttggcagcgagggcggtaccctgccgatcgtcgggcgcctgctgctggatatatgggtgctggtgccgttgctggtgctggcggtgctctggcgcccggtgctgcgggttccggcggcatcggctgccgtgctgacggcgctggcgtacacagcggtgctgttcctggtctacctgggaacaccgcatgacctggactggcacctgcgcaccagtgccgaccgtgtgcgcatgccggtaacactgctgctggggtttgcggtgctgctggcgctggaacatcgcgccaccgcgaagacgccgcgcgctcgttga

SEQ ID NO: 510234 - DNA, 1356 bp, Stenotrophomonas maltophilia
atgaagcgtagggaattcatcgcggccagtgccgctgtcgccgccagcagcctgctgccgcagaccccggcgtgggcacgcgggcgcaaggtgcgcctggccatgatcggcaccggcatgcgtggccttgtgctgctgaaggagctggtgcgccgcgacgatgtcgaggtggtcgcgctgtgcgacatcgaaccgatcatgctcggtcgcgccatggacatggtggccaaggccggcaagccggccccgaagacctacggccaggaccgcgacacccatgcgtggaagcgactgctggaacagaagggcatcgatggcgtgatcatcgccacgccgtgggaataccatgcaccgatggcgattgccgcgatgcaggccggtgtagccgtgggctgcgaggtggtggccggcatcaccctgcaggaccactgggacgtgctgaagacccagctgagcaccggtaccccttacatgctgctggagaacgtctgctaccgccgcgacgtgatggccgcgctgcagatggtgcgccagggcctgttcggcgagctggtgcatctgcaggccggctaccagcacgacctgcgtggggtgaagttcaattccggcgatccgaaccagccgtatgacagcggcgtggagttcggccccaagggctggagcgaagcacgctggcgcaccgagcattcggtgcagcgcaacggcgagctgtaccccagccacggcatcggcccgtgcgcgatgtacaccggcatcaaccgtggcaaccgcttcacccacatcaacgccttcgcgaccaaggcgcgtggcctgcacgagtacaccgttgccaagagtggtggcaccacccaccccagcaccaaggtgaagttcaagctgggcgacatcgtcaccaccacgctggcctgcgagaacggtgagaccatcctgctgcagcacgacacttcgctgccgcgcccatactcgatgggcttccgcgtgcagggcaccaagggcctgtggatggacgtgaaccattcgatccacatcgaaggccgcagcccgccgcaccagtgggaagagttcaagaagtaccaggacgagtacgagcacccgctgtggaagcagaacgccgacaccgccgcgagtgcagggcatggtggcatggactggttcgtcattcatgcctttgttgaggcgctgaaggcgaaggctccgatgccgatcgatatctacgatgcggtgacctggagtgcgattaccccgttgagcgagcagtcgatcgccaacagcttccagaccctggagttcccggactttactgctggcgcgtggaagcagcgcaagccgatctttgcgtttgatgggaaatactga

SEQ ID NO: 510235 - DNA, 1158 bp, Stenotrophomonas maltophilia
atgaagtctccagcccccatctacgccgactttgcctcttctgccccaccgttgcccgaagtcgtagatgcaatgatggagtggctaggcggctcgcatgccaatcctcacgctgaccacctgcctggtcatcgggcggcaagagccattgaggatgcgcgtcaacacatcgctgacctcattgaggctgatcccgatggcgtgatctttacctcgggcgcgacagagtcaaataaccttgccttgaaagggctggtgaactcatgtgatgaagggctgtttttcagccccttggaccacagttcaatcgttgaggtagcccgccatcttggccagggtgatctgtgccgagtaagacagctcaagcatgatgctcagggtagtgtccccgccagtgaggtggagaatgccctggccgctagtcggggtagggcgctcgttgcgctcgcgcatggcaacaatgaaattggaactattcaggatttgattgagatcggcgctgccgtttcagcccgggggagcattctccatgtggatgcgtcccagacggcggcccatgttgcgatatccgtgcaggatatgagtgtgacgtccctgagcatatccggtcacaagctttacggaccggccggaatcggcgcgctctgggtagatccaacctccaatctggagctacttccaatgtttcacggaggtggccagcaaggaggcgcgcgctcagggactgttcccacctacctggcggtcgggttaggggtggccgcccagcttgctcgcgatcgtatgcaacaagcacgcacccatctgagggcgatggcatcggagttcatcgaagccttggccagtcgcggtctatcgccggtggtcataggtcatccgttgaatcgcctgcctgggcacctcagtatccggttcccaggtgtagcagcgccggacttgctaaccaggcttctgccgctattggcgttgtccacaggtgcggcatgctcggcgggtgagatgagggcatctcgggtgctaaggcagcttggcctggatgaggacactgccagcgagggacttcggatcagctttgggcggtcgactacggctaaagaagttgctttagctgccgaatacatgtcagatgccgtccgtgaggtcctggattttatctag

SEQ ID NO: 510236 - DNA, 840 bp, Stenotrophomonas maltophilia
atggctgagcatcatgttctgggcatatctgggggcaaggacagcgcggcactagctgtctacatgcggctcaaccatccagagttggatcttaagtacttcttcactgacaccggcaaagagctaccagaggtctacgacttcctcggtagtcttgaggggttcttgggcaaggaaattctcaggctcaaccctcagcgcgactttgacttctggctgcgggagtacaacaactttcttccctcgcctcgaagtcgttggtgcacccgtcagcttaagctgaccccgttccgaaattggatcaaaccctggctcgatgctggtgacacggtccatagctacgtagcgattcggtcggacgagaaccatcgcgaagggtacgactctggtcatcggaatctgactgtgcaccttccgttccgcgaagcaggtgtcgaccacgcgggcgtgatggagctgctggacggtgccggcgtcggactgcccaagtactacgagtggcggtcacgtagcggctgcaccttctgcttcttccagcaaaaaatcgagtgggtgcggctcaagcagcagcaccctgaacgatttgaggaagccaagctgtatgagaagactgcgctggagcatggttcgccatttacctggagcgatcgggagtccctgacagagttggagcagcccgagcgcattgaagcgatcgagcgcgactttgagcgacggaaggagaagtccacaagccgtggccggatcaatccacttcgacaagggctggagttgccggccggcgttgagatggaagaggtatttggcgagacaaccgcctgcgtcatctgccagaagtag

SEQ ID NO: 510237 - DNA, 2361 bp, Stenotrophomonas maltophilia
gtgtttggattcctcagctcgtctgagccgttagggttccaagagttcctgcgcggtcagactggggacatttctactgtctacagccccgcccgcttctgggactacctgcgcgtcaactttgagcctgcgattctggcttcggccgacgggcaccgttgggcggtcgcgagtgatgccattgaacgtgtggaggctcgcttccatgaacttcatgtagctctgatcaagaccatcgctctgattgacatgttccgcaacggctctggcgtggcagcgactaatgaggtcctgcagcagagcatcccggggcacagttcaaaagatatcgcaggggccttggcggatcttgtgacgtccagtgttgccgtgtatcgaaagcacttgtctgcgtgggctgtgtatgccggcagcgactttgatattgaagctgcggttgaccaggctaaaggcaagcgcactctttctattgatcaacaattcaagcaggtcggcacgcttcctgctttgagcgcccgcaagcactatttcctgaccggtacgctgcgttggttcgagcgagtggtcgccacgccgaaagcggctggtgaaatgctcgattccgcacgagagtccactgcgggacgcttcatcttgcttgtccccgatgaagagacctcacctcaggcgctgcgtgatgcagctgtggcgctggtcaagcgctccaaggattcactcaacgccatcggtgtgcccaagctccatctgggcttggctgaacaggctaccgagctggcggctctggagcaggtagctaaggcgacgccccagctcgacggcgatgctgtagcgaggcgggagatttcagcgaggttggaacatgcccgccactccttggacgccgatctgcgcgaagcattctccactgccacctggcacattggggcggaggtattgaccagtactgttgacgatggcctctcgcccatcgccagtgtcgtgtgtgaaaaggctttcgacagggcgccactcgtgttcagcgagctagccaatcgcgatacgttgtcctccaacgccgcgaaggctcagcggctactgatgcaccgcatgctctcccatgccgaccaggaagagctcggcttcgagggctaccctgccgaagccggcctctaccacaccatcctggcgccgctccagctccatggactcaacggtacctcagcgggcttccgaacattggcacagctggaggaaatgggtagctcaagcatcgtcgcgctctggcaggactggaagtcgcagttggtccagtcacggtcaacggttcacctgtccgcactatttgagacggcccggcaggctccttatggcgtgcgtaacggactccttcccatatttgctctggccttcttcctggcccaccgcagcgaaatcacgttgtacatcgatggcatgttcacgccggagatgagcgacgctgattcggatgcgtggcttcaggatgcagctcgaattggatggaagtggcttcacatcgatgagagcgcgcgcaagatgttgcggcagctcgctcgccgccttgagcctatcgctgatcgacctgtgcaggctgacccgttggattcggccagggcgctggttgcctgggcattctcgcttcccacatggacccgcaagaccacatcagtcagcgagcctgcccggaatgtgcgctctgttctgctgcgcgcatctgatccactcaagacgatcttcgttgaccttccagatgcgctcgaacttaagcctggaaaggagatcgttgatgtcatcatcaacgtcgtcaatgaactcgactccgcttacgacaatgtactcagcaagcttggacatgaaatgctgatatctctggcgcacactggaccgctgtctcgactccggtcgcgggcgaaggccattgcaggcaggacgggtgactttcgaatcgatgcatttgtctccaggctgtctgagtacgacggtcttaccacccagaatgagagcctggcatcactcgctaccaatcgtgcagctcgcgacttcaccgatcaggatgttgagcgtgcgggtattcagctggcggactgggcattccagttccgccgactggagctcttggcttccgtccaaggtcgcccgtcaggacgtcacgcgctcgccgttgcgtttggcagccagaaaaccgtcagcgccaccatcgacgtggcagacgaggatcgagaggtgatctctcaggttcgcgacgtaattctggctgcagcaaagagagagggcctgacgaaggagctatacctcgccgccttggcagaggcaggtgcagcaatgctggaagatgcaatggaagtggagagcggcaatggctga

SEQ ID NO: 510238 - DNA, 738 bp, Stenotrophomonas maltophilia
atgcgcctgctcggactcgatcgcgccgccaatcaggccgatgacctcgtccgtgccggccactacaggaatgtctacgaagcgaccttggaccttggcccactccgcttgaatgccacggtgcgacctacctacgtactgctcaaacgcctgatgcagtacaccaacgatgacaaggcggccctcgcagcgactagccgcttcggccagctcctgcagcagatagatatcctcgcccgctgcagcggcagcttccaggagcttgcccatctcatcaaggatgacgagcacgccaccaacatcagggttttctgcacgcttgacgagttcgccgacgacatcacgaacgccgtctcgcatgcgcttggcaccgcgaagtggtgcgtacttatcaatggcttgactcaaagcagcctcaagcgactggcgtcgacccaccaacgggactacagcccacgccttgcggccaccgaatgcccgggtgacttcgctggccgcatccagaccaagcgccgccttggcacgcttacgtacctgcggcgtacctcctgccagctgcgccagcgccaatgcaagggtcgacttgccaccgccgtatggcccggtccaagtgaaagcccgctgctgggaagtcgctacgtagcgggcagtagtctcaagagcgagctcgccgctaccatgcagaacatagccatcaagagcatcctctcgggcaagatcggactccagctgcactga

SEQ ID NO: 510239 - DNA, 933 bp, Stenotrophomonas maltophilia
atgacctcgatcccgctcccgacgctcgttcagttttctggccacgaaacgttcccgctccgacaactgtggttgcggaaggcttacgacgctgccgcagagggggaggggaggccggccaaggaagtctttgcccccgatgtaggtatccgccgctttggtgtgggtaagaacatggtggccgccattcggcattgggcattggcctgcgacgtcatgtctgaagcccgcgatggacgtatctcaattgggacgaccggtcatgccctgttcggaagttcaggcctagatccatttttggagcgtccggcaactgcgtggtgggttcattggctgctcgcagggcgagcgcagcgttcaactacgtggtggtgggtattcaatcaaggggcacagcatgccttcgatgttgagaggctgaccgattcgctgaaatctactgttgagcaagcggggcataagacttccagagtcacgctcaagcgtgacgtagaggtctgtctgcgttgctacgcagccaagcgtgatggccgtggcggcgatgaggcagtcgagccgcttttgtctgagcttgggctgatcaacgaaggggcgggcggaagcttctccttcctgcgcaactcgcagcgctccctgcctgacggaatctttgcaatggccttgctcgagttctgggcggagcgtgacgcgcggcttggtaccggtcaagcgacgctctcctttgaggctatttcgcacgagtatggttcgccaggaagggtgtttaagctcgatgagaggggaatcgaagatcgactgtctggactcgaatcgctgacggatggccagcttagatggactgataccgcaggggtcaggcaggtcagtcgtcagattcgtgtggctcaagaagagctcactgcaggtctattcaggaaggcttatggcaagtaa

SEQ ID NO: 510240 - DNA, 327 bp, Stenotrophomonas maltophilia
atgagggcgttctatctagcctcgctcgagaacgacttgagatacttccacacgcctacctccgaccgtgtgggaaagatctttgagaagtatctgcagatcaatgtcttcgacgggtgggtgtggaatcactatgatccggcccgcgcgaaaggacacttaaacgcgatcgcgaagaagcggggtgacattgcccaccgctctcttcgtcctgtcccgggtcagccagcggcgcatgcggtaacccgcgaagacctcagaaagcacatccgtttcatttcagatttggttgccgccactgacaagcacatcgccgccatcctttag

SEQ ID NO: 510241 - DNA, 537 bp, Stenotrophomonas maltophilia
atgaacttggtgttctacgcgaaggatatttccttggcgaaccttctaagagatgtgctgtcacggcaacgcgctgatgtagcgaacatcacagtgcaccgtgtggctgcgtacatgatggaagcctacgggggaatgactcatcaggtcaaaggcgaggtcatgaagcgggttaccgcggctgacaagaaggccgtgggtgctgataatcctgacatagcggttgtgtccagaaaggatgatcgcattgtgctgatccctccgcgtttgagggcgaacgacatgaagaagccgaagaagcacattactggcatccgggcacgagaaatcttcgggcccgactggaaggatctgtttcctatcgcgtattcagatcaagtgcgccaagtgatcgagcaacttcaaacgacaccaggtggggagcagtggctcagtgatccatctacagttgctgttattgtacgcacggcgcaggacggctggaaggcgtacattgcgagtgacgcctacgagccagagattgaattcgggttctag

SEQ ID NO: 510242 - DNA, 714 bp, Stenotrophomonas maltophilia
atgtcgcagcaacctatcgatcaccccttgctcgatgagattcgtgatcgggcttctgcgggacgggggaagatcttcaatattcttcaatgggctactagtcccatctcgcacctcggactgtcgaccgaagaagaagtcagtttggcagcgaggttgcacccacttctcctagaggctgagagtggcgggcaggatgttcttgatcttgttcaggacgacgacaacctcgcgctgatcttcattgttctggaaatggccctggagaaagcaattttcaaagcagttgctattgagcaagaagatgaagaactaaagactgagcttaagcggaaacttacagatatcattcgtctaatcaacaacgtggtggcgcggaatttctctagtcagcacgtgaacttcgcactgccctccgaggaagacatccctgatgatcctgccattatcaggtggctgatcgtcttgtacacgctgatgctattccaggcgagcgtcgcgtttgttccgcgtaaagagctgacccatgagatgttggaggcggccaagcaccggatggaggagctctccaagatgatcctagagctcttcccggcgccaaaacaggggctggatctctcttctggccctagaaacgatgatcaatccaaggcgcataccgtcaagcgtgatcttgtggcgaagtcttcgtttgagatccctcgcgggagctag

SEQ ID NO: 510243 - DNA, 393 bp, Stenotrophomonas maltophilia
gtgagcgacaacgcgcacctgttggaagccttcttggcagctgacaccgtggtcgtcggcgcgcctatgtataactttgcactgcccactcagcttcgcgcctggctggatctattggctgtgcctggcaagacgttccgctacaccgagaccggcgctgaaggacttttgtcgggcaagaaggtaattgttgcttccacccgggcgggctctacggccaaggaacgccatcagaggcctttgatcatcaggacctatctacgcactttcttcggcttcctgggaataagggaggtgaccttcgtacgcgcagagggtctgggtgtcggccctgaggtcagggcatcggccattgaaggcgccctggccgacgtgcagcggatcgccgcctga

SEQ ID NO: 510244 - DNA, 393 bp, Stenotrophomonas maltophilia
atgaatgtgactgacccaggccctggcatcaggagcgtggactgccaaaagatcagccaagtccttgcccgcattggggaaaagtggagcgtgctgatcatcatgcggctggccggcggtccccagcgctttaccgaactcaagcgcgccatcaacggcgtgtctcagcgaatgctgacgctctgcctcagagggcttgagcgggatggactgatcaaacggacggtaatcgctgtgatgccgccgcacgtggagtacgaactcccccccctcggtcgctctctgacagttccagtgactgcgcttggaagctgggccagggatcacctgcaggcgatcgaccaagcgcgcgaagcattcgactccaaggaagctcagcactcgcaggactga

SEQ ID NO: 510245 - DNA, 903 bp, Stenotrophomonas maltophilia
atgacgcggcaggcaatcgtcacttctcacacgctgggaaccatttacgcccaatcctccgtcatcgaggacgtctcgccgttgctcgacgagcaaccgatcaacattgtgggcatgttctacagccagatgatctctgccggcgttagaacgtttcgtcttccggtgaagacatcagaggcataccgggatcttctacccaggcatgtcgccccgatcgacctctctgatcaggttgaggtcttcaacgccctcaagactgccgcctttgcgagcaatgatcccaccaggcattccaagcaggaacttcgcgatgtatccgctctggtcgtttgcctctccgagatctatgtcgcggccaagtacaggatgccagtcgccacctctttcagcatccccacgcttggtccgatcgagcatctattacgcgaggacttcctgatcgttgccaagagcctgttgggcgaatttgaagtcgtggcgtcgaatcttgctgtggtaaaagctagcgcgcccgcatcatctgccgacgcattcgtccagatcatcgattctgggcttttcactcagtacgagcgtgctcaagctgctttggaaggatcttcgcacgatcggggaagcgttctgacagggatcggtgagtctgctgcacgcctagttgatcgcttcccatccgtgctctctgcgcagcaagcggggatcactctggtgaacgctgttcctccaattgccgagaacgcctttggcaaggtttttggcgcgctggccaagccatttgctgaagtgcttgcggagatgttgggagcgcagcgtcgggtagtcctctactctttcgagccagcgtggaaccatgtgtggcaatcgaagttaaagaagatcgcagaacgccttcggccgagctaa

SEQ ID NO: 510246 - DNA, 432 bp, Stenotrophomonas maltophilia
atgaagccaaccactctggccttggacttggagggcaccttgatctccaatgctgtgagccaaatcccccgccctggactctacgagtttcttgaggaggttcgtggccagttcgacaggctggtgatgttcaccactgtgccggaggcacgtttgcgggagatcatgggcttgttggtgcaggagggaagtgcgcccccctggttcgctcagctggacaacattgcctggtctggtgccactaaggacctggcgttcgtctcgccgcggattggagaggttctccttgtggacgatcatggtgcctatgtccatgctggacaggagccttactggatcccgatcccgctgtttggggcaccctatgaggcgggggatacgggtcttgccgttgctttgggcctgattgcagggaagctggcagcctactga

SEQ ID NO: 510247 - DNA, 594 bp, Stenotrophomonas maltophilia
atggccaaggcacgtgacaagtcgctgccgacgtcagaacgcctggagcaactgcgcctgatcagcgagaactaccctaaatcctccgaagcgaatcaggccacggtgcttcgcccagaactggagatgcagcgcaacaccgaacttaacccggtgggacagcagtggtcctatgcaatccaagaggacggcatgtccggcaagttcatgcgcacggcatctgtctccagcacgaacggcttccacttcgattttccctacgaaggtcgccagcaggctcggctactcatccggcggcaccctcgctggggcaatgatgtgatcctcagtatcgaaagaggacagatcctctgcagcagctatggtggctgtccgatccgcgtgcgtttcgacgatgaacctgcgcggaccttcaaaggcaacgagcctgccgacaacagcagcgaaatggtcttcatccccggctatgacaacttcgctcgcaagctggccacggcagagcgcgtgcgcatcgagttcaacgtctaccagcagggcgctgtggtggctgacttcgatgtcagcggattcgatcgcaagcggctgacacagtag

SEQ ID NO: 510248 - DNA, 423 bp, Stenotrophomonas maltophilia
atggacacagcgttcccacaggcccagagcatggaaaagccgtttgcgagcaacgatccagcactggcagagccagggctacgcgcattcaatcaggtggccaaggcgtggtcgctgaccgcgtctgagcagtctgcattgctgggtcagccgatagacgtcactgcgctgcttgcacaaccgggctctgtggaaggcgtgggcccagagatgctggagcgcattagctacgtgctgggtatctatcgcgcgctacacaccttgttcccgaatcgggcacaagccgatggctggattcgccggccaaataaggccaacgcattcgagggggcatcggctctgtcgcttatgtgtagcggacgcctggaagacatggcccaagtgcgtagcttcttggaagctggaggtcaggtggacacctag

SEQ ID NO: 510249 - DNA, 1962 bp, Stenotrophomonas maltophilia
atgaccgatctgactgactttcctgacgactcgcgcgtctacttcatccgccacattgacggctacacacagccgcacaaaggcacggagtccacatccgttcgatgctacttggcccccattcccccgggatggggaacggtcccggaaaagcttgatgaccggcagatcgcccggctcttctccgacaagaaccgtgaaacgttcatcagcaccatcttcgttggatcgcttgcgaccttcgtggtgggtcaatgcttcattcgtggaaaggacggtggcggcgtttacgccggaatgttgacggcgaagcagagaaagcttggcaatgccttagccttcggtgaggattcccggatctacagggaattcgaggacgaatcagagaccgagctttacccatgcactgaggttggtcgaggttccacgggcgagcgcatcttggtgctccccgagagccagctctatctcagcgatttgatggcctacgccaccaagattctggtagctcgggacacccgaagtgcagacccgcgacaacacgtggagtacatcatcccaaggacggtgatctttcgcgccttctacgcgttcagctcgactactgcagacatcttcaccgcgggcccatgggatacggtcaggtcacaggcgatctccgaagaggagtttgcagggcacaagactggaatcaatgaggttaccggaagctggacgatcgtcctcgctctgggcatgactttggatgatggcccgatcatggcgctgtaccgctttgatcgctatgcggagtcgaaagccaaacggatccatgagcctatcctgcagtcccaacttgacactgcgctctgggctggggacctgacggtatggtgttcaaacgcggagataccgctaaacccaagctacgggccctaccgcggcactgtttctggctacttcttgaatcgccgcaaggacggtggattcgccggcaggaccttcttggtgacggccattcatcaggtgagctttcccaagcaattgccgaaaattgcccccatcctcgtcaatgactcgaccgagggcatgaaggtgatccatacggacgcgcccaggccgcatgacaagcgccccagaaatcgtaccccgcgccctaatggcacaccgtcagtcgatacacgtgaggccactgagcaaaagccagggttcgacatgccgtcgatctcctttgccttctatccgaggccgaagatcatacggctgaagaagaaccagagcttcaagtacaactcaaaacggagcaaacccaatcaagagcccacaactgagatttcaggtggacggaagagcgggaagcaggaagatctgagccacgcccacagcgcccatgagaagcgtgatccatcggaacttcttgttggcctgatggagattctcaagaagctcaaagcaagaggcaccatagctgagtaccgagtcgtcgcacctgtagcctcagagcagcgagtacaggtgggcggctacgcctgctggaattttttgggcggggatgagcgcaaggcgcttcgcgccggcaaggctgaatggggcactcgatcctgggtgtatctgcagaagggaaactcacactacaacgcactggcgcgttcagcgtttgtggtgagggtgaccctccccaatggcacgagcggtctgtggatcgagattgagcgaaggatcaaggaggataagaccaaagagtccatcgcctcggcttttgccatttcgagcaatcttgccatccaagcagagacggaagcggcgctcagcatcatccgcgctgcccatggtgtctcactgagcaaggcattcgagaggaaaggcaaagtgtgctacacccacccgcactacatggagaaagcgggtagcgagaagtggagcatggccccactggagagcttcttcacctctctcggagaccaacaagccaccgccgaatag

SEQ ID NO: 510250 - DNA, 1002 bp, Stenotrophomonas maltophilia
atggccttagcgatgctggagttgagcatcaccccttccggtgacgtgctagagcagctgctcgtaatcacgatcgccgaggcggccactatgaccccgcggatcgggagtggtgcagtcagtcgtattcggctgctcatacaggtcgacgatatgctgcccggggttccgtccactcttcgtgcccagctggagcacgcagcctcatgctgcttggagcagctcgcgcggcgagacagcgaaacggcgggcgattgggctgcacctaccgcagtgatatggcgcgacgatcgcctgcataaactaaagacccactcccttaaagacagcatttctgcctggctgaggcaggcaggatctgcagacggctctgtactgtgtgtgcttagcgatctgtcggcgccggacgtggtcacaatcgggtgcagccagcaatcctgcctcccccggctgcgcgatagcgtggtagatcacatgcagcaccgctaccgacctgtggaagacgagcatccgatctctggtgaagtcgatagcgatgacgcatccctcaaggctcgatcgcccgctcagaagatacttgccgatgccgccgcccagcgggacttgctagcggcgcagtggctcagcgccgaggaggttggtgccaggctcgatgcgaggagcaggaattccggtcaccgcgctagctacctacgcagcgagggtcggttgctgggcgtgtacgttacgcatcccgtacctagctaccgctacccgccatggcaattccatcctgatggtcttccggtaagccacttgggcgagattcttgcgctgttgcgcgaccttggcccttttcaacgcgaggtggatggcttgcgtcgtaccaccgggtggggggaggtggagtggttcttgtctccgcatgcactgctcgacggggccgcgccagccgaaaggctggttggggatcccgccagtgttctgcgcgcagccaaagttgagttcgatagcggcacttga

SEQ ID NO: 510251 - DNA, 804 bp, Stenotrophomonas maltophilia
atggactcgttcgcccctcccctgaccagtcaatgctgcttgtgtggatccacccaggcactctcgggagaacacaagatcaaggcatctgccttgcgctcaatttttggggaccgcaagacagtgatcgtgcgcgagggtgggcggagccgtcatgcccaaagctcgaaatccaaggcttaccattacgaggcgcgggtctgcgaaccatgcaacagcgctaggactcggcccgcagatctggctttcgattcgtttaacgcagccgcttcagaacttttccatcgcggttcagatccagccaacgtctttgatgaccccagatttgatgccgagtcaggcgagctatatctggatgtattcaggtacttcgccaagttgatgtgctgccacctagccgagatgagcgccccctacctccaagggctggcagatttcgcgatcggcagtagcaatcacaacgtcatctacctaggcgttggtgtagatgtcgcgtatcagcgcctgcagagcgaggcagtatcgaccgcctatgctgctcatggcggcctagttgttctcgctgacaagaccacccgtgaactaacgtccttctattccactctcaccattgggccggtgcgttactgctactacgtcaggtacaacgagctcggcctgcaagtgctgatgaatgactatcctgagttctatgcatggtgcagccgcaggatcgcagaggccatcatcacgcccttgagcgcaaatgatagagagctactcgggctcaccgcagagccacagtccgagaatctaccgccgtaa

SEQ ID NO: 510252 - DNA, 906 bp, Stenotrophomonas maltophilia
atggtcaaaggcgccggcatggctcggtgtgatgcatgctctatcgctgtgcgactccggcgggaggtagccctgaacgcggcaaccattgagcgggagtgggtggcatctctctacagagcgttcggtgaatggttgttggtcaaaaacgttgctaccggtgctttgccaaaagtcgccgtgcgcgctgtctcgttcttccgagccatcgatctggatggggacacccatcagccaatagtggcagcggacctgctcaggatcttcgattccaagcagctcagggcgtacctcaacgtcacacgcttcatctgcgagcgctacgggtttcagattgatgaaaaggctagggcggcggcgcgtgaccaggcgctgatcgagcgtggactgcaggagagtgcatccaagccgtgggcggggtatctgactgactacaaggcatggctgatgggtcggccgagtcgaacccaagcccagtaccttcgtacggcacaggccttctgtgagtcgattgagctgagcggacctttcacacaggagcatctggtgaagtacttggtgtcggcgccgggctcgcgcgccaatctgagcgtctgggtgagtttcgtgagaactcagtacagctggaccgtcaccatgccgcctaagcttgctcagaagccggcgcttaagcgcgacgcattgaccctggtagatctgttgcagcgtgtaagcgtgccaggttctgcaacggatgaggacctcgctgccacggtcgctcttgtctatggttttgacttgggtgcactgcggcggcaggtggtgggggtcaccgacacgggtgacctgaacactcgggacggcgtggttgtcgtgcagaacgagcttaaggagatcgtggccgagtgggcacgacgggtcttctag

SEQ ID NO: 510253 - DNA, 1035 bp, Stenotrophomonas maltophilia
atgcgtatcgtctggccgccccaggtgccagacgaactgctctccagctacttagcccgggtttcaatcgcgtacggcacatcgccccagaagctcatggcgctctacgcgcctggatttcaagtctggactagggacattgatgtttgcgcgcccgaagggctcctatcctgcctgaccgatccttcaggaaaatccctgcagatgctctatggactcacactcgttggctggaatgaggttacaaagcgcagatgtgagccacctcgaggggtctatcactggatcaacagtatgggcatctaccaccggacccgcctccggcacggtctaactttctgccctgagtgcctggagcagaatggggcctatctgcgcccctggagactgtccttctggaccgtctgtccgttgcaccaacggttactgcaggacgggtgccccaactgtggggtagtgattcagccacaccgccatggatttgatcttcgtatgtgttggaactgcaatcgatcattgactactgccacctcgccggtgttggacgtcttgcccgtacagtctctgctctttagatgcctcatcaatcccacccgggactttgagttcagtggccacacctgttctggctcagaggcgctgtggggagctgacacactcctctcagcgctcaagccactgtggcggggccttggtctggcatcggagcggggaccacggatagagatgcgccgggtccaggaacgctacacggacatgcgcatgctcgaccacctactaagcctggggcctgctggcctgctgagactggcccagtcgatgcgtgtgacccagcgttgctttcggcaacagatgccagcttggataggagggattgcagcgaacctgcctgaagggcgcgcccgtcgcgcagtgagctcaaatcggtcggagctgaggtccgtaggcgaggctcagcgaaggcgccttggcggctggcgagaaatgagagcagctgtactgttgaaaatgactggaagaagtaatgagtactga

SEQ ID NO: 510254 - DNA, 1200 bp, Stenotrophomonas maltophilia
atgtccgccttggcttctcccgcaacgacctcacgtccggtggctcccggtgtgctggcagctatttccacctcgcatgtcgtcaacgacatgatgcagtcgctgatcctggccatctatccagtgatcaagggcggcttcaacctgagcttcacccagatcggcctgatcacgctgacctaccagctgaccgcttcgatcttccagccactggttggcgccgccaccgaccgtcgcccggcgccgtactcgctgccgatcggcatggcctcgaccctgtgcggcatgctgctgctcggcttcgcgccgaactatgcggtggtgctgatggctgcggcgatggtcggcattggttcggccattttccatccggaagcatcgcgcattgcgcggctggcctcgggtggccgccatggcttcgcgcagtcggtgttccaggtgggtggcaatttcggtaccgcgctcggtccactgattgctgcagccgtgatcgtgccgcatggccagcatgccgcgtcgtggtttgccggcgccgcgctgatcggcattgcactgctgacctatgtcggccgctggtatgcgctgcacctgggcaccccgcgcccggccagcaccgcctcgatggcgccgcgccatccctcgcgcaccgtggccaaggtgctggcgatcctgctggtgctgatcttcagcaagtacttctacatggccagcatcggcagctacttcaccttctacctgatccaccacttcggcattccggtggcgcaggcgcagctgcatctgttcgcattcctggtggcgtccgccgccggcggcttcctcggcggcccgctgggtgaccgcatcggccgcaagccgatcatctggacctcgatcctgggcgttgccccgttcgccctgatgctgccgcatgcggatctgttctggaccacggtgctggcggtgctgatcggtttcgtgctgtcctcggcgttctcggccatcgtggtctatgcgcaggagatgatgccgcaccgcatcggcatggtgtccggcctgttcttcggcttcgccttcggcatgggcgggctgggtgctgccgtgctcggcctgctggcggacaagaccagcattgagtacgtctaccagttgactgcgttcctgccgctgctcggcatcgtggcggcgtggctgccgccgtcgcggcctgctgttcactga

SEQ ID NO: 510255 - DNA, 864 bp, Stenotrophomonas maltophilia
atgaacgatatcttcggcgatatcttcggcaacatctttggcggcggtggcggtggtccgcgccaggcgcgtcgcggcgccgatatcggctacgtgatggagctggacctggaagaagccgtgcgcggcgtcgagcgccgcatcgagattccgaccctggccgagtgcggcgactgcgatggcagtggctcggaagacggcaaggtcgaaacctgcaatgtgtgccatggccgcggccaggtgcgcatccagcgcggcatcttcgccatgcagcaggcgtgccacaactgcggcggccgtggccagatcatcgccaagccctgcaagacctgccacggcaacggccgtgtcgaggaagacaaggtgctgtcggtgaaggtgccggccggcgtcgataccggcgaccgcatccgcctgcagggcgagggcgaagccggtccggccggtacgccaccgggcgacctgtacgtggaagtgcgcgtgcgcgagcatgcgatcttccagcgcgatggcgacgacctgcactgcgaagtgccgatccgcatctcgcaggcggcactgggtgacaccgtgcgcgtggcgaccctcggcggcgaagcggagatccgcattccggccgagacccagaccggcaagctgttccgcctgcgcggcaagggcgtgcgttcggtgcgcagccgcagcgagggcgacctgtactgccgcgtggtggtggagactccggtcaacctcacccctgagcagcgcaagctgctggaacagttcgaagccaccttcgtcggcgaggaagcacgcaagcattcgccgaagtcggccaccttcatggatggcgtgaagggcttctgggaccggatgacgtcctga

SEQ ID NO: 510256 - DNA, 675 bp, Stenotrophomonas maltophilia
ttgcgtgcgaatgtcccccggcgccggcctgcggccgtcacctcctcctttacttcgcacacaagcccctctccccccgcgcatcaggcatccacgcggcccaggcagtggctctggactgtccgcaagccgagccgctgcgtgggtggccggcgtctggacaaagtaaaggaggaggcgaccaccgcaggcggacgacgggggacatttgtccagacgcctgccacctgcgcagcggcccagaccttcgcggtggcagttaccgtagacgcaggcgtggtcgagcgctggagggagcgggggctggctgcgaatgtcccccggcgccggcctgcggccgtcacctcctcctttacttcgcacccagcccccgctccctccgcgtgtcaggcatccaggcggcccaggcagtggctctcgactacccgcaagccgagccgctgcgtgggtggccggcgtctggacaaagtaaaggaggaggcgaccgccgcaggcggacgacgggggacatttgtccagacgccggccacccgcgcagcggcccgaacgctcgcaatgagagtgatcgaagctcaacaaaaaaaccccggtagatgccggggcttttcgttcggaacggcgcgggcgccttacttcttcttcggcatgtacagatcggtgatcgtgccgtcgtag

SEQ ID NO: 510257 - DNA, 552 bp, Stenotrophomonas maltophilia
atgagcattgcagagcgatggactctagggaatatcaatcatgtggataactggctcttcatagatcctcccgtcaacttcatggaacctgggacctacagccttgatctcgtgaattgtggggttgaggtcgattactctcttgccgggtatgcaagtgttccagtggtaagtgcgagatttcgagatgcgcttgttggcttgcctgagttcgatgagccctatatgaatgtcgttgtcgaaccattgatcatcgagggtcaggatgttcgtggcgagtactctgtattgatcgtggagacgcgcgttgactgcgtagacgaaggtcgttccgatttcatgaagtttgaagaggatgatccggtcagaccggatctctcgggtcagtacagggcgttcacgaaactcattgtcgatcgagagaggatcggcgcgaggcatattttccgaatcgagaaattcatgggcgcgttgatcgtgagtgaagaggtgaggcgtcgcctggatgaggctggggtggttggtgcggtctacgatcctgttactgaatga

SEQ ID NO: 510258 - DNA, 894 bp, Stenotrophomonas maltophilia
atgacccagaaacactctagggcggcattaagtcgcgactccagcgagcgtgctcagcggctgcttaacctgcgagcttctattgacggactaggtattggcgcgggctttgccagcgtaattggggcaattctactttcagatgctctcggtcttccgcgcactctaatgatcagcgcgtcggcgatcatcgcgggtctatgcaccgccgacattgtcagcctataccttcgcggaaaaatcaccctgggaagtactgcaacggtgaccatcactccgatgagggccaacagcctcacggaagaagaaattgctgatctgcgcaacgtgttgagcgacttgggcagtagattccgcgagtcagcacaggatgatagtgcaggtgcagatcggctactacggcattcgcgcgcggtcattgacgaagcgagaaagcgtttgctcgaaaatgcttctcaaatcaataagcgatctcaagtcagcctggtaaccggaagcggcatcgcgatggtggcggttcttatcctccttgcgtttgcgttcccacccattcccatgtattcgcttcggtgggagcaggtgttatgggcttatctgccaaaattgggtgtaattgtgatgttggaagtgttcgcgttcttcttcttgaggctatacagagcgtcgctagtagagtcgcgtgccgttcatgctgatttgaatgctttggccttgaaggaagctgcactagttgccggctgggctgagtcagatcaacaacgtttgcagcttgcaacgactattattgaacctgtgcctgaaggctatcgtcctgccgatgattccagccaaggcttggatcctaaattggttgcggatctggcggcatcaatttccaagttggtacgcggatga

SEQ ID NO: 510259 - DNA, 243 bp, Stenotrophomonas maltophilia
atgctgaaccacgtggtggacccacgcgcgttcaaggttgccggggagattgagttcccaagcactgtgaggatgaaaaccacccgcttaggcaccttgtgggaggacgtcgtgaagtcggcatcttgcgcattggcaatgaacccgacaggctcgccattgcgagagcagagcatcaactccgcacccggttctcgcctcttgaacggcgttgccacggccccggcctcccatttcatctga

SEQ ID NO: 510260 - DNA, 1680 bp, Stenotrophomonas maltophilia
atgggcatccttgcccaagacggccatttgctcgtggagggtggccctggctctggaaagacgaccattgcgctgctcaaagctaaagcgcgcacgaaaacgcttcgacccggccagcgaattctcttccttagcttttctcgcgctgccatccgccaagtccttctacggtgtaaagaactcctcacctctgaggaacggtccttcattgaggtccagacctaccacgcattctgcatgtgggttctgcgctcccacggacgtcttctgcatgggcatccactgcattggctgtatccgagggaagagcgcctcagaaagtcgaattttgagggcaattggttagaggaaagccatcgcctcgcacaagatgagggtatctacagctttgacctattcgcaagcggagcagcgagcttactggaaggatctcaagctgttcgcgaactcatatcagatcgatatccgatgatagtggtggatgagttccaagatacggacgaagatcaatggcgattagtccaacagtttagtcacgccagtgacattttttgcttggctgacccggatcagcgaatatttgactaccgcgcaaatgtggaccctagacgcgtgaaattgctgatcgaacgattggcaccaactatattcgacttgggcggggacaatcatcgcagccccaatgcggggattctagggtttgctgacgcgattctccacaatcgagctccgctacctcaaagtcgagacgtaaagttacatcactaccggcctaatacatttcaaagctccgtgcatgctgcggtgatgtggacatttagcgagctccgaagacgtgatgtgattagcccaactgtcgcagtactggctcgaagcaacgctttggtcgccgagttgtcggagattatttctcatcctcacacctataatgggcaagagctctcaccactgactcacagtgtggtctgggatgcggaattgtccgcggcggctgcgcttgtagtagcctcaattctggaatggccatgctcacctgacgctagcggcttgaatcgcacactaatggcggtttcgaactattacaaattaaagcatgcagaagagcagacgcagactgcttggagaaaagcagggcagtttgccgaggccgctgccaaggttacgcaaggccaatcgcccagaatcctggcggggcggcagttggaacagagctatagaggcccgttgattttgaagggggacccagtcggagattggaagctcgcacgcgcggttatcagcgggattgatgcactttctgacatttcaagggatgttcggcttattccattgttccgagcatccgccactcttggaggtagcttggcggagcgctggctcaatcagggaagttacctgggcgtatcacggcttgtacagcgcgcactcgatcaagacaaactttccgcagcggagcgggacccgcaggggtgcatgctaatgaatattcataaagccaaaggcaaggaatttgatggggtcgtgttggtcgaaggcgccttcaagggcgcatttctggatgaacggacggaacaagagccattcgagcgaagccgacggctcctgcgtgtaggcataacacgcgccagaagtcttgtgaccttggtgcgcccccatcaatctcggccgctggttgactag

SEQ ID NO: 510261 - DNA, 1842 bp, Stenotrophomonas maltophilia
atgcgcgttcgacgcttagagcttcgtaattttcgcggaatctccgaaggccgggttgatttcaacggccacaccctactagtcgggggcaacaatgttggcaaatcaactgtctgcgaagcactggacctcgtcatggggccggagcgcctgtttcgtcggccaataatcgatgagcatgacttctttcaaggccgctatctggacgaaggaggtgcgtcgattgatattaggatcgaagttatactcctcgatctctcagaagaggccttgcggcgtttcggcgggcatcttcgacggtggaatgacgaagacaagtcatttatcgatgaaggcggcgcggcgcttaacgatgctgatgctcccaatgtcgtgtgggcattgccattagttttcattggtcgctatgacagaagcgatgatgacttcgtcgggaacacattctttctccacccagaaccagagcccaccgaagaccctgatgaagaacctgaactgggcgccggcctcacgcgcttcacacgggagcataaacggctttgcggcttcgtttttctgcgaacaatccgtaccggatctcgtgccttaagtcttcagagaggttcgcttctagacatcgtccttaagttgagcggtgatggggcgccgcagatgtggcaggacacattgactagactccaggcattagacccagccgttggagacattgagcagttacgagagattcgggacaaaattcgctcccggatgggcagatttgtgaacctgccgccgggagacgaagcaaccgcattcttcgcttctgacctgacaagagagcacctaagagaagtagtgcgactctttgtggcaactgagcctggctctcacctcgtcccattcaatcgccttggcaccggatcggtcaacctacttgtgttcgcactgctcaccttcatcgcagaactaaaggatcggcactccgtcatctttgcaatggaagagcccgaaattgcgcttccccctcatactcaaaggcgagtcacacgcttcgtgctatctgagatgggacagaccattgtcacatctcactctccctatgtgattgagcgatttgagccagctcaaatcgtcatgctgagccgcaatggcgatggcagcctatctgggcagcctgtcgatgcggatgaccttaagcctaaaacctatcggacgaatagtcggcagttcgccgaagctattcttagtcgtgccgtcttggtggtagagggatcaacagaagcatcgttgcttcccgttgcgtctcagatcatggaacagacgcttggggctgacgcgtattcacacctcgatttagacggggtcagcatcttcaatgctgatggagatggggcggtaccgcgattcggccccgtgttcgcttcgttaggaaagctctcattcggtttctttgataagccgaacaacccactcaccaatgatgcaaagaccaagctggagagttattctactttctgggaagcgccagaaaaagggattgagaatgttctcctagcggaatctcctttcgaggtggtaaagcgcttcatggcccaagcgtcgcagcgagaggatttcccggatattgccccctacaatccagaggcctcgcaggccgatattcttgaactagcgcgaaaggttctgaaggcaagaaagggcgaagcttttggctatgccgccatgctgattgcccaatgcgagcacgcagatgagttgcctcagacggtccggggcatacttcagtcgattcatgattcactcaagggcattcccgaggtgggagagcccccagcacaactcgctccaggtgaagatgcttga

SEQ ID NO: 510262 - DNA, 645 bp, Stenotrophomonas maltophilia
atgggactcaagcatgcgtacgattcttctgacgctgggcgtagggcggttagcattttggactggctggctcgtcaccgtggtaagacgccgagatgtttgatctgtaatgaagatttgttggttaaaggtgagcactcactacaggtggattgctatttttcccaccagatgaattcaagttgccctacgattttatcgaagcctccgacttcgtacttattaaatgccccgatgagtcctggagcatcgcacgcttcgcgcgactatgcgcgagaaaatttgttgggcgtctatatggagatgcgtggtctggcgaagggtttggggtggcttgatcttgagacagcgtgtgacgttgctaaacaaaagaaggtttgggatcttgtaggaatcacccctgagttcctgcccgccattttgctgtcctgcttggatgtgtggactcctcgcggatcaaccgggcccgtaacttattttttggagcccagcgcaactcctggaagtcattggaattttggtggcgctaagaaaagtagattgtatgaggtcgatataaagaccggtgatataaaagttcatccgattggcgtgaagctaccgaaaagtaatgtcatttctcgaatagagaagctgctcatatga

SEQ ID NO: 510263 - DNA, 243 bp, Stenotrophomonas maltophilia
atgtcttctacttcggccggtaaaaataaggtcaggttgatcgtggctcttcagtgcaatgatggaatcatgctgcctttggagcaacagactcagatctattgggtcgtgcatgacgtgtatccatttcagttcgtttgcagcggagataccgccgaagaggccatgagagtggcgcgcgaagaatgtggctgctacttcgccggggatccagaagatgtgcggattggaatgaatatctag

SEQ ID NO: 510264 - DNA, 480 bp, Stenotrophomonas maltophilia
atggatatgaggtgctttgcgttgctgggtcttctcaccattgcctcttctgccgaggctgcgcccagcctgtcttgccaactgcagagtggccagttcagtgcgggcggggtagggcatcccaaggtctccgagttcgtctgggccacgggtcatggctccgcaacgcccactggacccatccgaaccaggatcggccgcatcgaacctgtggaaggccgggactacaagcgcgctatcaagctcgatggcaagccgatgctgctgcctaccgaagcgcatagcgtcattggcttcggcaaggtctacgacttcgggcgcgccgttgccttggcctatctgggagagcgcgatgaagactcgtccgcccggcctagccagatcgtcatcgtcatcaacaaggccgggtcagtgatcgatagcgaagtgctctctggcgcgagcctcaacccgggcaagcactgcttgctcatcgactga

SEQ ID NO: 510265 - DNA, 762 bp, Stenotrophomonas maltophilia
atggataaacatgatgtcgatggagcgataacaggtgcattggcttcttatcgacggccaaccctccacgcaaaagtcaacctatttgcgatcagatgctttcgggatatcggagatggtgattacatcgcggccaggttagcaatgcggtcacgtctctatcctcaatatttggcagcggcagagcaggcagttgaaaagtacttgaaatgcatcctaatgctcaatcgttgcgacaccaggggccttggtcatcggatacaggacgctattgaagccgttcggtcttccctgtcaatcaagctcgaactgacagatgtggagttggaggcttttgggaatctcgtgcgctggaactttgatcgttacctgattcgctcataccaagttgaggatgtggagctcgggggttttgacctcctcgtctggcgccttcggcagtattgtgagcctcttgacgttgttcattatgcggattcgccttctgcggagttgctaagaaagaacttggctgagatcgagctccgaaagatcggctctcccaaggcagggcatctgcctaacggtgatcttgagaagatattggcagacaagaagcacccggcaagggaagggttggtgtggcgcaacttgcgatacaacaatgccaatcgacagcggactcgcatgtcttcaggatggcgagtggtaaactcgccactcgacatgaccgatgaccaagctgtagtggatgaggctaagcgttggatgaagcttgcgtaa

SEQ ID NO: 510266 - DNA, 669 bp, Stenotrophomonas maltophilia
atggctctattgccggtctggacaatgatgtcaaacggattcgacgcgtccagtgccgagttttccagctttttgacatcaaaagctcaagtcatgtctgatgctagtgactttaacttctacgatgaatgccttcttgaaggattgctctcacgctcctggcaggaatgggccaacttctgcaggtctgtcatcgtcctttcctgcatgggggcagacacggcagacggcaccccgataccttcccatccgcaagccctcagcgaacagcatgttggtggagcagcagctagagcaaaagcgacggacaaaccgccaacgtgggggaaattggccgatacgctccgaaaggaaatgatcacctggggcgataccgatgtccttgcgacaatcctcccgcgcatgggcgttcctcgttacccccatcttctcgcggcattttcgcaagctcatgaaagtgctaaagccatgcagactatccgaaatgcgtctgcacacttcaatgccgaaaccatggcggaagtcgttagcctaagctcaaaatattcggcattccagattacccatccaactcaagcgttgttttggacagttccatcctccggcgactatcttttccgacacgccttggaggatctaaaagaaaacgcatcaatcgccatcgcatag

SEQ ID NO: 510267 - DNA, 1053 bp, Stenotrophomonas maltophilia
atgaaggttgaagaagcgaaatattctatcgccgagctacgtgcatggtttttggacaaggtcctaacggtcaacaaagactatcagcggtcatcgggactgtggcccacggctgccaaaagctacttcatagacagcattcttcgtgacttccccttccccaaagtgtatttccacgaacggctggacaaggctcataagcgccctcacagagagatcgtggacgggcagcagcgtctgacgacaatctttgatttcgcggaagggaagttcgccctcgggcgcaatgcggccgagttttccgggaagcgccttagcgacctaccgccggaaattcaggacgacttttgggcttatacagtttccgtcgatgttattcgaaacgcggaccgtacaaatattctgcaaatgttccggcggatgaacgcttttacgctcccgcttaacgccgcagaaaagcgccatagcgagttctatggagagtttaaggactgggtcaatcagatccttgatctttatggttcagttttggttgactggaaggtctttacgaatagacagatcgtgcgaatgggtgatgcagagtttgtgaccgatgtagcgctcgccgcgagcgagggaatcgttagcacgagccctaaacgcctcaccgagctctatgcgaagcatgaaaccggcgacaacgggctctccgacattgattgcaaggtgagtggtgccttcgatgttctccgccaacagctttctggaatccaaggaagctatgcaacaaagcctcacatgcttcactcactgctaacggcactcatgcacaacaaatttggccttccaggcgtcgctgaagacacgggaatccaatctacgggagattggctcgctgacccgcatcgctccacgagccagatacgtgagctagcagaagcatttgagacgaagagccttgatagattcgccgccttcgtcggtgcttcaacggagggaggaaatcgcgcaccgcagaggcaagtgcgagttaagtggatgtgcatggcgctccaaggggatcttccctag

SEQ ID NO: 510268 - DNA, 1569 bp, Stenotrophomonas maltophilia
atggccatctatcacacaagagtaaagaccttcagccgtgcccaggggcacgcatccaccgccgccgctgcctacagggcggggctgctcatcatcgatggccgcaccggtctccggcacgactaccgaaggcgtgggggcgtagtcgaaacccgctgcctggcgccggatgatgcgcctgactgggctttcgatcctcggcagctttggcccgcagccgaggcctcagagcgccgaaaagacgctaccgttgcccgcgagttcgaggtggcgctgccacacgaactgagcaaagagcagcgttccgatctggcggctgagatttcgcgctgcttggtccagcgttacaggttcgctgtccaatccagcatccacgagccgcagaccgctgacgggctcaactaccacgtccacatcctagccacgaccaggcggatggacgcagacgggttgaaggataagaccagggagctggatggcggcccttcaggccgaggggaagtcgaatggattcgcgcgatggtgggggaagccatcaatgctcacctggccgcagccggtgtttcgacccgtgtggaccaccggagccttagggaccaagcggcggaggctgcagagcgaggagatgagctcacagcggcggagctttcccgcattcctgggattcatatgggaaaagatgccactgccttacaccgccgaggcgtggataccgatttgaaccaaggcaatgaggagattgatcaggccaacaacgctgcttgggatcgcgccgtggctcagatggcagaagagggcaggttgatggaagccgcatccgatcaagccgtgccggttggctcgcgccaggttccactgcgccctgtcacgcaaccaatgctgtctcctggtggagagactcgtctgggtagcgtggcgagggaagtcatgccggttggggcggttgccgatgaaggggcgcggcaaccgcaggccacagcatccaagcaggccctgaaggaagtgttggagatgtgggccgaggcgtggatagaggcgctgcgagataggctcaaattcacgcgaaggttgctgcgcaacagtgctgccttgatatctactcatgtcgcggcgcctaggctccgtggcgacttggaagaactgcttttgcggctgaagaagctgaagcgggactctcttcgcttcaagcgtaggctgaaagctgaagatcgtgcccagcacgtattggctcaagcagaatttgccttggagaacttcgaaagccagaacccaaggccgggcctcttgaatcgctcagactggtcgcgtcgtcgggcgcgccgggttcgggctgttgagctgggacgcaaggagtatcaacgcgctcacgaagccaccggacccaaggcccaggaagactacaaccgtcgaacaggcgagtcgttgtcgcagctggagaattggagtgaagtgctgttgcgtagataccgggtggaggatgcgcccattgacgctcctgaagcccctattccagcggaccccttgctcgtaatgaatcctgtcagagatcctggagcacggttgcactga

SEQ ID NO: 510269 - DNA, 297 bp, Stenotrophomonas maltophilia
atgccgttagaaagaaagctggctatcgctagtcgagtgctatgccctttgattgcccaagaccggacacgagacacgcaagagcggatcgaggacatcatccacgccctcgaaatcgcggacgaattgatcaaccgatgcatggctccaaagcccccggctgacgaccacactctgaaacctgccgttagggttagagaagccgtggtagaacgcgatcaggtgcagcttagtgacatgatctcagagcgtcgtggcgcggtgtccaagccaactcgcggacctacctaccactga

SEQ ID NO: 510270 - DNA, 735 bp, Stenotrophomonas maltophilia
atgttcttgttgacaaagcggggtctttggtggaaatttgcggacactaggagtgtcaaccggtcccttccaaaccagaggttttgtcaactgatggatactgttcagattctggagcactgcggtgtcaccgagcgccactgtgaggcgctggggcaggcggtccctgaagcctatgcggctctggctaaactggctgcctccactccgatgctcggcggcttcgttcaaggtcgaagaggccttagctatttgagagacatttcagtccagcacgcattggaggcgaaggcagcggagacgaggctcttcttcacctctacggcgtggaatcggcatcgcaactactgcttcttgcagctccaagtcgggcagacgatcttcaccactcattacgcaggagccaacgggagccgagcggtccgcaaggccgcatcgcgtgccgagcttgtgatgcgcacgcctgatctgttcgcggccaccggggaagagcccgacatgagtcttgtggagaagagtgcctacgtacagcttgtgcacgcaggcgtgaccaagccaaaatttgtgttgctgcagatcccgaaccgtgatcagcatgcatcgagactggcgcctctgattttggatatgcagtcgcctctgaagggagctgttgaagaggtgcaagataggttgaatgaggcatttaagcgcaaggccgtagagcgcgcagagcagggcaatcgtgcaagctaa

SEQ ID NO: 510271 - DNA, 816 bp, Stenotrophomonas maltophilia
atggatgcgatgcaggagcacgttgattacgctgacgcagacattccaaagatcccgccggatgtcgacccgttgtcgctgagtggcgatgaggttgaagaggttgctaattcggtccgcaaagagcttggtttgggattggggccaatctccgatgtaacgctgttggtggagaaccgctcgatacctgtgatgcattttccattgccagacggaatggatggactgtcggcatactatggtgagaggcctttcatcgtagtttcatccgacgcgacgcgggatcgctcgcgcttgaacgtggcgcatgaatttggtcacctggttctccatgagtcgatctctgtcgaaggtgagctcgacatcgagacattccggttggtcgaagaccaggcgtggcggtttgcgggtgccttgatgctgcctgcggagtcgttcctaaaggatgtctacagcacctccttggatgcactgctgttgctgaagaagaggtggggtgtctccgtcgccgcgatcattaaaaggctacaggtgctcggcatcctcaaccaagatcaggtcaagtatctgaacatccagaagcgccagagaaactggagtcgcgcagagccgggcgacgatgctgagagggaaacctcgcggctgttccgtcgtgctgctgactacttgtcagctgaggcgggtatcccgctccatcagttcgctgcagaagctcggcttccgctgccaatcttggcaagtgctttggaaacgactactgcggagttgattcctccgcgattggagaatgtggtgcaattccgaccgaagggttga

SEQ ID NO: 510272 - DNA, 171 bp, Stenotrophomonas maltophilia
atggccaagctgcctcccgccgcgctgacctggtcgtttgctgggggcgggttccaagccggcctcgcccccccgtgggagatcagccgcagatgccacgccgcgcccttccacggccccgacgagcgcccatctgtcctctggagcctgcaggcggtgccccatgagtag

SEQ ID NO: 510273 - DNA, 228 bp, Stenotrophomonas maltophilia
atgccggagagcggcaggtggcacgaggattgggtcttcgcaatcaggggcagggtggttacgtgcagggtttcggtggatattccaggcagcggcgagatcgttgcggttcacgtgatgaacggacctagtctcacgcgcctgtcgattccggttctgtcgcagcaggacgcaagagagaagacagagctcctgctctgcgacctcatgggtagagattggtattga

SEQ ID NO: 510274 - DNA, 228 bp, Stenotrophomonas maltophilia
atggagacagaaggctttcgccgcactctcaggggcgtgatcgatggccacaggttcctcgtgactgttactagtcaggcgggggaggtgttccagttcacggctacggtcgacggtgttgccgtcgaggtgagggatcgtggtgtgatccgcaacaagggcgatgctatgcagctggcgatggtggctgtggagcgttacatcgcggaacttggtggaaagtgctga

SEQ ID NO: 510275 - DNA, 309 bp, Stenotrophomonas maltophilia
atgactgccaagcgacccgcgccggccttcgcctgcgacattgccgcgggccctgatcacactgccgttgcagagatcgtggccggcaaggtcaccaacgtccgtcatctgcctcgccaagatccgctcacgaaaaagtcgcaggttctcctagtgctgaaggccggcggacgcatcgtcaccggccaccgcccgggcctgctgcagctgctcgacgccgaggacagcccagtgcctgcctggcaaaccgccctgaaggctgcccagccctcccccgcacgttccggagatacccatgaaccgcagtga

SEQ ID NO: 510276 - DNA, 378 bp, Stenotrophomonas maltophilia
atggcattgccagctgacgtccgcatagaccagctacacgaactactgggggaacaggaaaagcagcgcgaagcgatgaacattcgaatccacgacctggagcggatccaagtcgaccacgcaagagtcatcgagcggttggtctggctcttggacggtgcgcgcgggcgggctgcggtaatggaaaccgtcatccctcttctcctggaatcaagcgatcaacggacccgggatcgcgtgcagacggcacttgagctgcgctggctccaggaccaggctcagggcgcaggcgcgactccgcgctatgaggcgaagttcgagaaagcagctctcgaagttgccccgcaagcatcgcttcctcggcagcacagtcgctga

SEQ ID NO: 510277 - DNA, 177 bp, Stenotrophomonas maltophilia
atgagccggagccggagcggtagaggccgactgccgctgctccagcacgcgcacccggcgttcaagcgcaccaatgcgctgcagcgccgcggtcatgacggtcggcgtggaggctggcagcgggtttacccgaccgcgcttctgatgcccgctattcattgcaccgaccgtgcgtaa

SEQ ID NO: 510278 - DNA, 369 bp, Stenotrophomonas maltophilia
atgaccccatccgaactggaagcccgcttcgccaagtacgacgagcgcattgctgcgttggaggattcccgcgaagccgacacttgggttctccgcgctctcattggcagtcatcccaatttgggcgacctgctgaagctggtgcgtcgaaccatgcaatcaatgcgcgaaagactcgcaaacggagacccagacgcgtactgcgagcgggtcctgagccagctggccgatacagaagagctgattctgaaggtgatcgcgattcgccaacgcaccgcgcgcagccagtcggaatctgtgaagcaacaggctcagacacagcagcgggtacggcaggagcagaaacatgagccggagccggagcggtag

SEQ ID NO: 510279 - DNA, 306 bp, Stenotrophomonas maltophilia
atggcagatttgcagcaacttgcaattgacttcgacgccttccagcatcgcgtccgcgggcagctcgaggcggtcgctcaggacatggaaacagtccatggtgagaaggcagccatggatctgtgggtccatgcgctcatcgcgactcatccaaatccagccgctctgaaggctcgggtccaggacctggtcggacaggtggagcaggcgggcaccccagactgggctcgtcagagacgagactccctggcccgagttcttcagcgatacggcaacttctttgagcaggtgcacccgggcgtgtga

SEQ ID NO: 510280 - DNA, 327 bp, Stenotrophomonas maltophilia
atgaagattgactgggttctgatcctgggaaacaggcttgccatcgcgtgggccattgctgccgttagcgcgtacctatgcgaccgcttctctgggaacagcggcgcgaccttgtactccatcgtgatgatcgggtttgccattaccgtcctcgtggacggctttcttgacgtgtttgaggcagaaagaccccaggggctgccatggggaacaatggtctctttcatcatcattgtgctcagcgcgattgcgatgctcggtctgtggttggacacctactgcaagccgccggggaacaaagctgcttggatttgttcatatatctga

SEQ ID NO: 510281 - DNA, 1074 bp, Stenotrophomonas maltophilia
atgaccattcgcccacccctcattcttgaccagctcgctgcgcgtatcgtcgagcttgccatcggcgatacgatcgacggcaacctgatcgagggctacatcggtcggaaccttctgatcaacggaaacatggacttcttccagcgtggttcagcagggacgcggccagacggggagagcttcacgttggaccggtggctctttgcctctctcggtaccggtacctcaaattggggtgtagggacgttcgctattggcgacgcgctaccggtaccgcatccgcctcgcttcttccagggtgtgaacgtcgcggcaggcaccaactcggcttgggtccgccagaaaatcgagaacgtgtggtcctacgccggcggcaaggccacactttctttctggatgcgctccgctgtcgcaggaaagaaggtcggtgtccgccttgttcaggactttggcggcggtagcggcgcgtcgccagcgatcttcatcgaaggcccggttttcactctaaccaccgcattccagaagtacaccgcaacctttgatgtaccttctctggcgggcaagaccgtaggtgcctcagcggtaaatgattgcttgcagatcatctttgactttgccgcagccagcggctacggcaaccaactggtgggccaaaccggactttttgagttcacgcaggtccagcttgagaggggcgccactgccaccagcttcgaacgccgacctctggctttggaactgatgctctgccagcgctactacgagaaaagctacatgccggaggtcagtcccggcacgattgataaccaaggtagacgtgctttcgcggtgcagcctgctgccggaggcttcctcttttgcacacagggtttccttgtgcagaagcgagtgactccaagtattactgtctatacggctccaggcggggtgcccgggagcgttgcccaagacgacggcagcgcgcgtactgttactgtggccaatcaaggtgtttcttcgttcgagctgcagtggtccaattccgccggacgctacggcggctggtatcacttcactgccgacgcggagatatag

SEQ ID NO: 510282 - DNA, 465 bp, Stenotrophomonas maltophilia
atgtaccggctcacggagaacccggacgtactcctctgcatcgaaaccggcgcgttcattccccgcgggcattggatgtggccctccaaatggctggaatcgcatgcaccactcccgcttccggccgcatacacccttcactcaccagagcactaccgcgcaattcgagcggccgcctgggcatggatgaatgccgaggtaaacgcccgacagtacgacagcatcgagacgtgtgtgggctacttcaacagcggtgttgagcggtaccgtctggaggcccgtgcactgttagcctggcgcgatgcagtaaatcaggcccttgagaccctagtgttgaatccgcctgccggcatcgagacctgggagcaggtgcgtccgctcctcccgcagcctgaggcgttcccatggccggcgagtgtagagctcccgctggaggctggtgacggccccactgctcaactttga

SEQ ID NO: 510283 - DNA, 267 bp, Stenotrophomonas maltophilia
atgcccgatacaggccttttctacgttctagacctttgtgcaatacgcaacgacgatggcaacctcgaccgcgtgaccgcgatcagcctccgttgcaaccactgcaaacacatcacccatgccgaggcgccggagctggagacgatgcccggcggcacgctgctggcatgcgccggttgcggggagcgccaacccgtgagcaacgcccgtctcatggagtgtgaccaccttcttggtcctgtgagcccctccccacaggccgcctga

SEQ ID NO: 510284 - DNA, 600 bp, Stenotrophomonas maltophilia
atgccgtcgttcacccgttgggccatagccactacccacaccccgtggcaggcgatcacggccaggggttcatccgggcggctggcggacttggtcgtccagttgaagtcggcggggagcggcatggccggaaggatacggccggctgtcgcagatgctgcgaaggcacaccaccgctcagcccgctgtgatgaagcgttcactgtggggcgagcacagtaccggctcacggctcttctccggcgcagaatcctttgctcccgtgtccagccctcaagcggcacggctatgcaccctcccaatgctttcaggatccattcgatcctgcccctgcttgcgcccaatggggcaatcatccgattggatcaggtgcgatcaacctgcaaaagctgtggactcaggtcgtcgatgactgagggtgcaggctttcaaaaggatccaacgggaaccacgcttacgtgccctgcttgcggagctacaggattgatggacgaaatggagatctggcatcactggcttgagcaacgacgtcgtgaacgactgctggcactctttgatccagagcccgacgaaccacttgatactgagggtccaaaatga

SEQ ID NO: 510285 - DNA, 621 bp, Stenotrophomonas maltophilia
atgaagatgctggaagctcttttcgtggcggccacgaatcctacgcctgcggctactgccgccgcaggcggcacgtacgattggaagtggctggtgccggtgatcaccctgctcctaggcttcgggctgaagtggctccaagactgggtgacggagaatcgtcgcgagaaggctcagaagctgctgcggcaggagcagcggtttgatcagatgcgggctcgtcgcatcgacgccgagcgggcgaatcttctcgcgctgcagccgatgcttctccgcttgttccgggcggtggggctgatccagctggcattccggcgccaccacgaggcaaccggcgaatggcacctttcccagtacccggacggcctcggggaagagctgcgacaggccttcgcagacatagtcccgatcagggccagattgcactccgatgctattgcaggcagcatcgaccagctcaattctgcgatcgttggtaggaacgaggcaggtacaaaagaaggtgcggaggagcagtttcaattcatcgacctgagttatcagctgcttcaggtggcaattgggggcgagatccggcgccttgaggatgagcaccgtcagctagatgactccccttactga

SEQ ID NO: 510286 - DNA, 315 bp, Stenotrophomonas maltophilia
atgaagctgcgctgtgagttcgaggctggcgggcgatgcggtatccgcaacgccggcgctgatgttgcggtgccggtggacctggatgtcaccattccgggcatgagcaacgtgcgcgatggacggcctgcgcagaacgcagcgctgctgccggatgatgcgcgggcgccacgtttcacgccggatggctatctggtgcagcggcattcgacgctgcgctttactgctgggcgtgacgcggtgacggagatgctgaagtcacccggttcgcattggcagggcaacatgacggtggtgtttgatgccaatccgtga

SEQ ID NO: 510287 - DNA, 468 bp, Stenotrophomonas maltophilia
gtggttgatatcgactccgcccgccggttcctcgccgctgagttcgagagcgccggcctgcctcacgccgccggcagcatcctcgcgggcatcagcccatacggccagggcgcgtacatcgcaaccgttgctgcagcgctgactgcggccgcacccggccctgcctttgcacgcaggcttatcgagtccggcgcagagaactacatcggcgaggtattcgatactgagcgcggggaaattgaggtgatcgcccgctacgtgtcggggttgaccccagctgacaagctggctcgattggaagcagcccttgccctgcaggttgacccgtttggttggtggttggaagacgccaccggcacgggctacttcagccggaagatgcaaccggcggcgctgtacgcgtaccgcacgacgctcggctactccgcgacggcactatttgctcgcaagggcctggaggctgcatga

SEQ ID NO: 510288 - DNA, 213 bp, Stenotrophomonas maltophilia
atgcttgaacggatgatccgtgaccccggcaggcactgcccggactgcggccagacgggcgtcctcgacttcacgaacgttcccgcctcggtgcgtacctacacccgtgaagacggcaactatgcggaccacaacggcccctcgcgcgactacgagtgccgcgactgtggcgcctcattcacgcttaccggctgggaggattcccgtggttga

SEQ ID NO: 510289 - DNA, 207 bp, Stenotrophomonas maltophilia
gtgatgcgccacaagacacaatttgacggctggtcctcggcaatggagccgagtttcgtcactgctccggtgcgtatcgagtacgtgccctatgcacagaagcagcgcgacgccgccgagcttggcgcactggtcaaggcccacattgcacgtggcggcgcgtatgaggtgctgccttcgcataccgctgcacaggtggccgcatga

SEQ ID NO: 510290 - DNA, 318 bp, Stenotrophomonas maltophilia
atgaaagcccaacgacgtaccactgcgctgcgcactgccgaacaagcccggcagtggctcatcgacaacggcctgtccgttcccgcgtttgcggagttgcatggactggaccggcacgccgtcaacaacgccctgcgcagcaccagcaagtgccggatcggaaagacccacgatgctgccgtggcgctcggcatgaaggccgccagtgattctcacacagattcacccgtttccacccgtattcgcacggtcaaaaagaccgccggcaaagcgccggttaagtcgaaggttccgaagaaggcgtggggtaaggcatga

SEQ ID NO: 510291 - DNA, 429 bp, Stenotrophomonas maltophilia
gtgtctgtaggtaatcgcctgaaagaagaacggaagcgtctgggcatgacccaggaggccatgggactggcctgcggtgttgccaagcgcacgcagatcctgttcgagcaagatgcacacctgcccggtggcgcgtacttcgtcgctgccgacgaactcggtatggatgtggcctatgtgttggtcggccggcgtgatcggctgtccgaatccgatgcggatctgctcgatgcctggcgcaatgcgtctgtttctgcacgcgccgccgcgctagccgcgcttggcggcgcagtaccggcggcagcagctgcatcgcgtaccacgttcgagaacacaagcatcggccagcagattagcggcgatgtggatctgcgcgggcagaaggttgttgtcaaggcgcctaaagcatcaaagaaacccagccgataa

SEQ ID NO: 510292 - DNA, 555 bp, Stenotrophomonas maltophilia
atggaaattgaactcgaactcaagggcgcgatcgcgagcgccgaggtgctgatcggtcggatcgagaaagctgagagcgaaggtatcgatttgccacctgccaaagacgcggttgaacgagcacgcacggcattagaagtgaaggatgtgtctgcgatgcagtgcgcgtgggtcgaggtgacgttcgctgaagcgtcgcttcatgcgcaactgtatggatggtacaagttgaatggcaaagcgactggaatcggcgctgggaacgtgaaaggtgtgatggatggctttcttgcgtcaacgcaggcggcgcttcgtcaacttcttgccaacgaggcgctactgggttcgatccctgacattcagctcccggacgccgcagtgatttctctcgcggaggcaacgggcaaggacgctgcaaagttcattgacagtgcggcagcttggatcttcagcaatcaggacaagatgatcgcggctgccaaaactaaagctgacgccaaggcaagcgcaagcgcaaagagcgccagcggtcgcagccagatgcgcaaactctaa

SEQ ID NO: 510293 - DNA, 519 bp, Stenotrophomonas maltophilia
atgtccaacgaaccccgctttgcccacgccttcgacccgatcacccacgcacacataggcccggtgcggctgcagccctcgccagacggcgcctggtatctcccggatcacaccgttgacgtggcacccaagcgaactgctggcgagttccaggcactgcgcctttctgaggacggaaagcgctgggatgtagtggccgactaccgcaatcggatgctgtgggatacgcgcactgcaatgccagtccccaaccgcctcgcgctcggcgacaagctgcccaacggcgtgacgctggctgagccgtttcgactggatggcaccaccccgcagtgcaacgcgtgggacgatggacagggcctttgggtgcttcagccggactacagcggccgaccgctctggaacaaggcagacggcacgttcgccgcgccggtgccgcgtggccagtcgctgccgccatcggtcaccgattacgcgcccccgttcaaccgcagcgtaccagtcacctacgacgataagtag

SEQ ID NO: 510294 - DNA, 3213 bp, Stenotrophomonas maltophilia
atgcgcatgaagatcaccaacgccggccgcgccaagctggtcaacggcaccaacaccggcaccaacacggtgctgatttcccacatcggcctcactgctactgcgttcacgccaaccgcagcgatgacgcagctaccgggcgagttcaagaggatgaccagcttcggcggcgatgcagttgcggccgatacgattcacgtcaccctgcaggacagcggaaccgacaagtaccagctgcgcggcttcggcctgtatctggccgacggcacactgtttgccgtctatggccaggccgaggccatcatggagaaggcgaacatttccacgctgctgctctcggccgacgttgtgttcgccgatatcgacacggcgcagatcaagttcggaagcacgcagttcctgaacccgccggctacggaatcggtcgcgggcgtagtcgagttggcagacggccccgagaccatcgcgggcgcggacggggtgcgcgccgtcaccgctcgcgggctgagagccgccctagacgaccgcttcggcgccaatgcaccgacaccgttcgtcaagacgatgctggcgctggccacggccgcggctatccgcaccagcctcgaagtgaagggcgccgcgctcaaggacatgggccacggcaaggggctggacgccgacacgctcgacggcatgcacgccgccgacttcccgcagatcggaaaggttcagccgattgacgcgattcccggcaactcgaaccaagttcgatggatcaagctgggcacgctgccgtggcggggcgctgccgcaagcattctgctgttggaaatgaccaatggcgcaatcggcagcccgcgctacgcttgggagcagatcgctgcgtccacgcgcacgttcgacgcaaccacagtgctcacgcaaacggttgttgatggcatggtgcagcacacccgaatcggcgccgactcttcgcttgatcgcgccagccgccttggcttggtgctaatgaccgatgcggcgggcaagtccacaggtgtcgagttgtggctgcagcagcgcgagtacaaccaaggccatgccgtgcgcctggtcaacgccaccggcgcgacgtatcacggccctggcacgttcgtcacagccgagccgcaggggatcatctacgccaccgctcagccgctcgcgtacatgggcgatctgcggcgcctggtcgatggtaccgagaaccgctggggccgtcgtcagacgttcgccctgggcgcttcgttgtctgacgatcaaaccctcgatctcggtaccgccggcgccgcgctgcgcggtagtgccgcgggcagcgtggtgctgtctgccgccgcgagtagcgacggtgggttcgtctacctgcgccccaatggcaacaccagcacagccggccagctggtggtctacaagaacggctttaccgagatggcggctgcccggatcggaaccggatctggcgacgggaaggtgctgtgcgagctgtactcagagcgtccttggcagttcaaacaaggcggtaccgagggacagaccggattggagctgcacgacattaccggtggcaaggaattccgccttacgaatgtggccaaccccaacaagatcgtgatgaaccctaccggcagctgggtctatgcggccgagttccggggcaagctgactggcaacgccgacaccgccagcaggcttgcagcaccgcgcacgatcaacggaaccgcattcgacggctccgccaacatcgtgaccacggcatggggcgcttcccgcaaggtgaccatcgggaacaccgccaaggatgtgaacggcggcgtgaactttggatggaccctgagcgagatcggcgcagcttccgttgaggacgtggctgcgcgcgtggcctatctcaccccgaccagcaatgacgacagctgggtggacacgtggaacgcgctgcgcatcaatcgacagggcaacccctcgcctaccacgatgccggcgcagtacaccattgcctggtccctgcccagctatgacaactcccgtggccttgccctagccgccgactacggtggtggaaaccggttctggatgcgatcccgccgcgacacagcgcccgctgaccagcgctggaaggcatgggcggagctgtggaccgatgcgaacttcaatcctggcgacaagctggaccgggccggcggcaccatcacgggcgctctggtcgtcagccaaggcgtgacgttgcgatccacgattggccttgactacatcggggcgaagtctcggctgatgatccgcgattttgcggatagcagcggcgtcaccattgacgcggtgaccctgagcaacagcgcctacgctccactgctttttggtggcagtgaactgcggttcaatggcaagcctgtttggcatggtggcaccttcgatcctgtcaccaaggccaaccgcatccccggccaggtcatcatgttcgccggcaagagcgccccggctggcacactcctgtgcaacggcgctgccgtctcccgcaccacctacgcggacctgttcgctgccattggcaccctctacggcgccggcgacggcaagaccactttcaacctaccggctatgggcgatggcaccgttgtaacccataccaacagcgccgacgccgttggcggcttcaccgccggtgaggtgatccgccacgcccacaccgctagttcggccagtgccggcaaccacagccacacgatcagtgttggtgccggcggcgcacactcacacggcgcaagtgcaagcggtgtgggcgatcacgctcacggcgcatggactgactcgcagggccaccacgcgcataccggcggtacgtctgcggtaggcgatcaccagcacttgaccgccttcgccgaagctggcttcgcttacccgtggggtgctgactacggccagcacgccggctcgcgcggcaatgttgactacgacaacccctggccgaacaccagccccgctggtgctcactcccatagcttcacgacggatggcgcaggtggccacgcccacaacatcggcatgaatggcgccggcgctcactcgcacgatatttctatcgcgcagattggcgaccacggccacagcgctacagcggctgacggcggcgcgcatacccatgcgatcacggtggccaacaccggcggcgaccgcaacctgccggcgggtctgcgaatgatctactgcatcacctactga

SEQ ID NO: 510295 - DNA, 708 bp, Stenotrophomonas maltophilia
atggccgacacccccgccagccgccatgtgaagcgtgcgctcgcctctaaggaggcggcgcgcaccgccggcagcaacctgatggaagggaccacaatctaccagcagatgcaggtgcgtctgacggccgaccgcgcccgcctgaaacagatccagtccacccaaggcaaggcccagctcaaggtcgcgctgctgccctcctacgccccgtatctggaaggcgtgctgtccgccaatgccggcggcaaggacgacatcgtttccacactgatgctctggcacttcgatgcgggtcagttcgatgccgggctggacattgcgcagtacgtgcttgcccacgggctggatatgccggacacgcacaagcgcaccgcaggctgcgtggttgccgaagaaatcggacaggccgccgtgaacgcgctcaagaccagcgcaccgttcgatctggctgtgcttgaccgtgcggtggcgctgaccgatggccaggacatgcccgacgaagtgcaagcccgtctgctggtggcgcgtggccgtggccggctcgcaacggataccgacgacgcgccgctggatgcggaggctgtcggccaggtcatcgacgacctgcgcaaggccatccagctgcatgacgcctgcggcggcaaggaagacctcaagcgcgccgagcgcctgatgaagaagttcgaggccagtcagtccaacgactga

SEQ ID NO: 510296 - DNA, 1254 bp, Stenotrophomonas maltophilia
atgaatgctatccgctattacggggatgcggttttcgacggcgataaggacggtggcgtgctacttacgctgcatcgcatcgcgcaccagcagctttctagaagtagcatgacccgaacaagaatgggccggtatttggctttgtataggttccaatcgctttcgccgtttttcaggacagggatcgggatcgatgttgactcttattttgccatggcgtttgccgcgattagtgcttcgaatcaaagaccctgcagcaatcgctctacggactattcatgcttaggggtagaccaagccgcttccgagattttcttctccaggatcgttggatcagctgatgaaattcgcaacaagctaattaacgagcaacgcctaggcgattgttgggaatacaccctcaacgcactccacttcaaaccactcgtcgcgtttgacgcgaaacatcctgagcggcttatttgtccacttccccacgccgtggagagccgccttaccgaaggtatcttcttcgacgttttctgcaaagagcgcagctttgcgcaagcctacggcgacgcggtcgagtacatcgtggggcgcatgctgtgttcacttcctccacgctacgcccactacaaacctgccaaggaggtgattggaaaggcggtatatggcggtacggattggatcgtacatgacggggagactacggcgtacatcgagtgcaaagcgaagcggcttgcacttccagggcgtgtagccgagaaactggaagatcttcgccgagagattgggcacctagccgaagcggtcctgcagaactataagaatatagatcgtgccacgcgcgcctccgatgctggggctacaagtcaggcccatattttctcagtcgttgtaacacttgaagactggcttctgttcagccccgtcgccacggagctgctagatgacctagttacagaggggctgcagaaggccgggctagctaccgagcttcgcacacgtgtgccatatctaatttttggtgcagagaccttccagtacgcgatagctgcgatgcaacatcatccgatgtcggaggtcctgggcggccttcttaagcctgagcataagggatgggtaccatccgcgtacctacataagcagtaccctggcctagatcctgcttctattgggaattttgaccaggactttgacaccgttgttggttcgatcctgtcggaagcggaatcgcgtaaagcgacggggctattggcatctgcatcttag

SEQ ID NO: 510297 - DNA, 213 bp, Stenotrophomonas maltophilia
atgcagcatcacttcgcgtgccagaagatcgagctgatggggaaatgcgaatcgctccagccgcatatgcacgccgaggccatcgacgtggcgatacccatgtgggagtggctcgccattgcagatcagccgagagtagtgccacagatggataagcgactcctccaggccgagttgcttaagggcgttcttcactcttccgtaatctgctga

SEQ ID NO: 510298 - DNA, 1224 bp, Stenotrophomonas maltophilia
atggctcataagaacaacgctgcgaagttgcctaacggcaagaaagtcacgacctcaagttctggcgggagagccgataagaaggccgcggtaaaaaagaaccgtgaagacgcttcacccaaagtcaaggacgctgtgtggattagggcagctgggcactgcgaactctgcggtcgcgaccttagctacgaacgcctttcactgtccatagccaaactgggcgaggtggctcacatcctgcccgcaagccccgatggtccgcgcggctccaatggcggcaccgtaacttcccttgctgatttgtcagatcggaacgaccccggaaatctgatgctcctttgcgactcttgccaccgcgaaattgacaagactccatccttctatcctgcggaagacttgacagcccagcacgaggcctttatcgaatctattcgctttgctgctacgcgcgcgaaggcgaatcaaggccaaggagtactgattcaggggaaccacttcgaaaccctggcccgaattgatccaacacaaattcaaacggcattgtggagagaccgaacacgacctgttggacgcccactgatcatcgatctgcccaggctcgatggaggcgtgcgcgatgacgcctactacgttgcagttcggaaaaagctgaagtactcaattgatcgcgacataccttcaacacaaagcgatgacggtgatgggcttgtcctaggcattgctggaatagccgacatgccaagcatgatgcttgctgggcaagcgatcggtgaccgcagaagacgaaagctctactccagcgatcgcaagaccggactagtttggccagacatctttgcaaagcctaaagattttaaattcgaatttgagaaaatagatgcgggccccgttgcactcctgctggagatctccgtcgtgctttcgacagatgcgattcatgcagccacgactgtagggagtatcgcgcgttttacagctagcgatcccagctattcctacatccgtaacggagagttcattgatcacttccgagagcagatccaaccggcactaggaataattgaggcgcacacggccgaaccgatccatctatttatggcgattccagctgcacttgcattcgagctcggcgcgcttctatctacaaaccatcggcacaaatacatcgtctacgacatagacgatcagagcaagacctaccgccaacacatcaccatcgaataa

SEQ ID NO: 510299 - DNA, 1245 bp, Stenotrophomonas maltophilia
atgaatattttgacagaagttccggatccacgtgctgccggctgggagcatgtactcttcaaggccgccgatgatatttcattgagtgaagcactctaccaaaagattaatgatcgctatgacacgctacaagatgctcttcgcgcaacaaaccatccgttactaaagagtgcccatgtttttccgcaaggctccattcgactgcgaacagcaataaccccctgcggcacttcggatgagctaggcactgtggacgcagatgcagtgatttggctcgagcacgctggggatgcatctgcagcagacgtgctaggcgcgattgaggaacgcttctctgaatcttctcgcgtgcaagcgccaatcgagcaactgcgccgcggaattcgaatcgtgtatgccgatgagaaccccgggttccacatcgacgtcactccagcacgcaacatagcgacgaatttcaacgagtgcggacacggccggctagtagttccggatcgaaagctcaaagattggaaagcaagtgcgcctattgattattgcgcatggctggaggaggtcgcggaactatccctacctgtcttgtcagtcgaggctcgcgcaatggatagcgcctcccaagaggatctcccatcctactcagactacatcagtaggaacgttctgcgagcggcaatcaagctcctaaagcgaaatcgcgatacttgggcccagcaaaacaccgacctgtgtgctgatcgtcctatttcagcagtaattacaacgctcgccgcgcttgcttatcaatcgatcgcgaaggattccaaccacaggttcctcaggccaattgacgctctactagaagttgttgaaagaatgcctgatttcatcggcggatcatcggggaactggctcgtcctaaatccagtcgagcctagtgagaatttcgcagaaaagtggaatcgtccagaaggcgcgaatggtcgccgcaccttcgataaatggcatgcgcaagctactaatgccttcagtctaggcttgcgtgaacatgcaagcatggagagcttccgtgaagaggtcagtagcgctttcggggtgggaaggaattttgtaaaggacgccgtgaacgagatccctgcaacctttgacctacctggagcgtcagttggtacgactcgatcaaagcaacttctcgaagcgttcagcggcgcggcggttgcaggtcgggaatcgcaagcaaacattcagccaattaaacgtttgggctaa

SEQ ID NO: 510300 - DNA, 1728 bp, Stenotrophomonas maltophilia
atgtctactgacgccatcatgcggggagaggcggagctcaggcgctgcctgggcgaagccgagggggcccttgttgcggcgaaggcccgagctggagagctagcggcattcgaaatcaagctgccagtcgactatctgggggtggagaggacgctgcgggtgagctttggggaatctttcccggatctgccggctaccttctcagtcctcccttggccaaccttagactggccccacgtcatgactgggggcctctgcctgcatgcggaagacgagcagcctcttaatgacacgccggaagcctcgatttcctatagttttagccagttttctgctctcctacagttcaatctctccggctcagacgaaactgttcgccgccacgagttccagaaggagattcgctcatattgggccctccagattcctaccgccgagcaccgcctcacacttatatctatccccaataggtcaggaccgttggacgtagtgagtgaccgacctggaatgcagcgtcaaaatctacgatatttggcagcacccgaacactcgcagataaacgcctttgagaagagacagggacgtcaacacgtacaatcgcgagcgaccgcaaaagcagggtacttccttaagcttgtggaaactcctccaccgcgcctccctggaccgaacagcgatcttataagttggctaattccgagcattgagccgagtgggcttgtggagttccaatcctggcttgatgaaacacgtgacttgggcgctcgctggatagtcatgtctcttcctacagaggatatcgcgcttgaggcattttacgtaaccgctccaggaatgaatagaaagactcgccgagtgttcggaaggcgtacacaacgtcggcagacttggcgagcccaaaagccgagtgccttaagccgggtccaaatcgacgtgcttgacccgatggtcatccatcaacgcggcgggcaggcggcagcaaaactttcagataaaaagatcgttctggtaggtgctggctcattgggtggcgaactcgcagtgacactagcccgaaccggagtcggaatgctcgtgctggttgatcccgacgttcttgaagacgtgaatgttggacggcacgtactaggggcatctgatctcggcaggccgaaagtcattgctttggctgatcgcattagaagggacatacccactaccgaggtggtggcgattccgaaggcagtccaagctgcaactggaagcttagcaacacacttcagagatgctgatttggtactggtgactacggcgaattggccgtcggaagcctacctatgggcgctcaaggctgccggctccgaatggacgcttatccaggcgtggagcgagccccacgcactggtaggccacgctctgatcgcgcccaaaggatcctatgatggtcgctacctattcgagcgaggcaactttcgacacctgaaaagtgactggccctcgaatggcgtcattcctctacccgcatgtggccaaagctacatacctgggagcggcgctaaccttagccgaatcgtcagtatgatcgcggcttgtgctctgagggctttagcaaatccccctgacatgcctaaatggcacttcaccgtaggcggtttagaacaaatcgaagagctagagggaacatacactggcccgagccttccggctggacagtgcttcatagagtgcgtgcaggaatggcctccatga

SEQ ID NO: 510301 - DNA, 318 bp, Stenotrophomonas maltophilia
atgacgatgttccgcgactgggtactagagatcgccggtgcagacggagagccagtctttgtcggcttcaatgccgcgtttgactggtcctttgttaactactacttccacagatacctatcctccaacccctttgggtttgcagcactggacatcaaagccctctacatgggggcaaccggcagcagttgggcaggaaccaagtccagccagatcgccaaggcgcttcacccgaagttggaaggcaaacatgacgccctccaagatgcgctgtatcaagccgagctcttccgtttaatccgatctatcaaaatctag

SEQ ID NO: 510302 - DNA, 435 bp, Stenotrophomonas maltophilia
gtgcccagaattgtagtgacaaaggcggctctgccaaaaatactgcgtgaacttgaccgctgggaggggaagctcacctggccgttgttctgcgcgcgagtcgcattggtgctgggcgtcggctcagtatccaagcacaccatgtacctctatcccacgatcaaagagcgtttccagcaacgccaacgggatttgagggaggcgaaggatgcgcttcccagggacttcactctgagtggagcagtccgacgcattgcagatctggaggctcaggtccgcaggctcgaggaaacgaacaacctgttgctagatcaatttcgtcgttggcagtacaacgcctacgccaacaatgttcggattgatctgctccagttggatcatccgctaccatcattggatcgtgcaaagcgcccgcccggaggtcgctctaggtag

SEQ ID NO: 510303 - DNA, 639 bp, Stenotrophomonas maltophilia
atggacgatttcactctcgcccaatgggccgggcgtgcgagagtttcagacaataggcactacgaccatcgcagcccacaggagcgcctggcgggtgcgcgagagctcctgcccctgcgccacatatcgctgttagaacgcttcagtcaacgtgcgccggtcacctatcaggagcttggtgttgatcggcttggaactgcaaaagctaccctctacggcatgtgtgtccacgattacgccatggcaccttgccagaagcagagagagtgcatgacctgcaaggagcatgtctgtatcaagggagatcatgtaacacttgagcgaatccgcttgctggaactgcagaccgaagcacttctcgcacgcgcgaggagagcgcactctgaaggtgacttcggcgcggatcgctgggtcgatagccacaagtggaagcttgcacacgtcagggctatgaggctcgcactcgagcatcctgaggtttcgtcaggggctgttcttagaataccggaggggcacgatccctcaccagttcgtagagcgttgctcgatcttgggttgatagaacatcccgcctcagaatcactcgacaccctcaacatcacaatgcacgggagtacggataagtgcccagaattgtag

SEQ ID NO: 510304 - DNA, 1245 bp, Stenotrophomonas maltophilia
atgcaacgaatccgcaatcccacgctagaactgctgcagtccgagcgcgccgcgcgcagcgccgccgagaacatggcgcggctgaaggatgagttcctggccacgctgtcgcacgagctgcgcacgccgctgaccaccatcctcggttggagcgagctgctgctgcagcgcgtggacaacaccagcccgctgtacaagggcctgaacgtgatcgccaacagcgccggtgcgcagaagcggctgatctcggacatgctcgacctcagcagcatgctgctgggcaaggtacagctggaggtggaagtgctggacctgcgcacgctgcttggcgaagccatcggcgcgcaggaactggtggccgaaggcaaggcgctggacgtgcacctgcagctgcccgagcagcccagcctggtattgggcgatgccacgcgcctgcagcaggtgttctggaacctgctctcgaatgcgatcaagttcaccccggccgagggccgcatcgacgttcagctgcaggccgacggcacccactgggtgattacggtgcgcgataccggcgatggcatcgcaccggagttcctcaaccacctgttcagccgcttccgccaggccgatggcaccaccacgcgccgccatggcggcctcggcctgggcctggcgatcgtgcagcagctggtcgaactgcacggcggcaccgtcgccgccgccagcgaaggccatggccacggcgccacgttcaccgtgcgcctgccccagcacctgccggatgccgagcgccggccgctgcgcgaagtcatcagcgggccgatcctggagccggtgatcgtcgaaccgtatccgctgcggggcatgcatgtgctggcggtggaagaccagccggaggtgctggagtacctgcggcgcatgctggaagagcagggcgccagcgtgtcagcggccagctcggccggcgaggcactggcactgctggccgacaccggccatctgcagtaccacgtgatgctgaccgacatcggcatgccgggcatggatggctatgggctggtgcgcaccttgcgcgaggacatgggcgtggacgcggcaaccttgcctgcggtggcggtgactgcactggcgcgtgccgatgaccgccgccgcgcgctggcgtcgggcttccaggagcatgtcgccaagccgtactcggtggcgcagctggtggctgccgtacgcaaggtgcaggtgccgcgcgcggacagcgcgctgcactga

SEQ ID NO: 510305 - DNA, 2883 bp, Stenotrophomonas maltophilia
atgagtttactttacaaattgcttgatagaaccgaactgctcttatcaaaaaaagaaaagaaggagtcactgtctcactctcatgcccgtatgcttgaagaagcttacaaagtggcggatctgattacgggccgtcatgacgtgccagaccgtattccctcaaatcagctggttgttgagccaggccgcgaggatctggttaaacgcatgggggcggagctaattgacggcgtctggacagtccctgaagggatggacatacagaaattcagtcagttttggccaatgatcccagctgacttgcgcgataaggcatcgagaaacactacaacaaaaaacggtgatccaattgaggggtatttgcgccccgatgacattgtaaggggaggggattcgacagctacccccttaatgtatggagcattgcccgtagtaggggccttgtcttacctggtctcactaattagcccttcactctcattgctagtgatgcttctggccgtcccattcctaattacaatcgcacagggtgagggaattattgatgctgtaaaaagcttctttgtcttgcttgtagggcccgctgcattggcagctatggcagcaaacggggcgcgtcagcttgagagcttgaatctcctgggatctatcagagcaggtggaattcagtcagtagtgactgcgtctttgagtctcgccaccctctccgcaatcgtgatgggagtcgcgtttgttttgatgcttgcatcaaatatgctggactcaaaatataaagcgtcagttataggcgggttctgggcacgtgttcgctatagcgccaagcttgcccttgtgttcacgcttgtcatggttctttccgtggcaattctgcccacatctatgttgcctttcgcatttttcttcatggcaagtatgtatcccatgatccacactgagagcaattacaactctagagctaaagagcttgaggcgcttggtattacattcaagttgggtcgcatgggtaagctgagcacagttcacgtagaaccacgaattctgcaggcaaaggaggcttacgctgataaatccccgactatggtttgcggttatgcagaaggttggttgacagctaaacatcaccccaatgcccctgacgaaggtcaagagatggttctttcagcagtcgatgtttcgtcgcatatcttagttttcggagctacaggtgtaggtaaaacatcatctacgctgcggccttggatcaagcagtggactgaaaataaaatgggttctgcctttattgcatgcgcgaagggtgctcttgctggtgaagtatcggcttacatagatctaaggatcggaacgggcgtcgattatgcaccgatgcagggtcttgatgcccagggcgtttacaacgcactaaaggcaatcaaggtttctaacaaaagatcaagttcagacccaatttgggataacggcgcaatggactatttagacaatgtgactgtccttcatgaagccctgcgtgaccatgagcttgcgatgctggaatattcattcactacttcgcgtgaaaacgaggatgccgctctctattacgggcttgaagccattcgattagagaaaattggtgctgacgcgagcgaggcgagatcaaaggaagagcttgctatggagcgttctaaatactgggcttcaaaagcacttacagagcgtaagtggctgtggaacattgatactctttcaaaaatagttgtgatgggtaatcaagttcgtgtagtagatggagtgccagttgcatctgaggatatgttgtttgctttgtcagaacttggttatggagcatcagatgagcgtatccagaggatgcctgagtcgatacaccctgaattaggaaagggcacattgctggatggaacaattgcatattttacaaatacgtggcccaacgctggcgaacaacgttcttcctggatgtctaacgtaaatgatcgaattcagccgttgtccagaggcaaatatttaactgggaaaaatggcgttcactggaagatgcttgagaagggggaggatgttagatcatgcctctactggaaaaatgttggcattgacttgcctgaaacaattcatggtcgtgctggtttggcaattaccgcctttgcgaagcagtgtgtctatgatgaaataaagaagcgtggtgggatgaagaaagcggattggaaagccatgggtcagtcgcgtgttgcattcttctatgatgaagcccagggcgttgtaggcgatgctgagttgcagttaatcgacatttcaaggtcgcttgaagctgctttcatttgtgccactcagtcatatgagagttttgtggataggtttaatgacgaaaacactgctcgtaagttcgcaaacacattccagtcgttcttctgcatggaggcatcaagcgggacgtatgaatatgtgaagacaaggcttggtaaggcggatttgattacattcaaacaacgctcaaacggcattgattattcaggtgctttaaagaactatgcccttagccccttgaatgatcctgatcatccaaaccgcgcaggcatggagagcctgttgaagcgtggctttggcaagctaattgttcgcgctcctacggctcctatgcaatacgtaggtggaaagtgggtaggaaataagacgcggcagcttgatgaaaactcaatgcttactgatataacagttcctgtgggaggagtcctggagactgttgatgtgtttgaagatcaagagttcaattcattactaacgaggggtaaggcgattgtttcattgcgtcgcgctggcggtaaaagaattgaccttgtgaaacttcagtatgtagggccagatgagctgcgcaaggataacgtggcctga

SEQ ID NO: 510306 - DNA, 801 bp, Stenotrophomonas maltophilia
atgagcgaccttcaacgtgaaagagaactgcgtaggctggaagcgagtttcggattggataataacgtggagggtgagtcctcccctgcgtcgaaacgtatcatcccagaacccgtgatggagcaagttgagccagtagcgaagaaggtcgctgaagcaagtcagcgaataattaaacagacaacagctgtagctgatgaagctgtcaaacgattgccaaacataaatctgaataaggctcgtaagaaaagtccatatatatgcgtgggagccgcattgcttgtttgtgctggagtgcttgccctgaaattcaagggtgatgaaaagggatcagtcgcgcctgctgtcgctatagcaccttctccgggcctatatattcccccggccgtaaatcaagtgccagtattgccagggcaagtcctggaagaggagaggaagcccgttgatcatttagaggaagcaattccccaggaccttcctttgatagaagaagctgcgccccttgaacctgtgcaacctcctgtcagttcagcggatgaggataaagggggcgttcaaaacactgttcctgctcaatcaatagccccagcacctactgctgcgcctcaagttaaaccagcaaaaaatgattctgaagctaaggttgcccgccaaccagctgtagtagctgcgcctcgcgttattcagcggaatcaaccagctcccgcatctgataaagaaattaaggccgaggtcaagagggtggaggctgggaagccatggcaaagcaggattgatcaaattaaagagttggatctttaa

SEQ ID NO: 510307 - DNA, 174 bp, Stenotrophomonas maltophilia
atgacatttgaactatttctaattttggctggatctgccctcattatctctgcgaagattgctcgtatatatcagcaccactctgataagcagtattcagacaatagagaggatttcattcaggacgcccaggtctttgctgctagagcaaagcagatcatcggcaagcgctaa

SEQ ID NO: 510308 - DNA, 192 bp, Stenotrophomonas maltophilia
atgtcgcgtcgatctgacccggaacgcgcgctttcaagccaggttccgcctattcgcgttgagcgttggtttctggcggaactgaagagagttgccgaaataagaggcatgccactctcacaatacgtgaggcaggtgctgcgtgagagagttctggtggatcagatcgaagaagagaagcaaaagctttaa

SEQ ID NO: 510309 - DNA, 516 bp, Stenotrophomonas maltophilia
atgcgtaaaattttaattggtgccgccatgtcagtgtcaatggcattagttggttctgctagcgccgccactctcaatgatcagctgcagttatcgcttgatgttgaatcatcttgcatctttagcttgaccgaacagtcgttaacaggccgaattgataatcagggcggaagctttgtcttaacctcgcccgagggctatatcaacgtcgaatgtaaccagggcgcagcctatacgattgaagcaggtgtcgcgtcaggtggatttgttgagctcacgggcgatacaacgggtgaaaaggttccagcctatctgtttactgctgacccctacaaaggaggcacgccctggtcaaccgttgccaacggagaagcattgagcggagtagcgactggtgggccagatgaacttacgttccagttcctacccaacaccgacgcaacgggccgtagatcattaaacatcccgaagcctgatacctatcgcgccaacgtggaaatcacgttcaactactga

SEQ ID NO: 510310 - DNA, 657 bp, Stenotrophomonas maltophilia
atgccaattgcgctagttttgaggaagcaagatgcatccagcgtatatcgagatctagtgttcggctcgctcaggagcgaagggatgtcggagctgcacatcgcctctggcttctttaggggagatatggcggagagattggagaaggaaactccggactactcctttactaaggcgagtggccggataattcacttgtacggcgcaagcaacacttctgcggtccaccagatggttgcgctttccaacagcctcaaaggatcgggactcaacgcaacagcaagtgtgcagcgcactcaaggtgaaaatacgccaacttggcatgcaaagatgcaggtgcatgtgcatcaagacgctggcccagtaatagcggtggtgggtagtagcaatatgacaatgcctgcaatgttggcacacacggaaaccggaccgcagcgaaacatatcgcttgcgcagcaggaggcggatgtcgttatgtggctagccggcaaccaatgcgcgtctgaggttgtgagaatcgccaggagcgagtgggggagcgaagttctaggccgggaagcctttgtagactcaaagtatgacgatgaagtcaaaaagctcatcgacggggcttacgactcactgctgaagttcgattgggaaagggtggacgaatag

SEQ ID NO: 510311 - DNA, 687 bp, Stenotrophomonas maltophilia
atgttctggaggtcggcctgtaggttcagaattttcgcttgcttcccagccatagcctccacctgtcataggcccaaatggccaaatccgagcctagtatcggctctaaagactcacccgcgttcactcatgccttggccgggcgcttctgcactgggcttgatctcagcgatggctcgcgtggtgtggagcagccgggccaacgccacgcgcaggcatatttcagggagaagaatccaactgcataccagcgttgggcgtaacgtctgccttgggcgatgcttgcgacccagaagttcctggcctcccacaacctccaaacacccaagcgggaatgcaccccaacatccttggccgtcgaggcgttggcgacctgccagccattccaccaaaggacccagccctactgaacgaccaagccccgcaaaagcggggcttggcgaatcgaacacttccctttggggcatgctcagctggatgattttagtaaccggtcttatcgttcatgaaatgaaactcctttgcgggtggaacaggagagacaaacctaatgctgctgctgaaccccatttgtctttcgggcctcttgctcttcctgatcacgctgggaacgccagtccgttgctagcccttccaactcgaagtaggcccttgagtacctcgtctccgaccgtgctcgccggatga

SEQ ID NO: 510312 - DNA, 735 bp, Stenotrophomonas maltophilia
ttgtcgaccccatccgaacccgcctcttcgacctcctctaaattgcaggtagggagcatcatcgggggagcgcttgttgtagtcgccttgggcgcgatgagctgctatttgctgccgacagatatgaggacggtcccaaattatgtcctcatagtgcagacggtcgtgattgttttgggcctcggctcgcttgctctacttgctctgcagctgcgcgcagccaacaggcaagcagcgtgcagcgttcagcaactgacgttgactgcacagcaattgacgatgaccgcaaaatggaacaagacgctgtcttatcaccagttctttggtcgcctcattgctccagagcttgcggacaagattcgtgcgtgtgcaaagaagcatgaatttgacgattctttcacaacaattagttgcatatcacaacaggttctgcaggcgatttggacggacgttgaagatcacaacgcggttagcacttatctcgatgaatttgaagagttctgtgctgccgttaacgctggcgttgtggaaaagagctatgcttatggcatagaggcgaccagagtgataagagctgctacggtctttgaacccttcatccggcgagcacggtcggagacgaggtactcaagggcctacttcgagttggaagggctagcaacggactggcgttcccagcgtgatcaggaagagcaagaggcccgaaagacaaatggggttcagcagcagcattag

SEQ ID NO: 510313 - DNA, 267 bp, Stenotrophomonas maltophilia
atgtcagaagcaatcgcagaggtactgcagcgccttgaagcctgcgagacttccttggaagcgcatcgcggctacctgaaggcgttcgagtacggacttcgtgcagtggtaatcacccatcccagaccaaaagagatttgccgcatctgggcgcagttgcttcctgggattgcagagaagcattccggagatggtggcgccatctacacagcggccctgcagcaagcgctcgcgctgcttacagatcagatcgtggcaccgaactag

SEQ ID NO: 510314 - DNA, 285 bp, Stenotrophomonas maltophilia
atgacgccgattgcgcactctaccggcgtgctggcgtctgtgctcgccatcggcttactagcgccattggtcgggcagctgcccctcgtccagtccaatttggagtgcgctcgaggattttcttatgtgattcttgccggcctcacaatgtggcaggtctggactgtaatttcgacactggcgccggcaagcgccgtgaaggacaacgccatcggcgaaagcgccaagaacaagcatgtcaacgctgttatcggccaggcgcgcaaggcgcgtaagaaggactaa

SEQ ID NO: 510315 - DNA, 309 bp, Stenotrophomonas maltophilia
atgcggaccaggatcaagtatgaaatgggtgtttctgctcaaccggctcagattgtccagattgtcaatgatcatgcggaaagcgcggtcgcgcagaaggatgactacggctttgtaatggagggtgatccaagtacgacccactggctcagcaacgctatcgcatcgttggagctcgatctgcaactaggacatgaaagaagggggcgggaaggcggcgaaggcatggtctcaccatcgcagctgctggaccgcttggttcagaggaagtcacaactattggaggctgctggaagtgtcgaggactag

SEQ ID NO: 510316 - DNA, 156 bp, Stenotrophomonas maltophilia
atgagcgttttgagtgatgaaatcagactgttcaccgtgccgcaaaagacgcaacgaaaagcgcgcctgaacgtcgtcgtgctcatcacccagttcgtccgcgtatgcaacgattttgctttcatcatcggcatctactctcacagcgggcgatga

SEQ ID NO: 510317 - DNA, 303 bp, Stenotrophomonas maltophilia
atgcctagacttcgcttcgtcgtcgtagctatcctcatcttgcttggcgcctgcgccggacggccagaaacttggacagccgtcgtctaccctcccgggaagtccttggcagcagaagacgcctccaagacgatctacggccactacgcgtccttcgagcaatgccagcaggcctcgattagcgcactaaggcaattggcatccgataacaagtcggaagacttcgggagctatgagtgcggcgttggctgccggtacgagaaggagtgggacatgtacgtctgcaaggagacccggaagtag

SEQ ID NO: 510318 - DNA, 294 bp, Stenotrophomonas maltophilia
atggcgttcaagccaggacaatcgggcaacccgagtggccggcccagggtggattttgaggttcgacagctggcgcgagagtacggccgtgaggcaattgagaagctggtggcgatcatgaggggcgataacgcggccctcgccaaagcagccagtgaggcgctactggatcggggctacgggaagccggtccagtcagtcgggatagaccctgattcggagccggtccgagccatcacggtgcagctggtagctatgacagctgacaatgagccggagggtgctcgtggctga

SEQ ID NO: 510319 - DNA, 216 bp, Stenotrophomonas maltophilia
atggcgccttctctgtcacccgcagcggtgaagggcatcgctgcagtgatgcttcgggccaacgcgggtcagcgcgtctacctcggcggcttggacatcaccgaggtagccgcgagtttcctccagcgacacgtcgaggaggtaggtctggatgcagcggacaagagcttccgaaagcacgggttcacattggtaacaactgaaaacaataggtga

SEQ ID NO: 510320 - DNA, 711 bp, Stenotrophomonas maltophilia
atggcagattcaagagttccagccttcttcatgggggcgcgcaatcgcatcgcgaacggtgtagtgcccgggcgagttttcgacgcccgtggcaactacatgggcaatggtggtcgggcagcccttgcaactgtcgcgaagtttggtagcggtctcttgtttggaccgctggtatctcaggccgtcgacaggggcttgtccggctgggtcaatagaggggctgactacggtatcggaaagccggttatggagcagatcggtatcccgggggctcctggtgccagcagggcatacaccgcacctacccccgcccagctaacgcagaacctcggcctaggcgctcagcgccctggcggcaactggtacggctacacgggcggtccgggctccatgggcagcttcggcaacacccagtttggcaatggcatggcaagcgtcggccagtggaacccgcagagcatttggggccagcaggtagcggctccggctggatcgaaccttgacctcggcaacaacgtgggcgggttcatcggcggtggcggtggcggcggctcaatgggcggcagcaacgttggctatggctcagtggcgccgagcatggggctgactcgcggtggcggcgcagccggtggctggcagaccgcatcgaactggagccagttgctcggccggttcagtggcgaccccgaaatgtacacccaagcaatctaa

SEQ ID NO: 510321 - DNA, 180 bp, Stenotrophomonas maltophilia
atggacgcctgggaaaagacgagctatcccctgccgcagccgccgaaaagcaaccccgtttctgatggacggaagggcggcctgtatggccttgcctttgccggcttgctgatcgcagtccccgttctactggcgggcttcgtagtgctcgcttttacgggtttcgctgtggcctcgtag

SEQ ID NO: 510322 - DNA, 2376 bp, Stenotrophomonas maltophilia
atggaaagaaatccatttgatcagtttgatgccccatcggtaccttctccgaccgggcagaacgtctttgaccagttcgaccagctcgatgagatcgtgacgctcccggccgtacaggccgccaagcctgatttcagcgaggtaacgaccagttgggatagcacggccgagttgccaggcaacgccataggtcggtggctgggccagtacggcgggcgccaagtccttcaaggcgctggcggccttctcggtgccgttggcggtgacgctttcaatcactatgtcgtggatccgattcggcgccgcctgcacgaacctacggaagaggatatcgctacggggcgggacagcttcgttccgactgccccgtatcgccaggtcggcgagcagattgcagatgagttgggcatgcagcggccccagacgaaggcacagcgcattgtttcagacattggcgaagggctgaccggtacagcgctcaccttgggcgcaggctcagcggctagcggtggcagagggcttgctcagactgccggcgagttcttcgctgcaaatcctgtcctgcagaccgctgccactgtggcaggcacaggcgcaagctcagccgttcgtgaggcgggtggtggtactggtgcacaggtagccgctgggctggctggtggcttcgctccaggcttcgcctcagcacttcccggcatgcgtagcggcttcgttcctcaggctgtcgcggatgctacccgtggagcgctaaggggccgcaatgcttcgggtgagcgcgtgactgcccaggacgtggaaagggcgatttccgatttcgcggcagcaggtacttcaccgagtgtgggccaggcaacgggcgggaggtttgcccaggctacagagaccatgttgggcaacgttgctggcggctctggtccgattgcgcgtcttgcgcgcaaccaggcggataacgccaacgcggcgattggtcagtacgcggcggaactctctccacgtggccgagccatgagtccagagcaagcaggacgtaccatcctagaaggaattgaggggaagagcgctgccgccttcgtccccaagacggccaaaagggcggaggagctttacggtcgagtcttgaagaaaattgcaccggatgcacgggtgcctgtggagaacacgcagagggcgcttgccgatctgaacgcctccattgaaggagcccccaacgttgcgcgcctattccagaacgctcgcattcgaggaatcggcggtgcattggacgaggatgtcggcggaatggaggcagcactgcagcgccctgatgtacagcggcaagcagagcagctgaaacagcagcttgaggggcaggcgcagcgggcagctgcggagaacgcgcgccttcagtcactggggttgcgtggctcgcttcccgttctgacgcctcagcagatcgacgagcaggtggtgaccgccgtatctggaatggccgacaaccaactgccgtatcaggcgcttaccaagcttcgcacgctggttgggcgggagctcgataactactccttggctgacagcgttccccgggacaagtggaaaacgctctatggggcacttacgaaggatatggaggccgccgccacgacacccgaagcgcggcaggcttggagtcgggcaaacgcctactacgcggcgcgtagcaatcgaatcgacgccgtggcgcatgtggtggataagagcggcggaccggaggctgtttacaaggcggcgtttggcaacacccgagagggtgcgaccacgttgcgagcggtgatgcagtcgttgccaaaggacgcccagcgtgaagtatcggcgtccttcattcgccggatgggtcgagccactggcagtcagcagaatgcggacagtgacgtcttcagtatggagacgttcctcaccaactgggcgaacatgagccctgaggccaagcgagtgctgtttgaccgtcatggcctcggtttccggcaggacatggacaggatcgccaggatgacggatcgaattcggcagggaagttcggtgttccgaaatccatctggatccgctcgcctgatctccttgataactcagtcggctggtactgcgagcagtgccggtagcgcattggtggcgggtagtccgctgctggctgcagggattgtctcaggctcgatggcgctggctggtggcttgaatggattggcccaccttttgaccagccccggcttcgtgcgctgggttgcgcagaacggcgagaagccaattggtgagctgatcccgcaagcgcgtttactgcgggaaattgcagagcgagaagacaacccggatctggatgcgtttgcagatcggcttgaggctacgaggccacagcgaaacccgtaa

SEQ ID NO: 510323 - DNA, 1995 bp, Stenotrophomonas maltophilia
atgaactcctacattcacaatttcttcggcagggtcacgccgagatggcagggcctgtccgagaaggaccaaggcgcggttgctcgccagagcttgctatccgctggacttgccatgctccggccgaccggaggcaactttggcgccgcattggcaaacggcattcaaggtgggcttctctcagccaatcaaggcgtgagcgatgccgagaacgcccgctacaaggacgaaatcctcgctcggactcgccagggcatgctgcggaacgcggctatcgaagaggctcagcgaggcgtacttaaccctgacggatcgctcaatgagggctcatggagtcagtgggcaagtgtcgaccccgttggcgcccaggagttccggcagaaggtgagcccgaaggcgaaatgggagccgggccagatcggctatcgcgacccgaagacgggtaaggaggggctgctggatgtcatccgcaacaccgaaacccaagagtaccgggatctccaaggcaacatcatcagtgaaggtctgcttggctcaggagccgctgcaccgcagttgccgagtgcaggtcttctgtcgccggccacagcccggctgcagatgcctgccagtggacttcttgcccccggttccctcgggcagtttggcgcaggaaacattgatctgaccatgcggccacgggtcaagaatccggatggttcgatcagcacggttctttccttctcgaccaacattgatgggaaagaagtgctgcttccgctcgtgtccgacgatggccgaatcgtgtcggaggatgaggcaatccgcaactacgagcgtaccggccgatacctcgggaagttcaatacgccagaagaggcggatgcttacgctgagcgactgcacaatgagcaggagtccatctatgcaaaacctgatcgaggactgctcggttctgacgtcgtgccaagccttgaacaggccgtgatgcaggtggagtcgggtggcaacccggctgccgtgtcgagcaagggtgcagttggcaccatgcagacgatgccgggcacgctgcgcgatccgggctacggcgttgcgcctgcccgtgatcagtctccggctgagcaagagcgtgttggtaaggactatcttggggccatgcttcgccagtacgcagacccgcgtgctgccttggcggcttacaactggggtccgggaaacgtagacaatgcccttcgtgcagcaggcggtaatgttgacgccatgcttgcatctgctccggcagagacccgggcatatgttccgaaggtgctggcgcaggcaggccagccgaggccggcgagaactgctggtctggaaattggtttcagacccgatcgttcggttcgtcaggcggagcgtcaagctccgtctggctaccgctttagtgccgatggctcacagctagaagctatccctggcggccccgcagatcgaaagaacaatcctgcccccggagatctggctcaggcagagcaggcgctgcggaaagagttcatcgctcagattaaggttcctcagacggtggtccactcttacgagcagatcgcgcaggccgcgaagaatccatctgcgcagaacgatcttgcgttgatcttttcttacatgcgcatgcttgatcccacttcggtggttcgcgagggcgagttcgcgaatgctcagaacgctgctggcgttccggaccgcatccgcaacgagtacaacaggctccgagatggtcagcggctgaaccctgagcagcgaactggctttgttaactccgccaaggggctgcacgaccaggcaaagtctcagatcgacgcttatcgagagcagtactcgggcttggcgcgggaatacaactacgcgccggagcgtgtagtgggtaggtccactgccgcagttcccccagcggcggtggacttccttcggaagaaccccaacatgcgtgccgccttcgagcagaagtacggcgttagcgcagatgactacctgaggtag

SEQ ID NO: 510324 - DNA, 828 bp, Stenotrophomonas maltophilia
ttgaacggtcgagctcagttcaaagctagcctaaagcaggtacgagcaccggaaatttcagggctgtcaaagccctggctggaaggatcgattaacgtggatcgagcttccaaggcacttgccgctgccttcggttgcgggccatgcatgtcgctgccagtgcaagcgacttgggtggaggttctgcctgatgaagacggctcaattgaaccagcggggctagccattcacaccagggggcgagtagttcaggacgctcggggatatctgcctaaaggtacaagggcacgggcagccgctctacgctccttcagggctgaggaccggaaagccgctgaggacttcgaccaagtagcgaacatgcgtgcggacgcgtgcgccacgcgtgtccgacgcgtgcggcgctgggagaaccacagttttgcaggcgcgttggtcatcccaactgtgaggccggtgaagccagtgctgctggcattgtccgacgcgtcacttgacggcccacttgaggcatggctgatggtctatgcagcacagaggatggagctatggcccaaggtcgagctctatctgaccgtgatgggacatacagctgaagtggcaagggcggcggcggccaagcttctcggcgtcgggcgcagctacaaggacggcgcgcgtagtgcccgagttcgagagggtacctatcggaagcaggtgtctaccgtcgaagccattctctgggattggcttgaacgggccagctacgccctgctggaggagctcggagagagcacaggatgggatgttggcgtgggaagaatcttgaatgtgacggcgagtggctaa

SEQ ID NO: 510325 - DNA, 537 bp, Stenotrophomonas maltophilia
atgacggagcaggctattggtcagcttgtgccacacgcgtcatctggcctccttgtcagtctttccaccggaaggatctttgagccggatggattagaggtagggatccagacttcggacacctatgtgagggtgatacggcgccagtcagaggcccgtacccccgtgacttggtacgcgcaccgactggtatgggaagccgctcacggacccatccctgagggcatgcagatcgatcatctcgactccaatgcgggcaacaacgcgctgtctaatctagatttggtgaccccccaggagaaccgcgccaggcaggctaataggagtctggcgctgtacggctgtagatcaccgtactgcaaattgtcgcccgaccaagtcagcgcaatacgcgacagcacggagagcattccgtcaaaggtttgggtcaagcgactcgggatatctcttcgcacggtgaaccaagttcgtagcggacagacctgggcgcacctgcctgggaagcgcgccgcgaaggcgcgtcgcaagaagccctag

SEQ ID NO: 510326 - DNA, 288 bp, Stenotrophomonas maltophilia
gtgaacgggttcaatttttcctgccttaaccgggagcagtcggctcttctggatgcggccggttggacggccggctgcgctcgtccagcccctacgcggcgcgccgtcagggagctggtagagcgtgggctcattgaggcttaccccgccacgcatgaggacgaccacggatcgtacaaggtggtcgagtactacgtcccgcaagacgttcagcgcgcctggcagacattgagcgcctcaagggaaccggagattgagccagacgaccgggaggaggggcagctatga

SEQ ID NO: 510327 - DNA, 711 bp, Stenotrophomonas maltophilia
atgcccagcaaagagttcatcgatccacagtacgccatggtaagggacgctctctcgggttcggctgcctacgagttctgcttgcgcacactcgaaggcagagcccaccgtccatttatgatctcgaagagtctaggggactggatacacgcggctgttagcagggggctcgcagagctggagcccttcgaaaagttgacccaggagcagcgcgaggagcgcgcggagaagatcgtgctccattgcgaggcgctacgcgagcttctgatccccttctaccgagagcagtacggacttgattggccgttccagccattcttcgatcacgcagccctcgagagcgcattgaattaccagaggcgcatgggcgtcaatttcgccgatgaggatgaccaagaggaagacttagttcataagcgattcgccatctatcacggcatcatggccgacctgggcttggtgtttgacgcaattcacaatggggccctgatgctcccagagttgaaaacagaaattaagaagcctaacgatccgaatgttaagcgtttacgcttcattcggcgtctgactgaagacctccagagtcactttgggaagcctcaccgggctgttgtcttgtcgctgacttcggtcttctttgacacctcagatctggacgaagcggcgatctcaaagctcgccccggtgaaggccgcagctcgcgcgacctga

SEQ ID NO: 510328 - DNA, 711 bp, Stenotrophomonas maltophilia
atggatagcgtgagtataagtgctgcgtccgagagagcgcataaagatcccagcggctgtgagccggccattcaggcccgcgacccgattgacggactcttggcaatgggggtggctccccgcttgctcatctctcatcaactcgtttgcatggactggctggccgtgcaccgccgagacaggttctgcctgtgctacttcgatagcagagatgaagttgtgacggaaatgatgggggccgatcagcttctctcacgtgcacaggcactgggctggcggcctgtggaagaacctctgaatccgggtgcaggtcgccatctgtttgaggaggcctcatacaacaagcggaggggcgtgcactggtacgcggtggctcatgacggcactgaagagatgcttcctctaggctttcccgaggtcgccctaaaggcaagccagaagcgccagcggcggcgggacctagcgttagccaggcgcgagcggagctttcagaggcaagtggcggagcaggcgaagaagagagcaaagcaacttatcgacggtattgccgaggaccttttacgtaatccgtccgctgattgccctccgctccgaactaaggcgcaagccaagcgcgcggcccgtgagcttataagagacactgtggctcgtctgaaggccactagggaggatacaaacagctctgggggccctaggcgggagactacatag

SEQ ID NO: 510329 - DNA, 132 bp, Stenotrophomonas maltophilia
atgtctgagcgtagcgagttcggcaccgtcccctgtttcaccgagaagcgcagggtaccggtgcgcagcaccggctcgcggccggcggaacgtttcttttggttacttttctttgcgtacaaagaaaagtaa

SEQ ID NO: 510330 - DNA, 474 bp, Stenotrophomonas maltophilia
atgactgagcttcactattgcgacttctggttttctgcgaagaagtccgcgcgaaacataatcagtgaatccgaggctaaatcgagacatgagagccaggctcgctacacggttctcgttggctcccccaccacgccatcagcgatcgtcgatgtgctgttggacaaagacatgattggtgtcgactttctggatgaatatctaagggagcgcctgacgtatcagtttcagcaggtagcaccgggaaatctgttcctgagcatggcggtacatagatcgttcgctgagaagagtgacagcattgccgaaggaaccagctacctcttcaatgaagatggacggctcacgataaccagggagactttctcgcctcatcatctggaagagtcttcaacaacgcatgatccgatagacaactatgagcctgttcctgacttcggccattactctggtctgattgcagaagaaagatag

SEQ ID NO: 510331 - DNA, 138 bp, Stenotrophomonas maltophilia
atggatctggattacagcgctgcacttaccgttctggccggtctggcagcgggtgttgccgccatcggcaccgccaagctggcaccggccgcaatcgcggttggctacaagtggttcaaggctgcgatcttcggttga

SEQ ID NO: 510332 - DNA, 822 bp, Stenotrophomonas maltophilia
atgcaggacgcgcagtactggttgaacgaattctggtcgggcctgagcgtgctcgatctggtgggcggcagcgtgctcggtacgctgctcggcctggtgctgggcatcgccggctggcgctggctgcatcaccgtggttggttgcagcggcgcaagcgctggcatcactggctgctggccagctacgtggtgctgctgccgctggccactgccttcttcggcctgcagctgggtttcactgccggtgcgcaccgcgcgctgttcaagcagctcgatcatttccagccgcacctgcagaccctggtggaaggctggagcgaaggttttaccgattcgctggacgacccgcgcatgcgcgaggcactgcgcagccagggcacggtgggcgacgtcgccgacaccatcgcctcggcctacctcagcgagcatccgctgcccggcctggaccgtcttggcaacggcccgttggcacgcggcaccggttgggtgatcggcaaggtgcgcgaaggcctgctgcgcggcatggtggaagacacgctggtggacaaggccggcacggtcgggctggagcccgaggtggtgcgtgaagcgctgacgatgcgtgtggatgagctgctgcacacccgtggtgtgctgcgactggtgaaggcgcagatcaacggcatgatgcccggcgtgtacctcgggctgctgttgccgttgttgatcatcgcgctgttggtggcgctggagatctgggccgcgcagcggttcggatgggcgcagcaggtggtagtgccggccgctggccggcaatttcaggttcctgccgggggttcatga

SEQ ID NO: 510333 - DNA, 2883 bp, Stenotrophomonas maltophilia
atgaccagtctcaaccgcctcatcacgccaagccgtctgccactcgctctggcggtcctcgcctgtctgcaggcagccccggccctggcccaggaagccgacagaacggaatcggcggcgtcaagcgcctcgcatgagggcaagaaggcgaccgaccttgacaaggttacggtcaccggctcgctgattcgtcgcgccgactacgagaccacctcgcctgtcttcaccatcgacacagaacgaaatgcaacccagggccaggtgaacgtcgccgagttcctgcagaagtcggccatcggtgccgctgaaacccagatcaccaaccagttcggtggcttcaacaccaacggtggtaccggcgtgcagaccttctcgctgcgcggcctgggtgctaatcgcacgctggttctgctggacggccagcgcccaggcccggccggtacccgcggtgccgtcggtgcattcgacctgaacgtgctgccgaccgccgtactgcagcgcgccgagatcgtgaaggacggttcgtcctcgatctatggctccgacgccgttgccggcgtggtcaacctgatcaccaagaagcacttcgatcgcccggaactgaccgtaaccggccgcgtgccgaccgaaggtggcggtgaagtattctccgcgtcgctggccaatggctggaacttcgagcgtggcagcatcgttgccgccgtcgagtggtaccgccagaatgaactgacccgtggtgaccgcgattacttcaagtgcgccgaagacctggtctgggacgcagacggcaatcgcgtcgaccgtgttgaccgctcgatcctggccaacaccaatctcggcaactgccagaacatgctgcacaacgtcgtggacgtgaccaacaatcgggtcaccacccgttacgtgcccagcccggatggctccacggtcggcccgttcccgggctatcgtccgcgcgccaaccagacgtatgccaacggcaacccgattgccacctatgaagagccgtacaacttccaggactacggcaagtcccacatcgtcaacaagcaggagcgcaagtcggtctacttcgctaccgacttcggtttcgactcgttcaactggaagacccagttcctgtacaacaaccgcaccacggacaacttccagtggcgccagttcttcccgaccgtccgcctgccgggcagcgcaacggcgaccgcacagccggtcattccgttcaagagcatctccaacaccgaagttgactacttctacttcgccaacaagcttgatggcatgatcaagggcaccgatacctgggcctgggaagtcaacgccaactacagccgttccagcggcaagtacagcaccctgggcatccgcaattcgatcagcggcgatatcggccgcccgggcgcgggtaccacgatggccgcgaactacttcgatccgggctacctgagcggtgccaaggtcgatgagctggtgggcatcctcggcgtgtgggccaacggcaagaccacctatgaccagaccaccgtcaatgcggtgttcagtggtgaactgttcgacctgccggccggtgccctggcaactgcggtgggcttcgagtatcgcaactacaagatcgacgacaagccggcgccagaaaactacgatctgtggggttcgaccacggccgatcgcaccaagggcgatgacaaggtcaaggaagcattcgtcgagttcgacattccgctgctgaagggcctgccgggtgtcgaatcgctgtcggccaacgcctccggtcgcgtcttcaagtacgactcgatctccggtagcgacaacgtgtggaagctcggcctgaactggcagatcattccctcgctgcgcctgcgtggcaccatcggcacgtcctaccgcgcgccgggcctgtacgaaatgtacctgggcaaccagaccggcttcctgtcgcagacgcagatcgacccgtgcatccgctggggtgaaagcagcaacacccgcatccaggcgaactgcgccgcagcaggcatcccgggcgactacactgccgctggcaactccagcgccaccgtatacacccgtggtggcaaggacggcaacctgactccggaaacctcgcgcgcgcgcagtgtcggcctggtcttcacgccgtcgtttgccgacctgagcattgcgatcgactacttcgactatgaagtgcgcgatcagatcacctcgctgggtgcatcctcgattctgcagggctgctacgaatcgaccaacttcccgaaccgctactgcgacctgctgcgccgcaatccgaacaacagcgcgaacgcgaacatggtgaccgaggtgtacgcccagtacctgaacatcaatcgccagcgtacccgcggttgggacatgaccttgaactgggatcatgagttcagcttcggcaagttctcgctggactcgcagatcacctacacggtggaagacaccgccgagctgttcgacagcgcggcagccagtggcctgtcctcctccgatcgcctgggtgacctgggtcgtccggacctggtcggcaacctcggcctgagcctgaagcgcggtgactggacctacaactggttgacgcagtacatcgcccagaccaaggatccggacctggacgagaagttcacctaccagaatcgtccgaactcctaccgcgacaccaccctggaaagccgcttctaccacaccgcttcggtcagctacgaccaggccgactggcagatcctggtgggcgtagccaacgtgctgaacaccaagccgccgctgatctccagcagcgtctattcgtcgcgctacggcaacacctatccgttcgcgacccagtacgactactacggccgcaccccgttcgtgcgcctgaagtacaagttctga

SEQ ID NO: 510334 - DNA, 2034 bp, Stenotrophomonas maltophilia
atgaaccaccccgctttgacccgcaccagcctcgtcgccgccctggcgctcgttgccagcgaggccgtggcttcgcccacccctctgccggtcgaggactttgccaagatccaggcgatccagtccgtctcgatgagccctgacggaaaacagctggttgccatcatcgctgcgccgggcagcaacaatggcgacacagccctggccaactggaacctggacaagattgacgcaggaccagtcgccatcaccccttccggcgaccgcatgaagttcattgcggccaatgccctcaaggcaggccgcagcctggtgatcggccgccaggaactgaccgcgcagttggccggttgtggcgaaggcaattctgtaggttcaaccaagacattcctggccaaggcctacctgaccgacagcagtcaaaccaagttcgacgaagcctttgctgacaatagccgcaagctcggcatcagcgaacagacccggcgctgtctggaaattgccggcacagcctcgctggtgcattcactgccgctggatccggacagggtcatcatttcccaggtcaatcaatccaccctgtcgtcgaactattatctgttcaacctgcgcaccggtgaggcggggctgctgttccgcggcgacgcccgctccacgccaggcctgttccaccctcgcgatggcgaactgctcacccgcacccagatcgaacctgcgggctccaatgagtacgaacagcagatcctgatcaagaacaggagcagcggtcagttcgaaaagcatgacccgctgaccacacgcctgagtgatcgttacacgatggatgtggccgggaccgacgaccggaccggcaagctctacatactcaccgacaagttttcggagcaggtgcaagcccgtctctacgacccagccagccgtacgttcgacaacgagccgctggcggcccatccgcagtacccgattggtggtctgatcctgggcaccaagccgagcaacttcaaccaggtactcggcttctatctcgacggcccgcgtagggaagcggtgtatgtcgacccgcagatgaagagcctctacgaaggcctcaagcaggcctaccccggcacctacatcgccatcaccggctacaacgacgacctgtcacgggtcctgttcaccaccaatgccgccgaccaacccacggcctaccgtctgttgagcgatcgcaagcatgtcaccaccctgggcagcgagcggccatggatcgacggaaagcagatcggtgagcagcgctgggtcacctacacagcgcgcgacggacgcaagattcccgcgatcgtcgaccttcccgccggttggaagcagggtgatgcaccgcttccggccctggtacatccccatggcggcccctgggcacgcgactacaccggctgggatgtctctggctgggtgcccttcttcacgtcgaggggctacgcagtgatccggccgcaataccgcggatcaaccggctttggccgcgagcattggcttgccggcgacaagcaatggggactgtcgatgcaggatgacaacgacgacgctgcggcctggcttgtgcagcagggaattgccgccaaggatcgcctggccattttcggctattcctatggtggctttgcagcggcggcggcaaccgtgcgcgcaccctctccgttccagtgctccatcgccggcgctccggtcacagaccttgcgcgactgggggtctcctggagcgagaacaggttacagcggatcctgcagggacagaccgtcaaaggcatggacccgatgcagaacaccgcaaaggccgccattcccctcctcacctttgtcggggaccgagacgtccgcacccctgccttccatgccaggaacttctacaacggtgtcaaggacaaggtaccggcgaagttcgagcttgttccggacatgccgcacagcatgccctggtatcccagtcactatcgggtgacgctgccgctgatggccgacttcctcgcgaaggactgtggccccggcggcctctaa

SEQ ID NO: 510335 - DNA, 2808 bp, Stenotrophomonas maltophilia
atgaaatacgtaagcaacaccgcacgtcgcaacacgctcgccgtcgccctgatttccgctctgatggccgccgccccggcaatggcccaggacaaggcgaccaacctggacaagatcaccgtcaccggttcgctgatcccgcagacccaggttgaaacccagaccccggtgatgtccatcacctccgaagacatccaggcacgcggcttcaccagcgtggccgaagtgctgcagcagtcctcgctgaccaccggcggcctgcagggtggccagacctcgggtgccttcacccagggcgccgaagcctccggcatgttcggcctgaacccgggttacaccaagtacctgatcaacggccgcccgatgctttcgtatccggcgctgtacaacggcagcgagtcgttcaacaacctcagcggcattccggtcgacatcgtcgagcgcattgaagtgctgccgggtggccagtcctcgctgtacggttcggacgccatcgccggcgtcgtcaacatcatcctgaaggagcgcatggacggcggcacgatgaccgtccgcggcggcacctacaccgaaggtggtggcagcaacctgcgcatcagcggcgcgcacggcttcaccgccgtcgacggccgcttcaacgcactggtcaacgtccagtacgaaaagggcaacccgatctggggttaccagcgcgacatcacccgccagaccaacccggtcggcttcaccccgcaggctccgtccaacgacttcctggtcattggtggcggcaagtactacatgatggacccgagccgttgcgccaatgtcgccggcctgtacgacggcaccaccaccgtcggcttccgtgaaggcaagggcgagtcctgcggctcgatctacagcgcgggctacaagacgctgaagaactccaaggacagcggtcagttctactcgaccatgaccttcgacgtgaacgacaacctgcagctgttcgccgacgtgctgtacagcaaggaaaagaccgagttcacctccggctccagcgccctgtggtggggcacgcagtcgggcatgggcggtttctacgaccagggcctgggcaaggtcgtcaacctgcagcgcgccttcgcgccggaagaaatcggcgtcggcgactacaacaacatcctcaatgccgaccgcagccgttcctaccaggtcaccctgggtgcgaagggcatgttcggtgactgggactacagcgccagcttcacccgtggcgagtaccgcctggaccaggaccgcttcgtgcgctggaaggacaagatcaacggcttcttcgccgatcgcgtcctcggccagcagctgggcacctacaccgacccgaagaccggcggccagttcggcatctacaacccgaactatgctgcgttctactcgccgatcaccccggaagagttcggcagcttcaccggctacggcacccaccacagcaagacctggcagaacctgggccgcgtgcagctgaccaacggctcgctgttcagcctgccgggcggtgacgccggcctggccgtggtcctggaaggcggcagcgaaggctggaactactcgccgaaccagtcgttcatcgacggcaatgtgtggggcaccaccgccgtggccggcgccggccaccgcagcagctacgcggtgacctccgagctgcgcatgccgctgcacgaaatggtgacggtcagcgcttcgggccgctacgacgccttcaagatcgccgacagcaccgtcgacaaggccacctacagcatcggcgtcgagttccgtccgctggaaagcctgctgttccgcggcaagtacggcaccgccttccgtgcaccgaccctgtccgacgccttccagggcatgagcggttcgtacgcgtccagccagaatgactactaccgctgcaaccaggcgggcttcgcgctgaatgacgacctctgcccgtactacaagaacacctcggtctacagcgaaaagtccggcaacccggacctgaagccgatcaccgccgacgtgtggagcgcgggcgttgtgtgggcaccggtcagcaacttctcgttgtcggttgactactacaactggaagatcaagaacgaggtcaagaccctgagcagcgaccagctgctgatggctgagtacgcgtgcgccaccggtgccgtgaacaacacctcggccagctgccaggatgttgccaactggatcacccgtgacaacgccggtgcgatcacccgcgtctacaccccgaagctgaatgtcgccagccagaacctggaagcggtcgccgtcagcgcgaagtaccagcaggacatcggccgcttcggctcgctgaacttctccggcaactacaccaacatgctgaagcgcgagctgcagccgctgccgggtgcgcagaagatcgacctgctgagcgatccgtacaacatgtactactacgacaactacgccaaggtgcgtggtgacctgtcggtggcctggaacatcgacaagttcaccaccacggtgtacgcgaactacgtcggcagcacgccgaactacgtcgcctacctgggtcgcagctacgactacaccaaccgctacggcgccaaggccggcaagtggggctcgtacaccacgtacaacctgagcttcgcctaccgcgcacaggaagacctgaccctgtcgctgatggtcaacaacgtcttcaacaagatgccgaccggccagcgctacagctacgagggtaccgatggcaccccgtacaacagcgccttctacagcatctacggccgctccatccaggcccagatgaagtacgacttcggcaagtaa

SEQ ID NO: 510336 - DNA, 429 bp, Stenotrophomonas maltophilia
atgaagaaccagaagggcttcacccttatcgaactgatgatcgtcgtcgcgatcatcgccatcctggccgccatcgcgctgccggcttaccaggactacacctcgaagtcgaaggtcaccgctgcgctggccgacctggctgcgcacaagacccagttcgagatggaagtcagtaacggcaagaccccgactctggtgaccgctggtttccaggctgccaataccggcaactgctcgaccattgaagtcgatgacaccggcatgacctgcaccatccgtgatccgggccgtatcggcgacgcttccaagctgcagctggcctatgctgagccgagcgttgacgacaagggtaccatcaccaaggctggcggcttctcctgcaaggttaccgacgtcaagccgaagttcgtgccggctggttgcagctga

SEQ ID NO: 510337 - DNA, 1803 bp, Stenotrophomonas maltophilia
atgcgtcttacgagaattaaggaagccttggccgaggggcccgccgctgctttggtgttttttcttcaagctctttatgagcagctatatgatagaactgatcatagctacagggccccggcacttaatacatatacgcggacgttggagttgcaagttcttgcaaatagcaacttcaaggccgggattggcaaggaggcgctgcggcctttcgttgaagagttgaaatggagtgtatcaagagatgtcgcattatctgctgagcaacgagcgctttgccaggtgcacgtcgattcagccttggactccatatccgaaccggacagaattgctcgaagcttggcgggcctcaggatatccctcggcaattatttcgatctcgtaaagaaaaagattcaggatcagatagtgaatagccctgagaaaaggggcgatctctatcatctggcatcatccttcattgttcaagctgaggcgataggatatccacgcagacacacctatcatacgcttcagcgcgtgggtcacggtataacggatgagcggcttagagacccgcgctcaattatagaattcttcttttcccaatttgaggggcgcgctgaacacgactgcacgctaattgtctcaagtgaagcatcccgtatgaaggacctcatggggagattcggaattcttccaatcgagggtgatttgaatctgggcgggcttagtgctaggcaggcaaacttcgctgaaattaggtctgcgcagcagatatttgtgaggatcgaaggaataaaggcgccaagtgttgtaagggcggctcaagttgcgggaacacgctactcgtcgttctcagcaattgttcggtctgtcgatcacgagtttgattcagggaacgagccgctaattctggtggagcgcaagtcggataataagagatttatagtaagggaagatggcgatccgatgcgccgatggtctccttccgcaggaaagaatgaggaatacatgattctcctggcggatgctgttcacggaaagcatttgaccgaggaatcgaagaggcggttgttaaaggctgttacatatcacagctctgcacttgacacttcctcggtgccccacaagctgaccactctatgggctgggcttgaaggcctgctctctacgccaagaaagggcatgtcgcgtattgacttctttgcggaatgtatacttcctgcattgagtctaaactatcctgagtatctccttaactccctaatgactaggttgtacgcccttcctggagtaaaggaggaaatcgaaggtcaggttggaggtgagtactctgagttggagaagtttgcgagattcactctgtgcaaagagtttgacaagaagcgagctagggttactcacatgatggggcacaacgagcttttaataagatttaggtgctttgaagtttggactaagcttagttcggcgtcggccatgtgcgagacgatttcggcgcacaggcgtaaagtcaagtggcacattgaaagggtgtattcaatgcgcaattcaatcatgcatgatgcatcggcacttccgtatgttgaggtgctggttgaaaatattcatggctacatagatattctggttgagtctattgcaaaaatagcggttgctgccgaggaggctgtgtctattgagagcgctattctctacatggcctcgttggagaagtataggatggagtacttgaaggggctgagtggagcgcgcgtttctacctcaaatatagatgagatgatttttggaaaagtggtcggattgaatcttgatttttga

SEQ ID NO: 510338 - DNA, 2475 bp, Stenotrophomonas maltophilia
atgggaactctgtctgcatcttcagccaaggaagaggggctcggcgagcgtatagccgcataccgagcagccctcgatcaagatgataacgaagctcaaacgcgcttccatgtcatagacgagttcctcacgaatgagcttgactggaagaaggacgcgattcgcgtcgaaccctatattgaggacgcgggattcgcggattatgcgttctttagctcaggccgctgtcgtgctgtcctcgaagcgaagaaggacggcctagagctttgctcagtcaggcagactaacgtggcggtcgtttcccttgacggatcagcgctaaagggcgccgcagatggggtcagccaagctattgggtacgcggcaagattcgggtcggctgtgggtgtcgttactaatggccgccagtggatcatgtttcttgcttcgcgtagcgacggaaagccaccgaacgaagggctagccgtggtctttccgacgatagaatctattctcaactcgtgggcccagttctacgacttcatgtccgaagcggggcttcaagaacataagcttgccacctatttgagagagcgagaatcgggttcagcctcagtcgccgcctcctactttagagctgtggacaggagtcagaaacgcgtcccacaagtttctgacctggccttctcgctaagcgagctttttcgaaaatcgttcatcaagataaacacaaagtctcgagaagctctcatcgagtgtttcgttgagactcggtccagtcgtgagacggacgtcgccttcgagaaaatcgtcaacgagcttatagatagggcacttcggcgcctggacacaattgatgtctccaatcctgacaacctacagggattacttgagagctcggtagatctcagaaccggagaatttgttctccttgtcggcaacaaaggatccggaaagacaacatttcttgatcgtttcttctcaaagattcttcctgcaagcctcaaggagcgggttctccacttgagcgtggatctgcttaaaagtgagggctcagatgcgcaccttacagactggatgtctggcgagctaattcgacaagccgagcgacagcttttcgggccaacgccaacgtacgaccagctgcgaggtgcattctggccgatgtacaaacgcatgagtacaggggagctcgcgcccttgtacaagcgcgaccgggacgcgtttaggcaacggttcggagaggacctagcaatgctgcgaagagatcagcctcgcgagtacctccttgagctcttgaagcgttccttggttggtcaacaacgattgccgattcttgtatttgacaatgtcgaccaccttcctcgctccacccaggacagggtctttcagtacgcggtgggactgtcaactagcgtcgcatctttcctcatctgtcccgtaactgacactacagtttggtcgctcagcaaggctggaccacttcagagctttcattctcgcgcattctttctacccgtgccaagcttgaaggatgttttcgccaagcggctagacgttctgcaagccgagcttcgggatactgaagatggcaagggaaaaagcgctctagtcgggcaaggaatgcgactgacgataaaggacctgcagtcattttgtgctgccgtcgagtccatatttgtttcaacgtccgacataacggcagtaatcggaaggctgtgcaactacgatgtcagaagaagtcttgagctctctggagaaattctctcttctccgtggatcggcttggaagaacttctgaggatgtacgtggccagaggcgaggttcgtccgaagagaactgcacttatgacggcactggtcttacagaaaggtactctgtacgacgaagacaaacacaacttcttggtgaatattttcgcccgccccgccggcgccctagcgtcgccctttatgtcgctctatctactccgctttctgtcaatggcagacgacgaggcctcaactacacgcgaccgcttcatcagcgtctcccaactttgggacaagttccactctcttggcgtccatcgcgagaccttccgctactacatcgacaggttgttcgcgcgcgcactgattgaagcttacgacccttcggaaagggtactgcgagatgaaacgcttgttcgaataagccctgctggagctgcacactctcgactcgtctacagcgacaacgtctacatatcacaaatggcgttggttacacccctcgccaatgaggctgcctgcatatcgattcgggaagaatctcagaagacttttcagggatggatgaaaatctgcaatattcttctgacgcagatgaagatcgaggatgctcgggtatttcctgcgctttccgatgagctgtatccttggatcgttgccgtgcgtaatgatatcgacctgctacaccagcgcattgaagagcgaaagcctaaaaagtggacgaaaagctcaaatcgagcgtag

SEQ ID NO: 510339 - DNA, 882 bp, Stenotrophomonas maltophilia
atgcgcgaagcattcaacaagaacgatacaagtggatacagcgactatcaggttgcttttgggtggatcgacaagcgaccctacgcgaagctagcagggctaagttcccgcgtcgagctcggagatcttgcaataatcgcgcttaacaaggttgtttgcccgggacggccagcccgcgacttcactggtcgttgtgccctgatgcaggcgaagctgcaggacgtaggcgtatcaaacaagctcaccgtcttgttcggaaaaaatgactcaagctccgcgaatcaaagctatcttctttcgaattggggtcggttcgatctatttcggcacagcactggtggaccagaaatcggcagtttcaatcttccggcacaggaggacagctacggctggttcatggccgctcaccgcgattcagcccaagccgggcaacaacgtgctgcttggttgtgcggcccgcccgatgttggcaccacctgtgacgtcagcatcggcgaggtcattgcctctgttgcttcattcggcagccaagtcggcgttggcgctcgttgtacgcttacgcctcagcttcagcggaaatctagcgactgggatgagttggtcgctctattgatcaacgagtgcctctgcgaggagctgcccgaggttgcacgggctgtggcaggggagggcagccgacttgccggaatcttgcagatgatgcctgtaggcagacctggaggccagcttaatggctttgactgggagcttccatcagagctccgaggcgggagacatacagagaacctactcacggctcgcctcgcaggtcagcacctgttagaagaggaggataggatgggggtgctggtgatcaaccggactgtcagcgagaaatactag

SEQ ID NO: 510340 - DNA, 234 bp, Stenotrophomonas maltophilia
atgccctacatggatccacccattcccggcagctaccaagggcagtggtccagcggtctaggcggtgggtcttgcccgtcacctcggaccatcaatgtatcgctcggcggctacagcgccgccatggtcttcgagttcaagccgctgtgtgatttctctcggtacatccgcggcatggtgatcgcattcgcagccatcgttgctgcctacattgttttggggctcagaagataa

SEQ ID NO: 510341 - DNA, 285 bp, Stenotrophomonas maltophilia
atgccttggcttgccgccttccttgtccaactcctgggcaactctctcgcacgtgttttgaccggcgcgggcctcgggcttgcgaccggcgccgcgctgcttccgctggtcaaatcagcattgaaccttgtcgtctcctactggggcggcatttccggtgacctcgccaatgtgctgctgctcgcaggggcaggggaggccatcaccatcgttggctctgccatggtcaccaaggtcgtgattgacgctggcaaagtcgcagttcagaaggccgcatccaaatga

SEQ ID NO: 510342 - DNA, 1221 bp, Stenotrophomonas maltophilia
atgatgtatctcatttccggtcagcccggcaacggcaagaccctgcgcgccatgagcatggcgcaggagttctacgagcagaaccagcaggccgtcaaagaaggcaaggcgcagccgcgacgcttcttcaccaacgtcgcaggtgcaaccactgaggagaatccggacgccttcccatggttcgaaaagctgcctgaccacaacgactggacccagcttcccgatggctcctttgtgctgtacgacgaagcgcactcggatggcaacactcaggggctggagcgctatggcaggctgttcccgtccaccggcaagccgggtgaatcggaagatccacgcattcgctcgatgtccacgcaccggcatcgcggtttcgatctggtgttcgtcacccagtggcccagcaagatccaccaccaggtgcgcagtctgatcggctcgcatacccatatgaatcgtgcgtttggcatgcagcgggctggtgttctgacgtggacccgcgtgcaggctgatccctacgacgaacggattcgcgataaggctgaggaagaaatctgggtctatcccaagaacctctatgacaggtatcgcagcgcaacgctgcatacggccagccacaagttcaaggtgccgaagcgagtctggcagggcctgtcagtggcggtcgccttgataggcatcctgtggttggggtggctgttcctgatcaaaccctccagcgcacaagctgcgaagaaggaagagcagggggccgaagctttgccggcggcaggtgccctggcgcccttgggcgcgggcatgccggcggcacggcccctcacccgcgaagaatacgtgcaaaaacacaagccacgtgtggagttccagccgtggtccgcacccgccttcgatgatcgaactgtgcaatcgcagcccgagctgtactgcatggcctccggcacgactgagcaggacaccacttgcacctgcataacggagcagggcaccaaggctaagatctcgatccctgtgtgcgtggcgatcgcgcgcgatggcccggcctacaacccgtatcgcgcaccgcgtcaggaagcggagtcgagtcaggatcacccgtctcgcggcattgctcagtccgcagcatcaggcacgcccgagccatcaccgcatgcgctggttgaggttgggaagcgccccatggggacgttcccggagacgccgccttatccggcgaccttctga

SEQ ID NO: 510343 - DNA, 207 bp, Stenotrophomonas maltophilia
atgagcaacctcagccaggtcaacgatgcccgcacgcccaaacggccgtttctgaccgcctctggcaatctccatcatccgacgccattcctgcgcctgtgccgccagcagggagagccaagccagatcctgtggttccagctcacggccttcgggtgtgaccagtcggccagccttaaacgaaaaaccggcccaagggccggttag

SEQ ID NO: 510344 - DNA, 177 bp, Stenotrophomonas maltophilia
atgaacatccattcctttgccgccgaacttgcgcagaccgatatgggccttttcgcatgcgctgtgctgattgtcgtctgcctcggcggcgcaatagcttcaatcgtgattgagcaggcatggcttgggatccgtcgcctgtggaatctccggaaggatcgctccgatggtcggtga

SEQ ID NO: 510345 - DNA, 993 bp, Stenotrophomonas maltophilia
atggaacggatgtggatggttcgcggcgatggcggcaccttgtatgacgcttttcgagagcgcggtgtcgttgctgtgggctggagtcagctcgctgctcatgccaagcctggcgttggtcgaaagcagctgatcgccctctatcaggcagctgagccgcaggccaagcatggcacggtagtgtcaggcgcttctcaggtgtggcgcttcgtcaacgacattcgagatggcgattgggttgttacctattctcctccaaaccgcatttactcgatcggtaggattgctggtcccgctacgcatcatgccgattgggcagagcagggcatgcctttagcccgagatgttcaatggggcgcgcaggaattgccgcgcgatcgtttgggcaccggtacaaagaatagtcttggttccaccttgacgttgttcgaggtgccgcgagttgcggctgccgaagttctcgccgctcttcaggggcagtcggccccgatggccgatgatgaggcagatgaggtagtagcagatcctctggctgacatcgactctcaagcggtggagcgaatcaaagaccgcgtcaacgagcttgattgggacgacatgcagcagctagtggcgggaatattgcgcgccatgggctacaagactcaggtttctccgccaggttcagatcgaggtaaagatattgttgcctcgccggatgggttcggattcgaacatccgcgtatcgtcgtggaagtcaagcaccgcaggggccagatgggaagtcaggaaatccgcagcttcctcggcggccgccacaaggatgatcgcggtctgtacgtcagtaccggcggcttcaccaaggacgcccagtacgaagcagatcgggcatccatccctctagccatgtggacgctggaccacgtggtgcgcgccctgattgagcactacgacgctaccgacgccgaaactaaacgaattgtgccgctaaagcggctttactggcccgcctga

SEQ ID NO: 510346 - DNA, 1956 bp, Stenotrophomonas maltophilia
gtgaatgaggggctggtagaaacgctgggccagcagggcagtatcttccaatgcaatgcgctatttacttccgacgattcggtggccttgaacgacaacgatctatccttgcgcaaacccatttgcaagcaatcagcggccaataggcgagaggccagcgagaccggcaaggaaggcagtcataacgaaacacgggacaaaaacttgaaacccatagaacaacaattcttcaacgatctggaaaagaagctctggactgccgcagacaagctgcgctcgaaccttgacgccgccgtgtacaagcacgtcgtgctcgggctgatcttcatcaagtatgtctccgatgccttcgaagaacggcagcgcgaactgcgtgaacagttcaccagcccgaatcatgactactacatggatccggacgcatacggcggcgcaggtacccaggagtacgaagagaatattgccgccgaactggaagtacgcgactactacaccgagaagaacgtgttctgggtgccggtagaagcgcgttggcagacgctgcgcgactgcgcgcaactgccacccaaagcggtgctgccgtggaataagccgggcaaggacgagcctgaggaaatgcgttcggtcggctggctgattgacaacgccatggaggccgtcgagcgcgagaatgcccgcctgaagaacgtgctcaataaggacttcgcccgtgtgcaactcgaatccaacaagcttgccgggctgatcagccatttttcggataccgacttcagcgccaaagagtacaagggccagcggctgaacctgaaatccaaagacatcctcggccacgtctacgaatacttcctcggccagttcgccttggccgaaggcaagaaaggcggccagtactacacgcccaagagcatcgtcaccctgatcgtggaaatgctccagcccttcaagggccgcgtttacgacccggccatgggctctggcggcttcttcgtgcagagcgaggagttcatcgagcagcacggcggcaaggcagtaaacggcaagagcgggcagattagcgtctacggtcaggagagcaaccccaccacctggcgattggccgcgatgaacatggccattcgcggtatcgacttcaacttcggccccggcccggccgataccctgctgaacgacctgcacccggacctgcgcgccgacttcgtcatggccaacccccccttcaacatgaaagagtggtggaacgaaaagttggccgccgatccgcgctggatcgccggcacgccgccccagggcaacgcgaacttcgcctggctgcaacacatgctctggcacctggcgcccaccggcagcatggcgctgctgctggccaacggttcgatgagttccaacaccaataacgagggcgaaatccgcaagcggctgattgaggacgactacgtggagtgcatggtcgcgctgcccggccagctgttcaccaacacccagatccctgcctgcatctggttcctgactcgcgacaagcacaacggcttcgcgctggacaagaagaagcgcgaccggcgcggtgaattccttttcattgacgctcgtcagttgggctacatgaaggaccgggtgctgcgggactttaccctggaagacattcagaaaatcgccgatacctttcacgcttggcagcagggcgaagggtacgaggatctacccggctactgccattccgcaaagttggaatttgtacgcaagcacgaggcacgtgctcacgccggggcgctatgtgggcgcggcagagcaggaagaggacagcgaaccctttgccgacaagatgcagcgcctgaccgcgcaactggcggaagagttcgcggagagtgcgaggcttcaagcggagatcaggaaaaatttgtcggggttgggctatggctggtgagtggccgtacaagcgagttgaagaaatcgccctga

SEQ ID NO: 510347 - DNA, 1335 bp, Stenotrophomonas maltophilia
atggggccatttggctcatcgatcaaggttgaaacattcacagatacgggaattccgataatcagtgggcaacacctgcgtgaggcggagctaacagacggtgagttcaatttcattactgaagagcacgctaactcccttagaaatgcaaatgttgaaaggggggatgtgatttttacccatgcgggtaatattgggcaggtggcttttgttccgagtcattctaaatacgagagatatgttatctcgcagcggcagttctatctgcgctgcgatactaatattattcttccggagtttgttgcctattatttcaaaagtcctgaggggcagcacaagcttctcgccaatgctaaccaggttggtgtgccgtcgatcgcacgtccttcgtcatacttgagaacaatcgaagtccccgttccctcaatcgaggagcaaaaaactgtcgtgcgaaacatcaaggcgcttgatgcctgtattcgcacgaatcgctacatcagccaaaccctccaagtcatggcgcaggccatcttcaaatcctggtttgtcgatttcgatccagtcaaggcgaagatcgctgccatcgaacagggtgaagacgcgctgctcgcggccatgcgcgtcatcagcggcaagaccgatgacgaactcgatcagatgccccgtgaccaatacaatcaactggctgccaccgctgctctgtttcctgatgcaatggaagggtcggaattgggaggggttcctcatggctggagtgtccaatccatttctgatctgacgcgaaacgccgtcggcaaggttgatgtgtcttcgttgactgtcgaaacctatatatcgacagaaaatatgattgagaaccgcgggggggtcactcatgcctcctctctaccttcggtctctgccgtaccgtccttcaagaaggggcaggttctgatttcaaatatcaggccatatttcaagaaaatatggatggcacgttttgatggggggagatcaaatgacgtgctctgtttcgaggcgaaagagaaggggtgctcggaatttctttacaatctgctctatcaggataatttttttgaattcatgatgcgcacatcaaaaggggcaaaaatgccgcgcggggacaaggacgcaatcgcgggctggaagtctccttgtgcgcctctcgaactgaggcgggccttctctgagatggtacgcccgttctattcgtacatcgaaaatctcagtatggaatctaggagtgtctgtgtactacgcgacacgctgcttcccaggcttctctcggatgattttacgattgctcgtgatctggctggtgaggagggtcaatga

SEQ ID NO: 510348 - DNA, 1278 bp, Stenotrophomonas maltophilia
atgactcagccagatagtttattccttgatgagcagagtgcaggctactttgagagaatcccaatttggaagagcggagagaaatgctttgaagtgatggctgatgagcgcagcggccgaattccagtgactcgattggaatcatggcgggatttcgctgggttgttggaaagtccattcttcaatcgtcctgcgatacagctcattttccgtggtcagcgacgctcggactggagtttgatgccgagcctcggtcgaatatccgagaatggggtcgtttccgagaatctggcagcgactcaacttgagcgattcaagcgggcgatccgaggccgacttagtgacaatagtcttgtcgatgaagatgacgagctttggtccattggtcagcatcacggattgatgacgcctttacttgactggacttactccccgtacgtcgccctgttctttgcctttgccaaggcagatagcaaggatgaagaagaaaatccttaccgtgtcgtctacgtgctcaacaaaagtttcactttggaacatcaggatgagactggcattcgactttgggagccgcgaaaggacagctacgggaggttggttaatcaggctggattgttcactttctctccgtatgacgccacgatagaaaacaagctggcaaatgtcttggctgacgacgaggcttttgaagatgaggagttgcgctccgcatcggaagaagatcagcccgatttattagctcgatacatctgcaagatatatgtccgcaatgaagggcgtgatgcttgcttgcgccatcttaggcggatgaacgtgcaccatgccagtctatttcctgatctgatcggagcatctgattattgcaatatcacaacctccgaagcggaggaggaagccagccttgcgcgtgctgtagagcgtgagcgctcgaacgccagtcaaattgttcaagtgccttccgttccaaatgttgatgttgttgaagctcccatcattgcttcggagcagatggccttcaacattgaggccatcttgcgtgcgcatcctgacgcgcagcaagttgagccaggacgtatctccttgatggccagcgagctgtttcacgatatttccaaacatcaagttgtggattgggaaaaacgcgaagacgttcaggctcgaatgcgtaacgttattcgagtcacgttgcgaaagaatggctatccatcgcaacttcgtgatggagcggtcgaccaaatcatagatgcggtgaagcggcaggcagcggggggacaatga

SEQ ID NO: 510349 - DNA, 3150 bp, Stenotrophomonas maltophilia
atgattactgaacaacagctcgaagacctttgcattgaatggttcgagagcctcggatggacatacacacagggcccagacattgcgcccgatggagaccaacctgctcgctccgactattgtcagactgtactgcgtgaacgcttcttggtcgcgctcatccgcatcaacccgaacatcccccccgcggcgctggaacaggcggcacacgaacttcttacggtcagcgagccgctgctcattgcacgcaactgccgtgtgcatcgactgctgttgtccggcattcccgtcgagttttcagtgggcgacaaaaagcgcagcgatctggtcaatctcatcgacttcgctaatccacgcaacaacgacttcctgctggtcagccagttcaccgtgaccggcaccaagcagccgcgccgcccggacctggtggcattcgtcaacggcctgccgctggcagtgattgagctgaagaacccggccaacgagcagaccgatatttgggatgccttcaaccagatccagacctacaaggatgagatcagcgacctgttcgacaccaacgtggcggtggttgtcagcgacggcttcacggcgcggttgggatcgctcaccgcgaatcaggagcgcatgcagccctggcgggcgattgccaatgaggatgaccggccgttgctggagttcgagctggaaacgctggtccgcggcttcttcgagcgcgcactgtttctcgactatgtgcgccacttcgtgttgttcgaacaggacgccgaccagatcatcaagaaaatcgcgggctaccaccagttccatgcagtacgcgaggcggtgaaggccacgttgattgccgccagcagtccgaacaagggcacggtggaggtacaggagccccgtgccatctatggcaaggaagtgcagcccggcagtcgcaaggccggcgtggtgtggcatacgcaaggttcgggcaagagcatcaccatggcctgctacgcgggcaagctgttgcagcagccggagatgaagaaccccacgctagtggtggtgaccgatcgcaacgatctggacgggcagttgtacggcaccttctgcgcggccgaagacctgctccggcagacgccggtgcaggcgggcagccgcgaggaactacgcgagatgcttgcctcgcgcgaggcgggcggcatcctcttcaccacggtgcaaaagttcgccctgctggaggatgaagagcaacatcccctgctgtcgggtcgcagcaatatcgtggtgatttccgacgaggcgcaccgcagccagtacggcatgaaggggcggctggataccaagaccggcaagtacgtgttcggctatgccaagcacatgcgcgacgcgctggccaatgccaccttcatcggatttaccggtacgcccatcgccctggaagacaaggacactcgggcagtgttcggcgactacgtcagcatctacgacattcaggatgcggtagacgatggcgccacagtcccaatcttctacgaaagccgtctagctaagctggacgtgaaccaggccgagatcgacgcactcaatgcccaggtagatgaggtcatcgaggacgaggaagacatcactgcccgcgagaagaccaagagcgattgggcggcgctgaccaagctcgttggtgcgcgaccgcgtctggaacaggttgctgccgacttggtgcagcacttcgagacgcgcacggccacgctggaaggaaaggcgatgatcgtgtgcatgagccgtgacatttgcgccgagctgtacaacgccatcgcggccctgcgcccggactggcacgatgccgacccggagaggggcgcaatcaaggtagtgatgaccggctcggcagcggacaagcccttgctgcagcctcatctgtacagccagcaggtgaagaaacgcctggaaaagcgattcaaagacccggcagacccgttgaagctggtgattgtgcgcgacatgtggctgactggcttcgacgcaccctgctgtcacaccatgtacgtggacaagcccatgaagggccacaacctgatgcaggccatcgcccgcgtcaaccgagtgttccgcaacaagcccggtggattggtcgtagattacatcggcattgccaacgagctgaaggcggcgctcaagatctacaccgaatccaagggcaagggcgatcctgcgcatagcgcggcggaggccctagccgtgttgctggagaagctggacatcgtgcgcgggttgatgcacggctttgattacggcgggtacgaaacggttgcgctgcaactgttggtgccagtggccaaccatatcctgggtctgaaggacggcaagcagcgcttcctggatgcaatgctggcggtgagcaaggcgttttccctatgcagtacgctcgatgaagccgaggccttgcgcaccgagattgccttcttcgccgccgtcaaggccgccatcgtcaagttcaccacggtggatcgcaagcgttccgacgcggacaagaacagcgcgctcaagcagatcctggacaacgccatcgtggcggacggggtggcagacatctttgcgctggtgggcctggacaagcccaacatcggcctgctttcagacgagttcctagaagatgtgcggcagatgaagagccgcaatctggcggtggagttgctggaaaagctgttgcgcgacgagatcaaggcgcgggcgcgcaacaacgtggtgcaggagaagaagtacggcgaccgcctgctggaaaccttgcgcaagtaccacaaccgagcagtggagacggcgcaggtcatcgaagagctaatccagatggccaaggacttccaggcagccttggaacgagaggcggcattgggtctgagtcaggatgagatcgccttctatgatgccttggccaacaacgaaggtgctgtacgggagttgggtgacgacactctgaagaacattgccatcgagatcacggagaagctgcgcaatagcaccacggtggattggcaggtgcgtgagagcgtccgcgcgaagttgcggattctggtgcgacgcaccctgaagaaatggaagtacccgccggtaggtgaggatgccgcgatcgaactggtgctgaagcaggcggaatcactgtcaaacgcgtggtcaaagtag

SEQ ID NO: 510350 - DNA, 1716 bp, Stenotrophomonas maltophilia
atgcgtggtgtcctggctgttgctgtttcccttgccctgttcgccggccaggccgcggccgcgccgcgcccggactacgtcggcaccaccgagccgttcgccagcgatgcggtgtacttcgtggtcaccgaccgctttgtcaacggtgatccgtccaacgaccatcgtgaccagggtggcgcgcaccgcaccttggatatcccggtgccgtgcccggacaaggtggacggcaacatcggctatctcggcggcgacttccgtggcgtgctcgacaatgcgcagtacatccgcaacctgggcttcggtgcggtgtggatcacgcccatcgtcgacaacccggacgaggcctttaccggcagcaagccgatcagctgcaccagcacgctgaccgaccgcggcaagaccggttaccacggctactggggcatcaatttctacaagctcgacgagcacctgccgagcagggacctggacttcgccgggctgaccaagggcctgcacggtgctggcttgaaggtggtgctggatatcgtaggcaaccacggttcgccggcctggaccatgccgacacggcagccccagttcgggcagatcttcgacaaggacggaaaattgatcgccgaccaccagaacctgccaccgcagaaactggatccgaagcacaacccgttgcacgcgttctacaacaacatcggtccggtcgacagcaaggacggctcgatcttcgacggcaatctggccgagctgtcggacttcaaccaggacaatccggcggtgatggactacctggtcggcgcctacctgcagtggaccgcgcagggcgtggacgcgttgcgcatcgacaccatcggctggctgccgcacccgtggtggcatgaattcgtcaagcgcatccgcgccgagcatccgggcatgttcatgttcggcgaagcgttcgactacgatgccgcgcgcatcgccgagcacacctggcccgccaacgcgaacgtgagcgtgctcgatttcccattgcgcggcgcgctggagcagaccttcggcaccgccaacaagggcttcgagaccctggccgagccgctgcacctgagcggcggaccgtacgccaacccgtacgagctgatgagcttctacgacaaccacgacatgccgcgcctgcaggccagcgacgatggcttcatcgatgcgcacaactggctgttcaccgcgcgcggcattccggtggtctattacggttcggagacgggcttcatgcgtggccgtgccgagcatgccggcaatcgtgcgtacttcggccagccgcgtgtggatgcggcgccgaagagcccgatcttcgcgccgctgcagcgtatcgccaggctgcgcgaagccaccccggcgctgcagcgcggcctgcaggtgaacgagcgcctgcagggcgatgaggcagtgttcttgcgcgtgctgcagcatggcgaggtggcgcagaccgcgctggtgctgctgaacaagggcgaccacgccaggaccctcaccgtggcgcgtttcgtccagtccggccgctggcgcgatgcgctggacggcggttcgttgcaggtgaacggtccgctgaaggccgacgtgcccgcgcacggcgtgaaggtctatgtgctggacgctgccgtgcagcagccggcgctgcaggccgagctggacaaggcgatggccgaccagaaggcgcgggaccagcgtctggggcggtag

SEQ ID NO: 510351 - DNA, 1332 bp, Stenotrophomonas maltophilia
atgatgcccaagctgtcggtccatgtgatgcaagacggcgagcgagttccgatgctccacgacgagtcgggccttccgctgttctatcccacgttgtacgcgacctcgcagctgcgaaatgctggcgtggccgtcaataccatccgcaacaagcttgccgatctgatcgtgttgttacgatgggaattcgcgaatcgtcgtaacttgatttcggacttccaggctggtcgctttctgaccatcgccgatgtggtttcgctgcgcgatttcgccaagcttgatatgcggaactggaaatccgatgggcacagcacggggaagccaggtgtccatgtcccgagctttttggaggcgacgattgcttcgagccgagctcttgccgcaattggcccgcaacagcatttcaaccgtctgagtacgattgccgactacttggagttcacggcaagcgtcgtcacgcagtacaggaactctcaccaaatcgtgcaagaaatctcgcggatggtgactgccattcgtaagcaccgaccgcgtggtctagcgaagcaccttgaggacgaaccggagcgccgctctcctccgaccgaagtggtgaatcgattcatggcggtgggatcggaacatgatccaagaaatccgttcaagcacccggatatcaggctacgcaatgcgatcatcttcggcctgttgaggcataccggtatgcgacgtggtgaactgttaagtctccgactggaccagtttgacttgggtcacgagcctcttgtttgggttaggcgtacccaagacgacaagcttgattctaggcgtcatcagcccgtcgctaagaccaaagaacgaccgcttccgctgccggatgagctcgccaagcagctcggccgatacatgctgcaggtgcgtgcgccgatcacgcctgctagaaagcatccgtatcttctgatctcgcatcggaagggcactggctgggggcagccactctccatttctgctcttaatagccagatcttcggccgaatgcgagctgtggacagggactttgagctgatccatccccatgcattccgacaccatttcaactatgaactgtccagaagcatcgatgagcacaatgctaaagctcagtcgggcgccaatactgcctgcgcaacgccgatcagtgagcatagagaattggatgtaagagcatttctgaatggtcatcgccatagggcttccggtgcgacatacaaccgccgtcatgtccgcgaagtgagcaacgaagctgctcgaagtttgcaagcaaaaatgatgcgccaggcccctaccaacaaggatggcgatgaagtcagctga

SEQ ID NO: 510352 - DNA, 1545 bp, Stenotrophomonas maltophilia
atgaagtcagctgacctccggccgttcggaaagttagggcggcaggatagtgccgcggtatctaaggatggctacctcttcaatccttcggacacctattggcgtctgaacaaagacgtgcagctgtcgctggcccttcctgtagcagtcatgccgatcgttgaggctggctatcgagcgactctattgcgctacgctgaagaggcatcagcaaaacactgcgagaacatgtccacccggttcaagagataccttcgtgacactgctgcgtcgcaggtgtccgtggctgatctcattaattggcgtgccgttctgggcgtccacgaagaatggcagcttggtggattaaagggattcttgctggcatggcacgactacggctttggcggtgtctcaaaggatgtcgtcgacctcctgcggggctggcggattcagggcaaccagaagggggcggcggttgctagtggttgtccggacagcgggccgtacaccgacctcgagatggcagccctgcttgactgggcgaatctggcagtcacgcgcaaggacgtctctttggaggactacgcctatctactggcgctggcaatgacggcacggcgtccgattcagctcgcggcccttcgggggcgagacctgatccgaggcagcagcaacggcgctgaagcattcagccttcgagttccccgagcgaagcagagagggatcaagtttcggggcgagtttcgtacgctagctgtaatcgaggacctctacctggtgcttcaacagctgcaccagcgctccatcgccctagccagcgagacggtggggcaagcgatcgagccagacctggcggatgaactgccagtcttcatcaatcgacagcgcctgctgcaggtgcgcagcattcgtgaaatgaaagagcttctaatgggtgatgcgccggatcagctgcatgcaagcacctcctccctctcgttggccttgcagcgctgcgcgagagcgtcgaccgctcgctcagagcggaccggtgagttcattcggctgtccgcgactcgcttccgacacacccggggaacaaagctgcgtcgtgaggggtttggcgcctttgtgatcgcagagcttctcgatcattctgatgttcagaacgtcagcatctataccaagaacacagcgcaggaggccgttctgatcaacgagctggttggtgcccagctggctcctttcgcgcaagcctgcctgggcaagcttgtagcatcggagagggaggcgatccgcggcggtgatcctaggagtcgtgtagccaacgagcgtcagaatgccgttggaacctgtggcaactatgggttctgtgctagtgggtatcgcgcctgctatacgtgtagtcactttcagccttgggttgatggacctcacgaggaagttctggccgatctttatgcagagaaggaccgaactcgagctgcaggatgtgccgatgcggttgtgaatgcgaatgatcaactgatacttgcggttgagcactgtgtggcaatgtgcagaaccgcaaggtcaacggagtag

SEQ ID NO: 510353 - DNA, 942 bp, Stenotrophomonas maltophilia
atgacctcccccattccctgcggtcgtttcgcgccctcgccgaccggcctgctccatcccggatccctgctcgccgccttcggcagctggctgctcgcgcgacataacggcggcttgtggcggctgcgcatcgaagacgtcgatccaccacgcaccgtgcccggcgccgccgagtcacagctgcgggcgctggccgcgttcggcctggtccacgatggcccgatcctctggcagagcacccgcggcgaggcctaccaggccgcgctggacgtgctgctggccagcgacctggcctttgtctgccactgcagccgcagcgacctggccgccaacggcggcatccaccatcgttgcgtcgcccggcaacctcgaccggaccctgccttccgcttccgcgtgccaccgggcagcatcgtgtacttcgacgacggcctgcgcggcccgcagcagcaggacgtgcacgccgaggtcggcgacttcgtgctgcgccgcgccgatggctgctgggcctaccagttggcggtggtggtcgatgacgccgcacaaggagtgaccgaagtggtgcgcggcgccgacctgctcgactccaccgcgcggcagatcctgctgcagcaggcattggggctggcggtgccgcgctactggcacctgccgctgctgctggatgcgccgggccacaaactgtccaagtcgctggcggcgctgccggtggacagttcgcacccgctgcccgtgctgcgccagctctggaagctgctcggccaggcacctggggcgctggaacctgcgcacgacctggatacgctgctggccaccgctcggcaggccttcgacccggcacgactgccgcggaccgacatcctgttgccagccggcgcactttccgcgccgatgttgcagaatcccccttcccccacccgacacccggacaacactccatga

SEQ ID NO: 510354 - DNA, 606 bp, Stenotrophomonas maltophilia; identical to SEQ ID NO: 498683

SEQ ID NO: 510355 - DNA, 525 bp, Stenotrophomonas maltophilia
atgaatcgccaagaagctctaatcggacgcgccttgaagggcgcccacttgggcagctatggagcgctggctaagcgcatgggggtatctgccgcaaccatgtcgcaatggcgtagcggcactagcaagctgtcggatgagcgggtcacgcagctctcagagctggcaggagatgacccaggaatctggctgatcgcgatgatggcggaagaatgcaacatcacgcccttgcgcaaatcgttgcaggacatcgtgagcaaggttggcaagggaatgtccatggccattgctcttggtgtagcaagcctgccttgggcagggagcgcaaaagcccatgatttcaaaggactttcagagtcggcacgggcgcattctgtatattatgttaccaagaggtctacccagccgaacccaaccagtccagtcctggccgcatgctgccccccttcaagtcccccccaacgccgccagaacctggctccacggcgccaacttctcacccagcatgcaggcccgccggtgtag

SEQ ID NO: 510356 - DNA, 1371 bp, Stenotrophomonas maltophilia
atggctcgcattcgattcgtagcgctgctggcttgccttgtggtgtcgatgctcgcggcgccccaggtattcgcatatgacgcgggtgacgcggccatggactgtcgcaacagcatgtcttggaacgcgctcaactcggccaagcaatgcgttgatatcgggcgccagagtgatggcgtgtgcagagtagggctgctttcaacaaacggcggctacctcggccttttcagctacccatgcagcagcacttgcaagacccgcgttgacggccaagcgggaatgatcaacggtacgatgtactcgggcggcgtctgcgacagcggctgcaaggttgcgccaaatctggaccccggtaccgatttctcactccgtgagaacggcaaccccaatgccatttcaattcgttccgggacatggcgcgccacggggtcgatctgcacgcctgacgacacccggccaaagcccgataagaaggatgagtactgccatcagtcgggggcgtaccaggtgtgcaagtcgaaggacaagacgtgcatcagcacttcgtcgggcttccgcacctgtgcaagcgataccgccaatcaaaaaggtcacaccgccaccaatgacccccgcactgaggctgccagcatcagcgcgccgaacagcggcctgaatcctcccagcaaccgccccggtgaggactggaagccctccggccccggcggcagcatcaccaacaacaacggcaacaccaccaacaatttcaacgggtacaagaacgagggtacgcccaatggcaatacgccgacgccgggtgatggctccggccccggcgtgggtggtagtaacggcaacggcgagaagggtgagggcaatggcaacactgctaccggtggcggcaactgcgcttcgccacccgccaccggtggtgatcccatcctcggcatgatcgcgatgcagacctgggcaactcgttgtgccgcagaaaaggccaacggcggcaaggtgacgggtgacgttgggaactgcgatgcacctttcagcgttgagggcgacacggtgcaggccaaccagctgcgtgcgcagcgtgcacagctatgctccggtcggcccggcgaggggcagggcagcatcggcaatccgcatgccggcgcagaggacgttgatggacctggcaagttctcatggaagttcgattccagcctgatcgataccagtggcttcggcggcggatcatgcccgacgttcgggacgctcgactttggcaagtttgggtcggtctcgctcgatagcacgacctggtggtgtcagctggtagcggccatgcgtgccgtgatgttgctcatgggcgctttcatttcgttccgcatcgtcttcggagacgcctga

SEQ ID NO: 510357 - DNA, 1272 bp, Stenotrophomonas maltophilia
gtgaccgaactggaccgctacctcgatgcagccacgcgccagaacacggtgcgcagctatgcgtcggcgctgcggcacttcgaggttgaatggcaaggccacctcccagcgacaccggacagcgtggcgcggtacctggccgcgtatgcgcagaccctagccgccagcacgcttcgccaccggctggccgccattgcctcttggcaccgcgaccacggctttgtcgacccgacccggtcgccgctggtgcgcaaggtgctcaaaggcatccagaccctgcacccgggccaggtcaagcaagccgcgccgctgcagattcggcggctggtcgagctcgatgactggttggctgccgcgatcgcggcggcgcatgcccggggcgacggagcggcggcgctgcgccatcaacgcgaccgagcgttggtgctgctcggattctggcggggcttccgtggcgatgaactgctgcgtctggacgtggcccatctcacgctggtgccgggacaggggatgacctgtttcctgccgcgcagcaagggcgaccgccaggccgccggcgtcacctacaaggtgccggcgttgtcgcggttgtgcccggtggaggcgacccaggtgtggctgcaggcggccgacctgcacgaagggccggtgtttcgggcggttaaccaatggggccaggtgagcgccgagggcctgcatcccaacagcttggtgcgcctgctacgcgagttgctgaccagtgccggctttgccgatgcggggctccacagcagccattcgttgcgccgcggctttgccagctgggccaacgaccaaggctgggacatgaaggcgctgatggagtacgtgggctggcgcgatgtgcagtcggccatgcgctatctggacgggcgtgacccctttgcccgtgaccgcattgaagcaagcctgcccagtccaaccgcgccggtaccggcgatggcactgccggcgcccgagggcaaaccggccttgcagctgcgcctgcgcatggtgctgaccccgtttgcccgcacgggccgcggcgcggccaaggcccgaggccggatcgaagagatctgcttggccccgttccaggctgtgcgcctgaacactgccagcagcgagtaccagttgactgttcccaccgatcccgaccgggatctggatgaaatcctggccacgttgctcgatgacatgcaccgcatggccgatacgcaccagtgtttcctggaagcgtctctcaatacagacgacggccggcactgggattga

SEQ ID NO: 510358 - DNA, 414 bp, Stenotrophomonas maltophilia
atgaaaatcagtgaggctgccgacgccagtggatgccacctggagacgatccgctattacgagcggatcggcctgttgccgcgcccggggcgctcgggcaatggctaccgggtctatggcccggccgacatcgagcggctgcgcttcattgcgcgcggccgggacctaggcttcagcctggaggaggtccgcagcctgctgcagctggccggcgatgaggagctttcgtgcggggacgtggaccggctggcacgcagccatctgaccgacgtgcgggcgcgcatggccgacctggagcgcatggccaccgagttggaacgggtgattgccagttgccacggtgggcagcgggctgaatgcaccatcctgtcgaccctgcggcagccggtcgctgtggaggccacgcgccagtga

SEQ ID NO: 510359 - DNA, 618 bp, Stenotrophomonas maltophilia
atgagtgattgcggctgccaccacgaggccaagaatgcgcaggagcggcgcgtcctctggatcgccctagcgttgaacgcggcgatggccgtgatcggcggcatcgccggctggattgcccattccactggcctgctggccgacgctctggacatgctgtccgatgccaccgcctatgccattggcctggtcgctatcgggcgcacggcgcgcttcaaggccaatgccgcttgggtcagcggcagcgtgctgcttgtgctgggtgtgggcgtgttggttgaggtgggccgccgggtgatgtacggcgccgagccggtcagcggctggatgattggcaccgccctgctgtcgctggcggtcaatatggcggtgctgcgcatgctggcaccgctaaagtccggcgaagtgcatctgcgagcgacgtggctgttcacgcgggccgatgtggtcgccaatgttggggtgatcctggccggtctgttggtgtggtggctggccagcccgtacccggatttcgtgatcggcgccctgatcggcctgtatgtgatcaaggaagccttcgagattttaggtgatgcccgccgggcaggtgccgacgcgcgcaagacggctgcatga

SEQ ID NO: 510360 - DNA, 300 bp, Stenotrophomonas maltophilia
atggcaacctccgtgcttgccatcggcgcatctcttggtgtgcgcgattttgggcctgtcgacgaaccgagatttgccttggttgccacccaaatggtggcaaccggaagctcgctgttcccgcgtcggggagcggagctgcacccagacaagcgtctcttcatgtggatctcggctgcactgctgtcactgacccaaaacctgcggaccgcggtcctggccccttcgctggtgtcaggcgttgcatatgtgtggatggctttccatctaggaacgcgcaatggcggccgtgtgcgctag

SEQ ID NO: 510361 - DNA, 1716 bp, Stenotrophomonas maltophilia
atgcattacgtgaaaacagaattcaaccgaggcagttcgcgcgggggcctaggctcagatccactgggccgtcttggcaagcccatctgcggcccgcagctgggcgtcaacacgttgattatcatcgtggcgatgtacttcacgttctttctcaacagcgcgttcttcgcagaagtaattgcgaagagtggtgcggacggagcagctcgtgcgctacttgttatctctacgggagcgatcctcactgccttgaatgtgctcattctcggattgctatgcgttcgatggacggtgaagccggttcttgcattgcttctcgtcgtgtccgctactgctgcctactattcagacaattacagcgtctacttcgacgccagcatggtacgaaatgtgctgaagaccgacggcgctgaagccggagagttgctgacctggggcttctttcttgcggtactaattaaaggcgtcgtgccagctatcgcggtatgcatggtaaggctccaacgttcttccaatgtgacgcgggcgatacttgcaagagtgcttctacttggcatggcggttgttgtaatcgttggcgcggcaattgcgtcattcgacgacctctcatcactcatacgcaatcacaagcaagtcagataccttgcaaaccctggaaactacatcgcttccattgcgaaggttgtgcgagaagacacccgtgcggagcgcggtccgatccaagtggttggccccgatgccatgatgacgcctcatccgccaggcgcgaagccccacttcttggtcatcgttgtaggtgagacggttcgtgcgcagaactggggtttgaatggatacggcagacagacaacgccacagttggcagcgttggacgtcgtcaatttctcagacgtgaccgcctgcgggtcaaacaccgaagtgtcggtgccctgtatgttctctgcgtacgggaggcgagactacgatcgagacaagatcaaaggttcggagtcgcttctgcatgttttggagcgtgccggggtcaggaccctatggcgtgacaaccagactggatgcaagggcgtctgctctgatctggcatttgaatcctatcgcgtgccggtcaaggatgttctgtgcgacgaccaagcatgccgtgacgagattatgctgcaaggtctgcatgactcgatcgaggacaaccctggtgatgtcgttgtcgttctacatcagctggggaaccacggacccagctacttcaagcgatacccggaagatctgacgaaatttactcccgactgccgaaacgcagacttgggcaagtgcacacgcggtgaaatcgtcaatgcgtatgacaacgcggtccttgcgacagatgacttccttgcaaagacaattcgcatgcttgaacaggacaagagtcacgataccgggctgatctatgtctccgaccacggcgagtcattaggggaggcgaacgtctatcttcacgggctcccctacgctatcgcccctgatactcagatcaaggtgccgatggtgatgtggatgtctgatggtatgaagagcagcaacaacctggaccttcaatgtgtccgggaccgatcaaagcagccgtccagccacgacaacctcttccattctgtgcttggcctgatgcaggttaggacgacggtgctagacgagagcctaaatctgttctcaggctgtaccagcaacgccggtcacagcctatag

SEQ ID NO: 510362 - DNA, 183 bp, Stenotrophomonas maltophilia
atggggagcgtactgttcgttttggcattcgagctgctgaactccgctatcgaggcagtgatcgaacggtatggcccagaaatccatgagctggctggtcgtgcgaaggacatggggtcggctgcggtgttcgtggctctttgcaatgtcgccctcacatgggccgttatccttgtgggttga

SEQ ID NO: 510363 - DNA, 312 bp, Stenotrophomonas maltophilia
atgctgctgcttttggcggcgttcgtggtcgtgcctgtggccgaggcattggcgtgcgcgcaagaagcgacggtcagcgtgggcgatgtgcacgccttgcaaagtgattcagactccgagtcgagcaagagcaaggattcgtccagtgccgatgcctgtggccatgggcattgccaccattcaacggcaagcctcccagctgccggtcacgacgatctgttcgccgatggccggatttcgctgcacagtaccgagcacggggacgtctacgccctccgactcgacggacccatgcgccccccccgtatctga

SEQ ID NO: 510364 - DNA, 1119 bp, Stenotrophomonas maltophilia
atgcctgcgacggtccaaggcgtcgcgctggctgaggcagccgaggcgcgggtacaacaggctcgggcactgcccaatccgacggtctccatcgaagcggagaacgcctacggcactggtccctacaaaggtttctcaaacgctgacagcattgtcaccctctcccagccgctggagatttggggtcaacgaggggcccgagtgcgcgccgcgcgtgcggaggctggggctgcaggcttgcggggtgatctgatgcgcagtgacgcagcgggtcgcctggctgcgacatacgccgaagcagaggctgcgctgcgccgatatgagttggccagcgaggcattggccttgattgaacaggacgccaaggcggtagctgcgatggtcagcgagggacgtgagcccaacctgcgcggtgtgcaggcacggagcgaggtcgccaatgcaaaggccagcctagatgaggccgaggcctaccgggatgcggcgcttgctcgcctagccggggtgtccttagtggacagcccgctgaccgacatcggcgaaagcctgcttgaccgagtgccctctcacccaattgacaatgaggccgccccgcttgccgttcgtatcgcccaagccgaagcggacgcctccggccgccttatcgatgttgagcgcaagcgtgcgttgccacaactgagtgcatccgtggctcagacgcgcttccgccaagcgggcgaccaagcttacaacgtgggcatcagcctttcgatccccctattcgatcgtaaccgcggtgcgatccaggcggcctatgcggaacaacgtgctgccgaagcggttctggaggctcagaggcgtgacagtgaggcggcccgtttgggagcggtagcgagtctcaaggcatccaacagccgcgcacgagcagcggatgaaagcgtacaggccgcagatgaagcctatcggctggcccgcatcggatttgaggcaggtcgtatatcgcaattggagctgcgcagcacgcgatcaaccctgatcgctgcgcgtggcagtgctgtggatgcccgtcttagccgggtggcagcagaaatcgacctcgcccgccttgaagggcgcgcaccgtttgtggaggcaaaatga

SEQ ID NO: 510365 - DNA, 1254 bp, Stenotrophomonas maltophilia
atgaacaagtacggaaacaagacgctcatcggagcgacgctgctggctaccttgatgatgaccggcgcgctgacctcatgcagtggcggggcgcaggaggatgccaaatccaccggtacggaggcagaaaagccggctggaaaggatgatggtcacgacgatcacgcagctgacgcaaagccgggctccgccgaggcgcacagtgaaggtgatggtgatggcgaacatggcgaagaggagtccgaggaaggtgtagtcaagctgacgcctgaccagatcaaggcatctggcatcggcgtggtggctgtcggccgcggcggtggcgcatcgacccgccttgcaggtcgcgtcgagccggccatcggggggcgtgctgccatcgcctcaacggtcaccggccgcgttgagcgcgtgcttgttgcgccgggtacagccgtcaagagcaaccagcccctggtgatcattgtcagtggagaagctgcgaccttcaaagccgccgccactgccgctgcggcggaggccgaagccattcgcctggcctacggccgcgacaagtctcttgtcgagcagggcgtagtggctcgccaggagctggaggcctcgcgcgcgcgctctttggccgctgatgccgccgctagtgctgcacgtgcacaggtagcggccagtggatctccggacagttccggccgggtgacaatctccagtcctgtcgctggcgtggttggcaacgtccaagtgacgcccggtggtgtcgtctcagctggaacgcttgttgcggaggtttccaatccggacatgaatgaactcgtattcactgcaccgccagcactggccactctcgcggtgcccggaatgaagctggaagtgactggcccgggcggaagcttcgaagctgaggtgattgccgccgctgcgaatgtgatgcagcagggaggcaccgcgaccattcgcgccaaaccaatttcggagaagttgccaccggccggctcccccgtttcggccgtcatcatcgccgatagtgccgctgaaggtatgagtgtgccggcggatgcggtccaaagcgttgatggcagaagtgttgtcttcgttgccgtccagggtggtttccaggctacgccggtactcgctggtcgtcgtgcaggtaatcgaatcgaaatccttaacggcctgacaggtagtgagcgcctcgtaggcgccaatgccttcctgctcaaagccgaactggccaagggcgaagccgagcacggccactaa

SEQ ID NO: 510366 - DNA, 3237 bp, Stenotrophomonas maltophilia
atgttcaagatcatcattgaagcagcggtcaagttccgttggctcgtggtgtttctggctgcttcgattgcctgctttggcttgttccaactgagcaagctgccagtcgatgctgtaccagatatcaccaaccgccaggttcagatcaataccatcgcacctgcccttactccggagcagattgaacgccaggtcacctatcctctggagacggccttggccggcatcccaggtctgaacaccactcgctccctatcacgcaatggcttctctcaggtcaccgcgatcttcactgatcagaccgacatctatttcgcccgccagcaggtggcagagcggatgcgggaggctgccggagatctgcccgagggcgtgtcccccatgctctccccggttacaaccgggctgggcgaggttctcatgtggacggtggacttcaagccattcgaccccaagaagctggccaagcccggccaggctggctggcaagagggtgaggtctacctgacaccagagggcgatcgtcttggaaccgcccaggagcgcgcaacgtacctgcgtactgtccaggactggatcatcgcaccacagatgcgctccagccccggcctggccggtgttgatacggtgggtgggtacgtcaaggaatacggcatctaccccgacagcgctcgactggcggcatacaacttgggtctggccgatctggtccaagcactggaacgctccaacgtccaggctggcgcgggtttcgtccagcgtgcgggcgaaggcctggtcgttagggcagacggccttgccctgacgaccgacgacttggctcagtcgccggtggccaccaaggacggtgtggtcatccgggtggccgatgttgccgaggtcggtatggggcgcgccccacggcttggtgcagctagccgaaatggtcatgaggcggtactgggcacggcactgatgatcgccggcggcaacagccgcaccgtcgctcaagctgcagctgagcgcctggcacaggtcaatgaatctctgcccgccgatatcttcgcagagccagtgctggaccgtagtgtgctggttaactccactgtcaagactgtcgccaagaacctgaccgaaggtgccctgctggtcgtagttgtgctgttcctgctcctgggcaacctgcgtgcggcagccatcaccgcattggtcattccgctgtcgttcctgttcgctgttatcggcatgaacaagttcggtatcagcggcaacctgatgagcttgggtgcgctggacttcggaatccttgtagatggcgcggtaattgtgatcgagtccaccctgctgatgcttggcaagcggcgtgccgaacttggccgacccctcaatgccatggagcgactgcgtgtagccgccgactcggcgaggaagatggcgcgtcctgcagccttcggtcaggtgatcatcctgttggtgttcgcaccgatccttaccttggaaggtgtggaaggcaagacgttccacccgatggccgccaccttcatgctcgccctcgttggcgcattcatcttctcctttaccttcgtaccggcgatggctgccctgctggtcagggagcccaagctccacgcgaagaaggaaggacacgagggcgaccaggacgaagaacatgagacagccatcatccgcgtcctgcgcggccgcatcgaaccggtgatccaagcggcgattcgtaggcccaaggcagtgttcgctggcgccctcgtgatgctcgcaatgggcgtggtcggctttacgatgctgggtcgagaattcatgccaacgcttgatgagggaaacctcgctatgcaggcgttgcgtgtgccatctacgtcgcttgagcaatcgttggctatgcagttggcgctggagaaggccattgctgctgaaccagaggttgtgacggtcttctcgaggaccggtactgctgaagcagctatcgaccccatgccgaccaacatctccgacagtgtgatcgtacttaagccgagaaaggagtggccagactcttccctgagcaaggaggatctgattgcaaggtttgagacgatcgccgcctcgcagataggcaacagctttgaattcagccagcccatcgagctgcgcttcaatgagctgatctcaggtgtacgtacggacctagccgtcatgatttacggcgataacttcgagcaactgcaagctgttgctgaccaggtcgcgctgaagctgagaaatactcagggcgcagcggatgtccgtgttgaacagatttccggcctgcccacgctcaatgtggcaatcgatcatcttgcagctgcgcagtatggcctcacggcggcggacgtgagcgacgcactttcaaccggtattggcggcgctgcggcaggcaagatcttcgagggcgaccgccggttcgatgttgtggtgcgcctcggcgacgatgcacgcaatgaccccgatcagctcgcatcgctgccgattgcaaccccaactgggggcatcgtgccgctctcctctgtcgcacgcattgagatcagcgaggggccgaaccagatcagtcgaaacaacgggagccgtcgtgtcgtggtgcaggctaatgttcgcggtcgtgacttgggcgggtttgtcggagaggcccaagctgcggtgaaggacgtgaagcttccaccaggcgcccacatgacgtggggcggtcagttcgagaacttgcagcgggcggaaaggcgactcatgacagttgtgccgattgtcttcctgctaatcggaagtcttctgttcatggcattgggcagtgcgaaggaggcgggtctggtgttcacctgcgtcccgcttgccctggttggcggaattctcgcattgctggtgcgtggtatgccgttctcggtatctgccgctgtcggattcatcgcggtatcgggtgttgcgacgctgaacggattggtgctcatgcaagccatcagagagaggcttgatgccggtgacagtccattgatcgctgcaatgaacggtgccggcagccgaattcgagctgtggtgaccacggcgctggtggcgatcgtcggcttcattccgatggctattgcgagtggatctggtgctgaggtgcagaagcctctcgccacggtggtcattggcggcctgttgaccgcaacagtactgacacttcttgtgctgccgacatttgcggggcgcctggccaagccagatcccaaagggcaaccgggaaatgttccctga

SEQ ID NO: 510367 - DNA, 2460 bp, Stenotrophomonas maltophilia
atgaacctgaccacagaagtcgaattgccggtcgtactcccaggcgtttctcgcgacgataactgcgtccaaaggctggtggacgggcttcaggaaatggacggaatatcacgcgtgcacgtgcgcggtggtagcgatggggcttgcggaacactttgcattcattacgcgcccgagctcatctcgcttcaacgagtgcgagaggtggcgtcgtccatgggtgtcaagctgggtgagcggtatggtcacctctccttggaactgggttcagcagttcacgcccggaaagcacgaacaattgcaggccaactacaggctttgccgggggtcattgaagccaccaccagcccgactggcggcgtgagcctcgaatacgatcaaaccaagacaagcgagacggagctgagagcagagctccacgcgctgggtgtagggcaaggcgcatccggtccgaaggaagacttgaaagatcagcacgaaggtcacgaacacaaggacggacaagaccatggtcattcccacggaggcgtattgggtggcaatagcgagctgatattctcacttgcctgtggcctgctcctgatcttgggatttgcgattgaaaagctcggcttgctccaaacgccatggattcctaccgcattttacgtagctgcctacctctttggcggctggttcacgcttggcgaagcgattgagaacgtcaagctgaagcgttttgaaatcgatactctgatgctggttgcagcggtaggtgcggcagcgctgggcgcatgggccgaaggcgccttgcttctgttcctcttcagtctaggtcatgcccttgaacactacgcgatgggccgggctaagcgcgcgattgaagctcttgcaaagcttgccccagaaaccgccagggtgctgagggatgggcaggtcgtggaagtcaaggttgaatcgttgatacctggagatgtggtggttgttcgtcccaatgatcggatgccggcagacggattcgtcgtcaaaggcactagcagcgttgaccaagcccctgtcaccggggaaagcattccggtagataagttgcaagtcactgaccctgctcaggcacggggtcggcctgattcggtgggaatggagtcccgcgtcttcgccggcactatcaatggctccggcgtcctagaggtcgaagtcacgcgtcgatcaggcgaatcggcactggcccgcgtagtcaagatggtgagcgaagccgaaaccaggaaatcgccaacgcagcgcttcacagacaagtttgagagggtattcgttcccgctgttctgatcttggccgtgctgttacttttctcatggatcgtgatcgatgagccattccgcgacagcttctatcgagcgatggcggtacttgtagcggcaagcccttgcgcactggcaatcgcgactccaagcgcggttctagcgggaattgcgcgagctgcgcgaggtggcgtactcatcaagggtggcgcaccactggaggagctgggcatggtccgtgccatcgcgttcgacaagactggaacgctcactgaaggcaagccgcgaattaccgacatcaaagtgatgcagggaacgacagagcaggaactgcttcacgttgccgtcgccgtcgaggctttaagtgaccaccctttggccgcagctatcgttcgagatggtaatactcgcctgggcgatggaccggtcatggtagcgacagacctcgctaacttcgctggaagaggcgttcaggcgaaggtgaacggcattgacgtgtggataggaaaggcagaaatgttcggtaacgacggcattggcgctctatccgcgggtgcggagtctgccattgaggagctccgtaacgccggcagaaccacgatggccgttcgcctaggtgatcgcgacctaggtgtcatcggccttatggatacgccccggccagaggcgcgtgaagccctggacaagctaaggcgcttgggcatccaacgaatgatcatgatctctggcgaccaccagactgtagctcaagccgtggcaacggacgtgggtctaaacgaggcatggggaaatctcatgcctgacgacaaggtgaaggcaatacgtcagttgaaggagacggagcgagtggcaatggtcggcgacggtgtgaatgacgcacccgcaatggctagtgccagcgtcggaattgcaatgggtgccgcctcttcggacgtagcgctggagactgccgacgtcgcgcttatgtctgaggatttgagacaggttgcattctctgtagcgcttagtcgacgcacgaaacgggtgatccgtcagaacgtgtatgtgagcctgggcgtcgtagcgttgttggttcctgcgaccatcctaggtcttggcattggaccggctgtggcagtgcatgaaggttcaaccttgttggttgtattcaatgcgctgaggctccttggcttccgtcagtcgtga

SEQ ID NO: 510368 - DNA, 735 bp, Stenotrophomonas maltophilia
ttggcttccgtcagtcgtgacatgcgaattctagtgattgagcgcgatcgagaagtcgctttgaagattctggcctacttcgaggcccgagggcatcagcttgataccatcggggacggcatcgccggccttcactttgcggcgtccaatggttacgacgcagtcattcttgattggatgcttcctcgcatggaaggcccggaggttctgagaaggctgcggttgaatcacggtgtttcagttcccgttgtgatgttggctgcaaaggttgcgctctcggacaaaatcatcgctttccgctccggtgcagatgactatgtgaccaagccttttgagctcccggagctcgaagttcgcctagaggcgttggtttcccgtacggagggacgcgtaacaaggaggcggctgctgatcggagagctcacgttggacctgagtacgttggaggccacacgggctggaaaacgactgcatctgtacccagcttgcaggaagctccttgaagcgctgatgcgggcaagtcctgccgctgtgaccaggcggcagcttgagcacactctctggggtgacgacctgcccgacggggatcttctgcgatcacagatgtccagcctgcggcgaagcattgatggtccgtttgaggaaaagatgatccagacgctgccgcgggttgggtatcgactgataccgccatcaaggcctatgccccccccccggggaagggaggccctatga

SEQ ID NO: 510369 - DNA, 717 bp, Stenotrophomonas maltophilia
atgtggaagccagccgcactcccaattggcgcgttcttggccgcagcgatttggggcgcagcggccatggtgcccttcgcgccggcatcagaagagatgatgttttggataccggtgtcgattgcgctaacgagtgcggctgctgcattggtagttgcgatgatgcaagacatcattctggtcgcggtaaagagatggccactgttcgtgaaattctatccaaccctctgcttggagccactcccctttgcattccttccaatcgtgctgtcactcgccggaattgcggagttcggtccagcgatgctgagtgcagctctattgctgatcggcttctcgtttgcggagactctcttcgccgccgccctccacagagcccgggcgacgccgaccgcggttgtgatctcgatgcagtgcgctgctctggtgtttgcagtttacatgtacaagaaaggcatccaagcgaacgtcagtgacatcagttggccgtggttcgcatcgtctgtcactgccatgagtctattctccttcctagtcggaaggtattgggccaacctgcttcgtgatgctgaggtggggttctctcccttactgaagtgggttctggtcaccttcatagctgaaggatctactagtgaatggagccggtggagattgaagcaacctattaagcaacgcagaccaccggggcttcggtccaagcctcgcaggaaatag

SEQ ID NO: 510370 - DNA, 1431 bp, Stenotrophomonas maltophilia
atgaacaacggcacaacaaagcgtgaaaagacacaaaccaagtcgccgggtgtctatgaaagaggcattggaagcagcagcccctattttcaggtcaagcttcgctctaagggccagagcgagaccttccgcttcccttacgtccccggtcttccggctattcatgagaagagccgtctgagagctttgaaagatgcaaagcattgcaaagcccgctttgaatcgctctctcacttctatgataagccggttggtgaaatctacagcgaacaccggttgcgggattggattgaagcttggattcgggagtcgtgtgagcgcattggattagacggtcagccgctttcaggaatgattgagcggaaaggcgcaaaagaagactccaagcaaatccggcgcttggtcttcatcgccgatgcctatgctgaaaagcatggaacagcttcgatcatggagaagtcgattcggtctttgaaaaaatccgattttgttggaaaagaaggcctgctcaacatgcttaccgggcgagctccgaaaagagccgatcccaaagtcccggaaaagaagccagaggcctcagcggcaacaaagcgtcgagcattggctttattgggaatggtctggaagcacgccaatgatttctggaaagcagacgatgccccagactatcaaaagccttgggcaggctttgaaattgcatccagccatcatgcgaaaagcacccgtgcgctttccgtccaggaattgcatcaagtcgaagaggcgatgagcgagcttcatcccaccacccttgctgccatcaacttcctccgctggactgcggctcgtgcgggtgaaatgaaaaagctggaatggcagcatgtctttctgccgagtcgccccggcgaactgggcgaagtcctttttgtgggaacgaagacgcctcgccgtggggcatatcgggagcgccgcattccgctccccgaaggggcagaagaagcattgagaaccctgtttacgggaacgaagccagagaagggatttgtcttccaatcgccctctgactccacgaaaagcatctctcgtgattcggtctaccaggcttttgttcgtgccgtaaatcgagctggggtgccccatgctcggttgcatgacctccgtcacacacgaacgactgaactctctaagtcgattcaacctgcacaagcgatggctgtcacaggccactctgaccatcggacgttcatgcgctatacgcatgtctcgaacgaagtggctcagcagatttcagcagcagataaattgcgtcgaaaggttggcggggtcaaatccgctgccacagctcctgtctcaggggcctcttccttagatgacgcattgaaatcgctttcaaccaaagagcgcaaaaaactagctctacaaatgttgtcagatgatcttgacaacgactga

SEQ ID NO: 510371 - DNA, 276 bp, Stenotrophomonas maltophilia
gtgaaaactgcttttatcgctcgcccccatcagcttggtattgtctttttaactttgctcatcccggtcctagggccgttcgtattcatcacgatgctcttcacgtatttcgtctttacgaaccctcgccagcgtcttgaaccgctctctgatcgtgagcgaaaggcgcagtggaagaccttctataccgtctccctagtgctaatcctggcctttgtagcggtcttcattgtgttccccacactgctgggtgttggtctgacgatgatgaaataa

SEQ ID NO: 510372 - DNA, 471 bp, Stenotrophomonas maltophilia
atgcaaaagaaatggaaccgcagccagaaataccataaaagaacccgctacctttacgccctgttctttgacaatgagcaagcggtctacatcggccaatccgtagacctcaaaaaacgctggcaacagcatcgctcaaaagctgggaaatggaaccgctacttccgtcccgttgaactcgcctcttacaacatgacccagcacgaagcggaacatatggaagagctgtggcgctgtaaggccgtgcaaagcggctggcgtgtctttggcctccctccgggcatcctcatcaacccgtatcgaagagcggggctgtggaagcgctggaaagccaggaaactggtgtggaagacgggcagaccggaagttgcccccgccaggttcccctggaaagggttgggatgggggcttggggtgatgatgggtgcgatggtagcccttccgtgggcgctatctttccttagcggctga

SEQ ID NO: 510373 - DNA, 1971 bp, Stenotrophomonas maltophilia
atgtcgaaaagtaaaaaaagaatctacaaccatttgggcgggaacattcccggtaccgtcccgccatcacagatggttcgttactggaatgaaggcctgttggttgcctttttggcattgagcgtgacgtatccgctcgctctgcttgtgactcagttcctccccaatcctgcacctcttccttttttcaagctgctattcggaagtctggctgcaacttggaatattttttcactcggcacgtatgagagtgcgttgcttgccgacttcttacgcatcgtccacgtggagaccccgcaaccatggcgtgtgtggagtcagataagcctagcctggacaacagcaatcggcatggcgtggtggctctctaaggcgtcattcgtgcccaggaacaacgaatcccacgtgtcgggtccggaagctttaaaaggcaaagaggcagtccaagaactggctcatcggaacatgacgacgaaagagcgtcagaacgacccgtattgtcttctgctgcaccctgatctctacatcgcaaaacgacaagccagtcgccacgtcgccatctacggtagcccaggctcagggaaatcggtggcgatgaaagtcgccatggctgatgcgatccagcgcaacttgaagtgcttcatctatgacgtgaaaggcgattttacggcaacgttccgcaagccgatcattgtctctccgttcgaccaacggtcctacgtttgggacgtagcaaaggatgtggacaccccatcaaaagccgctatttttgctgcctccatcatcaacgatcccggcaacccaggaggaaatttctgggttctagcagcacgctcactgtttgaaggggcggtcaaagaattgcagtcaacgaagcccttggagtggggctttgaagacctgtccaaagcgatttatcgagatcaagctcagtggatcatgtcgatgagtgagtggcaccaacaagccgtgaatctagtcaatggaagcggggagacggtgcagtcgattcaggcaacgctatcgggtttgacaaaggtcattcatgacctggcagcagcttggccaacacctgggaagcgaagatttgcaatttctgagtgggtagcagatggctatgaaggccggaagcaagtgatcgtccagggcggtccagatgccattctcaccgccaactatatcggagcgatgatcaattgtgctgtgcctgaaattctgtcaccccggctccccgacaatgaaagaggtcggttcctaggcttcttctttgatgagctgacttccatcgcacgtttgaacatcaacgggctgtttgaaatgggaagaagtaagggcgtcgtggcttatatcggcttccaggacatcgcacaagttcagagggtgtatggggacaaggaagccgcaacgctgatgtcgatgattgcgaatcagatcatctgtcaagttcagccgtcagacacaagagatcacatcgctcagaagcttgggaagaagaaggtggcgtggttcagtcatcaagacaaagcagtcgtgcacgaagagagccgcaatgtcgtgtcgccaaacgagttgacaacagacctgggctttgtggaagacaagcgcatcaagccagaaggaaagggggtgaaagccatcattgcgctttcaggcaaagacccactattcgtcacattccctgtcatcacttaccctaaaaagcgggagggtcaggttgaagcgaaatggatgcgtgagctggcggttcgcatgtcacagcagaagctgaccgaaatcatcgctgatgcagagggcggtgaagcgttcactgtgcaaacgattggaacattagagcctacgtcagaggcaacgccaaaagcgatttcgaaagagagtatttccgatattttggagcgtcacttgaagaacaagggggcgaaaaaagtagagcgagtgaagcttgattcgaatgatctttttggctttgagtga

SEQ ID NO: 510374 - DNA, 696 bp, Stenotrophomonas maltophilia
atgttgaagaaattggcgctctgcgctgcattgttatccccaagcttagcccaggctggaatcatcaccacagcactagacgcccccaccaaacgtgctttggaagccattcagtgcgcaggcttgacccccaagctgctcctagtcgctgacatgtctcagtccaaggactttccccgtttgaaggtcattgacctggacactggcaagaccctcatgaccgactacgttgcacatggggtgggtagtggcacaaccgtgcccaagcgcttctcaaacgtcgaggggagccttgcgacaagccttgggctgtatcgcatttcagagcgctactttggtgtaagcgggtggtctcggcgattggatggcctgacacagggctggaacaacaacgctcggcagcgggccgtggtgatgcatccagccacctacgttcgccccggtcgtgtgggccgaagtgaagggtgtccagcagtgagaaacgaagttctcgtaagcctggaaaagcaaggtctctccgatgcggttctatggattgacggcggcaagtccgttgaaaaatgcgggacggggaaccccctccctgtcatctggtctcgcaaagacccagttcgagcgtgccaattaccaagaacgtttgcttggaaaatcccaggcccatcgttcaaagagaaaggcgtttacgcatcgaattga

SEQ ID NO: 510375 - DNA, 1869 bp, Stenotrophomonas maltophilia
atgagtcgattttacgaaataatcaaggaaggggtgtctgagttcaaagggaaggtaagtggagcacattcgctctataaggcagtgaataatgattattcgagtgttgaagaacatcgcttgacagacgtgttcattgaagggtttaaaaagaaaggccaagcaaacatcgtcaatcagaatcagttagcagcgtctgtcgaaagagcgtgttttggacgccagcgaattggcatcatcgtcctttgtggtaaaggcgttttaggtgcggagttcaagttctttgacatgatcttgcgcccaggcgtccgctacgctccatttgaggggctaggtccggaagagatcgagatgggcatgtttgatgtgggggaaggtgaagtcgctgcgcaaaacaagatgtgggataacggtgctcggaccttgctgcgccatgcgattacggtgtgggttgcgcttttagaacagcaaaagacgcttcggaaatactgggccgaccttgcgctcgacctctttgatcaaatcatggacctggaacatcgctcacaaatcaaggcgctgagaggtcaagatacgacaatcattacgaagcaaattgaagatcttcaaattagagagcaatgctgcatcgaaatactcaatgcagagccctaccggaactctccggacggtttgaatcgtgtctatcaaaagttgttgaacggtattggatcatccaacgatcaaaagtattccagggagctggaattgttgttcagtgacctgggctttgaagacgaactgttcaagattcacaactaccaagatcgattggcaaacaacacggtttacccagatttgctcagctcaaactcatcgcttcgccgggcgattgagcactacacgaagaccacccgtgagttagaccctaaattgagatctagtttcactgttgggctgcaagaaaagttcgatgctctctcaaaaggccgtgcgctcaaatgcaatgcagacgtgccctggttcatgcacgaaaccggcgacttcaagccgaacgaagtcatcttcggaaagaccgtgacgattgacttgaacgatgcgattcatggtgatgcaacgatgatgatcacttcactcgtgaagcagcgggtctatcgagtcatcaagtctcgtgccgaaaggccccaatggcgaaaaaccgagtgccaggtctcgatgatcattgacgaagtgcatctggtatgcggcttgaaagacgccaagttcttctctattacgagaagcttaggtatggatatcacatgcgccactcaaagttttgagtcgatggtgagttcgttgggttcagagaacaatgccaagttgttcttcacgcagctcagcacgaagattgtctttgaagcgagtgagccaaccttccaatatttgatgcatgaaatcggagaggcgaagctgcaagtgacaaagcgttcgatcaacggcatcgactacgcctctgcatacgaagacaagtctatgtcaatcttcaatgacgtgaatcatcctaattacgagcaaatcaggcaagtcagaaaatatgcggtattgaagtccgacaactcgacgctgaaaggttttgataaaaatcctgagagcattcacattgaagagatcatcgttcacaacagtcaaaaggccagaatcgaatacaaaacacaaccgattttgcgccaggatgagttcaatgcctatgccggtatggccggtcgtcctttcctgcacatttccagggcgggcggtgttgtgactgactatgcgatcatcaatgaaatcaaggaaaaggatttactggacttgcatgatgcaaaaaacattgcatacttgaatgaatgcatttccgcattgaaataa

SEQ ID NO: 510376 - DNA, 1221 bp, Stenotrophomonas maltophilia
atgctattgaactcactaacacgaaagaaagatgaggagatttatcgagatgcgatagagcagttcgaagacgtaacgactgatccaaatgctttgcttagagttgaatcgaaatatttggaagttccaccggaggacgaagagcgagccatcatcatgggagctgactacgatgcagacgttcgatgttttgtggttccaggctctaaacgccttcaagattttaaagagtggttcccctgggtggaaggcgatctggtcagtaaagacaacactcaaagctatctgacaaaaagcggtagaccgctcgaatcagtcaggcatgagaaagattcaacatacggttgggattcgcttgcggtgcctttgatgtatacagcactgccggtccttgctgcactgactgcgctgtgctttgcaagcggtctgagcttatggtctgtgctctttatcattccattgattttgaccatcccttatctcatcacgattgagcaatcgagctgggcggggcgaacagaagcctttaaagcgttcgtgattctctactttgccccagccttttgcggagcattaatcgtcaacggactaggaatcgtagcagtgggcttgattacagcgattcttccgccctggttccttttctatgctgttttgcctttcttcaagagcgaactgcatctaggtaagaaacagttgatgaaagggttgcaaattggatcggtaatctttgttgcagtcctggtcgcatgggtgatgggtcgttacgctatcggtgctttgtgtgcggcttctgcctattacgctgttttatatgctcgcaagcagaaagaaattaggttcggggagttgctggatcaaagcgatcaattccgcatgtcgaatgtcggttcgttgaaaaatccattgcaagaacaacgtcgcttacaagccattcttgctgctgctgatttcacgccaagaattgaattaggggaaagccagggcgtgttgagcaaaaaaggccacgtcctgggcgcaacattgggagcaacgatgcgctacacactcaatgacgcaacgagagggacaggaatcgtcggaaaaatcggacgtggtaagacagtcatcattcgtaagctgctctacgctcgtttagcaaacaacaaagtctgcgatttcttaggggtggatgtttacgataaaaaagaagatcaacaacaatcaggaggtgaacaatga

SEQ ID NO: 510377 - DNA, 966 bp, Stenotrophomonas maltophilia
atgaagacagagacgagagaagaacgcatcaagcgactacttgaagcacgagagagcggagccttggaggatgttgcctcagctaaacccatctcgattgcgtcggaaggtcctgaaaaatcggaagaggattgggaggaggagagtcgtctcatctcttcgaagaatcaagagcgaatcaaagaagcctctcagaaaactgcggagttggcatcgcaaagcgctaaggctgcaacgaagatcgcagagctaggcttagtcaaaagcgttgcggcaatgcaagcgatcaaagacaaggtgcaggagaagaaagcggagaaagcaaagaacacggagtcaaaatcatacgaggcttatggaaagtttcgcagaagggaagaaaagcgattcgctgagagagttaaagcggaggctgctgatctcgattcacttcatgtaagtaattctcgatttagagatcgacttgaagaaatcgttgaggagcaacaagagcggtccgtagacgattcaagcgctcccgaggagcggcaggaagaagcagctaaggcgagtcggtctcattggctcacacccaagctggcggcaattgttgttggtctgttgatcgccgggatcgggatcgcttggttcgtgcgctatgaacgaaccactaactcaaccatgtcagtagtagaggagcttcctgtcgcagcgccggaggttgtccaggtgatgccgcaggttgaggccctcctgtccccgcctgccgctgtgcctcctaccgagctaccgccactacctgacacaactcgggttgctgttgagcgagccgccgcaaggccagtggcaccggagccagcgaaagttatccaggttgctcctgtccagaaagctcagccacagcccgctcctacacctgcccccgctcagaaagagtcagagtggcaaaaggacgcttcaaaaaagttagatgaatggggcttttaa

SEQ ID NO: 510378 - DNA, 669 bp, Stenotrophomonas maltophilia
atgaaatcaaaattactcattacatctatcgccaccgtcatcgctttgagcggatgcgcctcgatgcccgacttccaggcagacaaaggccgtgtagccaaagcctcgattgttggctgtgccggtggagccttactcgcaaaggtgactggcaacagtgacaacgcactcagagcatgtgcgggcggagcagtggttgcaggagttgcttcttacacagctcaactcaaagaggcaaaggcagtcgaggaagccgcacgccaagccgggttgaccgctcaggtgcagacccaggaagtcggacagggcagcgaacgcaagagcgagttaaaagagttgcgcttgcaatacgaccccaacgaccttcgcaacccatctgccgaaacgtctgcggtgttcgacaagttagcgaacttgatcaagaacaaaaagccaggcgcagatctcaaagttcaattgagaggaagcgatcaagcgatgtgtgtgaagcctgctgagttgttgaaagcaaggggagtgctgttgatcgacactggggcttatgcatcaccagctagggcgactgttccaggtgcggtgattggaaatgctcaggtcgctcatgcttctgtctctgcaaattgctcaggtcagcacgagatcgtcatcagcccaatcactagtttgtga

SEQ ID NO: 510379 - DNA, 831 bp, Stenotrophomonas maltophilia
atggataaccgaacctttcgtttcccagtcgggccgtatcatggccgatgtaatatatgtgggcagcaacgagatttgactgagaaccacgttccgcccaaatcttggagtccaggcagagcggtccggatttggagcatcctggattcggttgcgcaaggcggacttgacgagttcgaaaagcgtgcgtatggcgttcctttccgaacgctctgtgccgattgcaacggaaatattcttcaaccctacgatagagagcttgcgtctctgaccactcagctcagacagacaataggtgagagacgggaggcaattccattcggtggctcggcactagtaagacctaaacgtattgcgcttggagttcttgctcatctgtgttccgtgggtcttgatagatataacgagaagctatccagttatgttctaggtgccaatcaatcattgctggatgacgtaaagatctactactggccctatcttcattctccgatgaccattgtccgtgattatcgtgcgctcaacttcgtctcaaaagcgctagccaatattttcatcctgaaggcttatcctgttgcattcgcaatagctattggtggcaaatcattcttggaagatgcgggtgtccgtgactttgatgcctatgcgagcctaggcgtcgatgacgaagcactgatgtatttttcgctattcaacatgccgtcccagcagtggcccgagtgtggcgacgagaatagtatgttggcttttgattcagcgtcagcgttcaaggtcacaagcaaacttaccaatactgacgacttgatgaccgtttggcacaggcctaactag

SEQ ID NO: 510380 - DNA, 309 bp, Stenotrophomonas maltophilia
atgccgcacagaaaaatgaaaaggcgcacccgttttctgcatggcttagctctcctgttcgttgggccgatggcttcatggctggcgtttgggttgcttgtagcgtttcaggactcgcctcattcgctgcgtgcgctatcgatgacatgggcttactggcttggcatcacagctattccgatgatctttggactggtgttcgtcagccttgtgcggccagtctatgcgtggttggtctacgcaataggcagtggcttcatgctctacgggcaggtgactctcaatagcatgagcgcaaccaatggataa

SEQ ID NO: 510381 - DNA, 804 bp, Stenotrophomonas maltophilia
gtgcgatccaatatttttctggtcttggggctggcactagcgcttgctggctgtcagcagcgagaggcgtctccggcctccggcccagatgcagcagctactgctcagcaggccccagcccaacagccttgggtatggcgtgcctggccgttcgaccccaacagttcccgtgtcgaactggacccggcgtctggcaaagtgcagctcacctccccacgcatgtttgcagagtggttcgacaagaagcttcctgagcttcgaaagggcgagttcgagaccactgctgactaccagaagcgggtccaagacgtgggcatggccctagcacccatggcgacaggtgatgtctacctgttcccgccagactccatctactcaacgtatgacgctgacaagcaggtcttccgtccaacaacattgcgctgttacgactggggcgataccggtaaccaggtgtgccagcttgctcaattgccagctccacctggggagcgatttggcactcaattccacgccgtggtgcccactaagtcggttcgtcgttgggtcagagacggtggcttagagattgactacgcttgtcccgtttctgctgccgaggccccaacgctgaaagatagggtgcagttcgcttatgggttccgatttacgtctggtgaacctcttagtccagatgcgccgatcaccttggatgaccggacctattttttccattatggattgaaagccgagcttgtgctggcgctttgctacgacacgagggatggaagcgtcatcgctcagcagagctacgataaaaaataa

SEQ ID NO: 510382 - DNA, 660 bp, Stenotrophomonas maltophilia
atgaagactgatgcggagaaagaacgccaagaacgctacaccagtgccatgggggatgagttgggcgtcgcctatgccgagctgacccgcaacctgatcgatctcagaatcgtctggcagcagtatcgccagctcttcggcgctgaccaggagactatcaacctcctcaatcgcacctcaggcctgttcttccaagttgtggaaagagagctttgggacatggttctgatcgccatcacccgcatcacagacccggcaagctcaggacgtaaagaccccaggaagaacctcacccttcggtcgttaccggaactgatcagcgacaaagcgctcagagagagcgtgacacaagacctagtaatagcccgttcctcatcggaagacgcccggcaacacaggaacagacgaatcgcccatcaggatgatacctacgttcgaaccaggcacgaggccgacgccctgccgccgataagcagacaaaatattgaagacgcaatttatgccctgggcgaagttctcaataacatcagacggcactacatgaactctgagatggattacagcgatttcgttgcgattgacggagcagagaccttgcttcaaaagctgaggcgactggaagagctggaagaacagcgcatcggctggaagcgcccctaa

SEQ ID NO: 510383 - DNA, 141 bp, Stenotrophomonas maltophilia
atgagcgtggacaaattgatcaatcggattaagacatggtggcttgaacgagcttggttcaagcaaaacaaaaccctttacgatatcgcgatggaagctcataacgatgcggtgaagcgggataaaaagaaggatcgctaa

SEQ ID NO: 510384 - DNA, 369 bp, Stenotrophomonas maltophilia
atgagaaagcactctcttagcatcgtcaaagaactggtcattgctcaccctgaattctcttctcaaacctttgttctgagctacctcccccaccagggtgtggtcttcaaagaatacgacagcgtgacagaagccatccaggagatggtctatgaagagacgaagcgagtcatagccttgggccagtcaaaagtagcggtcctggttgaacggacgacaggggaccacttagtcaccgatgatgagcttctggaagcctttgatgcgtttgcaagttacagcaaaagatatgatcgccaggacatcgagaccgtggtcaattttgctttccagatcatgaatggcgattacagaagcgtgtgggaataa

SEQ ID NO: 510385 - DNA, 456 bp, Stenotrophomonas maltophilia
atggctattatccaagatggaatgtctataaacatgtcggacttccaattcgagagactcggaataccccaggccgggcttcactacgacgagcacgaaagaatttgcaacacagattggcacagcgattcagtgatgatcatgtttatggaggggttggttgcgtcccagaagatgggctatcaaaagattcagctatcgtggaaggaactccaatctcttgatgatgacaacgcaaagttcatcgctaagaagattcggagatcactcagagcgtttgacgttgaaaaaatagagtatttaaacggtcacggttttatcttcgctgccgcagggaaacggaagataagcgtgctgaacctggcagacctgagtgtctctgtaatctcgcacaaagaactcttctactatgtaaggcgcatctccgatggaaatatgtatggaggtggcttgtga

SEQ ID NO: 510386 - DNA, 759 bp, Stenotrophomonas maltophilia
atgaatagcccatcaacgactcaaattataaaatccatgtgtgttccagacatgatcctagagcgacaaactcgacttgatgccgcttttgcaaccattgacgatcctgcatcccggcatttcgtagcttacttgttgcacgcagatcgcgataggaataaagaagttgagttttgcatggatgctttacagagatacacaacacagctagatcgagagctttggacgcagtttatgcaaagttcgggcttgtggaacgttatgtcccgacaagagcgtgaacgttggcgcaaagttttggataaatactcaactgagccggttgccgcttttgacgaagaaacgaccaaaggcgttttttatgatttggtagaacgcaaagatcaattgcgcaaagaagcagtggaaagcctctttcggaatttgtcttgggatcatgaaacaaatcagcccgctcagtttagtgaaaaactgatttatcagagattttacgatcaacacggcaattcggatagatatggcaatgactgtatggatgacttgttgcgtgaactctatcgacttgatagcaagtcagagcctggtcattggaagaaatacacgactggatacatcgaagttcaagcgttcaagaatggaaacgcgcatatccggatattgcgcccggatctcgttgacaagttgaacagcgagctggcgaagtattggccgggggcactgcctgcacccaagaaaaagcaaagaagaagcagagggtga

SEQ ID NO: 510387 - DNA, 453 bp, Stenotrophomonas maltophilia
atgaacagtgcaattggagaagagtccgaaaaaatcacgtgtagtgaaacgagctttcaagagatcgaggctaccggctgtccttatttcccatgttttagtgagaacaaccattgcttcgagaatgcggtgttctctgtcatgcgagaactgtgtgactcctatgacggcggggactggtcagccctaaagctctccaacggggcttggtatatggctctattggactgcgaaagcatcttcttgaaggacggcgatggcgaactgcatcagatgagcggggatggcgcagggcttgctgtgacagcgtatttggttaatcacctgagttggatgtatcagcaagaggggcagacagacgaaagcatagcggcggctaatcacttctctaagttgcgggatttctatcttcagcatcgagacgcagcggcaatttggaaggtcctggactaa

SEQ ID NO: 510388 - DNA, 126 bp, Stenotrophomonas maltophilia
atgaaacgcctgaacgacaaaagcctccataacctgggggctttttttatgggcagaagaaagataaagagggttattaaactttttcaattcccgtccttatcaaatctgcatatctataaatga

SEQ ID NO: 510389 - DNA, 285 bp, Stenotrophomonas maltophilia
atgagaacaatcattacttcaaagcaaatcgctcacaatcaattcgctttcatcgctcaattagagtcatctggaagcggcaagttcggtagaccaggtgtcctgcgcttgatgcgcacagacaaggagggcctggacactttcgctcaacacgctcgcatcaagaacaacaagcgctatgagcaaatcgatgcagaagccgttgatttgagatgcaaggggccacgcagcggatacgctcgtaagctgcaagcaatgacaaagcagttggaagccatcaactaa

SEQ ID NO: 510390 - DNA, 144 bp, Stenotrophomonas maltophilia
atgcagcgtgtcgaacgcttctttaacagcaagctctaccctcgtctgttcttcattgacgatgcgggcgtggcaagcagggagcgtcagagcgagttcccgcttgatttggagaaggatcttctggggtgtaggggtcattga

SEQ ID NO: 510391 - DNA, 687 bp, Stenotrophomonas maltophilia
atgaaaaaaattatcgaaaacgaaatcacttttggcttgattgaagagatgttgaagattgggctgaacaacgatgaaggtcgattgcagaacgagtatcgaatcgccaagcggttggcacacgaccttctctctgctgttgagccgcacgatattaacgtggttgatgttggatggtttgaggacgaagcgaaaagaggccttcaattctatgcggtgatgctgggtcaagaaaaagggactcgaaagaacagcgctgggcgcaagctctacgtcaaatttaatggcaagaaaatcaaggttgatggcgtcgaagaactcactctctttgtcttgttccagaagtgccgaagattgcagtgctacccgctttacgagaagaagcttttaagagagatgttcaagccggaacgcactattaatccaggacgctcagtgatagcccaatggacaaagataaaccgcatgtcggaatggctcacatctgctaagtcatcagagttcgttcgctatgtcgtcactccacagggtgttgaaaaacacactcattatattctgttcaagttaagcgatttgagtcctgaaatgaaagcaattcttttcgatgagaacggggagccaagagagctggtcgttgaccaccaccggtataggcaacgtattttggaagcagcaggatgtctatga

SEQ ID NO: 510392 - DNA, 282 bp, Stenotrophomonas maltophilia
atgaaaaaacaaatcaactttgcagatgtcaagagcgcagaagagtttcgcactagattcgatagatatcaccaggcgcatcatgtgaacgggaagttggaatccctcaaggatgaaaatggtgcccctgttctttcggattgttactacgtctctgtcggatgctactggcctcatttaaagcaatttatgaccaaggaacgggtccacgaggatcaattgagagtgaacattgaatattccaagtggtcaggcaccgagtgcgcctggcggttcgtttaa

SEQ ID NO: 510393 - DNA, 756 bp, Stenotrophomonas maltophilia
atggcaaaaacatggatacgaagatctttaagagcaagtcaaaatcacttgtgcgcttattgcgactcccctttgctcgccagggcgaagagttcgcaattaatcccaacccacgtggggggagacaacgccaccggcatcgtgatggcatgcaatgagtgcttgggaagcaagagccagtcagatctagtcggttggcttgcgatgccgttccaccgggtcctacccaagaacatccctgccctgctgacaaaacgtctcgaagcggctgagcaggctcagaaccatgagctgccggtgagctactcacaaaacaagaaagccgtgaggagagcgctccacgagcgctggcagcacccacgagtgagaatcagagtcgaggacgacacactagtgttcgagagagaacaacatgggcggggaacagccctagcggtgctcagagcacatgtggcggctcacattgatgagcggccaactaccgtgcgtgtgaggctcccaaggcagcatatggagcgagcgatcgctctcctggtagacatgaactgctgggtagtgggcaggccagccagcgcttccctgggcgacttgaagcggcccaagcgaagcattccgaatcggggcttatccaggcggcagaaatccgaactcatggaactacgagacacggggcagttgacaacgctggggcgggtcgatgcagagcttctcttgcttagagacgctcatcggaagttgaccgcttccaacgcttga

SEQ ID NO: 510394 - DNA, 381 bp, Stenotrophomonas maltophilia
atgcgctttaaattaatcccaaaagacgaaaagctggaccagatcttgcccaacccccgagtgagcaacgagcttctgggtgacttgcaatcgtggagcgaggcctcccaatgccggaaggcgaaattgcaacgacagatcgttcagcactacttgcagaacttttccgacagcaagcttgaacgtgagcttgaaaaagctcctgagcgaccaatcacgcctaatcgatacttgcagatgactcgtgtctctttgagcgacctgaaagcgctgagagagcgagcagaggcgttaaatcttcctagggctacgcttgttcgattaatgatggaagcagcggtcaagcgttggaagcggtcaacttccgatgagcgtctctaa

SEQ ID NO: 510395 - DNA, 414 bp, Stenotrophomonas maltophilia
atgaacgccattctcaaatcagaacccgtccaatccttccgcatcgaccgccgtccaatcatcaatgaaatccatgccgctttcgcagcagaagtttgcggagcagctgagcttgccccaggcaccattctttttaccgacttaggtcttatgaatctcaccaatcatgaagaatggagcagctggaaaatgatgacttggaatgcagatgaagaaaccacggagtcccgcaaaggattcagtgttggctattacaagttctatgtgaagtcatgcaacacgatctatgcgttcaatcatgtcaatgaccgctttttcagaacgattgttgaccaccttagggaaagcggcgatagccacttcatcccgtccactacaacccacacagaaggagacgtatgcgctttaaattaa

SEQ ID NO: 510396 - DNA, 855 bp, Stenotrophomonas maltophilia
atgagcttgaaaattaaatacacagcagatgcaataagattcgtaaaagcctacaagtccttccaggcgctgagcgacgagcaaaaagccagcgcttatgcaggcgcaatgaaatacgtcctcaggcgctctcgattagagcatccggagggaacctgggacaatcacggatgcttccatccgagcgcttacgagaatgctgactggatcacagagaatatcagtagtccgggcaagcgctaccggtatacatatatggtggcttgcagaaccgtcgagcactgctgccgtttaacgaatgcaaacgtcgaacacgcaaggtgggtcattacccttgaacagattgcttatggctcccagttgcacagctacaaaagattcttggtgagaatcaaagccatgttcaaagtggcggaaaagagagcgaagcggaagcttcatcactacactcatcttgatgacgatgacattgaaaagtacgatgtgataagaaatgagttgaggttggatttaaagtcttacggcaagcgtcaagagtggagcttttcaagagatgtgctttccttctttttcgataactatacatctgagagatatcggagagccgatccgaggggggcttgtttggctgaaaggtatgacagtgctgagaaatatgagttcaatacgcattggattacaatgttgcaatctatcgacattatttctgattatttagtggactatgcttgcgacgattacttgaaagagtgcggtgcaatagagcgttacactaagtcaacactaagatcgttgaaccgacgccctaaaacagatttcatcaataaagtagctccccaagctaaaaaggcctaa

SEQ ID NO: 510397 - DNA, 339 bp, Stenotrophomonas maltophilia
atgcaaaccacagcatcctttatccaatttacagacagcttcgcaggacactttgcagacgcagcgatgttcaccgccatgctcttagcagtcgctgctttcatctacatgctcgcaacagggaagttcgataaaaggcttgcgcagggcttcatgaaagcccgtgaagtctcatcagaagtgacccgaacgaagttctatcaagctcctgaccataccgtccactatctctcaacagaccgtcatcgtccctacctggtcgttacgaagcacgccgagttcctatgtgactttgatcgattagcaaggttctatgccggggagcggctctttctgtga

SEQ ID NO: 510398 - DNA, 513 bp, Stenotrophomonas maltophilia
atgaacgcagcaaagaccaacgaaaccccggttccgacccccaagcagactccgacccccaagcagactccgaccccttccacgactccgaacaaggaatcggcagcagtaaagagcgatgagcgtagcctggaagagctggaaaaagaggccgaagccctcaatgcccagctcaaaaagattgaagagctcaaaggcgctcgtaaagctgctgaggcgacggctgctttcgatgagttactgaagggcgtgcagaagttcaaagacttcttgaccgatgctcagaaggcccagttgattggtgccctgggcggaaaaatgggtaagggcggcaagggtggtaacaccggcaagaacaccacgaagtcgaaagcggcgtatcagcttccgagcggtgagcagtatggcggtaaaggaccgaccccacaggcctttaaggactgggcagaaagcgccgcaggtaagaaatggcgtgaccagaatcccggtcagaagtggcctgctgctcagtga

SEQ ID NO: 510399 - DNA, 522 bp, Stenotrophomonas maltophilia
atgaaagccatgaaagatctatcagcggtgttagatgtcgtccaccaagaggaggggagcatccagggcgttgacctggaagccgtcctggacacccagcccggtgactacttggctgtcggggacgaacctcagcgatcaagctacttcgactttgaagatctagaaaagcctgtccggaaccataggacagggaagaaatgctacctagccctaggcattccaggtgagccggaactcaggcctactctccatgactaccgcaccccgcacgggaagcgcacgagtcggatgatgatgactgtgccccctaagctgaaagagcagctcagggcacttcatgggacagaacatgacagtgaagcacctatcgctgtctctattgttgcgctggcgagctatgcggctcaattgctgattgaggagaagagggcagtggtggtcaaagcttggttggacccccgcaaagcccagagaagtcttctccgacaggggttgaagcgtcgaaatcgaaggaattaa

SEQ ID NO: 510400 - DNA, 279 bp, Stenotrophomonas maltophilia
atgaactacaaagaaaaagccgtcgaaattgcaacgaatggagcctccattgccttcggtctcatcctgttcctcgccttcttgatcggcgttcctgccgtaatacttggcctctatttttcaacaaaagtggtagcgcttggctatttctacttgaccatccatcgcgagttatttttttacggcttcgtcattccagcgtttgtaggtctgacatgggtgtctctgcggttcgggccggggtatttcaacaagacaaaagaaggcggtgactcatga

SEQ ID NO: 510401 - DNA, 324 bp, Stenotrophomonas maltophilia
atgaacttagaaaatcaatcattagaaaaactggacgagaacaaggaattctgtcagtcgtgcgaacagagagagcagcttctggatcaaattcatgaagcgacaagcgattcaatattggacgtcttagagcgagttgcggaaggggtgtcgcggcacttccttcttgttggcatatttatcaccatcgtccatcttgctatcccgatttacatttttggcctgcacatttttagcttgatttgttggagtatctctctattggctggcagcgtatcaattggagtcagggcaattaaggcatcacaggagaagcgattatga

SEQ ID NO: 510402 - DNA, 438 bp, Stenotrophomonas maltophilia
atgaactactcgaatcttctcatcccagcagtccacacaaagcgcctcgatatcttgaaagcagctgtcggcacggctgtcttccacatgcctaagcatgacttcatcaacgatgcggattcacggggcatcaccgctctggcgctggcaagcctgacgtggctgcacgaagaagaccccaaatcaaaagcggaattgaacgccatggtcgctttcttgctcgacttcaaagcgaacccttaccaagagattggctgtgtcttccggaagcggtatgcgggttggcacgggcgcaaagagttcgttcgggaacctggaaagaccattgcggagctgtgcaacggcaaattgccgccagccctcgacgctttaattcgcagagatgcgaaacgcccacaagtcaacctgggcaagctgattcaaaggagagcggcatga

SEQ ID NO: 510403 - DNA, 180 bp, Stenotrophomonas maltophilia
atgaaagactatctcgtaagaaacgaatcggcgttcaatctggaagacaacgcttttgcgttcttccgtcaagcaaacaaaagcaaaagggatgagcgtcggacgctgaaacagcgctacgaccgcaaagcacccagagagttgcccgaagatttactcatcttgggggtgtgggaatga

SEQ ID NO: 510404 - DNA, 1614 bp, Stenotrophomonas maltophilia
atgaaaaataaatcgagaggctttggtctcaatgaactgctgatcagcatcggccttgtgtcggctttgggtgctgcggcttttatgatttattttccggccaaagctcgtgcccaggtcaaagcagagacggggcgcaatacggaactcgtgagtgccattcggtcgtcgttcggtgtggttggcacatatgaaggcgtcagcgctgaacggctgatcgaagaccagctcgtgaacccaagtgcggtgcaaggggcaggcaagttgacgaacgcatggggcggcaacacgtatgtccaagcattgggcactgtgcgattcggtgactcgttctctgtcgaatacacaaaggtctctgctgactcgtgtgcgtcattcgtcactgcgaatgcagtcgatgttcaagacatcgtgatagatggaagaagtgtctatcagaacaatggcggtcagctcgatatagcagcgatgacgctcgcttgcagtgcgcccaacagcgtcacgttcgtctatttttcctcagaactgaggggtctggttgcggctgatcccttgcttcttccacaagcgccggcacctatcgaacggacaccgccacttgcacctggaatccccgcattgccagagatcgaccccggtcgatctgcccaacccgctcttctagtgaacccagcatgcggaccacaaccagcgatcccagcctgtcccggtatcaataattattcctggtcatccactgcatacccctcgtgctggcgattgaacggctcatgccagattccgccagccccagaaccttcccccgtggtgtgggaaccccaacttccagacacgatcactcctcccaccattccgcctcgggctatctgtcagagagcttctgaatcgagcgagatagcgtgtccagtgggtcattggggaagaggtcaagtcactcgtgagcggctctgtctggatgcatgggacaacacctgggaagcgccagtcacttcatatgcaagctgcaccacatgtccttcaaatcgcgcagaagagcagttccaaacggtgcctcgcacagaagcgtgcagcggtggaagaaccggcacagcgaacatcttagtcaggcagagaggcactcgaagtgtcagctattcctgcgctgtgggtcaggcaacagagcctgctcccagcttcggaaattggtcttgggcagacacgggcgaagtcgtgtcgagagatgagagcggctgcgtctctcctggcgtcgtcgtcaatgcgaattcgaagttttatttatcgaacacgaatgacacacgacttgtgccagcgggcttagttctagccgaaacatctacttggacctcgcttggaagcgtgtccggtgagtggccttctagccaagggccaatccgagcttgggctgatgtgtcgttgacatacaacggggttgtcaacgggctttacgcatccgctgatacgacttcccctcagcccagttcgccgatcaatcgctcaatgatttatgaacgagatttcggcggcaaagtgattgagttcgacgtgagaacaacaagttcccacaacaactcatcgattaatggaagactcgccatctactaccgcatgaaataa

SEQ ID NO: 510405 - DNA, 2208 bp, Stenotrophomonas maltophilia
atgaagaacaaaaattacgcacgattatcgattttatctctggctttactagcggtcacagcccaggctcagtccttaccatcaggcgaagacggaacaaaactaggcaacggagcgattgcaaaagcgccttccgatgtcgcaattggcaacgaagcagaagcttacagtgcccccttttacgaggtggatgaagacggcacaattcgagttctatcagcaggaaatacggcagtaggaacccgctcaaaagccattggcgaactcaacacggccatgggcaacggaacgactgtcacaggcaaatacaacactgccttgggtgctggttccattgcagagggtgagcgcaatttctcagccgggttgtctgcttacacgaacggaacgaacaacactgctgtcggctcccaagcaacagcggaaggcgaatcctcaatctctgtcggcactatgtcttactccaatggcgtcggtgcccaagccatgggtggctggtcagaagcagaaggagatgcttctacggcagttggatatatgtcaaaagccaaagggacatcttcaacagcgatgggccaaggtgcacaagcgtcagaagaagcctcgacagccgtggggtctaacgcaaatgttacggctcgtggcggctcggctttcggaaacggagcaggagcacatggcgaaaactgcacggcattgggtgctggatcgaactgctttgaagcgaacacggtctcagttgggcaatacgcccagcaacgtcgaatcgtcaatgttgcgaacggcatcaatgacaatgaagcggtgaattacggacaattgagacagttcggcaatgtcttagggaacggttttgggttcgatggtggcactttctacgcccctgtttggaacaaccgggatggaaccacgcacactgatgtgtcgtctgttttcaataattttgacgaacgtatttacaacatcgaaagcaacggcggaactgctgggaaagacggagcttcggcgtatgaagtcgctcaaaagaatggctacgctggaagtgaagcagagtggctgggaagcttaaagggcgacaagggcgagaaaggggattcgggcttagcgggggccgattcaatcgttccaggaccagcggggcaggacggtcgggatggggccgactcaacggtgtctggaccaacggggcctgcagggcaggacggcaaagattccatggttcctgggcctgcgggccaagacggggccgccggatcgtccgcttacgagcttgctgtaaaaaatggctttcaaggcaacgaaagcacctggttagactcactgaaaggcctggacggagcaaacggcacgggcggttctgagaacccctacatcgctatcaacgacgacacgacttacgatcaaaacagacccgcagaagcgacgggaacgaacgcaatcgccgctggtaatggggcaagagcggtgacgaaaaattacgtgggtgcaaccgctgtcggagcgaactcgtatgcggaaggagaccagaccacagccacagggtcggacaccattgcgaacggcgattttacaacggcgactggcagcggtgcgattgcaacagcaaacgctgcaacagcatctggtgctaacagtcgtgcaacagaagacggctcaaccgccgtgggaacaggtgcaagtgcgacggcgaaaggcgcaacagcagtaggcaatgtggcgtctgctgagcacgaaaactctgttgcggtgggaactgggacagtgaccagcgaagcgaaccaggttgccgttggcaatcgtaaaatctcgcaagtggccccaggtcgaatcgccaagaactcaacggatgcgatcaacggaagccagctgtatgacctgaacaacgagtggaacgataaatggtcaaagaccaatgatcgaatcaacggattggaagggcgcatgaagcagttcgataaaaaattgcacggggtctgtgcgatgcagcaggcgaacgctcaggtggcgatgtctacatccgcaatccataacgagaaccgaaaccgcttcggcgtgggcatcggtggatgcagtggacaagcagcgtttgcggcaggctacacacgggatgtgaccacttcacgaggatctccatctgctttctcaattggcatctcttccagtgaagctggaaccgcagtaggagcaggttggtccatcggttggtaa

SEQ ID NO: 510406 - DNA, 474 bp, Stenotrophomonas maltophilia
atgactacatttaccacaatcgtgataagtctcattattgcgatcatcgctttcggacaatttcgcattgctgacacgaagaccaagttggagttctacgagaagcgcctcgccattcttctctccgcatcagaggcggccagaaggacctacctgccatttgatcctgagcaagaggattttaaggatctgcacaatgccgtccgtgaatcgaggttccttttcgacccggaggacaaggttgaggaattgatgaaggcgatccagctgaacgtcgctgtgatcaacctcgatagacggtcttgctttgaagcgaacggaaaagcccctgcaaacccagacttggctgtccggttgtttctgaatggtcaggatgcacgagccgagttgacaaagaacatcggtcaactggaagtaattttggacaaatacaaccgattcaaaacggtcagcggctggacctgggcaggctga

SEQ ID NO: 510407 - DNA, 345 bp, Stenotrophomonas maltophilia
atgatttcttcaattaaaaacgtgatgatgtatggggtcatcctaactgttctcttccacccacgtatcgctctgaaagacaagttcgttcaaggtctggatacgatgagtgtctctatggaggaactgacgggagcaaaatatccccgcatccaagagtcgtccactttcaatgccgtaactcagcagttgggtcaagcgtatgaggaccggattgcgggaggcttggttgggaacaaaggcatcggtgacctgttgccggtgacctcaaccagcaacgctgatggctcgcctgttatccaatacatcacgattccagaccatagccaaatggcgtccaggtaa

SEQ ID NO: 510408 - DNA, 1011 bp, Stenotrophomonas maltophilia
atgagccagatgacagaccacacccaaaaagttgcccaactcttcattgaactcatccagaaggatcttgctccgttccagcgcccttggtctcccggacaacctcgacatacggccaatcagatgccggtcaacggaaccagcggaaggggctacaacggcatcaatgcgctgtatctccatatgcagcagctcttccaaaattacgaatcgaatgcctggatgaccttcaagcaagcgtctgatatgggcggcaaagtcatcaaggggcagaaatcaacactggttgagtattgggactggccgaagaagacggctggcgatgacgcatcgaacgtgccgtcttccgaagcgcccgaggaggcccgtaaagggccacgggtgttctacgcccacgtcttcaacgcctctcagatagaagggcttcctgagcggttctatgcccctccggttgtgatgccagaagcatggcggcatcaggaggcggaacgtctgatagaggcatctggtgcggtcattaagcacgatggcggaaatcaggcgttctatcgacccatgaccgactctatccacttgcctatgcctgagcagttcgagagccgtgatgcgctgctagcagtggaatttcacgagatcggccactggaccggggcaccgcaccgtctcaatcggacgttcggaaggtttggcgacgaagcctatgcgcaagaagagctgagggctgagattttttcttacatggtcagccaaaggctcgacttgccgcatgatccggaacgccatgccggatacgtcaaatcgtgggtgaaggtcgtgcagaacgacccccgagccatcttcaaagcgtgcgctgatgcagagcggatgtgcaagttcctgggcgtggaatacgcaaatgccaaggttgaagcgttccaagcggagcagaagcaggagagcaatgtcctgacgtttccagcgaaagagaagttggtcaatgcgaagaagaagagcaggggcttggcgttgtag

SEQ ID NO: 510409 - DNA, 264 bp, Stenotrophomonas maltophilia
atgcattccgattttgatgaatactttgaagagtcagcaatgacctgggaggatgtgctcgcttcactcgatcccgatatgcccatcttggcgagactggataacgaaggcgtccacttccttggaagcgaattcattgaacgatggagccatagcgaagcagctctggctgaaatcgaccaggacatgcttgttaaactttttctgcaccacctccgctccggccatcaagccatcctcttaaaagaaggggatatccgatga

SEQ ID NO: 510410 - DNA, 1641 bp, Stenotrophomonas maltophilia
atgagcttacaagaaaacattagcacgttaaccgtgcctgtcaatacacatgctgaaacttttgaagacatcgatgtagacgctttcgagctgtccgatgaagagttcaatgccaaatacggaacgggcaatcatggtctgggatcttccatccagatgattcaaaagcctcaaaacaacagcgtagcgaaagcggcggcgcagaaaagagcaacaagggccgctcgtaagagcatggacgatgatacgcatatctctgatctatacacagactacattatcgagtgtcgtcctgacatcagtgcttaccgcttagacgacgagacttttattcatcgttggaacggtcgctgctttgaacccatgagcttaaaagacggaattaccaacgctgttcgctggttgagaagcaatcataaaaagaaagcaaccaacgctgttgcaaaggaagcatggtcaacgattgaaagcaatctgcgtgaagaacgcttttttgttgatagagatctggatggcaatacggttattccactctttgacggctatctgcattttgacaatctgacgaacattacactcaaagcccctgatgccacgttgggcttccgccacatcattgatgtgaaatgcggtttgagccatgggcaagctttaattccagctgcattgaggccggattctagatttgcaggttttcttaatcacatcacgactgatctggaagagcaacgttatcttcaagaactcgccgcattgctaattcttcctgacaactttcaagtatgtgtgtggctttatgggaagccaaaaagctccaagtcggtgttcaaggacctgatggcgcttttccactcacagcgatctgtcgttcaaatgagtcttaatcgaattgacaatccttttgaaacagagcggctgctcggcgcgagcttaattacaacggatgaagttaaagatcaaaaggcgtttcatgaagaggcgttcaaggcaattgtctcgcaggctccgataagtattgcacgtaaaaataaaacctcgatcaataactataagttgcgggctaagtggatcatttgctcgaaccaggcacccaaggtttctgagagcagtgaaggcgtatggcggcgaatcggtctttttgagttcaagaatcctgttccagaaaaaagtcaggtcaaggactatcacaaagttctctttaatgaagaagggtatgagattttgcaatgggtcttagaaggcgcacagcgtctcctgaaacgaggtcgatttttggaagaaagtgaatggccggaggcatgtcgtcgcactaagaatgcagctcgtattgaatccaataccgtcacgcattggttgacggaacaaaatgtaacaacctgtgggctatttactgacaaaacgattgtttacaaccgatatctagatttctgcactgcggcgcatgttgagccgtttgctccaaacattttttggcgtcatgtgaaagcgcaatgcgatggtgtgatcgaaaagaaattgaaaattaaagatgcgatggggcgttacacacaaccctatgttgtcaatgttacgtggagcataggcgatgacaaggatgtggaatatttgaacgaaatcgtggatatccctttcggaaaataa

SEQ ID NO: 510411 - DNA, 165 bp, Stenotrophomonas maltophilia
atgaagaaggaaatggaaatgccgagtaaggaaaaagtgttccgctttcgagtgtcgagtgaaaacctaactcggttcaacaaagtagcagagcaagagaatgtcactttgtccgaattgacaaggcgattgttagaagagcgtgccactcaattaatggcataa

SEQ ID NO: 510412 - DNA, 690 bp, Stenotrophomonas maltophilia
atgaatctagcaatcaatttaagttccgtcgagtcattcgaaacaaaggttgaaagggtagtcgcagcgctcgttgaacgtgagaggcataccaatgaccggttagccagattttggttagagtgctttgcaaagacgtttatcattgatcacgttgtcgatgcgctagaagatgttttggatgagctgagaggcgtcaactggtatgagtgtaagaacgagggtaactggaagttcgaacatcacagaagcgaaggcatcgtcaagtgtcgcctgggctattccactttcgagatacccgaagatatctacttcaaagcaatgtgggatggattctggggctcatcgtctagtattgctgtgaaacatgtcatcagtgacgaggagaggacggtagttcaagccgatctagaagcttgcaatacggtcgagtctccggactgttacgatattgctgatcacgaaaagcgaactttgttttggctggctcactacgccatgcagcctttgcgttaccttgatccagttacttatcaggcatatcagcaaggcgattggcatagcgaacatatgcagtccgatgagtttgacggcatttttatctgttgcggtcaagcaagaatgtttgttgatcaatatcaaattgaagcggcaagagagaaagttagttcctctgcaatcgctgcttaa

SEQ ID NO: 510413 - DNA, 333 bp, Stenotrophomonas maltophilia
atgtccgagttcgtcattgatcgagacattctgagagatatctttaacgtcctagaagatcatatcgagccgttgtattggaacaacattgtgcgcaccaagatgctgacggcccgttatccgagtcagagagagaaatctctggcgatgatcaaagaagcgatagcgcacggagctgatgtgaacatgcgtctgagtgctcatctgattgacagagaaacgaagcaaaccaccattgttgagttcacgcttatggaagcattggaagacattgctgggagcgaagaggcgaaacaggcaattcaagagaggcttgacagtctgcaatcctga

SEQ ID NO: 510414 - DNA, 933 bp, Stenotrophomonas maltophilia
atgagagatgacgataatctattagagcaatacgaagacgacgatacggaatatcaaaaaattctggatgctcagcacgacaatgaagaggaagaacaaagagcactagaaagggtcgaaaatcaaaaacgagcagtcttggagacggcgattgatgttgcgagagaacacagatcccgtgatttcaatgttggttttgagttgataaaaggcgtgatagcgagcggcatttcggcgggagatgggtatcgggataacgatccgtatagcgctgccgaaaatgtgctcggtgatgcgtatgtgattgctgttgctgaactccaaaacagcgaatccacggttcgcctcatgcttgaaaatggagcttctgttcgtgcgagcggatcaagcggcacactactccaccacgctaccactcctgaattcatcgatcatcttatagagaaaggattcaacgacctccatgatgaaagcgagttcggacagacggctatggacactgcgattaaaaatgatcgactagctgttgctgaaaagctcgttgaaataggcttgacggttgattctgatcgccgtctatttgctgcgcagcttcatcatgcggagagcgctgagatggctcagttcatgattgataacggcgtgaacgtcaatcaacaagatagctacggacaaacagcactccataagctcgcaagatctttagattcttttgacagtcgaggagaagcacaagttgctgcatgtttactaagaaacggagctgacccgcacattcaggatcagaccggaaaaacgatgatcgatgttgctgcgaagaatggacagcgtgaaagaatgcaaatgattgttaaggaaaacgagagaaatgtgccttccatttcaaatcaaagagaacatggaagagaccactccccctccttctctcgataa

SEQ ID NO: 510415 - DNA, 324 bp, Stenotrophomonas maltophilia
atgaagaattttattatggatatggagcgagaaggtcacagcatcgtctttatttgttttgcagaagccgaagcgaagtggatagagagcgcattggaagtgcccgcttatgtgctcgatgagtttatgctctgcttcgaaaacggccccctgcatctggattccaagacgcttttactcatcaatgaaacgcacaattttccgacagacaatagccctaacaactgtttgctcgtaaaggatctagctgcattgcttggctgcaaatccattccttacaattttgcagagcttcttttagaacgacaatatgcggacaattga

SEQ ID NO: 510416 - DNA, 666 bp, Stenotrophomonas maltophilia
atggtggacgtagccgtgcattgtcttctgcgactgctcccaggtatccaacaaatccgcgtagcgcttttcaccggaacgctggaccaccctgcggatcatcttctctggggctgcagtgtcatggcccttctgaaaccgcgccaactcctgatcatcggccattgcagccacagcccgcgcacaaacgcttcaaaagatggccgcatcaacgctgtagcagagcccaacagcccgtgcttgatgaggagcatgactgacgattggtgttcatgcaccaccgcgaacgctacgaccgccatgtggtctggctccggcccatgcagaaccagcccgtggagttgttcctcgttccaacaccgcacctggtcggcccactccagtgccagctgcacgctcggctcctccagccaaaccgacaacgcgtcttgtgccgcgccgccctcaggcatcggtcacctccccgctggcccgtggcggatgcatgtttaccgaggtatcgaacagatcgttgtttccgtcaaggatagtcatggccccatcttgacagccaaccccctggcgcgcgataactcgcttgccgcgcggggattcccaccggcgcattgcctgcttagctcaaggcaacaggttcccgatccgatcgcacacgcgacgacgggatag

SEQ ID NO: 510417 - DNA, 321 bp, Stenotrophomonas maltophilia
atgagcttctttttagtggatgctgtgtccgagttcaccttggagctttccctgagccaagagtcggaacaagatctgcggcgccagattgcaaagatccaagagggcgcggatgccggtttgctgtccaagcgcctagctgccgagttctccagactggtacccgagatgctcgactgggacatcaaaaggcctactaaagcgcagatcgcatatgcccgctcaatttgctaccaggagaagattgagcttcccgacgaagcgatgcagtcgcgctacacaatgcatctattcatatcctcgcgcggccagtggccgtga

SEQ ID NO: 510418 - DNA, 192 bp, Stenotrophomonas maltophilia
atgacgttgcgcggtgataggaggttcgcgtgcgagccggacgggctgcgtcgaagcaccggttggggcgaggtcgagtggctgctgtctccccacgcgctgctcgatggtgccgctccagcggaggtcctagtcagcgactcggccagtgtgctgaaggcagcgcgtgccgagttcttggccgacggctga

SEQ ID NO: 510419 - DNA, 1482 bp, Stenotrophomonas maltophilia
atgtcacttggaaaagcatcagacccaaaaattacgccatcaaatccttggtcgaatgacccactctctcgagccgccgaagggaaaattcttgccaacctcatatccagccttactgacgcaccatttgtaatttccttaaagggaggctggggcacaggtaaatcgattttccttaaaaggctaggatactacctcgagaactcatacaaaatcccagtaatcaggattgatgcttggcaggaggactatcttgacgaccctcttctcgccatgacgagtgccctgaccgatcgcctggataactcaaaaagcagcacatcgaaagcgactgacaaaattatcaccggactagccggatctgcaggaaaaatcgcattgcccgtcctatcggctattgcaggcatcaccccggctggagctgcggcagccgaggccgctaaaacattatcagatctcgctgaaaacttcctcgaatgggacaggtcgaggaagtcggcagaagcgcgcttcagggaaaatctatcgaaagccagacagcagctcaagaagaagctccggtcacacgatggcgcccccatattgatcatcattgatgaacttgatcgctgccgccctgactttgcaataaagttcctcgagcgaataaagcacttcttcaacgtcaaaggaatttgctttctaattgcagttgatcataagaacttaccccaggcggtcaagaccctatacggcccagaggtcgacggcgaactctatctaagaaaattcttcgattttgagttcaatctcccgcccccaagcctagaggatcacgccaaccaaattttccagaacttccccggaaccgactgctataaggatgccagttcactccgaaagaaactgcgcaatttacgcacacttcaagactacgacttactgcgcaacgagtcgcaagagaatatagaccgagccgagtacagcatcttcttcgcacacattgcctcaacctttggaatgcaacttcgcgactcactccaggcccacactttattgatggcattcataagaagccagcccagaggatcttttagatttcccgcgatagattgcttcatttcttgcttgcgctttgcagcaccacaagagtatgcaaagctggtgagccaagacaccgagcgcctaactgattcggtgcgcgaactcagcaagcaaatgcttaaatcgatagtggcaatcaatcattttctaaacgcaagagtggactcagaatcgcgagaattcagaaactccgtggatcgatcatttcagcttctactagaccacagaagaaatctcgaccacattgatgccctagcccactgctcactctactcgcgttgcattcaacccagtgcgcagggcggaagccaccacctgagatacaattcaaatgactatttggctagcgtaatacacctaagcgccgccttcacggacgtaacggatcccgacgcataa

SEQ ID NO: 510420 - DNA, 303 bp, Stenotrophomonas maltophilia
atgttgaagcatcatgaggtcgagtttcatcagttcattgatcggcttgttcgatctggcgcctcaagcgctcattgggagagtgtctacacctggttcaacaccagccgaatcacgaagaatgtctggcgccagattcatgctcagtatgtagaactctgtgagcactacgagtgggaaggaccggtgcctgcattgcatgcactgaggctcgaatcattcctcacgctgactcgcgatcggttcgacggtgaatcccgagatctactcaccgaaacaggattggacgaatcaactgattga

SEQ ID NO: 510421 - DNA, 315 bp, Stenotrophomonas maltophilia
atggcacttccagcggaatatcagacactgaagctctggcgatcttgcaaagtaatcacttattacgatcacgacacttgctcacatgacaggtgtgacgtgaagcttgattgcaacttgctgattgagtacctcgatgagggacagatcatcagctatcggggacctaacgacggatcagggcacttcctgttgaagtctagcgatgtcggcgggtcagctaccttgcacttgaatccaaagcatctcgtgcttgagggctcgtggtccgagggcggctgcaatggtatgtggaagatctttctcgagtcctaa

SEQ ID NO: 510422 - DNA, 471 bp, Stenotrophomonas maltophilia
atgagccgtatcgccgttgtggtcgtgggactcggactgtggtccgctgccatgttcggtgcgggctgggcctggcggggtgatcgggcagagggcagggaagccacccagcgcgccgacggcgccgaggcagttaccgcccaggtgaaccagacccgtgccaccgagcacgcccaggccgaaacgctggccaccatcggagcgaagcatgaagaagaccgcactgcggccgcgaccgtccctgctgctgttgtggctgacctgcgcgctgggcgcctccagctgcgcgacgacctcgccacctgcagcaccagcctcctgtcccaagccgtcgccggcgccgtcgaacgtgatgcgcacgccgaactacgagcagaggttgcgggagctgctgttcaagtcggccgtgacgccgacgatcacctccgggcctgccaagccgctctgagcgttgacaggtcgccgaactaa

SEQ ID NO: 510423 - DNA, 1131 bp, Stenotrophomonas maltophilia
atggccgctgtatcgcggacctatgggcctctacactttgaagacttagatcccaagcggttcgaagaccttgtccgtcaacttctgtacgacttcagggattgggtaaagcttgagcccaccggacgttcgggcagcgatgacggatttgacgttcgggggattgaaagggatggcgccagtactgcggacgactcatcggatcaaacctcgtcggttgatgagtacaggacttggctgatccagtgcaagcgcgaaaaggcgatatcccctaagaagcttggaggctatttagacggaatttttgctggagctggcgagccgttacatgggctgatattcgcgtcggcttgtgatttctccaaggtggcacgcgaccttttcaacgctagatgccgttcagaagggctacgagagtggaatctgttgggaaaagcggatcttgaggatctactgtaccgcccgcagtatgaccgcttgctcttcggctactttggagtctctctcggacgggatacgactaggagctatgcagcactcaggaaggcactggcaggcaagaggaaagcggtcagagccttgaaggccgggagtgaagtattggttcgctctgtgtcagatacgtcatatccgcaacgcagtgtcgacgttccaagttgggcacgggtcacatacgtgagccatacccatcaaggacttatcttcgagctgcaccgccattttgcggcactggacatcgacgggaaatgggacgccgccttcgctgttgacgacgcccatcctgagactttggagcaccaagtaggccatgaggatgcggataagagaggcaggctatggtcattctgggacagtctgggtgacgaccgcgcttggctgaagtatcaaggatgtatcccttttgagagtatcgtcgacctggatccagatggcgacgaattggcagactttcctcatttgtatgtggaactggcttttggggggcggctattcccgttgcacggcgccgttgttgagcctgttgcgtcatacataatgccttcgattcaaccctctagcgatgacgatggccgcattagccgcttcccacccgaattccgcacgatgccgaagaacaatcggcggctatag

SEQ ID NO: 510424 - DNA, 168 bp, Stenotrophomonas maltophilia
atggcggcatcgaaagaagagattgcgcgtgacctcctgattgctgcgctcagcaacttcaacgggcgagtcgaggggaaaaagatcggtgaggagtacagagccatcctcaaagaggttggcgagggtattcacgaagagcgccagctggagcgtcagcgtccgtga

SEQ ID NO: 510425 - DNA, 159 bp, Stenotrophomonas maltophilia
atgcagcaaattctccgatcggagttcgcagaggcgaagaaaagtatccgtgacctgatacttctctatggtatgaacgacgacttcctgccggctgctgagcacggattttctaaggcagccactaactcattgaatcaggcagccgatggcccttaa

SEQ ID NO: 510426 - DNA, 408 bp, Stenotrophomonas maltophilia
atgagaaatctgaccttggcggaggccgctcgcgacgcggtgtacgtctgtgcagcctgctgcgccaacgggatcgtccgaatcagcgtgacccgaaaccccgaggacagcatccgccgcaggcccaacgtggttgccgcgcaatgggcatgggtcggaagcgagtcgagtgcaaagctgctcgtgcgccacctgcgtaggcggtgggcggcgcgctacgtggttggggagggttactgcttcgactacggtgccgagggagccgagttccggcatgggctcaaccaagcctttttccaagccgtgcgaggtgcggctaggtgggagaagctggggccagaggcgctacgcgtcttcaagatgtgcaaccggcggcatagcaatgagttgttgctctacgcgcggtga

SEQ ID NO: 510427 - DNA, 723 bp, Stenotrophomonas maltophilia
atgaacacccgtaaagccaaacctagtgctcaggacatcgcgtcggccgccaagctcaaggccatctggtccgaaagagccaggcacaggggccttacccaggacaagctggcgcaggagctcggcatcacccaaggcgccataagccagtacctaaacggccggatcccgatgaactaccgaacgcttcgggcctttaccgatgccctaggagtcgcggagaccgaaatccggtcggacctgccagagcaacaactcagcactccctcgtcctcccctaccgaagagtacgtagaagtattagcgctgcctcaatctgcaggtctgactgacggctccgaggccgaggagtacgcacaggcgaactccatgaagttccggaaatctgtactgcgacggagaggactccttacccggccacttgcggtcttctacgcccggggtcgatcgatggagccggtcatctcagacggggactcggtcctcctggacgcctctgataccgacgcggtcgacggagacatttacctggttaggtggccggagggtgacaatcaggcctacggggtgcggcgtgccatgacgctcgagggcgaggtattcttcatgagcgacaacccacagggggatagtcgctggctgaagccgcgtcgcgcgcaatccgaggggaacgcaataacggccgttggccgtgtccgttggatcgggggctgggcggactag

SEQ ID NO: 510428 - DNA, 174 bp, Stenotrophomonas maltophilia
atgcgggtttccatcgaaattgacgagccccctacccatgtggctctcaatgtgctttgtgacaacgagctaatcaggtcacgctatgaagcggagcgcgccaccgagttggtgcatccgataggcacttggaggcgtctaacggcgcacttcttcatttgggaaaacacctaa

SEQ ID NO: 510429 - DNA, 279 bp, Stenotrophomonas maltophilia
atggcctacaacctcttcattgcctatgatctgatgcagcctgggcagagctacgacgcagttcgcgacgcgataaagtcactcggacgttggcatcagttccagtactcacttttctacgtgaacactgagcacgccccggaaatggcgtatgccttggtgcaggcaaagatggatgcgaacgatagactcgccgtcatcgacgcgcaggcaggcatagtcagtgattgggataggccgccaatcaacgccatcaactccatctggtttcagccgtag

SEQ ID NO: 510430 - DNA, 597 bp, Stenotrophomonas maltophilia
atggccacgaagaagtcagcccagccgaagaaggtcccagaccggaaaacggaggttctatccatcaggattgatccgcggactcgttacggcctggagttgctctcgcgcctgcagcggcgctctgcgacaggggtcgtggagtgggcggtccaagaagcttttgcgaaagaggatttcgagtcctacgaccacggatcgttctcggtggccgacgtgatggatgacttgtggcacatcaatgagattgagcgcctcgtcgccctcgcgctccgcaaaccccagttgctgaccttcgaagaatcccgtaaatgggctgtgctaaaggggacgaaggcgttgtggaaggttgatccttcaacgaggcacgtcgacttcagggcatttaattgggatctggtgcttcccttgtgggagcgcattgagcccctggtggacgaggctgcagaacgatctgtcattcgaggcctgagccaagaagaactcttacaggtcggtattgcaacggtcgcgtcccctaagcgcgtcgcgagcggcgtcacgccagccccgcaactgaaggatgatttcgacgatgatgccgacatacctttctag

SEQ ID NO: 510431 - DNA, 198 bp, Stenotrophomonas maltophilia
atgagtaaggaaagccctacaccggagcacagcagcgatcatccgctggctggctgccgcgtcatcaagcagttcgaagaaggcgagatccatatcggggaaaacatccacctggtcgttctcgcagcgcgcgaaggaaaggcccgcattgcaatcagggcaccgcgcagcctggaaatcaccgccccaaaacagtga

SEQ ID NO: 510432 - DNA, 261 bp, Stenotrophomonas maltophilia
atgagcaacgcggccaatccggaaaagaccaaggaaatcgtaatccccggatcgccgcttatggcggtatccgggcaggacctggacctcgcgctgagcaaggcaaggctgctcaccgaccacgtgcaggagctgctctggcagggtatgcggcaagccgatgggaaggacgtttccttcggctacgacacggtcgtgaccatggatttccttctcgacatcgtgaccggcctgtatcgagccgcaggagccgaagcatga

SEQ ID NO: 510433 - DNA, 825 bp, Stenotrophomonas maltophilia; identical to SEQ ID NO: 422641

SEQ ID NO: 510434 - DNA, 456 bp, Stenotrophomonas maltophilia; identical to SEQ ID NO: 330258

SEQ ID NO: 510435 - DNA, 375 bp, Stenotrophomonas maltophilia; identical to SEQ ID NO: 356394

SEQ ID NO: 510436 - DNA, 342 bp, Stenotrophomonas maltophilia
ttgttcaagtcaaccatcctgttctgccagctgagcgaacagatcgggaatgtccctcgccaccaagatcgcatgctgacgatccatacctatgaaaggaacccgaaccaccggcattgccacatccgatgtgtcaaacccatacccctcgcctccgccgttggaagcgaacaaaaatattcccggggcatatgtcccgacctcatattcacggttgaaatcgactacttcttcgactctccagaaaatgatgtagccatcgccaatgaatccttcaccaccatcgtgggccttgaagaattcaatgtaactttcagggagcgcaaatcccacgcgcgttga

SEQ ID NO: 510437 - DNA, 858 bp, Stenotrophomonas maltophilia
atgaattacagggaatgcgtgctgggcctggtgctggcgggagtgctggcaccgtcggcgcaggcaagtggcgacgacggcgaaacgctgcggttccaggtggccgcgcatgtgcaggcgcatgccgatccgcagcaggacggcagcatcgccgtgcagctgtcaccgtcgggcaagcgccagacgcttgagggcgcggcggatgccgatggcagttcgcgatggtcgctcgaagatgtcgatttcgacggctacccggaactggtcgcacgcgcctcggtgggcatggtcaacgaagcggtgacggtgtaccggttcgatccggccagtgcggggttccgcgcgctgcaggccgacacccacggcaaggacagttgcggtgacctgatggggttgagcgtggatgctgccactcgaaccctgaccagcagctgccgcagtggcccgatgtggtacaccgaccagtaccggtttgcaggcgcgaagctccatctgtaccgctctgagagcgtgctgatgctgggcgataccttgagcgccgcgctgcagtgggaacagaccgacgagcagggcccgttggcggtctggcgcacgtatgatccggccggccgtgtgctggaaagtgccatcgccgatggcctgggcgcaccgccggacgggccgttgcgtggtcagcaggccaccgtggtaaccgcgcgcctgttcctgttcgaccgacccggcgcgtccagcaccaagcgttacctggtgcggggcgaccgcgtggaactgctggatgaacaggacggctgggtgaagctgcgctaccgcaacccgaagcagggcgcggtggaaggctggatcaacgtcaacgattga

SEQ ID NO: 510438 - DNA, 168 bp, Stenotrophomonas maltophilia
atgctggaggccgcgggcggcaaggtgctgatgctggcgatccaggccgaggggcgcgtgccgttgctgctgatggcggcctgcgaccagcgcagcgtgatcggccaagtgctgtggcagagcagggaatgtggccaggcgatcctggccgaactcggcggatcgtga

SEQ ID NO: 510439 - DNA, 672 bp, Stenotrophomonas maltophilia
atgttggagtgggtgaacggttgcgtgctgattgcgaatatagtggcacacaactcggttgaggggatttccaacgcaggctcaggttggctgcagacctacgggcaactcgttggtgtagcgatcggtaccatccttaccggcgtggtagcggtttcgcttgctgtgatgaataaccgcagcagcgatcacaggttgcgaatgcagcagacccacgatctgcagcgcgagaaccaacgcgttacgcgagaacgccttgaggagctgtacgtactggcaggccactggacggcaggcctcgcacagttcaacattctgggattgcgcctcgcgaaaggcatgctcacctataagcagtacgtcgaccttcagctgcaacagggcgagaagtccaaggtggagctatcccgcatggagcttctgcgtgacgtgtatgggtctccagcgctgatcgaagcagcggcggcagttaaggcggcccagaacgcttggaactctcgattccaccccattgagttgattgcacagcgccctgacaggtttcgtgaggtcgtggtatccaggcagccggcaagcgaagcggagtatgcggagctcgaccagctggctggcgaagtcggtagcaggagccgcgcgctacttgcagctattgctacccaggtgaagagctag

SEQ ID NO: 510440 - DNA, 1506 bp, Stenotrophomonas maltophilia
atgacctatcttcccggactgatgccgtacgtgcgctcgggtacgaccgagggtgatctgaattacctgaaggacgttttcgttactcctgcccagctggcagacgtatgcagcattgaacctggcagcatgcgtgtactcgttggcaacaagggcgcgggaaagtcagccttagttgaatggctcaagcgcactgcaattgacgcgaagcttccttgtgtcctgcttcgccctgatcagctcgctgacatggtcgcgccaacctcaagcgacctagctaccctcaaaggatacttctacgaaaagcttctccgtaccgttgcatccgaagttggaagtcagatcacctcataccttccgctcgttggcaatcaagccactctctacgatcacgcagttgcacagggaacgactcgcggagacgtgattacccggacgcttccactattggcggcactatctcgacccgccacagggctggatgccgataaactgtttgcccaaaccaagagtaaaatgccaaatgctcaacttcgcgaggccttaaactcccaccttctgaacaagacgaagagttctttcttgctattgattgacgacactgaccagctagcaacaccggacgacaaagcccaactaaataagatctgggcgcttattttggctgtccgcagattagcgatggattgcaactcggttcgtccgatagtcacattgagatctagcgtttgggcgcgactgagctatgaaagtgccggccagcgggaccaggtagaccacatacgcccactatccattcacttgcgctcaagtgacccgactattgttgagatcgtggagaagcgcatgcgcaccgcttcgctggcgaatcgcattccgatcttgacaccctacgggccttactttgaaggccgtgacgtcctgctccccgatagcgatcagcgccgatcgtggccagacttcatctcaaaatcagcgcgagaaagaccgcgcgatgcgttgcaactaatcaagagcatgattgaggccgcattggaccaaagtcaccagaagattggcgacgatgatgcatcgagagcaatgcacgtttattcttcagaacgcgtggacgacgttgttaatgaatacgcgatggattgccccgctatccgtgaagtcattgagtcgttctactcgggcaacttcgacatgagcttcgaagagctaagagagcatctggggcgcaccttgggagtgacgtccatccagcttcgaggcatctccatccagaacagggatgaacacttgatccagctgctcgccctccttcacgaggtcggattcatcaatgcgcgcttacctgataaaacaaagccgaagggctttgaccacaagaatttttctgatgatccaaagttcgtcaggtactcaaactggaacaatttgcaggcgtccaattgggaaatccatccggcgttccgtagccatttgatcaacattcggattgcgaaagagaagcgccgctga

SEQ ID NO: 510441 - DNA, 141 bp, Stenotrophomonas maltophilia
atgagcgtggccaaatttgttgagcgtattaaaatctggtggatggagcgcggctggtttaaacagcgcgaaactttggaagaggttgcaatgaggtctcaccatgaagccgtgaggcggggtgagaaagaggatgtatag

SEQ ID NO: 510442 - DNA, 378 bp, Stenotrophomonas maltophilia
atgagtctgagcaagcccatatcaaagttggttgagaatatcacctgggaaacaattgaggggcgagttcaatggagttttgcagatgcgccgtctgctcttacaagcggcactccatacatcatacctatatatgttacgaccaagtataaggactatcagcgcgtatctgtatacgagcgccgctttaagtactacaccgatgaggatacctggtcttggacatcaatgatcgtgttcgtgatgattgataattggggtagggttatttttgagtctgaggattcagatcttaaaataaatagcttgtttaacgttgctagggataacgcatcaaaggtggatgatatcgtcaagaagcttcttggagatgaatga

SEQ ID NO: 510443 - DNA, 657 bp, Stenotrophomonas maltophilia
atgtggacgggtatgggactcaagtatgcgtacgattcttctgatcctgggcgtacagcggttagcatcttgggctggctggctcgtcaccgtggtaagacgccgagatgtttgttatgtaatgaagatttggtggttaaaggtgagcgctcgctacaggtggattgctatttttcccaccaaatgaactcaagttgccctacgatttcatcgaagtctgcgacttcgtacatattaaatgccccgatgagtccgggggcatcgcacgcctcgcgtgactatgcaagagaaaatatattgggtgtttatatagcgatgcgtggtctggagaagggggtgggatggcttgatcttgagaaagcgtgtgaggttgctaagcaaaagaaagtttgggatcttgtggggataacccctgagtttatacccgccattttgctatcctgcttggatgcgtggactcctcgcggatcaaccgggctcgtaacttattttttggagcccagcgcaacccctggaagtcattggaattttggtggcgctaaaaaaactaaattgtatgaagtcgatatgaagaccggggatataaaaattcatcccattggcatgaaacaaccgaaaagtaatctcatctctcgaatagagaagttgctcttatga

SEQ ID NO: 510444 - DNA, 1566 bp, Stenotrophomonas maltophilia
atgaacttccctaaatctcagaagactggtcgacaagcagagcttgcagtagaacaagcctttttagagtgggattggaatgttggacacgatcagatagacattggttacgacctgtgcatcacccccgatcacactgtctaccacggcattcactttctagcacaagtgaaagcgacctctgtcgagtccagaggaagccgaatcactgctcaagtttccaagaaccgattgcggcagtatgcgaacaatgtgctcccggtcttcattttgagggtgacccccgaccgttccatttattggattcacgctcaagagtgggcgaagggcaatcaagaaaagctgatcggcgatggcaaaggcgtggtcacgttcgaccattcaaaggtcctcagtgaccgtgaaggctttgaacgctatctgtgggacatcgtagagcctattcttcaaacccgagatccgctatccatcggaaatcagccatctattgatctagcaaagcgcagcgcccgaagagcgcccccgggttcgggcgaaagcaagactcagaaagtgcaggagctctcgaaggggctttctcggttggatctatccttcacgccagtcggaacggccgagaacatagccctggtccgagacgcatatctgtatggcctcccacgcacatttgatgtaaaagacttcaagcttgcgcctctccccggcttccaggatcaaatgaagccgctacttgctcatggcaagctcaccatgaagacgaaagcagccacccaaggccatgtcctcgtatgtccaggccaggaatattccgtcttggcgcaggaagtgagcttagctgctgagctattcaacggcaccgcaggagcaggcattacgaatgagtctctcccatcaccattgacgatcatcattcggtgcacggttgtagagacatcattgaaggcagaaatcaaccttagcatcaggggctccgcaatatacggcgtcgcgctaaaggagattgatacgctcgcccctctagcaacgtgggctgaccagattgctgccgaagacgcaatgatgctgactttggacttcaatgggatccgccagccactgcaccctgctgtgtcacccatcggtcagatgcttcctgtgttccagcgcatcagaagcctgagcagactccatatgatttgtcgcgccctcaactcccccgtcatactcgaaaattcagacgtgttctccgaggaggacttccaggatatcgactttggcttcgatcttctgaggggcgtacagagatccgttacccttaatactatggaggtcgattcagtgggccccgaggcgcgcaagttcataactgttcctggcgaatttctcattcagacacattggcaactggatgtggctgggaaggcgctcggtcacttcccagtcgagatccatatgactggctatgcctttgaaagcaccgcagaccccaagaagctcaagattgtcaaaggtagcaatgggcaagcttgggttagctacaagaaacatgatgcagccgggcaccatatcattcggcggaagacgtag

SEQ ID NO: 510445 - DNA, 702 bp, Stenotrophomonas maltophilia
ttgccacgcccggccaccgcgtatccggtctcgatcctgcccagcagccacctgaccctggccaaacggtcgctgggcagtgacttcgtcggtgccagcagccagctgtcacgcggcaaccagatgttcgtgcccgctacgtggctgcaggacgcgccggcatcgctgcgcaaggtgatcgcggtggccagtgcagtgggggcctcgccagaggcgtcggagctgaaggtggtcgatgccggtgcggcgatcagcccgggtgtgccgtggctggctttcggtgtggcgccgtcgggtgtcgatgtggccggcctgaaggacggccacctgctgatcggcgggaagcctcagccgctgctggatgtcagcggcctggatcgcgccgcggtggtgcaggtcggcacctccggcggccagcttggcgtgctgtacagcgatctgggtgcacaggcaccgtcgttcggcgcaccgttccggctgctgcgcggtgatctggcggtgctcgacggcagtgatgccgtgcgcgagttcgatcgccaggatccttacgggggccgagttgcccaggatggcaatccacaatcgaagtgggaacggcacatggtctggttgctgctgctggtcggcgtgatcgtgttcgcgctgctggccgcccgcgtcacccaggtgcgccgccgcaagtccgccaacacagggcactga

SEQ ID NO: 510446 - DNA, 483 bp, Stenotrophomonas maltophilia
atgtaccggcgcgcagccgtggtgaacatggacactcttgatcccaagctacagattcagtcagatgccgcagcccaacgcgaagcactcgccgcagaatggctcagcggcgcgcaggtgagcgccaggctcggtctgatatcccctcatggcgacaacgatgcaactcagctacgtcgccaaggaaaactgctggccgtttacatggcgcagccggtaccctgctaccgctatccgacctggcagttcagagctgaaggcctgcccatagacggattggctgacatcttgagagtgctgcgtaacttggggtccttcgagcgcgagccagacgggctggctcgcacaactggatggggtgaggtcgagtggttcctgtccccgcatgccttgctcgacgaaagaagtccggccgaagagctggcgataagtccggaaagagtcttgcaggcagctcgtacagagctggagtgcgaaggctga

SEQ ID NO: 510447 - DNA, 702 bp, Stenotrophomonas maltophilia
gtgagtcatctgaacttcttgaagagtgaaatagatgcgctaaaggtcatcgatgccatgggcttggacgacgccatttcgcgctgtgtcgagaaccggagccgtcttgaactgatcccgtttcgccttgatctctgcggtgactatgttgctagacgagcgcgcgaattcgactctgcactgcaggccttcgcagcagccaaagcgccgaagaagacagaggctacgcactatgcagctcttaaggctggctcctctctaagctcggcgttcagacagacacaagtggcgctagagcaggagattcacgatgcggaggtcttccgtgtatatgaccacatgatgcccccagaccgtttggcagcaaccatgtccatacgtatcagctatcagtggagagcttcagctggcgatgcctggacttccggagaaatcgtcttcactcacaccgtagtcccccgggacaattacctcgctccagtcgcaaagcgtaagcccagtgccgcggcgcgggagagaaaactacaagatgacctctattcggaatgggaacatcttaagctgttggcgctatcgagtcttaggaagcacttccgagacggcgggagcgctgccactgtgcccaaggtcttcccggtggtcttggacagctacagcagtcagctcaacaactacagtactgatttctggcgaaagcattga

SEQ ID NO: 510448 - DNA, 471 bp, Stenotrophomonas maltophilia
atgaggccgaccatcttggcgttggacctggaaggaacgctgatctccaatgccataagccagattcccaggcctggtctctttctgtttctggagaacgtacgtgctcagttcgaagagctcgtcatgtttacgaccgtaccggagccccttacgcacagtattgctgggctgttggttcgtgaaggcagcgtgccagagtggttctctcaactcccgtacgttcaatggtcgggcaagactaaggacttgtcgtacgtctgtcctcgccttggatctgcacttctcttggacgactatggcccttacgtgcatccgggacaggagcagttctgggttgaaattccgctgtttggatcgccgtactcggacgatgacaaagggctgaatgtcgccactgagcagctgaaggagaggctctcaactctcgggaacttggtggctagcaaagcgagaccagagcatctgtaa

SEQ ID NO: 510449 - DNA, 153 bp, Stenotrophomonas maltophilia
atggcacagcagaaccagaacccgaaccagaagcagcagggccagcagaaccagcaggatcagcagcagggtcgtggccgcgaccagcagcagcaacagcagcagcgcaaccagcgcaaccagcagcagggtgggcaggacgaggaagagtga

SEQ ID NO: 510450 - DNA, 642 bp, Stenotrophomonas maltophilia
gtgcatccgagacgggcggcaggcacctgcccagaagacaaacagaacagggggagagggaagatgctagtggtagttaggcatgcgcaaagcatggctaatgcgggatttgcaaccgccgatcccgaatccattgcccttactgccgcaggggaggagcaggctcgcgcattggcaatgacctggtcggctgcgcctgaccgcatctttacctcaccattcctccgggctaggcagacatcacaaccactcgccgaacgcttcaagatggtcgttgcgcccctgggggttcacgagttcacttatctgtcgcctgagcggtgcgtgggcacctcggcagcagaccgcaagcagtgggtagaggactactggtcccgttgcgatccaaactatgtggatggacctggtgccgagtcatttgcccagctagttgcccgcgctgcgcgatcgctgcgcattcttaaatcctattccgcgcatgagcagttggtcgtgtttagccacggccaattgatgcaggcaatgcgctggatttgcgggagcaaggctccctccgtggtgaacgctgcagcgatgggcgcgtttagaaagctggatttggatcagcctatagcccattgccagagggtatctttcaaatag

SEQ ID NO: 510451 - DNA, 882 bp, Stenotrophomonas maltophilia
atgggggagttgcacgaagcttgccaagcactccaagcgatgcagtgctccaatttaggtcgtcctgcctctgatgcatcggacaggctgcactccaggattctctggaatacatggtctctggtggaaggcggggaggaagagttgagggcacgctatgttcttcggcgccagagcctagatggtgcgttgatgatgcgcagcgatgagttcagtgcatatcggcggggattgcgatcactatcactgaggcggcgcaagcaccttgccctgcagcacccccaacttgaggcggtgcttaagtggccctttgcagccctcagccatcgagagtgggatatgaggacagttgttggctggaatcgcctatttacatccagcgccgggctgctcggggtgcgctattcattcccaggcgacacggccagcactgatgagaaccgcttgccggtgatggcatatgacctggatggcctgtatcaacgaggtgacatctatggctttctcatgctcgcctgcgcgtatcgcctgttccacttgcagcggttggctgatcgccagtggtatgcggcaagccacatgatacgagcactatctggagcatgcagagatcccagagtgcgtccatacgctcatgagttgatcacacagacgaagcaacttcttcgcctgctgccggacacgagctttccaattcacgtgaatgacgacgtgatctgggatcagatccggaacgacgtccacgagccctcgtacttgatgaggcgggctgctgaaaggcgtggcgttcacatcccagagcctgtgagcccaatcatctcctaccgataccaaaagtgtgcccctcatcaacagcctttgctgttcgcgcgtaacgggtag

SEQ ID NO: 510452 - DNA, 2421 bp, Stenotrophomonas maltophilia
atgtccacagacccaaaatttggtggcttaacgtttgaagaccgtcaccttctttacacccgcataaaagcaagtgagctcagtattcggcagctcgagaacatgattgccggcagcggaaccaagaccgtaggcaaggcggcgctgagaaacgttcgtgttagacacaactcaatcaagaacggtagtgcgcgaacagttgaaagccacacgtgcgagttggtcttcgcctatgagcttgagcttgatcccgaggtgctgggctactacgtacaagtaccatgccgccgcgtgcagcgcaccacggcgtccgggcgcaatcacatcagcactgcacatgtggattttcttgtatttcgcagggaccacgtagagctagtggagtgcaagccgctatcgtggctggagagtcaactggcgcttccggactccctttgggtcaagcaggacgcggtatggacctactccccctacgcccaatgggcgcagcagcatggcctggtgttcagagtctgggtaccgcccactccaaccggtgtgtacctccaaaaccttgaggcgtgctacgcgatagccggtgatgcccttcagcaacatgaaactaccgcagtatccaaggcagctgggctaatcgccaagcgcccccttctgctggacagtctcttcgctgaggtgcctggtttcacaccgcgcctagcgctttggatgctgggaagatcggcggccttcggtccatggcagagcactcccgcggctaggactgaccgcttccatctgtatggcacgaaggagcaggccaaggaggcggacgagctactgcttggagccattgtcaaagctcagtcgcaaccagctgtggatgatccattgctggtggcaagcgctacagacctccagcgggcacaccagcgactcagtaggcttgcgctgattgaggccggaagtctgcccgcaacacgacggatgggcgctctgcagcgacatgttcgaaaggctgttgccgaaggaagatccgcgctttcggcttgtcttaccaaatatgcgtttagcggaaaccgagcatcgcgcctgcttccggaacacgaacaagccatagagaccgtcatcgcgctgcactggaacaccgggagggtacatagaccgaaggacttgctctatgtgttcgaagaggagtgccttcggttaggagttgagccctgcggtaggggccgactggatgctagacgaagaagcgagagcccaacacgccatgcgctatccacgggcggctttcgcgcctaccacgcgacgcgtacacgcaccgatcctcgccatcgctcgctgcctccgatcggatatggccacacactgcacgtggattcgtcggatctggatgttcgctgcgcgccgaacctgattcactgcttcccagcaagcaaagcaaagttctatatcggcatagacggagcgacgggctatccgatggctcatgcattggtatttggatcagcaagaaccgacgccttggcattgctcatgcgtgagtacgtcaaaagacagggcttcctacccaagttgatccatctggatcgagggccggagaacacctcccgctggctacaagatttctgccatggcgagatcagtctaaggttctccccaacggcgggcagcgcctggaatggcattgctgagaacgccatcaagcaggtcaatgaacaagtagcacagcgattcccgggaagcacgcggcccgaccagatgggacgtaaggtcgacggcaggttcaagagccgaaacaatgcgaggacggactttgtccgtgtgcacgaggagttcctgaagttcgtctatcacgaccttcctatgacaccgggcccagatgatgcaacgccagccgagaagagggttgaggcgcttgcggcctacggcgccgtcggaacaccatgcgaatgggacgatgggttcctaatcagaactgcgatcaaggtggagaccaagaagcgaatcgaccgccagcgtggcgtacgcactgccgatggttggttcaccagtgatgagcttctacgggccctgcgaactgagaatgccagtgaggttcgcagcgattgctgtgacccaagtgtgatctacgtgaaggttcatggaaattggttcaaggctttccacaacagactgcaaagcgatgcgctgctgtcggatcaggaacaacttttccacttgctctgggcacccacgttgcggtcgcaatcggccaaaagaaaaaaggaagttgcccgttctcgtcattcgcgccgagtgcaagcccaggcggcaaggcccgcaacagagcaccttgcccccgaagcgatgcccagcagcaatgagatccttgatattggaccagtgccaccggcgatcgcacaggacatcgtcccgttcgatgaacgggaggactactga

SEQ ID NO: 510453 - DNA, 1002 bp, Stenotrophomonas maltophilia
atgaagatggttcagcaccccgcatacgaaggcccccgcaagcgattgcgaattgcgcttgaccagcatcgtcccgggcatatggttttcattattggaccatccggcgtgggcaagacaacgatgaggcgctcggtgatgcgggagatgtttggtaagcctgcatgctggcgacttgggcggatacctttggtcgaaacattcgccacacttcctcacggcgcgtacttcagttcccgtcagctcgctgtctcaattcttcaggagttgcacgtgccaacgttggcatggctactggatggaagctatctcggggaggacgccaaactggaaattcgacgcgagcttgccactgcgacattggagtgggagtccttagcgcgaacaagacagacggaaggcgagtactgggggatggtgcagcgaagcctgagagcgcgtagttgcaagtatgtatcaatcgatcaggtcacagcgctactagtcaaccacagagacaagtcccccgctgaccacaccctccatctgatggcgatagctgaagccacaggcgtgatgttcgtcatgactggggtgcacaaagccacgcagttgtggtcggtcaactccgagttgcgacgccgagtcacaactgtttgggtgcctccatatagtgataagcgtcgggatgacaaggtgccgttccttcgtttgctcaagtcattggccactcgctacgggctttcacaggatgatctgctaatccggatggccaacgatatccttgccgctaccggcggcgtattcgctgaggtggtcgaactactggggcgggcagatattgctgcgaagcaggagggatgcaacagaattctcaaacgacacatcgagatctcctactacggaagtgaggatcttaggaatctatggcgggacatcgacgcatttgagatgagcatggttgccggcagtgtcactgagcgatcagaacatgtgaaggcgcgctggggatctccaacctga

SEQ ID NO: 510454 - DNA, 1020 bp, Stenotrophomonas maltophilia
atgaaagttctccagcactcagcatacagagggccgcgagatcgcctgagggcagctctagacaatcacaggccggggcatatggtcttcgtcatcggtccgtcgggtgtagggaagaccacgatgcgtcggagcgttatgcgtgagatgtttgggaacccaaacctgtgggaaaagggaaaagttcctgccatcgagacgttcgcgtgcttgccagttggagcatacttcagttcgcgatacctcgcccgcgagttattgaaagagcttaatgcgccgactctgacatgggcgctggagggcggatcacctcggtcaagtcccccttcggacattcaagccgaagttcgcgacagagaccttcagcttggacggtatcaactcaggctcaccgaagcggagtgttggtcgtctgtaaggcggtccatggttgcgcgtgactgcaagtatgtcgctatcgatcaaatatcagcgctcctggtgaatcacaaaaacaagtcacctgcggaccatgcattgcacttgatgacgttagcagagtccgccgggtcgatgctcataatgaccgggatccacagggcagttcaactctggtcgatcgaatccgagcttcgccgaagtgtgacgtctatatgggttccgccatatagcgttagaagaaaggaggaccgggctccattcttgcgcctccttacctcgctaagcgaaaggcacaatttctctaaacaggacctattgattcgaatggcggcggatctactggtcgcgacgggaggtgtctacggagaggtggctcagcttctgtcgcgagctgcggatgcggccaagcaggaaggaagcgagcggatccttaaacgtcacatagaggcttcctactattcagacaacgatcttgccaacctttggcgagatatcgaggatttcgaggatgcaatggaggctggaagcgccacagccagggcgaaaccgctcacgtctagttggacctcctcttatggggaggtgtgccgtgaagtctag

SEQ ID NO: 510455 - DNA, 1368 bp, Stenotrophomonas maltophilia
atggggaggtgtgccgtgaagtctagtattcagcgatttacctggtcgtccttgcctccacttcaactgaagggtgtgggaacgtcgcgagttgaatccttggagcactacgttctacggcaagcgtggacagtcggcgtgaccatggccaatatgatgtcgatagtcggtccagctattgatggtgggcgtagaggacaagtcatgggctcgggcaagtattgcggtcccagccgcgacttcagtcaccgtatcagcacgctcaagatgctgaccgcccagggcgacctgcagtgcggcacattctgggttttggaggacgtactggcaacctacggaggaggccgagacacaacgcgccgccgctggtgcccagtgtgctaccgcgattgggacgatgatctctcatatgagccgctatcgtggatcgtcgacattcaagctgagtgtgacctgcataaatgcaagctcgaaaccacctgttcaaggtgtggcgcggaccagccgagctcaacagactaccagcggcgtagaagatgccacaaatgcaagcaatcgctttccggtgatggcgccgccgcagcgattactggcgacgaggcatggggtcagcagcagctcgcatccataatcgaactttgcgcgacgccctcacaaccccagattcccttcgaaaactatgttcgattcgtgaaactgctcgttgacggacatccgatgaggcgcgcgtatcctaacgctctcaaggcggagttctaccgcgctaccaagaacttgaccaggggtcgaacgaccattcgtgccattgtcaatctctgcgctctccagtccatctcagcacgcgacatcttgctaagcccggatgcggcggcttccgagccgctgttggatctttggtttagctatgcaacgttaaagctacctgttgggaggcatgcggagcggctcgagcgatgtgccaaatgcttttcagatgttctgaaagcatccgagaaagaccactatgtgccgcagatgaaagttgtacttagacgcttcaggctcaataggcagttgctaagagagatgcaccttgacgtctacgaggagtacaaattgagatacgaagagcaaggtccgtacagtcaaagagttcacttgaacagggcaatggatcttgcgctacagatggttgaaggagatgcagaccaagcgggatcccaccgcaaacttcagcaggcagccaagcaaatcggccagcgatgcaatgtgtcgctggatgtgggattctcggtgatgctcggagcacgaaacgtgctgaaggcgctaagtgagaaccgcttacgaaaacagccgtctggtggccggcgaccacatagcgtcgcctag

SEQ ID NO: 510456 - DNA, 420 bp, Stenotrophomonas maltophilia
ttgaacgctgtcatctatcacaaccccaagtgcggaacctcacgcaacaccttggcgctgatccgctttgccgggatcgaaccggacgtgatcgactacctggcccacccacccagccgtgcgcgcctggtcgagctcattacggcggcggggttgagcgtgcgcgatgccatccggcagaagggaacgccgtatgacgaactcgggctaggcgacgcagcgctgagcgacgacgcgctgcttgatgcgatgctggcgcacccgatactcatcaatcgtcctttcgtacaaaccgataggggtgctcgtctgtgccggccttcggaagtggtgctggagatcctgccgccgctgcccggaccattccgaaaggaggatggagagttggtgaccgggcaccccggaagctcgacgctgtga

SEQ ID NO: 510457 - DNA, 1827 bp, Stenotrophomonas maltophilia
atgcgcttggaagcaatcagcattaccaactttcgttgctatggggatgagatccgggtcgaactggacgacttgactacttttgtcggccggaacgacatcggcaagtcagcgattctggaagcgctggaaatattcttcaacgcagacgtggtggccatggagcagggagatgctcatgttcacagcgtagacaagaccgtttcgatcacgtgtgagttctcggagcttccgccaacactgacgttagacgcgggggcagataccacgttggccgatgagtatcttttgaccttggacggccggctgaaaattcgtaaaacctacgactgcaccagcaagaagccatccgcagaggtgctggtgcttgcgtttcaccccactgcggccaattacgacaacctgctggaattgaaggagaaggagctccagaagagggtgaaggaccttggcttggcggttgcattgaagggcaaccctggcatgcgccgcgcactttgggcggccgctggcgacctcaagcttcaagaggtcgcgatcgcggtcggcaagtccaaggaggacgtcaaacgtatctgggaccagattgagcctcacttgccgatgttcgctctcttccaaagtgatcggagcagtcgggactcggacagcgaggtccaaagcccgatgaaggcagccgtcgctgcggccattgcagaggtccaagatgacatcgctcgaatccaaacaaaggttcgcgagaaggccgaagagattgcgaagaacacgcacagagctttgaccacgattgatcccaaccttgccagcgaacttacaccagagttcagccctcccaccgccgccaagtggcagggactgttttcgctcggcctgaacaccgacgatggcataccgttgaacaagcgaggcagcggcgtcaggcggcttgtgctggtgagcttcttcaaagccgaagcggagcgacggctcaaaaccagcaccaagcgcagcatcatctacgcgatcgaggagccagagacggctcagcaccccagcaaccaacggattctcatcgactccttcaaggtattgtcagaagaccccggctgtcaggttgtattgaccactcacagtcccggatttgcctcggcgctaccccagcagagcattcgttacatctctcgccactccgacacgaaaaagccgcaggttgagtcgggggtcgacgtgttcggtaaggtggctgaagcattgggcgtaacgcctgacagccgggtccaggtactagtgtgcgtcgaaggtccaaccgatgtactagccttgaaagccctttccaaagcgctccacgaggtcgactccaacctgccaaatctttcatccgatgagcgactggcatttgttgtcctgggcggtggaacgctggagcactgggtcaatcaccactacctgcggggcctaggcaagcaggaggtgcacatctacgacggcgatgtcccggcatatgccctaagcgcgcagcaggtcaatgaccgtggggacgggtcatgggctgtcgtcacaaccaagcatgagattgagagctacttgcacaaggacgcaattgcgctcgcgttcggatttgagattgaagtcactgatcaccccatggcgggcaaagctgttccaaaggtcttcggggaggcttttgtcgcccacgccggcgtaggcagtccgcttaaagactccaacgccaagagaaagttggctcagcatgcgttcccttgcatgacagcagccatgttggaagagcgtgatcccgatggcgaagttcgtggttggatgcgtcggctaggcgagatgttggcttaa

SEQ ID NO: 510458 - DNA, 690 bp, Stenotrophomonas maltophilia
atgtactggctcagccgccaccggatgctgttgctgaccatcctggtgatggtcggaggcaccgtgctttgtgcggtcgccgccggccactacgcctggcggcgcgccctcggcgaggaaagcagccaggtgcaacgccagctgcagctgtacggccagggcctgcagcagcgcatcgaccgcttcggcacgttgccgcaggtactggcgctggatccggatctgctgcacgccctgcgtgtgccgccctcgcccaccgaacagcagcggctgaacctcaagctgcaacgcgccaatgaagtcacccgtgcctcgaccctgaccctggtcggccacgacggggtggcagtggcggccagcaactgggaccagccgaccagcaacgtcggcgagaactacagctaccgcccctactaccggcaggcactggcgcagggccgcggccgcttctacggcatcggaatgaccaccggcgtgcccggctactacctgtcgcaggccatcgaggaagatggcaagcggctcggcgtggtggtgatcaaggtcgagctgtcggcgctggaacaggaatggttgagcagcccggacgtggtgctggccagcgacgaccatgacgtggtgttcctggccaaccgtgacagctggcgctaccgcctgctgcgcccgctgggcgccgatgagcgccgatga

SEQ ID NO: 510459 - DNA, 321 bp, Stenotrophomonas maltophilia
ttggcgcggagtagtgccgtcactgcctggcacgggtttgccatcctgtccgcccttgccctcacgtgcctgctgcatcgcctgctgcatgcgctggcgctgctgctcatcagccagggcctgcgccttggcatcctccacctgtggtggcgcctgctgtccatcgcggccacgctcgccgggctgaggcgccgactgcgcgtcgtcgtcacccgccttgggctgcccctgctggccctgctgagatggtggctgaccctgtcctggatccttctggccctgctgcggttgctggccctgcgggttccgctggccctgtga

SEQ ID NO: 510460 - DNA, 744 bp, Stenotrophomonas maltophilia
atgattgccagctgggacagcctggacggcaaaggccgtcgcaatgcggcacggcaactggccgctacggtgtccggggtgatcctgccgtcgccgctgtgcgaatccaaagccatcgtgtcggagttcgccaacgctggcgttgcagtgttgtcgatcggctcggggcgtttcagcgacatcgtctcctgcgtgcgcatcgacgagcaccgcgccagctatgagatggtccgccacctgatcgcaaagggtcatacacgcatcggctatatcaagggcgatcccagccacgccgctacgtccctgcgttggcaaggctaccgcgacgcgctgcacgatgctggcatcagctacgacgagaaactcgtgcagcccggctatttcacctaccgttccggcctgggtgcggccgagaacctgcttaccgcgcggcgcccccccactgcgatctttgccagcaacgacgacatggcagcggccgtggtctcggtggcacatcggcgcggcctggacgtgccaggcgatctgtcggtggtgggattcgatgacacctcagccgccaccatggtctggccggaactgaccaccatccatcagcccgtggcggcaatggccgacgccgccatcgacatcctgctgcgcgagatacgtcgcccccaacatgcgactcgcgtcatcgtcaaccatgtcgtaccccatcagctcgtccagcgttcctcggttgcgaacgcagttgtcacctaa

SEQ ID NO: 510461 - DNA, 1266 bp, Stenotrophomonas maltophilia
atggcctggacgatcctggcgaccatcattgtcaccctgctggcggcggtgatggcaatgaacttcaaaacctcggagaaaaagctcgaacgtaagatcgagcatctctacgcgaccgacagcccccagtttcgccgggaaatgggcgtgctgctcgggccggggctggtgccgggcaacaaagtaaccgatctggagaacggcgacgagatattcccggcgatgctgtacgcaatccgttcggcgcgctccaccatcaccttcgagacctatatctactggtccggcaccattggccaggcgttcgccgacgccttggccgagcgcgcacgcgctggggtgaaggtgaaagtgatggtggactggatgggtagcctgaagatggacaacaggctgctgcaacagatccaggacgctggcgtggaagtgcatcagtatcggccgctgaagtggtacaaccttggccggctgaacaaccgcacacaccgcaagctgttggtggtggatggcaggttgggttttacgggcggtgtcggcgttgccgaccagtggagtggccatgcccaggacggagagcattggcgcgacctgcacttcaggatcgaaggcccggtggtggcgcagatacaggcggccttcaacgacaactggatcaagacggtgggggttgtcctcaatgggccggagtactttccggccgttgcacccgcaggggagatggatgcccatatgttcgttgcttcgccatcgggcggcagcgaaagcatgcatttgatgtacctgatggctatcgcggcagcggcgcacagcatcgatctgcaagccgcatacttcgtgcctgatgacctgatcatcaaggcactgatcaccgcccgccagcgcggtgtgcgcgtgcgcatcaccgtgcagggcaagcacatcgactcggaaaccgtacgcctggcctccaaggcgcattggggtgagctgctggccgcgggtatcgagatctacgagtaccagccaacgatgatgcacaacaaactgttgatcgtggaccggttgatgacgtcggtgggctcgaccaacttcgacgtgcgcagtttccggctcaatgacgaagccagcctgaacatctacgacgcggcgtttgccacgcgcatgaccgaggtgttcgaagcggacctaaaacctacggtgcagtacacctacgccatgtggcaacagcgcccgctcaaggagaagctggtggagaagttcatcctgccgatgaagtcgcagctgtga

SEQ ID NO: 510462 - DNA, 2652 bp, Stenotrophomonas maltophilia
gtgaagaacaccaaccagctccagtccgaacctgtacttcccttgtcgccaccacgtcgcggcgtctccccgctcatctgggcgctctgcggtttgttgttcgggcttgcctgtaccgtgctgctgggcgtgcgcgagtggcgggatctgcatcagcgcggcaaggaggccgagcgcaatctggccgatgccggcatatcacaactgcacatgccgttgcagcgggcagcctccatattgcgggccatgcagacactgttcctggccaacgatgacatggaccagacgcagtttgagcaatactacgagcgccttctcagcacgcgtgagccgggcccgtatacctcgcttgcatttgcaagccgccatgcaatcggcggttcagcaagcccaacgctggcttatcgctatgcgatggtgtcgccctatcagaccaatacatccctgctgggttttgacatggtcacccagaaggccaacctggtcgctttgctgagcgcgcgtgacagtgattcggtggtgatgtccgccccgttcgtactacgccaaagcgctcagcccggacagagcccgctcggcgtcaccctgcgcctgccggtgtactccaacggtccaacaccgaccaccatcgagcagcgccgactgcgcgagatcggcgcattggctgtaggcatccgcctgcaacccttggtggaagcagccctttcgccatcggtgatggacggctttcgtatccgtatcagtgacgatgcagccggcgctgctccgttctacgactcgaacaccgacacaagccctgaccagcccgccctcgtgcggacgctcgactttggtggccgccagtggcgtgtggaaatgctgccgcggccgcagccgatggagtggggaagtctgccatccatcctcatcggcggcggcatcataagcctgcttctgtcggccctgctctggtcactggccgtcacccgccgcaaagcactggcgctcggcgcgcagatgagcgcgcgctatcgcgagagtgaacgccggttccgcacgctcaacgaactgttgcctgcgctggtgctgctggcagatgtccgcgattggcatatcgtctacgccaaccaggccgcccgtctgcggttgggcgatgccaccggcctgcagttgtcggcacttttcgccgaccagaggctgcaggccggcatccgcgatgccagcgacaaccacaccggctggaaccacctggaggccgagctgctggcactggatggcagcagcttctgggccaatgcctcggttgccgaggtcgatatggatggggtcccgcatctattgatggtggccaccgacatatccgagcagcgcgaactgactgaccggctgagctaccaggccgcccacgacgcgctcaccggcctgtacaaccggcgcgagttcgagcgccgggtggaggacgcgttgcgcgaacacagggccggccgtacctgcggctcctgcgccatgctgtacatcgacctggaccagttcaaactgatcaacgacgtatccgggcatatggccggtgaccagttgcttgaacagcttgcgctgaccatgcagcagcagctgcgcggtggcgatgtgctggcgcgcctgggcggtgacgaattcgggctgctgaccttccatgcagacgccgacggtgcgctggaacttggcgagcgcctgcgccgttgcatcgaggctctgatgttctcctggcagggccgcagctacaaagtcacctgcagcatcggcatggtgctgatcgatcaacaggtgcccaccttgaaggatctgctggcatgggccgatacggcctgctacctggccaaggagaacggccgcaaccgcatccacgtgtatcgcgaggatgatgaaaccagccagcgccagggcgagatggaatgggccaaccgcctgcgctgggccatggagcaggaccgcctgctgctggactaccagcagatcatctcgctggatggcaacgacagcaccaccaacatcgaactgctgctacggctgcgcgacgaagatggcgacatcgtactgccgggtgctttcctgcccgctgccgagcgttatgggttgatgccggcaattgatcgctgggtaatacgcaccgcgctgtccaacttcacccgcctgcaccccacggtgaccaacctgggcagctgtgccatcaatctgtccggggccagcatcgaagatgaaggtctggccgacttcattcttgcctgcatcgacctgcatggggtaccggcgcaggcgttgtgcttcgagatcacggagacagtagcggtacgcaacctgctgaaggtggttgccgtggtcgagcgcttgcgccaggcagggtgcagtatcgcgctggacgattttggcgccggcatgtcctcgttcggctacctgaaaaacctgccattggacatgatcaagatcgatcgcagcttcatccgcgaccttgacgacgatcccatcagccacaccatcatcagtgcgattgcccagatcggccaccaaaggggtttgaaggtcatcgccgagggcgtgagcaatgcccacctgtgcgacgccgcccgctcactcggggtggactatggccagggttttggcgtgcaccggccggaacgggtgttgttccagcgctaa

SEQ ID NO: 510463 - DNA, 708 bp, Stenotrophomonas maltophilia
atgcacgcttgcgtagccatgcgccgcaggcagcgccttggcgtaaggtgtaggcagctggcaggcacaaggtggatcaccgtggatgtatcaattgcagggtttgaagtattgccgcgtgcgttctatcgccgtcaccctgccttggttgcccccgagcttctgaacaaactgctggtacgggcggatggtcgctgcgcccgcatcgtcgaagtcgaagcctatgccggcagcgaagatccagcagcgcactcctaccgtggcaagaccgcgcgcaacgccacgatgttcggcccgcctggccatctgtatgtctacttcacctacggcatgcattggggcagcaatgccgtttgcggggaggtgggtgaaggagttggcgtgctgctgcgggcggccgagcccctgcaccatctcgacctgatgtacgcggcacggcccgcggccaagcgccccgccgacctggccagtgggccaggcaagctgtcgcaggcctttggaatcaaccgctccttcgacggcgcggacctggtgcgtggcgacactggcatcctcatcgcatccgatgcaacagccccgccctcgaagcccttggtcggcccgcgggtcgggatatccaaggcgatggactttccctggcgctggtccgtgccaaacaatccctgcgtatcacgcggccctttgaggtcaaagcgtgaaccgctgtaa

SEQ ID NO: 510464 - DNA, 1500 bp, Stenotrophomonas maltophilia
atgtcttcattcctgccacgtggcgtgttcctggtgccggccctgctggcagggttgctgggcggatgtgcggttggtccggatttcgttcgtcccgacagccccgcccccgacgattggtcacagtggcgcgacggcgacgcgctgttgcagccggcgttggatggcgcggcactgcagccccagtggtggacgcagttgtccgatccggtgctggaccaactgcaacgcgacgcgctgtccgccagccccgacctgcgcaccgctgcgctgcacttcgcccaggcacgcacgcaacgcagcacggtggcggcgcaacgtggggtgacagcctccgtgtcgggctcggcggcgcgccagcggcaaagcgagaacggcgccggcacccgcatgctggatattctcagtagcgacagcagcacgttgaagcagttgctggccgagcctttcaatctttaccaggcagggtttgatgcatcctgggagttggatctgtggggcagggtgcgtcgctcggtcgaagccgcggacgccggcgtggcccaacaggcagccttgcttgatctggctcggcagagcgtgaccagtgaggtggcgcgcaactatgtgcagctgcgcggcacgcagcagcagatcgcattggcacgtgaggatatcggtgcgctggaggagcggctgcagttgctgcaggcgcgggtggatggcggcctcgacgatcacctggatctggatcgccagcaggccgacgttgccgccatccgtgcacgcctgccgctgctgttggccgaggaagcagcggccggcaatcagctggcactgctgttgggacaacgcccgggtgcactgcgacagcgtttggcggcggtcccggcagccgatgacaacttgccggacctggcattgggcctgccgtcggaactggcaaagcggcggccagacatccgcgcggcagaggcacgcctgcaccaggccacggccagtatcggggtggccaaggccgacctgtatcccagcatccgcttgggcgccaaattcggttacgaatcgtacctgtcgggtgagttttccgattggggcagccgcacctggtcagtggggccagtgttgaacctgccactgttcgatcatggccggcgcaagagcgtggtgcagcttcgccagctggaacagcaggaggccgccgtgacctatcagaagaccgtgctgcaggcctggcaggagatcgacaatgcgctcaacgcctatgccgccgcacagcaccagcgtgcgcagctgcgtgtacgcgagcaggcaacgctggatgcctatcgcatcgcgcaggcgcgccgcgacgcagggttgatcgattttctcagcgtactggatgcgcgccgcagctatctgcagacacggcgcgagctggtggatggcgacgcggcgctgcgcacccagttcattgccttgaacaaggccttgggcaacgggccattgattgggaatgaccccatggcgtcccgctga

SEQ ID NO: 510465 - DNA, 1116 bp, Stenotrophomonas maltophilia
atgggggccatggtcgactatctgcggcgcatcgccttcctgtgcaggaaggagctgatcacgctcctgaaggaaccctccagccgtgccatgttgtttgcgccggcgctgatgcaggcgctgttgttcggttacggtgccactttcgatctgcgtcacgtgccgtatgcggtgctggacccgggggccggcgcaagttcaaccgagctgctggcgcgcctggatggcgcaggtatcttcgagcgacaggcggtgttgcgctcgtccagccagatagccggtttgatcgatgccaacgaggtgttgctggtgatcagtttcccggccgacttcgagcaacggctggcggcgggccagcaggcgccgctgcaattgatcatggacgggcgcaactcgactacggcgggcgcggcagcggggcatatcgccgccatcgtcagcagcttcaaccagcagcggtccggcaccgcgcaaggagtgcagctggttacccgcagctggtacaaccccaacctggagtcgcgctggcagttgatgcctgccctgatcgcggcactcagcatgctgcagaccctgctgatcgccgccttgtcggtggcgcgcgaacgcgagcagggcacattcgaccagttgctggtcacgccgctgacgccgatgcagattctcgtcggcaaggcggtgccgtcgatcctggtcggactggtgcagtccaccctcatcctgctggtgatccggttctggttccatataccgatggccgggtcggtgggcctgctgtatctggcgctgctggtgttcaccatcgcatcggtgggcattggcctgtcgatctcggccgttgcagccaacatgcagcaggccatgctctataccttcctgttgatcatgcccttgatgttgttgtccggcctgatgacgccggtggccaacatgccaaaggtgctgcagctggcaacctatgccaatccgttgcggttcggcatcgacctggtccgccgggtgtacctggagggtgctggtctgcatgagatcggcttcaacttcgtccccatgctggtagtggcagcgatcacgctgccgctggcggcatggctgttccgcaatcggcttacctag

SEQ ID NO: 510466 - DNA, 1122 bp, Stenotrophomonas maltophilia
atgtctggcttcctcaaccgcctgtgggccttgctgcgcaaggaaacacggcagatgctgcgcgagcgcagcagcatggcggtgggcctgctgctgcccgcggcgttgatcctgctgtttggctatggcctgtccttcgatgtggaccacgcacccgtggccgtggtgctggacgaacgttcgcctgacacgttgtcgttggtcgcgggcctgcagggctcgccctatctggcaccggtgcaggtgcaggacatggatgccgccgtgcgtctgatgcgtgatggcaaggttgggggcattgtgcacgtgccggtggacttcagccgcagccgcgctgccggccaggcacaggtgcaactgatactcaacggtgtcgacgccaataccgctcgtacgctggagagctacatcggtggggcgctggccagccaactccagggcgaattggaccggcagggcacgccctcggccggtggcggcgttagcgtggtgcagcggatgtggttcaacgaggccagcaccagcacctggtacctggtgcccgggctgatcgtgctggtgatgacgctgatcggggccttcctgacctcgctgctggtggcgcgcgagtgggagcgtggcacgctggaggccttgtttgtcacaccggtaaggcccaccgagctggtgctggccaaactgctgccctatctgggtatcggtgtcttcaaccttgccatctgcctgcttaccgcgcgttacctgttccacgtgccgatgcgaggctcgctggcagccatcatcatcagtgctctgttgtacctgatggtgtccttgctgatgggcttgttcatctcggctgccacccgcaaccagttccaggccagccaggtggcgctgctgaccagcttcatgccggcgatgatgttgtccggatttgtgttcgatgtgcgcaacatgccgatggtggtgcaggtgatcagccagctgctgccggcgacccatttcatgggcttgatcaagtcgctgttcctgaccggcgacaactggacgttgttcgtgcacaagtcgttggtccttgttgcctacgccctggtgctgtttgccgcgacgcgccacctgctgcgcaagaggctgcgctga

SEQ ID NO: 510467 - DNA, 1764 bp, Stenotrophomonas maltophilia
atgagcggtgcgccgcaggtgaccgtggttgcgcgcgatctgcgcaaacatttcacggcgccaggtggtggtcatctggatgcgcttgcgggcatcagcctgagtgtgcgggccgggcagctgaccgccctggtgggccctgatggtgcaggcaagaccactttcctgcgcatggtcgccgggttgttgccagccgacggcggcagcctgcaggtgctggggctggatgtggcagcacaaccgcagcaggtgcaggaccggattggctacatgccgcaacggtttggcctttacgaagacctgagcgtgcaggagaacctggatctgtacgccgatctgcatggggtggcgcccgaccaacggcagcagcgcttcgagcggctgttgcggatgaccgatctgggtgcgttcacacaacgcccggccggcaagctgtccgggggcatgaaacagaaactggggctggcctgcacgctggtgcgttcaccggacctgttgttgttggacgagcccagtgtgggtgtggatccactctcgcgtcgcgaactgtggaagatcatccaacagctggtgcaggaagagcagctcagtgtgctggtcagtaccgcctacatggatgaagccgagcattgcgagcagatcttcgtgctgcaccaggggcaattgctggccgaaggcgacccggccgggcttgcagccaaggcgcaggggctgacctggagcgtacggcccagcgatgagctgcaaccgcgtgacctgcaggccagattgatcgatgacagcacgcatgtgctggatgcagtgccgcgcgcgggtggcgtgcgcttcattctgcagccgtccgcccacatcgcgcagctttcagcgcagctgcaaggcctgcagccaagccagcgccctgcagagctggaggatgcattcatgatgctgttgcgcacccgcgagcaggcgtcggcggcagtggtaagtcccgcgccgcgaccggccagcgcaggcaaggatgggccggtgatcgtggtacgcgacctggtgcgcaggttcggcgatttcaccgccgtggccagcaccagctttgaggtcaagcgcggcgagatattcggcctgctgggccccaatggcgcaggcaagaccactaccttccgcatgctgtgtggattgctgccggccagcagtgggcatctggaagtggccggactcaacctgcgcactgcccgtgcccaggcgcggggccgcatcggctacgtgtcacagaagtttgcgctgtacggcaacctgagcgtgcgcgagaacctggagttcttcggcggtgcctacggcctggccggtgccgtcttgcggaagcgggtcgccgacgccctgcaacgcttcgcgctgcaaggtgcagcccgcagcgctgaactgccggccggttacaaacagcgcctggcgatggcggtgggcctgttgcacgcccccgagatactgttcctggatgagcccaccagcggcatcgacccgctggcgcggcgcgcgttctggcgcaccattaccgggctggcacagcagggggtgaccatcatcatcaccacccacttcatggaggaggccgagtactgcgaccgcattgcgatccaggatgccggccagctgctggcattgggtacgccggaccaggtgcgggcgcaggcggggggcgagggcatcgacatgaatgccgccttcattgccatcgtcgagcagggccgcgcacagcgcgctgccggacacgacaaggctgtggcctga

SEQ ID NO: 510468 - DNA, 1002 bp, Stenotrophomonas maltophilia
atgaaaaagcctgtgatccttgttgtggccgttgccgccgtgctggcagcgctgttgctgtggtggtgggctggccgtcgtcaacccgacgacgccgcgctgaggctgcagggcaacgtggacatccgtcaggtgtcgttggcctttgatggcagtgggcgggtcgaggcggtgaacgtggaggaaggcgacaacgtcgcgcccggtcaggtacttgccgtgctggatacgcagacattgcagctgcaggccgcgcaggccaaggcgcagatcgagagccaacggcagaacgttgcccggttgcgcaacggcgcgcgaccgcaggaagtggtgcaggcacgcagccagctggccgccgcggaggcggatgcggcgcgcgcaagccaggacctgcaacgcttgcagggcgttgctgccgccaccaacgggcgtggcgtgagtgcccaggagctggaccgcgcccgcagcgcggccaaggttgcccaggccaatgcgcaattgcaggggcaagcgctggcaatggtcgagcagggcccgcggaaggaggacatcgctgcggcgcaggcgcagcttgaaggtgcgcaggcgcagttggccctgctgcagcaccaggtggcacaaggcacattgaaggcaccggtggcggcggtggtgcgttcgcgcctggtcgaggtcggcgacatggccgggccgcagcggcctgctttcaccctggcattgacccagcccaaatgggtaagagtgttcgtgggcgagacggaactgggccgggtgcgcgccggccaggtcgcggcggtcagcagcgacagccacccggacacggtgatcaacggcaaggtgggtttcatttcgtcggtggccgagttcactcccaagaccgtgcagaccgaagaactgcgcaccagccttgtctacgaggtgcgggtagtggttgacgacccgcgtgaccagctgcgacttgggcagccggtgagcgtgcggttgctggacgaggtgcactga

SEQ ID NO: 510469 - DNA, 387 bp, Stenotrophomonas maltophilia
atgagcaagaccaagcagaccacccgcagcccacgtaccgatggcgaggccacccgcgcgcgcctgctggaagccgcaggtcgcctgttctccgagcaggggtttgccgaaaccaccggcaaggccatcgcccagcaagcaggggccgatctggcctcgatcaactaccacttcggcaatcgcaacggtctgtaccaggcggtattgctggaagcacaccggcagatactggacctcgacgacctgcagcgcattggagggtcggcagggaatcgttacgtacagggccaaaaaccacctaagcgatttaaacgcaatgataattgccttgtcccgatagcgcatctccccgtctatggggcctgttcaaggactttcgctgtatag

SEQ ID NO: 510470 - DNA, 165 bp, Stenotrophomonas maltophilia
atggccggagcggaggtggtgcagaaaaagtttaacaagcatgtcctggtcgatttcagccagagctgcttcgctatggctccatcgttcaatgaattcgcttccaaggaagtggacgccttcgttatccagtctcgccaagatgggcatatcgggatcgagtga

SEQ ID NO: 510471 - DNA, 198 bp, Stenotrophomonas maltophilia
atgggtaaagatgaacggcacgcgcgcgccactgagatctgcgacatgctcgcccgcgagtacctggaaaaatgggacttcgaccaacaggatgctctcgccgcatcggccatagatttcgatgaagctattcgacgcggatacgcagttgaggtgcagccaacggccgaagaactcaagcaattcgatttgcgttga

SEQ ID NO: 510472 - DNA, 690 bp, Stenotrophomonas maltophilia; identical to SEQ ID NO: 510458

SEQ ID NO: 510473 - DNA, 504 bp, Stenotrophomonas maltophilia
gtgatcgaaacgctgcgcatcaccgcgctggctgaagtcgccggcggcggcggccgaggccagctgctggatctgcgtgttgatggccagcaggctggccttggccgcgtccatcgactcgtgcaggatcgcgcggctgccgggcaggcggcgggcgtccggggcgaggttgccgatggcgtactggttgagcacttcaatggcatcgacgatcgcatcgaggtgttcgaagatcaccgtgttgatgccgctggccagctgaccgtagacgcccgggaagtcttccgaaatacggtggctgatgtccgggccggcatgcatctgtgccatcagctgggtctgttcgctgaagcggcgcagcatcgcggtcatgtcggcggtggccgccagcatgcggccagcctcgtccttgccggtgctctgggtggtgacgctgaggtcgccgcgtgcgacggcctggatggcgttcacggccttgcccagggggccggtcactgcacgtga

SEQ ID NO: 510474 - DNA, 567 bp, Stenotrophomonas maltophilia
atggccacgccgttgatggacaggccgctggtgctgaagtcagcgttggtgcccgggtcggccagggccagtgcgttggtgtcgaacttggcaccacccagggcattggccttggcgtcgatggtcttgtcgatggcgatggcctggccggcattggcgccgacctggaacagctggctggagaacgagccgtccagcagcttggtgccgttgaagtccgactgcttggcgacgcggtcgatttcgctgaccagctgggtcacttcggcctgcagggccttgcggtcgctggccgagttggtggcgttggaggcctgcaccgacagctcgcggacgcgctgcaggttgttgccgatttcggtcagcgaaccttcggcgacctgggccagcgagatgccgtcgttggcattgcggatggcgacgtcggtgccgcggatctgcgtgccgaagcgctcggagatcgccaggccggcggcgtcgtccttggcgctgttgatgcgcgaaccggaggacaggcgctggatggtggtggccagcgagctgccgctggtgctcaggttacgctga

SEQ ID NO: 510475 - DNA, 138 bp, Stenotrophomonas maltophilia
atgccggccagcggccggcactacctggcatcagccctgcgcttcggccgctgcgcggaagaccagctgcatctgctgcggctggaacaggcgatggacgccctgccgcgtttcccctgggaaactgccgagctgtag

SEQ ID NO: 510476 - DNA, 690 bp, Stenotrophomonas maltophilia; identical to SEQ ID NO: 510458

SEQ ID NO: 510477 - DNA, 1116 bp, Stenotrophomonas maltophilia
gtgacgagccgtccaattgatctggtgctctccggcggcggcattcgagcgatggtcttccacctgggtgtcatgaaggcactggccgaggcggggcacctggaggatgtgctgcggatatcgagcgtctcaggaggcagtctgatcatcgggctggtcctccataaatccgggatgcagtggccgagctcagaaaaattcctgagcgaggtctacccggcggtccgtgctgagctaacctcacgcagcctccagtgggatgcacttcgcgagctatgcaggccagcgaatcttcggttcctgctaagtcgatccaacttgcttgcttcagcacttcgtaggcactgggacatatgccaaaggctcgcagacttgccggagtcgccggactggtcgatcaacggcacaaatgcagagaacggacggcgcttcagattcaagcgcgctgatcttggagactacctcacggggtacgcaccttccggaaacttcccactggccagcgcgatggcggtttcagcagcgtttcctggagggtttgggccgctacgcctgagggtagaccgattcaagtggcggcggcgcgcgaggtgggatgcttccaaggaagacgccgtggaagtgcagccagactcgagagcgttccacctctacgatggtggcgtctatgacaaccttggtcttgagccgttctttgatgccggacggggagtcgccaagacagcgaacggtcacttcatactggtctctgatgcaggcagaccgctggacatgggattcagcaagtactcgctgaatccgttccgaatcaaacgtgttgccgacatcatgtccgaccagtcccatgcgttgagagtgcgaaccttccatcactacctgagcagtgacgcgacaagagggggcatgatctacatcggtgatcctgctggtgacgaggatgtcgatcgaagagaagcaagatttgttgccgcctttccaactagtctgctgaagctatcagcgactgactttgaccgcattgcgaatcacggcagagcactcactaggcttccgcctccccgtgagcagagtgacgtatgcgagccaacgcagatcggaaccctgatggtcgactag

SEQ ID NO: 510478 - DNA, 2241 bp, Stenotrophomonas maltophilia
atgagctcggattacttccaactcgacgtaattgggcttgaagatcgctcgcaggcatcatcgcgtacacacgcgatgatcgccgccatcaactcgaaccgcgactttgggctcattgatgtaatgcggggtcgaagggatgaggaagtgaacgtcgtatacctcatggttgatgtcgagtgccatggtgttccgaagcacaacaagtacgggctccgcttcagggagaggatgctgattgtcgttccgcaggatgacagcatcggaacggcagtctgggcgatgcgaaaggacttcccaagactggcgcatcagaacagcgtctcagcacttgggcccgcacagctctgcctgtactacgagcctatgagtgtggttgcgcggacatggaccgctccttcgttcctggcacgaatcttgtggtggttggagaagaacgccaagggcgagctgcatcttgcagatcagcccttggacaccctcttcttcgagtccaagcacgaactggtcattccgtgggatatcgccgatctcacttctgaaggaaaacctctccatgtcagcggagttcggcgcgcggacaatggcaccaccatgcgcatcgccaaccacctggacgctgatcaaggcctgctggcgaaactggtcaagattgatcttgagcctgttgaaagcggcgaggttgaatgggatccgcactcgctgggcgaactcaatgacctcatgaatcgtaggggggccaacctcctggatcctctgcgccttgcaatgcagcagggttttcccgagcagggtatgaccctgaaagacgagccggcaagtctgcttgtgctgctctctattccgttgaggagagcgtcgacgggcgatgttgagggcgttagctatcgtgccttcttccttcatggtggtgccctgaaagttggggtgcagctgggcgcactttttgacctggacgggcgcttctacacctcagcgggcctgcttgacggtgaaaaagcggctggctgggagaccatcggcctcgaccctgtaaccgttctgtgggagaacagcgcagaacgggcgcgctcacagtccggccactacgactctgggccgaaaggcacggtggtgggcgccggctctcttggaagtgccctgatcgagctttggatcagatctgggtggggtacgtggacggtgatcgataaggaccacatccgcccccacaatctagctcgccactcggcgctcaactttcagattgggcaacccaaggttctagcggtatcgaggcttgtcgaggccataacccgtggtgccgtcgcgttgacgggtgtagaggccgatgtcatgtcgagccttaatcctgacgtggcgcgtgctctggatgcttccgaattggtggtggacgcaactgcggacctaggttaccccagagcgagctctgccaacgaaggtagggcaaggcacgtaagtgtctttgtgacccctaatggcaggtcaggcgtcatgatgctggaggacaccgccaagaccaggtgcctgcgcacaatcgaagcacagtactaccgttccatcattcgctctgagtggggcaagaagcaccttgacggtcaccgaggcctcttctggagcggtgcatcgtgtcgcgatctgtcgatggtcctgccgtactcgagcgttatgatccatgcgtgccagttcgccgagagcattcctacacacattaggtcagatgcagcagctgcagtgatctggcagcgagaaccagatggtggcactgaagctatctccctaccgctattcgaacgacgcgtacacaagacagtggacggcctggacgtctatatggacgagggtctccatgaccaactccgtgagcttcgccatcagtccctgcctaatgaaactggaggcatcctgctcggctatcacgacttcacccagaacttgttggtaatcgtagatgccttgccggcgccaaaggacagcaggggtacgccgacatcctttgagcgtggaaccgacgggcttctagaccttgtcgccgaggctcgtaagaggaccgcgggtattgtgggttatgtaggagagtggcatagccacccagatgggtgccctgctgtaccaagtcgagatgatctagtccagcttgcacagttggcaacgggtatgaaccaagaggggctgccagtggttcaggtgatcgtaggaagccaggagataggtgttgttcaagccgaggtacggccgtga

SEQ ID NO: 510479 - DNA, 1647 bp, Stenotrophomonas maltophilia; identical to SEQ ID NO: 505216

SEQ ID NO: 510480 - DNA, 993 bp, Stenotrophomonas maltophilia
atgaatgatcttttccgtaaatccgccttgccggtgatcttgcttgccctcgcgggctgcgccacgcagggcaagccaccgccgaccatctcgctcgatgagccggtgcaggcccagccgctgcccgagccgcctgcgccggtggaggtggtggccgtgcccgaggtgctgccgatgccgacgcagttgaagccgttgcccgaagccgaggacgccaagcctgcaccggagccagccgacgagaaggtgcgcgtctcgcgcgccaatgccgaggcccgcgtcgcaccgacgcgcgagggctacgtcaacgcgattcaggtgtggcccttcaccgatggtgcgctctatcaggtctatgcggccgtgggccgcgtgaccgtgatttcgctccagccgggcgaggagctggtgacggtggccgctggtgataccgtgcgctggatcgtgggcgatacgtcgagcggcagcggtgctgacctgcgcgtcaatgtgctggtcaagccgatccgctcgggcctcaagaccaatctcgtcatcaccaccaaccgcaggacgtacctgctggagttggcttcgacagaaaagacgtggatggcgtcggcttcttgggagtatccgcgtgaccggatgctggccttgcagcgccaggcgcaggcggccagcgccgccgcgccggtggactccggcttgtcgctggaaaacctgcgcttccgctacgcggtcagcggtagcaacccgccgtggaagccgctgcgcgccttcgacgacgggcagaaggtctatatccagttccccgccggcatcgcgcaaggcgagctgccgccgctgttcgtgatcgggccggaaggcgacgggcaactggtcaactaccgcttccgctcgccgtactacatcgtggatcggctgttcggtgccgccgaactgcgcctgggcggggacaagggcgacgtggtgcgaattgagcgcacggacggcgttgcgcggaggaactga

SEQ ID NO: 510481 - DNA, 726 bp, Stenotrophomonas maltophilia
atgaaaaagcgccttatcgccgccgctatcgcggccatgctttgcactgccaccgcccatgcgcaatgggtcgtggtcgatccgacgaacctcgtgcagaacacgctaaccgcgatccgcacgctggagcagatcaacaaccagatccagcagcttcagaacgaagcgcagatgctgatgaaccaggcgcgcaacctcgccagcctgccgtccagcgtggtgaaccagttgcgcgccaatctggcgacgaccgaacgactgatcgcccaggccaggggcttggcctacgaagtgacgaatttggatcgggagttcgcgcgcctgtatcccgagcagtacgccgccacgatcagcggcgaccagatgtaccgcgacgcgcaggagcgttggcgaaacacgctcaacggcttgcagaccacgatgcagatgcaggcgcaggtgtcgcagaacttgggcgaagacgaaagcgtgctggccgacctcgtgggcaagagccagtcggccgaaggcgcgctgcaagcaatgcaggctatgaatcagttgctggccttgcaagccaagcagtcgatccaggcgcagcggctccagatcacgcaagaccgagcgactgcgctggagctggcgcggcaggcggcagccacggagcgcgcccgcgaggtgcggcggcgcttcctgggcgacggcacgccgtacacgccgcagtccgtgaacttctacggcaactga

SEQ ID NO: 510482 - DNA, 1053 bp, Stenotrophomonas maltophilia
atgagcgccgttccagagtccatgggtgccacgtcgctcgaccgccgcatccagatgctgcgcacggcgatggggccgctgatcgccgccgcgctcgaagacccggacgtggtggaggtgatgctgaatcctgatcacacgctttgggtggatcggctttccagtgggcgcgcgccgatgggcgtggaactacccgaggcggacggcgagcgaatcatccgactggtcgcggcccacgtcggcgcagaagtgcatcgcggccagccgctgctatccgccgagctgcccgaaacgggcgagcgcttcgagggcatcttgccgcccgccgcgccggggccggccttcgccctgcgcaagcgcgccatcggcgtgattccgctggagcggtacgtcatcgacgggatgatgaccagcgcgcaagcgggctttctcgttcgcgccgtgcgcgagcggcagaacgtgctgatcgccggcgccaccagcggcggcaaaaccacgctcgccaatgcgctgctcgccgagatcgccgccacgggcgaccgcgtgctggtgctcgaagacacggtggaactgcaatgcgcggcccgcgaccacgttccgctgcgcacgcgcgcaggcgtggtgtctatgaccgagctggtgcgctcgtccatgcgcctacgcccggatcgcgtcgtcgtcggcgaggtgcgcggcgccgaggcgctggatctcatcaaggtgtggggtacgggccaccccggcggcatcgccacgatccatgccggctccgcgcttggcgcgctgctgcgcctggagcaactgattctcgaagtggcggtgaatccgcctcgcgcgctgatcgccgaggcggtcaacgtcgtgatccacatcgccgggcgcggacgcaagcgccgcatcgagagcatcgcccgcgtcgtcggcttcgacggcgtgggctaccaactggcggacgcgctggaaacgccgtttcccgagctgccgccacttcccaatgccgcacccgctgcggcgacttccccatcccctgactcacttggagaactgccatga

SEQ ID NO: 510483 - DNA, 264 bp, Stenotrophomonas maltophilia
atgacgaaggccattgcgctcgtgttggctgcggtgctgacaggctgcggcccgaaggatgcgccagaggacaaaaacgtgccaaccgttgaagaactggcatccgatcccgtgcgcctgaaagagctgcgccagcaatgcaagaccgatcgtgccacgctgggcgacgtgctgtgcaaccgggtggccgaagccacgcgcaagcggttttatggtgacggcgatacgccctacacacctccgaaggaaccgcccaagttctga

SEQ ID NO: 510484 - DNA, 1131 bp, Stenotrophomonas maltophilia
atgacgatccgaggcgtttcccgagcactggccgcgctgctgctgacctcgattaccggtgttgccttcgccgccgaggttcagaccgccgaagtcgttgccgaattgcccgaggcggtcggcaacatcaccttcaccccggacaaccgcgtcatctacagccatcatccgttcttctcgccggacatccgcgtcgtcgaactcgacgccgaccggcgatccgggcgcccgttcccgaacctggcctggaacacgccgcggaaggacagcgaccactacctggattcggtgctcgggctgcgcggcgacgcccagggcgtgatctggatgctggacatgggcacgcgcagcggcatcacgcccaagctcgtcggctggaacacgcgcaccgaccgactggaacgcatctatcccattcccgcgccggcctcgcggccggaatcgcaactcaacgacttcgccatcgacgcggtacatggtgcgttctacatcgcagacgagggcatcggccccggcggcgacggcacccaggccgcgctggtggtggtggacatgcgcaccggcgcctcgcgccggctgctggaaggccacaccagcgtgttgcccgaagacgtgccgatcgccgtggatggccgtgaactgcgcgtgccgggctccgagggaaagccggtacgcctgcgcgtcggcgccgacggcatcgcgctcgaccggcaggccgaatggctctacttcggcccgctcaacggcggctggctctatcgggtgcgcacggtggacctgctcgatacagagttggatgccgaggcgctgggcagccgcgtggaacgctacgcgcgcaagcctaacaatggcggactgtcgatcgacaacgagggcaacctgtacctgaccgaggtcgaacatcgcgcggtcggagtgatcggcgcgggcgatcgccggtaccggcgcttggccacgcatccggacctgatctggcccgatggcgtgagcttctcaccggacggctggatgtacgtctcggcggcacagctctcggaggttccaatcttcaacgacggcaacgcgctgcaaaagccgccttactacatattccggttccggcctatcgcgccgggacggctaggccactga

SEQ ID NO: 510485 - DNA, 1035 bp, Stenotrophomonas maltophilia
atgaaagccattggcttcaatcgaccgctgccaatttccgatcctcagtccctggtcgatctagacctgcctgatcccgagtacggcgagcaggacttgctggtcgaagtgcaggccatcgccgtcaatccggccgatacgaaagtgcgggcatccgcccagcccgcgcctggcacctggcgcatcctcggctgggatgccgtgggccgcgtgcgtgcggtcggcgcccgtgtcaccggtttcaagccgggcgaccgggtgttctatgcgggtgccatcgaccggccgggttgctatgccgagctacaggccgtggacgcgcgcattgccgcgcacgcaccggccaccctcggcgacgaggatgcggcggcgctgccgctgacttcgctcacggcctgggaagccctgttcgatcgcttgaaggttgagcagcccgtggcgggcactgccaacgccatcgtggtgattggcggcgcaggtggcgtaggttccatgacgatccaactggctcgggccatgacggggctgacggtcatcgccacggcatcgcgtcctgaaacggtggcatgggtcaagaagctgggcgcgcatcatgtcatcgaccacagccagccgctggcgccacaggtcgaatctctgggcatcggagcaccggccttcgtgttctccaccacccacaccgaccactatctccctggcatcgtggaactgattgctccgcagggccgcattgcactcattgacgatcccaagtcgctcgacattgtttcgctcaagcgcaagagcttgtcgatccattgggagttcatgttcacgcgctccctgctgcaaacggccgacatcgccgagcagcaagccattctgcaaaaggtggctgaactggccgatcaggggaagatcacgaccacgcgcacccgctcgctcgggacgatcaatgcggagaacctgcgcgaggcccatgcactgctggagagcggccaagccatcggcaagatcacgctggcgggctttgcttcgcaggagcaaggcgcatga

SEQ ID NO: 510486 - DNA, 369 bp, Stenotrophomonas maltophilia
atggcccgcatcccgcatgaaacctttgactgcgctaccggctgcacggtggaagccacgctcaacctgatcggcggcaaatggaaaggcgtcatcctctaccgcctgctcaccgaacaggtgctgcgcttcaacgaactgcgccgcctgctgcccaacatcacgcaacgcatgctgaccaaccaacttcgggaactggagggcgatggcttgatcgcccgcaaggtctacccggaagtgccgcccaaggtggaataccggctgacggcctacggccaaaccttgaagccggtgattcaagcgcttaagaagtggggcgatgcgcatgtcgaggcaagcgtacagaaggccaagaccgcaaccggatga

SEQ ID NO: 510487 - DNA, 600 bp, Stenotrophomonas maltophilia
atgacggcccaatccaccaccgcgcgcacgcccggagccgcgccgcatcctcgctcgcgcccgcgcgctcgcctcgtgctggcgggcttcgccgccgtcggcctcgctgcgctggcctgggcggcgttcgtgcagccgctgccgcgcctgatctacaacccgtccgacagcgttccggtcggctggtatcgcgttgatccgatccaacaccgggccggctcgctggcacgttcgttgtccgtgggcagcatcgtcctgacccaattgcctgccgacggtgccgcgctcgctgcgcagcgcggttacctgccggcacacgttccgttgctcaaacgtgtgggcgcggtcgcgccgcaacacgtctgcatcgtcgccgggcaggtacgcatcgacggcgtgccggtggccgccgcgctgcctgccgaccgactgggccggccgctgccatccttgcagctttgccgccgcctcgaaccgggcgagctgttcctgttgagcgtgaccaatccggcatcgttcgacagccgctatttcggcccggtcagcgcatccgccgtgatcggcatcgcgcatccggtctggctggagacacgcccatga

SEQ ID NO: 510488 - DNA, 771 bp, Stenotrophomonas maltophilia
atggtcgatcgcagcgccgagccttggtatccgacagccgcgtacctgtacgcgctgcatctggacgaccttgcgctcgcttgggaatacctgcgcaggaaccccgactaccggctcgactggctgcgtcgccatcgccggccacagacggcacagggagcggcgcatcgctggggcttgcgcctgctggaagacccgatactggatgcgcgcgacgcgcatccggcctggctgcctggtcatgcggccgtggtgcagctctaccccgacgctgacccgccgcaggacgctaccgccttcgcgttctggcgcatccccggccacaagcaacttctccacgacggcaaggggctggcgctgatcgcgcgcagcccaggccattgcctgcgcttcgcgttggcgtccgctctggaagacggcatggccgtggcctatgcccatcgcggcggcgctgccgcgcatgcgcgtcgccatacgcccggcccagccttagacgacgccaagcccaggccaacacctgccgcgctgctggagctgcacaccttgcaggcgctcgacgcgaccctggcgggcgcgtccttgcgcgatgtgggcgaagggctgttcggtgccgaggccgtggccgattggtacagcgatggcggcctgcgctccaaggtacgccgcctggtgcggcgcggcgatgcgctgatgcgcggcggctatcgctacctagcacagcttccaccgcttgagaagggtcgttttgatgcggacgcaaaacggccctga

SEQ ID NO: 510489 - DNA, 564 bp, Stenotrophomonas maltophilia
atggcatatcgaaatggaaactacaccgccttctacgttgcggagccattccatcccagctcgctgggtgccaatgcgacaaaagattttcaatactacaacaccctgcggatgtggaaaggcgctgatgcgacgttcccctttgtcgattcgcacgacaaaacttacagcgtccgcgacggaagcgattgggaatacaccctgaagccgagactcagggagcgccttcggaactcgaagaacatcatcctcatcttgagttcgatcacgacgaattcccgtgcccttcgagaagaaatcgactacgggatcaacgaccaggggctacccgtcatcgtcgtctaccctgaatatgccaccaaggaaagcctgctggtcggtggatcattgaagcaggcggtcaagaacctgtggggaaatcttcccgtattccgggattcgatgagcaaaatccctacgcttcatgtcccaatgaacaaggaactcataaaaaaatccttgcaggacggcgagttcatggttgggagcataaaggccccaggcatctacaggtacaacccataa

SEQ ID NO: 510490 - DNA, 849 bp, Stenotrophomonas maltophilia
atgatccacgtcatggcgaaggtcaacttttttgacaggcgggtcatcaagaaattccttgagatcaccgctgtcatcagcggtacgctgtcattcgtagttatttttgttgacgtccctaccgagtggaagctgaaggctggcttggccttcttagtaatactggcgctcacctacttggtgatatggctctggtcgaacaacctgaatagtatcgacatcaatgtcgagggcagcgatgtcgcgatcaagactggagacattttccagcagcctggattgaaggcaatcgccttcaatgagtatttcgacacgcaggttgataacaagataattggcgagacttccctcaacggcgttttcattcagaagcatctcggcgtcccactctccgaactggaccgccacatcgaggaatacgcttttgatatcagcgaagtgctggatgagaacgaggccaggaaacaggggaagaagaaaagatatcagataggcacgatctgcctgtacaaggactacctcctgaccgcgttctccaagttcgacgagaacaacaaggcgctgctaacgatgccggagtaccttgagtttctcatcaatttctgggacaaggtaaacaaagtatacgcccagcaaagcgtatcgaccacaatcttcggttcgggaatcacgcggatcaaaggacacaagaacatttccgacgaggatctcctgaagataatgctgtggacgttcaggatcagcgaaatgcgattcaagtatcccgcgaagctgaccatcgtgatccacaaagataagattgaccagatcaatcttcttgacattaaatccgctaggaacggcgtgtaa

SEQ ID NO: 510491 - DNA, 789 bp, Stenotrophomonas maltophilia
atggaagcccaaaggggcgagacgccgcaggtggctcgatgcgcagcacgacagcgcgcccggccacaactcctggccggggacgcacgattggaggcatcgccgtactatcccgacatgccggagaagaccaccatccacaaagacgatcctctggagcagatgctccaacgctcagacgccttgcacgcacggctggatgcactgctcggcgatgccgaattcgacggctcaccccgtggcgaagcggccctaggcatgtgcatggtcgctatggaacacgcgatcgcattgcgcacgctgatggcactgcggttgcccacctcggccgtcagtctcatgcggctgcagttcgaggcgctgacgcgggcgatgtggctgctctacgccgccagcgatacagcgatcgacaagctgctggcccctctgacgctgcagagtgaacaagccgccaagaatcttcccggtgccagcgaaatgatcgagcagatcggcaggcgggccggacaaggtgtgccgcctgccgcacaccaaatgctgtcgcacttcaaggatgtgtcctggcacgccatgaactcattcgtgcatggcggcatccatccgctgcggcgcaacgccgaaggattccccgtccatttagcgctgcaggtgctgcgcaactcgaacggcctgagcaccatgaccggcatgacgatggcggttctcaccggcgacgaggccgtggccaagccgctgagcaagatccaaccggccttcgccgactgcctgccggctttgctcaaaccatga

SEQ ID NO: 510492 - DNA, 1260 bp, Stenotrophomonas maltophilia
atgcccgacgtccatattgccgacgctctattctctgctctactcagccgcgacgcggctgcactcgatgccatcgaggcgaaccgcgccgccgaatgcgcgttcattcgcactgtcatctgcaccgatgctccgggtgcggttgatctggacctcggcctcagcgtgtcctccaacgactatgtgatcccttttttcgaggggccgcgtgcgttctttatgtcggccggaaccagcgtccatgcccggctcacgggtgacaggtcgaacgtgctgatcgacttctctcttagcttcgactcgaacttcgcagagaagctgcgcgcactcatcgtcgccgagaacattcagcaggctgatcgcgatagggtcatcgagattctcatgctaaaggctcgaaaccgccatgtgcaattcgacgtcatgccgttcctcatcgagaacactcgcttggcccgcgacgatccatccaacgaacgccccctgaatacactaatcgctttccgcatgctcgaccacctggattggcatgcctttcagaatgatcccagccgcttcgctttcgatgcctcatacgaggatctgaaggccctactccgtcccgatgccgaagccttcctggcggagttgcaagccagtgaacatatcgctcatcatgaagcaaagagcgctggaacacaggcgttgctactgcggttcgctcgactttggcatgaggaatgcaaacgagacaagaatcgcatcctgcgtgaattgctccgtttcagcattcataagctagggtcgatcccgcttacagaactacggctgatctggagtggcatgacctctaatcagggatcaccgttcttcggccccatcatgggccggtcccctgagatgttacggaagattcgtggcatggcgtgggacatggcattgctccgcgtcatggagcaaatcgctacagctagcaatgtcggctctttcttcattccctatttcgtgtcaatggatcaccgctggcgccacctgcttcgtttgaatcctgtgagactgatgctgatcgacgacgcgaatcggcgcgtactcttcgcacgcgccgaagaactggaattccagcgcatgctgggagagttcacacagaccgaatttcagtcggagatgacatctgaaaggatcgagacccgccgtgggtcggcgcagtccgctgcactgagcgcaatgcagcaaatcgtgaccgaagaagagcgccattggctcgggcaagacttgcagtag

SEQ ID NO: 510493 - DNA, 357 bp, Stenotrophomonas maltophilia
gtggaacagctatcgcaaaaatccaacgcgctccctttgccgggaacggaagcctacggggcgctgccgcagtttccgaagcaacacccacttcccttccgacgcaccatccgccgccaggaactgcggcaaatcgtccctctgtccgaaacaacgatctacgaaatggagcgccgcggcgagttcccgcgccgcttcaacctgacgccgcgctgcgtcgtctgggacctggatgaagtggaggcgtggatcgaagtacgcaagcaagacgcgtgctccagcaccgcacgtaatccgataggcccggatgtcaggcaacgcaaggcgcgccctgtccgtcagctcaccgccaactag

SEQ ID NO: 510494 - DNA, 975 bp, Stenotrophomonas maltophilia
atggccgctgccattcgctggccggcaggattgatccctgccacgtacgaccgacaggacgacgtccagaagatgctgatcggcttagcgggtgcgatctttgctgccacctgccatgtggaggacctgcagaaagcggtcgaacatctctttgagaatgaagcagtgctcgaccgcattggaatggttgtggttgtcgggaacagccgccagcgtatattcaagagagggctgtcgaggctcagcgactggacgcagttggcgacatcgggattcacgcttgaaccgtcacgtcctgtcatcactctccgggaattgaatcctgcagaagacgacgaaggtcggtcggaagcaggcgaccgaagttctccatttacagcgaacaatcatcgtgatatcggtgttcgttctgtcatcgacgtgcatctatggaaccgagctggttggactgggacggcctttgctgattgggggccatcctacccgccagctattgccctcatgttcacgaacgaagatgccgccagaaagatcttcgcgcgttggcgtgaacgctttggcgaagtcgataagaaagacgagatatacatggcaatattgcgtggtatatctggcgatcatcctacccattaccgtgttctcattacttccggacttccttccgacgacgagaagacggcaggtaagactttcatgatgacatcgcgaatgcagactatgcacgcggaatccgatgtcaatctgagccgcttcctcgatatttatggccgatcacaggcctatttgcttcttcccgcgatattgaaaggaggggccgagccagagcttattccggaacttgcgatcctgaagcggggattgagcgtcaagcatgcttccgaagtcaaagagcatgacgttgaggcgatggcgcttggtccggagcagtaccgcgatcagcaacaagggataggccgtggcgctacgagggattag

SEQ ID NO: 510495 - DNA, 1956 bp, Stenotrophomonas maltophilia
atggctgagggagaacaagaaaatagggtatctccgtcggaattcatgcgccaactgcgccctgagctctactcagataccaatgaccgaacagcatatctgcttgatgcagcgacacttgagtattgcctcgataccatcacggcgcgcaaccagacgcatgatttcgagatcttttgtcgcaagctgtgcgagcgtacgatctgcccaaacctgaaacctgccaccggaccggagggaggcggggacagtaaggctgataccgaaaccattccggttgccgacgagattgcgaatctcatttatgtgggcaaagcaaatgccgaccaggagcgctgggcattcgccttcagtgccaagaaaaagtgggccgaaaaagcacgcaacgatgttgccggcatcgctgcgacgcagcgcggctatcagaaaatctactgtgttacggcgcagttcgcccgcgcaaaggaccgcgcgcgggtcgaagatgaactaaccaaacaatatggtgtgacggtcaccatcctcgatcgaagttggatcgtagaccagattgttggcggcgatcgcagggatctagcgtttaactatctcggtgtgggtcaggagattgtcgacacacaccgactggggccgtcggactattctcgctccaagcagctcgaagatattgagaaggctctcggcaatcctgaggcattttccgggatggagatgcagcgcgtgacggaggctctggtagcagccaagctctcgcgcaatctggagcgcccgcgaactgaaacggatggacgttttgcccgcgcagttcgacttgccgagcaggatggcacctatcgtcagaagctggaagctcattacgaatggatctggacttctttctggtggttcgatgacattgcgaatttgaatggcagctacgacgcgttcgagaatctcgtaatcgacacggatcatgccaagaacattgagttcctgtgcaacctggctcagctgcttttcaactcggtcgttcatcagcatttgacagccgatgaggccaatttggaggggcgaactgctcgattgagcgacaggttgaagtccatggctgcggatggcagtcgtcccaacaatgctctcgaagctcggacatcgctgctcgttattgaagtcaataaagcggcgctaaagaaggattcccaaggtcttactgcgctctggccacagttctccgatgtcatcaagcaagcaaaggggcttggtgaattttcagccgatcgcttaaccaggatgattgaggtgtttggcaatattgcgggcaaggatcccggctatgctcaactcgtcgacgacgtggcggcgtttgtgtcggacagaactggcgaagctcagggggcgctcgtgctcctcaagcgggctaagcaactcgatttcgaagaaaactttgaaatgatccggttgttgggcaaggccgcgcggcagctcactaaaaaagagtatgccgattcattgatcgaggcgctgcagctgctcacgcttgcttatcgtagtgccggattactctgggccgcgcgtgccagctgcatttttgcgatggcttcgatattcatcgaggcggaagaggacagcgatctcccggtttcgatcgtgcctacggtcatgatgcttgcctggatcgccgtcgaactgcggcatcttccagacgctctcgaagctattcggctggttcgaggttgtgcgatggggctcccgctcgacgatgcctccaaagagcgtgtcgtgaagcggctcgcggagttcgatctcatccttgcgagtcagattctgaacttcacgtcggaagagcttcagcagattgtccgattgcccgatgttctcgatggacttggtctgcagcagagtcgaagctcgctgctctatgcgcttggccatgaggcggtgcttcgcgaggaggagggtcggcagggattcgtgtaa

SEQ ID NO: 510496 - DNA, 525 bp, Stenotrophomonas maltophilia
atggaatacaccttcaccttgaagtatcagcttgccgaagacgaccgtgacccggacgtgctggtcgaacgcctgggcgaagccggttgcgacgatgccctggtcggcatcgggcagccgggacggctggcgctggagttcacccgcgaggcggccgacgcggaggccgcggtgcgcagtgcgctggcggacgtgcgtagtgccgtgccgtcggccaagttgatcgaagtcgcacccgatctggtagggctgacggacgtggccgacattgtgggcgtgtcgcggcagaacatgcgcaagctcatgctggcgcatccgggcagcttccccgcgccggtgcatgagggcagtgcgtcgatctggcatttggcggacgtgctgacctggttgcaggccagaggtagctattcgctggtcaaggaggtcttggacgtcgcgcgggtggccttacaggtcaacgtggcgaaggaaggccgacggttgccgcgctcggtgtccaaggaactggaacccctggtcggatga

SEQ ID NO: 510497 - DNA, 162 bp, Stenotrophomonas maltophilia
atgctcggaaagccgcataaaaccagctttcctgagaagacttttaccgtcaaagacggctttggtctggatagtgaacgggaaggtcttaatccggcctccgattcttaccgccagttctaccgccatcctgtcccgctagccggcgatagccaccgatag

SEQ ID NO: 510498 - DNA, 1395 bp, Stenotrophomonas maltophilia
gtgctagacgtcgaggttgtcaacctaaattacagctacgattcggcaaggaatatcgtcactatccatgatggcctgcgcggcgacgcgggcactgtatcgctgggctatgatcgactcgaccgactggtacgagccaactcaccttcgttcggtggtaatgggcattatgtgttcgcctacgataccttagataacatcatctcgatgcgccttccgggaaagcgcgagcgcacgtatcactacgatgcgtggaatcgcctgcaattgcttcgcgaccatgatggcaacggcgtatttgcaatcgggtacgatgcggcaggcaatatgacgactcgaaatggccaggtgttcgagttcgatgttggtgggcggctccgcgctggcggactcgtttccaagtacctgtatgatggtggcggcaatcgcgctgccgcggaaggcgagctgtaccgtacttggaactacttggcagatggcaagctgatcgagtcgacaacggggccagatgtgtccgactacatctatttggggagcagcctgctttccattcgaaccagtacccccaatgcagtcaagatggtctaccagcattacgatgcgcgctcgacacttgctgcgaccagcgacaccagcggcaaggtgttatcccgccacatctggtcaccgtacggcgagccggacattgcgccagacgcctcgacgccaggttacgcgggacatctcaccgatcccgatacaggcttggtatacatggggcagcgctattacgatccagcgatcgggctgttcctgagcgcggatccggttacggcgcacagtgatcctgcaggaatgttccaccgctacagatacgcaaacaacaatccctacaaattcatcgaccccgatggtaggcaggcagtccccgtccgcccgcttgtcttctaccaaatcacaacgcgcaccacgaccgacagcggagcggtcaacgtcgccaggacgaatgtttcgaactacggaatcgtccacggtgcgcaaacggaagtccgcgggaccgtcacgcttctaccccaaaagtcactaggcgggacaccggccaaccccgggcctgccgtgacaaccagattgcttaatttcagcgataagacccagcagaacattgaagtgacgagcggccaaagaaccgtggagcaaaaccaggctgtgggcggtgcgactcggagccagcacctgcaggacaacgcggcagacattcggatcagtgggagcacgccgaagcagaccgctgatgcggcccatagctccggtgagttcaacagagtcaatcaatatactgacggccgcggcgtgcatgtagatcttaagcaaggcggaacgcagggacgattcactgactggaaacctcaagaatga

SEQ ID NO: 510499 - DNA, 1116 bp, Stenotrophomonas maltophilia
atggcaaccaagcgacgccggggcgactcctggcagtacacgatcaagcgggcggggctgctgccccagccggtctatctgagcttcgccttggaggcagaaggggacgagtacgtgcgtcgccttgaggcgctgctcgaccgagggatagtgccggaggagctggccaacaccaaggcggcggcgaaggacctgcgcagccaggtaaccgaatatcggagcgcgcagcacatttctgtcgatgatgagcagttgctgcccgtccttctctcgcggttgcctatcggcatcaccttgccgcagctgaccttcacttgggcgaccgagtgggtgacctccatgaagcgcgagcagaatcttgcgccttcaacgatccgacactatgtgggggcgctctcccgtgccttggattggctggctgctcacggcgcgctgccaatgaatcctctgcgactcctgcctcggggttactccacgtacacggctgatgacaagatcgctgtgaagcacatagatggggaggcgaaagccgaccaggagcgcgatcgccgtctggaactgggtgaggaagaacgcatccgcgagatcctggccggcgcaaagccgccggggcggcagcgggctctcgatctgccgcagcgggaggcgctgatactgatgttcgacatggcgctggaaacagccatgcgcatgcgtgagatctacacgctcgagcgcagccagctcgatgtggcacagcgcacgatcttcctagacaagaccaagaacgggagcaagcgtcaggtacccatgacctcagttttgctggcgaagcttgccgcgtatgagggtgactacgatgggcggcttttaccattctgggcaggcgagcgtagcccgctggccctgcggcgtgtatcgagtaagctgtcgcgtcagttcgagcgcatcttcgttgcggcagggtgcgcggatctcggcttccatgatctgcgccatgaagcgacgagccgactgtacgaaaggacctcgctgacggacatccagatagcaaaaatcactgggcatcgcgatccgcgacagttgaagcggtacgccaacctccgcgcttctgatttggccgatcagctctggtga

SEQ ID NO: 510500 - DNA, 639 bp, Stenotrophomonas maltophilia
atgagttgggtggaaggattggcggcatgcgctccgcttggaaaggcttgcgttctcgactggagcgccattgcaaccgcatcggcggctttcgtcgcactcttcgtaggaattgctcctttggtgtggggtaaacgccaacgagctcgcattggcagagctaaggcgcggattgccgaagtcgatctgaaaatgcaggcgttgcatttggctgctggccttcacttgatctctggcaaggtcgttcagcgtcacaactatcgagtagcgatgcgtcaattccgagcgctcaatgccgatagctgccgagaccttgtgccttacttggactctctctcgagcggcctggaagcccctttgagtgacgtcatatctgacattggcatcgcaattcggcttctcgaagacatggactccagagatgattccatggagacaaacccttctgggccaaggagcctgtacgaagaacttcttgaaaccatggaatctgcccgtaaggccctctcgacggcgatcggcggcgggtacgtgctggagccattggagccagatgcggagaggcttgcagaaacgctccgccgatatgcgatggacgagctgatggctgaagtgctgagaggccagcacgttcgatag

SEQ ID NO: 510501 - DNA, 573 bp, Stenotrophomonas maltophilia
atgatcgactatcccgactacccgccgcagcgcaaccgtaagcaccgcctgacggttggcgatgcgacattcatcgtgaccagcaacgtcaacgggaacatgcgctggattcgcgaggttcaccatgttcgccggcatcggaagggcggcagcgccgacgtttgcatctatccgaatggcggccgcaagccgtcggctacgctggcatcgctctggtcgcacctaggcgtcgatcccgatgctcgttggaaggagtgcgccgccgatcacccggcgtttcccaccaatcggtcaatcaggaccgcaatggacgccgtcgatgatgcgcgcaagaacgccgcagccgctgctgtgctcgcctccactggatggacatgggtgaacgatggcacgggccactgggagtccccgcgcgcacaagccgtggacctggacgaactgcgccgagccgtttgcgtggttggcgtagtcggccagatcgacgggcacgacgtggtgcgccgcaactcggtgctgggcgtgatcgacgtccggcggcagcggcatatcgacagccaggcggtgcaatcgtga

SEQ ID NO: 510502 - DNA, 651 bp, Stenotrophomonas maltophilia
atgaccaccgacaacaagaccctggcggacgtgcagcccggtgggagggtgagactgggggatgcgccccactattggccagaggttgatcgcattcgggtcgacgcctatgtggcgggaagcgaaggcgacgagttcgacatgatcgctgcacggaatgcgatccacgcagccctcgccgcccgccagccggtgggcatcagcgccgactgggtacttggctacctcaccacggacgcacccgaggaatcgcgcgaagcgatccgcaatgccttcgccgagtatgccgcgctctctggcgcccgccagccggtgggggagccggtgggctatgcctgcaccaactgcgaccgcacggacgaggtggtcatctgccagacctgcgcagggatggcatgggacaacggccgtctgcatgagttccacgaagtccgcgagctgagcaccagcctcggtgagggcgttctggatcatctgctgccggacgaatggcatgagaagccgctgctccgcttccagggcgcattcgacgaaggcgacgacagcgttggtatctccccccgttccgccaatgtcttggccgacgatcagaccggcactgtgctgggcgactacctcgccgcgcgcgcggccaaggaaggtgcccagtga

SEQ ID NO: 510503 - DNA, 300 bp, Stenotrophomonas maltophilia
atgagcgccccagtcaatttcactgccaagtgcttcggcgccaacctcggccttacccgggacggcgacaactcctggcgcatatcgctctacaccttcgtagggaaggacaggaagcaccgagggattgccttcgcctgcgccagtcccggccaagtaccgcgcgtagatgcccccgatgctttcacccacgcccctgctgctctgtggctcggctcggcctccttcgatctggcggacaccctcgccccgaagatccaagccttcctagccgagcatgccaacggcggtgctgcatga

SEQ ID NO: 510504 - DNA, 339 bp, Stenotrophomonas maltophilia
atgccaacccgtgaccctgcgctaattatctccatagctcgctacggctggctgcgcgggcaccagcgctaccggttgttccgtatccggcagcagatccgcaagagcggggtggttgtgatgctcctggcgatgattgcccttcttgtactcggagtgcagaggcgcccacaggactgcaacaaccccgccggctccggtgtgaacgtcaaaggatcggatggcctgaaggcgcatgcgcgtagggaacgtgatgatctctggcatgagggcaatgttgagtacagcgctcccctggacggaacgatgaaatgttccgcatttcagggggctgcatga

SEQ ID NO: 510505 - DNA, 414 bp, Stenotrophomonas maltophilia
atgaccgagcacccgccgctgaaaaccgtcgccgacctcaagctgccgcgctacctgggcacctggtacgagatcgcacgcctgccgatgcgccacgagccggaaggctgcaccgacgtatcggcgcactacacccctgtcgacaacgacagcgcgcggctggaggtcagcttcctgcccaagggcctgcgctggctgccgttcgccaagggcgactactgggtgatccagatcgccccggactacagcgtgtcgctggtcggcagcccggatcgcaagtacctgtggctgctggcgcgcgagccgcgcctggacgcgaccgtgcaggaccattatctggcggcggcccgcctgcagggcttcgatctgtccgaactgatccagacgccacataccggcaaacccacagcctga

SEQ ID NO: 510506 - DNA, 177 bp, Stenotrophomonas maltophilia
atgagcgttcatcagtgggccattgaacttgccgagtccgacatgggcttgtttgcgtgcggtgcgctgcttgtagtcgtcctcggcacggcaattgtctccatcgtgattgagcgggcatggctcgagatttggcgcctgttgaagcttcgtaagggccggaccaatggccgttga

SEQ ID NO: 510507 - DNA, 2667 bp, Stenotrophomonas maltophilia
atgggacgtatcaacgcacggatcgaagccaaggatttccgcctcggcgccgagtactctcgccagaatgtcgcgcaagttgccggtctacctgtccccgctgagatctatggcacagcctgggctgacggcatcctagaactagagaatgccgtgttgctgttcgtcacactggagaaggagggcgaggccagctacttggatgtcttcgacggcactgacttctactgggaaagccagaatcggaacagccagagctccccgatcatccgcaggatgtcaggtggctcgcccacctatctgttcgctcggatcagggcaaaggctcgaggcgcctctaatgcggttccattcgtttactgcggaaagctcgacttcgtggcgatggatggtgagcaccctgttacatgtctgttcgatgcggtcgacattgaacccggacatggcgggagcctggccgagatcctgcagtggcgccctagcgcttcctcaactgagttttctgcgcgtcaactaaggttgaagaagggcggaaatgttctgccaccagcggttgcgagttccttcgcagttcctaccccctcgatggcgaatgggccgctgatctgggaagtcgtgctcaccgatggtgccatacgcaacggctacatctcagttgaccccaattggtcaggcttcgatgcagccatgctgggccgtccagacgtagcgtcaggaagagaagctacctttacgttcccggatggctatcagatcacctccgatctgcgagccaatggaccaggctcagctcgcatccgcgcacgtattgcgcccgcttttaggcgtcttggggtagcggctggcgattcgctgctcatcattcaagagacaatcgggcagtaccgagttgaggcgcgcaagggcagccgagacacgtttgagctcggctacgtacgtctgcgcgaacgcttcctcgcacaattccccggattcaccggcttctctaaagatcagcgcctgctgcgcgaaactatctacaagcgtcagctagtagagcactacaagtcattgctgctgcctgcgctggatgcaggtgggccgaagggcgtgtggtctgcgctgatcaaattgctgcgagttcgtgttggcgctgagaacccgcagccgcagaatgtggttggatggaggatcgtggcgcagttggccgaattgtcgggcatagatcagttaagactaggcaaggctgtcctttcaatgcttagggctgaaccagtgtctactgggctggaggcattcaatcgaggaacctccaagctgagctcgccgctacagcccgctgctcagcgatcgctctcaagtctgttgctcacgcttgaagactcgaagcactacttcttcgtcaagaccgggcagatacgccgtgccctggagatgctcgatccgacctttgatttccgcaagggtggcatgaccggtgaggagtgggagcgcattcgcgcgctagcagaccgactcgcagttcgtctgtctgaagacggatggcggccggcagacatgatcgatgtacagtcattcctctgggtagccatcgcctacgagcagggggacggtgcagatgctgaggaagaagatgaagctgaagctgaagctgaagatgaagctgaagctgtggagcaggatgacgacatgccggtgattcacgctcccaccaacaccatcctctatggcccgcccggtaccggcaagacttacggtgtggtggataaggctctggagatccttgatccggagttgctggccgctaccaagggccagggcactggcgcgcgagccgcgctcaagcaacgcttcgatgcgctgcatgaagaaggacgcatccgctttgtcaccttccaccagagcttcgcttatgaggacttcgtggagggcctgaaggctcgtgcgggcgcaagcggtgcgctcgagtatggcgttgagaacggggtcttcctcgaactctgcatcgatgcgcagcacagcgacctgccatacgttctcatcgtcgacgagattaaccggggcaacatcgcccgcatcttcggcgagctcattaccctcattgagcccagcaagcggcagggtatggatgaagcgttgtccgttcgcttgccgtactccaagcaagattttgcggtgccagccaacttgcacatcatttgcacaatgaacactgcggaccgctcgctggcctcgatggacgtagcgctgcgccgacgcttccggttcatcgaaatgccgccccagccggagctgcttgattgggacgtcgacggtattcgcatgggtgaactgttaagcaccctaaacagtcgcatcgaagttctgctcgggcgggaccacctcattggccatgcgtacttgatgggcgccaaagatctgcctgggctggctgaggcgttccgcctgcgcattctgccgttgctgcaggagtacttcttcgaagactggcgtcgtatcgcttgggtgctgaacgatgatgcgaagccgcagggtgagcgcttcttgcgccggcgcgagctgcagttgaaccgcctgtttgccccggaagcacagctcgcacctgacaccgccaattggtatatccatgaggcagcgttcgagcaggcagccagttacaggggaattctcgtcggccaggcagactga

SEQ ID NO: 510508 - DNA, 246 bp, Stenotrophomonas maltophilia
atggcacaaatccaacttacccgcccccagtgcgaaaccctcttgcaggacccggacagcgatccgtgcgtgcgggcgatggcagcactgggaatggcgttcttcgaggtcagcgatcaggccggaaagctcgatggcacctatcggggcatctgcttaaagctgatttacatgattcaggaggccattcacaccgccgagcgcgaacaggccgaagaagaggaggaggacgatgttgatgcgtaa

SEQ ID NO: 510509 - DNA, 240 bp, Stenotrophomonas maltophilia
gtggttaatttcaacacatccgggctgaagtacttgcagctgtttgctgagcgtctgttgcgtgaagccgagcttccgtaccgccaggtaacggtgatgcaccgcgacctgttccgccgtgccggcatcgaatggcgcgacggccagagcatggcctcgctgctggacagcctcaacctgcagcagctgcgagcgctggtcgaccagctgcgcgacggcgatgacgacgaggaggaatga

SEQ ID NO: 510510 - DNA, 294 bp, Stenotrophomonas maltophilia
atgagcgagcaaagcatcttcgcccgcctgctgttcgccttggccgggcacagccgcaccggcctgcgcctgaaacccattgccgacggcatcggcgaatcccccagcacgacgctgcgcaacctgcagcgattggccgaggacggcctggtcgagcgctcccccttcgaccaggacaactggcgcctgtccccccgaattgtccagatcgccctggcccatcaggccgaggtggcccgtgaagaacggcagctggacgacttcaagaaccgctacagccgtagccccaactga

SEQ ID NO: 510511 - DNA, 708 bp, Stenotrophomonas maltophilia
atgagcgcaaaggacctgcaaacgaacaggatttttcacctggctgctgtattactgatcgccgtgtgcggtgggtgtgatcgctccagcactgttcttgggaagcctcacgcggctgacgctgcgggtggaaagcagacggttgatcgagatgttgccgacattgctggcatcaccctaggcgcaagaattcatatcccagagtgtgggaaagagcgccgacatggggtgatcatttacgcgacggagggtcaggtgtatccgtgctttgaggacttccgtggcgcaaggggaacgatgaagagtgcggccggccttcccaaggggcctgactacgatggggtaactagcatcgaactagggtcttccgccgttcccgccggagtttccgcgaaagccaacatcctgatgctagatggtgttcccgagcaggtttcgctctctacggatggtgtcgaatctcaggataggctgtacgcacttctgattgaaaagtacggccccccgagcgagaccaaagaggtgcagttgcagaatgcctttggagcgcaataccgaagcatcgaggcgagctgggttttgagacgaatcaacgtttacttcttcggggtacttgacagcccgtctgaagggaaaatcaccgccagaacagataaggctcgggagttcttcgtctcccggcataacgacgccgcaacctcattttga

SEQ ID NO: 510512 - DNA, 768 bp, Stenotrophomonas maltophilia
atgcctgacgtcaaactctcccagctcgccgccgccagtgcggcctcggtcgcggccggggccggcctgtggacgatggctggccacatcctcggcctgcgcatggagtacgtggggccggcttccattcgcgtttccagcggcagcgcgtggattccgtcgttgcagcaggccattgaggtgccggccgcgctgaccctcagcggcctgacgcttgcggcgaacacttggtaccacctctatctgtacctcaacggctcgacgccggcgatcgaagccgttacggatgtcccggccgctccctacagcggaacagcccgcaccaaggcgggcgccgcatcgcggcgctacatcggaagcttccgaaccaatgcagcaggacagatcattcgcttcgtccacggcaccggaagcaacgcaatcaagtacatgcaggacatcaacacggcgccactgtacgtactgaacggcggcacggcggtgaccagcactgacgtgtcctgctctgcggcggtacccgtcacctcgcggatcatgtacgcattcgcagagaacaattcgacggccgaaacggcagttgcattcattgccaactccgaggccggccccgctagcagcaccgtcattttggagttcctacgcgtcggcaggatcatgttcggggagatgatcctcgacgccacccagcggtttaactactcgcgtagcgggccggtcgcagacggcggcttggccgtatggtgcaccgggtacctctacgagaggtga

SEQ ID NO: 510513 - DNA, 603 bp, Stenotrophomonas maltophilia
atgggtctacttcggacggaccgggatgatgggtttcaccgtgacaaccccgctgccacctcctccgcaacttccatagcagcctccgccagggttaaatccgccggttccaccagcacctccgccgctgccaccgccggcacctccaccgccacggctgggcggctgctgagttcccggcaggggctggacgcaagggcttccagtgaggcaagtaacagcggcttcttcgacggacccgtcaccccaggtcaccttgatcctgctgccgacaggcaaagacgcaatgccatgcgtgattcggtacatgcccgccaaaccgacaaggccggcgcgtcgcagctccaccatttcgtaggcggacaaattctgcgcaactgcaacctggttatacggatacgaactggcgttgatcgatactgttgcagcaacggcggcaaaggccgtgaaaaccagcccggcgatactccacttcgttcttccggagattcgattcactgcggcgtccttttcaagatggcttcttcccaactgctctgtttacttctcctattgctctatcaagcgactcttgctgtccagcaggaaccaccctgctcctga

SEQ ID NO: 510514 - DNA, 756 bp, Stenotrophomonas maltophilia; identical to SEQ ID NO: 509101

SEQ ID NO: 510515 - DNA, 996 bp, Stenotrophomonas maltophilia
atgccgggccgcgcgcaatgggctgcgctggtgctggcaaaaggcggtggcctgatgaagatccaacacctggtcaacgtctccggcggcaaggacagcaccgcggtctacctgcgcgcaatcgagctgggccggccattccgtgccgtgttcgctgatacgggcaacgaggatcagcgcgtctacgactacgtggcggagctggcgcacaagaccggcggccccgaggtcgaaactgtccgcgcagacttcagccggcagctcgcgcagcaccgcgaatacatcctgcagaagtggccaggccagggcatccccgatgaagtcgtgcgccaggccgctgcgctgcatgagccgacgggcaacccgttcctcgacttgtgcatcagcaaggggcgctttccttcgcgcatggcgcagttctgcactgaggaactgaagacgatccccatcacaacccaggtggtcgggccgatgctgaaggctggaccggtactgcagtggctcggcatccgggccgaggaatccgccaaccgggccaagcagccgcgcttcaaccggcatgagtccggctgccacgtgtggcggccgatcttcgattggacagtccaacaggtatgggatcagcaccgccggcatggcattgcccccaacccgctctatgccctcggcatgggacgtgtcggatgcatgccctgcatcaactgtcggaaatctgagctgcgcaacattgccgacctgttccctgatcacatcgaccggattcggagctgggaggcgctggtggccgctgccaacaagcgaggcagcgcgacgttcttccccgcagtgaccgatcccaccgacgtggatcggcctggcacctattcgcggatcgacaccctggtggagtggagccgcacgagccgcggcggccggcagttcgacctgttctttcaggagcaggccggaggcggctgcacctccgaccttgggctctgcgaacgagccgcatcatga

SEQ ID NO: 510516 - DNA, 771 bp, Stenotrophomonas maltophilia
atgcctgagtcactgtcctgcacgctgacggagcagtttgcgccaccaagtacagaccctatcccaaggctctcgcagcgctttatgtcgaacggaagggtaatcagttgctcgcgccaagcttctgtcagcaaaaccaatatcttccttagcgctggacatcaccgagcgaaacatatcttccataatgtcccagcctctccgtccagcatcttcgccatttacctgtttcccgaggcggacgacatccttcgcggactgcacggcatgcgcgactgcgagaatcaagtcgagatctgctgccggccatttggaaccatccacctcccgattcgcaagactgctcagtttttcggtgtactgctcgaagtactcacgctcctccgccgaatctgccaaagggtgtacgactggcgccgcgctgtccggatccgtttccgccgagaccggaaaactctcgatcagcccatccaggataatccttgccatcaatgtgtcgctgcgataggcggctgcaaacaccgcattcgcctttttcctgaggaaaaacctacgctggatagacggaccgaaaatggcagtgaaaaccgcaagcacggtaccgactgccgcccaagcatcccaccacactacacagccgccgattccgggctccatgcacgggcttattccattccacaactgctgcaactgactcattcccaaatccccctgtggattggccggcattttgccacgccaatgcagcccgaggagatcacacatggctga

SEQ ID NO: 510517 - DNA, 444 bp, Stenotrophomonas maltophilia
atggagtcggtggtcaagcatctcgccgcccgccagccggttggggaccatcttgcgcaagaccgcaaaatggtcagccagccggtgggggagccagtggatgcaatcgagcgcatcgcacgtctgctgtatctgcgaagctgcaatcgccatgcggatggctcaccgtacacggaatgggaggccatggacgaccgcatcaaggattactaccgcaaggacgcgcaggactatgaggcgctgcgcaactgcgcggtgtggcccgctggccgcgagaactataccgccccgcccgcgcaggccacggacctggggcagttccgtgaggctgtggtgcattggtacgcagatgcggacaacgcgaacacgaacccagcgtgggtgcgcgaagaatcgacccgactgctggccctgatcgacagcaaggcgacgggcaatgcctga

SEQ ID NO: 510518 - DNA, 2271 bp, Stenotrophomonas maltophilia
atgtccccgacccgcacttcccgtggccgatttccggtcgcgcgccccctcgttgccgctctttccgccctgctgccgctggtagcagccgcccaggaaacccccgctgccaaggatccggttgccctcgacgccctgcaggtgaccgcgcagcgccgtgtcgagaacgccaaggacgtgccggtcgcgctctccgcgatccagggcgagaagctggatgtgctcggttcggccggcgatgacatccgcttcctggccgcacgcgtgcccagcctcaacatcgagtcgtcctacggccgtgccttcccgcgcttctacatccgcggcctgggcaacaccgacttcgacctcaatgcgtcgcagccggtttcgctggtgtacgacgacgtggtgcaggaaagccctctgctgaagggcttcccgctgttcgacctggccaacgtggaagtgctgcgtggtccgcagggcacgctgttcggccgcaacaccccggccggcgtggtcaagttcgattcggcgcgtccgtcgcaggatgccgatggctacatccgcgtcggctacggcagctacaacagctggaacgtacagggcgcctacggcggcccgctgaccgatcgctggtcggcacgcgtctcggcgatctaccaacgccgcgatgactgggtcgacaacacccgcgtcggcgctcccaacagtggcttcgaaggctatgacgaagccgcaggccgcgtgcagttcctgtacgaaggcgatgacttcgaagcgctgttcaacctgcacaagcgcaagctcaatggcaccgcccgcctgttccgcgccaacatcatcgagaagggtggcaactcgctggtcgagaacttcgatcgcgacaaggtggccaacgacggcgtcaacttctccgacctgaagacctggggtggcagcgcgcgcctgcagtggaacctcggctcggtgacgctgcactcgatcaccggctacgaaaccgccgaatcgctcaaccgcggtgacattgacggtggctacggcgcggcgttccttggcgccggcaactacggccccggcctgattccgttctcgtcggagtcggctgacggcctgccgcatcaccgccagtggacgcaggaagtccgcatcgagtccaacgagtggggccgcttcgactggcaggccggcgtcttctacttcgatgaagacgtgaccatcaacaacttcaactacgactcgctggccccgggcaatccgcagaccggccacgtggtgcagaaccagcgcaacaaggcctgggcggtgttcgcctcgggtgacttcgatgtcaccgaccgcttcaagctgcgtgccggcgtgcgctacacccaggacaagaaggacttcagcgccagcgtgctgcaggccgttccgttcggcaccccggtcagtggcccgtacctggccaacaccgacgtcaacgacgtcagctgggatgtcagcggcgtctacaagctgaccgacgacatcaacgcctatgcccgcgtggccaagggcttccgcgcgccgtcgatccagggccgcctggccttcgcgccaggcctgtcgcaggccgattcggagaaggtgatctcgtacgaggccggcatcaaggccgacctgttcgagcgccgcgcgcgcctgggcctgagcgtgttccgctacaacgtcgatggccagcagctgatcgcggtgggcggcagcaacaacaccgccaccctgctcaacgccgacaagaccatcggccagggcgtcgagctggacctggaggcctacctggccgacaacgtcctgctgaccttcggcagcagctacaacgacaccgagatcaaggacaagaacctggcggtggcgatctgcggcggtggctgcaccatcaccgacccgaccacggtgatcaacggccagacctatgcgctggtgaacggcaacccgctgccgcaggcgccgaagtggatccacaacgcgaccctgcgcgtgggcttcccgctcagcgatggcagcgagctgtacgcctacaccgactgggcctaccgcagtgcggtgaacttcttcatctacgagtcgccggaattccgcggccgcagttcgctggaaggcggcctgcgcctgggctacaactgggattacggccagtacgacgtggcggtgttcggtcgcaacctgaccaaccagacccgcgtggtcggcgcgatcgacttcaacaacctgaccggcttcctcaacgagccgcgtacctggggcgtggagttcaccgcgaagttctga

SEQ ID NO: 510519 - DNA, 144 bp, Stenotrophomonas maltophilia
atggaaggatacgccctggcgtcgcaagggctgcgacatgatcgccgccgtccggatggcacgagctggggcacccacgttaaggctggtgacgaccatgatttcatctatgtcgttgttttgtatattttttatgatggctaa

SEQ ID NO: 510520 - DNA, 972 bp, Stenotrophomonas maltophilia
atgccaaggaggcctcagcagcccgttcctctacacggcattcccaacgacttccccgcgaatattcacgtcctcgacagattcaccgaatctgatctggaggtgtggaagaagcgatctcgtgaactagacgctcttcacgatgagctatatcacgggctggagccagagaggaccaggagacgcgatcagctaatcgaagcgctgaactcgcgaccggcgcctccttttgacttcacaaactgggtgcgaatggtgcagtaccgctattcgcatgaccctctctctgctgccggcagcgtgcgttcggtgggaggacgattcagcatcgggaatgactgcgacgaatctggcgctgcagctgtgttccctgccctctacataggggattcgcacgagactgctttccgagaatgctatcaaatggcctcggataaaatgcaagccactggcctaaccccagcagaaatgagccttcgacgaagcgatgcctcggtgcgaataaacgggcacattgagcgggtgttcgacgttagaagtcttgacaacctaaagccggttgcaaaagtcctcgcaaaattcacagtcccgcgcgagctggcaactcttgcaaggtcgctcaagttgggtaagccagatgagctactgattcgtacgccatcacgccttcagtccaacctacaggacgtgaactggcgggcttggccagcacagttcggcctgccctctccaagccagcgatttggcttgctcctcaagtgggctggatatgagggtgtgttgtaccgatccagtaagcagcctggttccagctgtatcgcggtgtttcccagcaatctgtgcagcgacaggacttatgttgagctcgctgatgaccatccgccgaacgtgactcaatcaaggctcgacctcagcactgcggactccctttgtgggtgggaacacgtccgtcaagctgatcgggctccatag

SEQ ID NO: 510521 - DNA, 1254 bp, Stenotrophomonas maltophilia
gtggtcggcgtggaacagcgtcttgttggaatccagcttcggattgctggcgaggaacgcatacgcgtcggcctcaatggtccgctttgcggcacgaccgaaggcggtcgccaagccgaggaacgcacccaggtcgtcgttgatgatcgcctgacgcgtcaggttgatggtgttgcccttggtgccagcggtgatggttgccttctcgccgtccgggatcttcttgttcttgaactcgccagcctcggtcagcttgtccaggttgccaatgctgcccacgcggtagcgcgaatgctcgcggaaatcactgacggtgccggtgacgcaccagcgggaccaggtgtccggcgcaacggcgtaggccgcctgcagtgccttgtgcatcgtgctttcgagcagcaccgggaagtcactgccgctctgcgtgaacgcgcggccgaccagctccagcttcgccatgccatcggtgcgtacgccgcagcgctccaggctacgacgggccagatccatcagggtcaggccgcgcactggattgtcaccggtgagcgcgaagatccgcttggttgcgggatcgatcacctgtgctcggtgcagcagcgcatgcgtcacagcggagcgctgcagatcctgctcgtcctcagtgacgctgatgcggttgatgttgccgccagcagcggcgtcgcgctgctccagcgtggtcaagatcaggccgcgcacgtggtcgaccgagtgaccagcgcgaatccagccagctgcatgctcggtctggccgtggcgagctgccagctccacgatgtcggctgcgcgcgtgtcaccttccggagcctgagctgcggccggcgctgccggagccggggtgttgttgatgggttcctgctggaccgccgattcggcggcgcgggcggcgggctgaggcatggtgtgctcctgcgacgatgcgctacgggtgaatacacagggggtcccctgtgcgggttgattgctgcgggtacctgctgccgggtcggccggcacagtgacgaagctgatctcgctcggcgtccactccaccgcgcggtagatcggcaaatcgccggggttgacggcgcgctcgatctcatagcgctgcacggtgtaaccaaccgagatattgcgaatgattccggcaccgatatcggcgattaccccggccagctcctcgcgaccggagagacggataagggcgtggccttcaccattggagagccaggcgcgatcaaccacacccatctgtga

SEQ ID NO: 510522 - DNA, 1491 bp, Stenotrophomonas maltophilia
atggcggcctcgctactggacagggtcatcggcgccatttctccccaggcagccctgaagcgtcatcgcgccagggcaacgctggatgcggtgcgtgcctacgagggcgcctcacgcactgacggttggcgtgttcgtagggcaggggccagcgcgaacgccgatcacctggcagacgcccgcgaactgcgcaaccgggctcgggcgctggtgcagaacgttccgtactgcgcgcggtccctccaggtgctggtgagtgcaacgatcgggaccggcattactcccaaggccgaaggcccaaacgcttccgcgctggacatcctgtggggccgctgggccgatgtggcggatgcggacggaaagtcggacatttacggccttatggctaccgcgtatcgcgcgatggagcaggacggtgaggtcattattcgccgccgcaccaggcgtcagtcggacggtcttgcggtcccgctgcagcttcaggtgctggagatcgactggctggatgggaacaagaacgggtctgcgtcgggcggtggtcagatcatcaacggcattgagtacgacgcgatcggccggattcgcggctactggttgttcggagcgcatcccggtgaggctgtgcgtggctctgtacgcttgagcagttcgttggtgccggcatccgacatcatccacctctacaaccccgtccgcccggggcagggacgcggcattacgcgcttcgcgccggtgatcgcgcgagtgcgcgacctgatgctgtacgaagacgccgagctcgcgcgtaagaacctggaagcgcggcttggtgtgatcgtcagtggcgacatcgactcgatgtccaacgcggacgatgacggcccttcgcagctcggctcagatcgcgaccaggtcaccgaccttgggccactgcccagcggtggggtcacccacatcactggtgccacagccttccagactgtcgagccaaagccggcagggggctacgtcgagtattgcaagtttaacgcgcacatcatcactgctggcatcggtgtcccgtacgagtcggccaccggtgatatgcgtgaggtgaacttctccagtgcccgcatccggcagatggagttccgtcgtgattgcgagcagatgcagtggctggtgctagtcccgcagatgtgtaagccgatctggcgctggtttgacgaagcagctgcgcttggcggtggggtccgttccacgggaagcactgccgactggagcacgccgcgctgggactacgtcaaccccaagcaagacatcgaatcggaaatcgcagcgatgggcgccggtctcaactcacccagtgaagcgctgcgtcggcgtggctacgacccggatgcggtgtacgtcgagatgggcaaggacttcaagcggatgaaagagaccggcgccctcggtctgatgactttccttcaatccagtggcgcccggaccggcctggtcgacgcctcaacaaccaacgaggaatga

SEQ ID NO: 510523 - DNA, 318 bp, Stenotrophomonas maltophilia
gtgagcaggaacacagtccgaaacaaggtgcgaatcagtgagctgacggaggagctcgccgtcggcgccgcgctgcgcctgcgatgtgacagcgacgacatacgcagcgttgtggaggccgtggtggcctaccttgtcgaggagtacccagcccaggatctgtacattcccgccagcatgcaaagcagtgcctaccctgtggaagcgatccggaaagggatgcaggaacaggagtcagtacggtcgctgtgtaggaggttcaggatcgacagacggacgctgtaccgcttgcttgatgagccttgctccaatgggtag

SEQ ID NO: 510524 - DNA, 645 bp, Stenotrophomonas maltophilia
atggctgaggaagacgtgacgatcactggcaaggagctggcctcgctgatcggctgcaagccgtcctatgtggtcgagctgaggaagaagggcagggtggtggtgggtaagggcggcaagggattcctgaaggccgcctccctggagctttacgctcgcaccgcagacccggtctatgccggtgtcgcccagcgccacgcagatgagcgcggtagcgcgctggtggggatcggggagggggccaatgccgtcgacgccgacatcgacgacgacgaagatgacggagacgacgacgaagccaggccctcacgcgccggccgccctcagaccccggactctgcgcgcaaggccaaggcgctcgctgacaaggccgagaccgacgcgcacatggcccacatcgcgctgcagaaggagctggggctgctgctgcctcgtgcggacgtagaagccttcctagcagagcacgccacgacgtttcggggggcgatggagcggttggccgatacgctagcgccgcagctcgctgcaacgctggatgaggctgggtgccgccgtctcgtgtgggatgaggtgagccacgctctggaagagctcagccagggctttcgcacgttggcggccaaggtggcagagggtgcggaatga

SEQ ID NO: 510525 - DNA, 2415 bp, Stenotrophomonas maltophilia
atgtctgagaattatggggatgtgctgcagcagctgcagtctgccggcctgctggtcaccgaactggacaccaccgggcgcatggtccggtgccgcgtcgaaggttcacgcgagcgccggggctggtacgcgctccacgaactgaacacctcggccggcgaagttctggtcgtcggcacctacggcgtctggcacggcaacgagaacggcgcgaccaaggttgatctgcgtaagcgcgacaagaccttctccgatgaacagcgcgaagcgctgcgcaaccgcctggccgaggatcggcgcagggcggagaccgcccggcagacccaggcgaagcgagcggcagagcgagcgtcgtccgcctgggccaaggccaatgccgttggcgaggccgactacttggtcagcaagggcgtgcagggtttcggcctgcgctatggcaccacgggcgccgcacttgtcccactgctcgacgtcaacggacaggtgcatggcctgcaggtgctgcgcagcgcgaagctggcggcggcagggcacaagcctgcgaaggagtactggccggccggtatggtcaagaagggccacttccacctgatcggcggaagtccccagtggatcttgctggtggccgagggctacgccactgcggccacgctgcacatggctacgggctacccggtggccgtggcgttcgatgccggcaacatgctggccgtcgcctcggccctggcgaagcgctatcgcggcatcaagatgctgctgtgcgccgatgacgacgtgttgcagaagtgccggcactgcaagagccgcctggtgctggccgatcatccgcagttctgcccatcgtgcgcgcagccgcatggcgcgtcgaatgccggcctgctcggtgccgaggccgcagcgctggacgtgggcggggcggtgttgcacccggtctttgccgatgagccgtccaggcgtgagcgcttcatcgacaacggccgcaaggtcagcgacttcaacgatctccacgctcaagagggcctgcacgtcgtgcgggcgcaggtcgaggcccgtctcacggagctttcatggcgggtgcctgcagaaaaacgcgcgccttccatcaccaacgatgggggcgaggggaatgatcgcttggcccccatccattcgctgactgagctgctcgatcgctttgcgttggtttacgggcagggcggcacggtgttcgaccacaaagagcacatgctggtggccctgggcgacatgcgcgatgcttgcgtgcgtaaggaactgcaccgcgcgtggatggagcattcagatcggtcgatcgtgcgtgtccgcgaggtcgactttgatccctcgggcgagaagccgggcgtgacctgcaatctcttcgcaggctggccgactgtgccgcaggagggcaactgcgaccggctgctccagctgctctggcatatgtgcgggaacgaggccaaccagaaggcgctgtacgactgggtggtcaagtggctcgcgtacccgttgcagcatccgggtgccaagatgaaatcgaccatcgtgatccatggtccgcagggcaccggcaagaacatgttcttcgatgagtacatgaagctttacggtgagtacggccgcgtgcttgaccaggccgccctagaagacaagttcaacgattgggcaagccgcaagctgttcctgctggccgacgaagtggttgcacgcaccgaggtctaccacctcaagaacaagctcaaggcgctgatcaccggcgatcgcatccgcatcaaccccaagaacatccaggcctacgaggaagacaaccacgccaacctggtcttcctctcaaacgaggcgatgccggtcgtgctggaagaggatgaccgccgccatgcggtgatctggacgccagataagctgagccaggagttctattccgaggtgctgtccgatatccgcaacggcgcgacggcggcgcttcaccactacctgctgcaggttgacctgaccggctttaccaacggcaccaatccgccgatgacgcaggccaaggaagaactgatcggcctgagccaggacagcccgcagcgattcctggacgagctctacggcgatgacattcccgggctgaaacccatgccggcgctgtcgaaggagtggtacgaggtctacaaggcctggtgcgcacgcgaaggcatgccacgcccggcgccgtcaccaaagttcatcaacgcgctggtgcgcaagcgccagatccttcaccccgaccgagcgcggaagcgctaccagatcgagcagaccgtcaacgggcctcatgggttcctgatgctgggcgattgcacggtgcctgacggaaagacagaggccgcgtggctgggggaccaggtcgtggcattccgccgcatgtactccgattacagggcgcgtgcgtga

SEQ ID NO: 510526 - DNA, 177 bp, Stenotrophomonas maltophilia
atgccgccctgctgcatcgcctggctggtcatgccgtcgctggaggcgccctcgagcaggaacttgttgaccagggcggtggaccagaacgcggtcgagacacggatcaccatgtccagcgcgatcgataccatcgctgccagtaccgccatcgagaacatcgtgccgatgccgtag

SEQ ID NO: 510527 - DNA, 1209 bp, Stenotrophomonas maltophilia
atgcggcttgccgtcgcggtacaccaccaggttcaccttgctgcccggcgccatcgcaccgatcagcggcggcaggtcggaccagctgttgaccgggctgccgttgaccgagcggatgacgtcgcccacctgcacgccggccttggcggccgcactgccggccacgatctggttgaccagggcgccacggctgtccggcaggcccaggccctgcgccttcagcgaatcgatcggctccacgaccgcgccgagctggccgcgggtgaccttgccgctcttcttgatctgctccaccgcgctcatcgcaaggtcgatcgggatcgcgaagctgatgcccatgtagccgccggacgcggagaagatctgcgagttgatgccgaccacttcgccgcgggtgttcagaagagggccaccggaattgccttggttgatcgccacgtcggtctggatgaacggcacatagcgctggtcggggccgcccgtactgcggccgacggcgctgaccacgccggcggtgacagaatggtcgaggccgaacggcgagccgatcgcgacaacccactgccccggcttcaggctgttggagtcacccacgcgcacggttggcaggttcttcccgtcgatcttcagcagggcgacgtcgtactgctggtcgctgcccaccaccttggcggtgaactcacggctgtcgcccagcttgaccttcacgtcactggcgtcggccaccacgtggtaattggtcagcacatagccatcgggcgagatgatgaagcccgagcccatgccacggcccttgatgctggggccaccgtctggcccacccggcccctgccccggcatcgggaagtcgggaccaaagaagcggcggaagaactccggcatgtcatcgtcgcccatcgggccgcgcgcggcctggcggttgttgcggacgatggtggtatcgacgttgaccacgcccgggccgacctgttcgaccaggttggtgaagtcgggcaggccactgaccagcggctgcgccggtgcccgcgcggccgcggctggcacgggctgggtctgcgcgacgggcgccggcgcctgtgcgcaggccaccaggggaagggtcagggccagcaggccaatggcctgcgtgcggagtcggggagtcatcggacggcaacctccgggtcgggtggaaagaggaatacgggccccgccgacggcggggcgtga

SEQ ID NO: 510528 - DNA, 1491 bp, Stenotrophomonas maltophilia
atggcggcctcgctgctggacagggtcatcggcgccatttctccgcaggcagccctgaagcgtcaccgcgccagggcgacgctggaggcggtacgcgcctacgagggcgcctcgcgcactgatggttggcgtgttcgtagggcgggggccagcgcgaacaccgatcacctggcagacgcccgcgagctgcgcaaccgcgctcgggcactggtccagaacgttccgtactgcgcgcggtccctccaggtgctggtgagcgcaacgattgggactggcattactcccaaggccgaagggccgaacgctcctgcgctggacaccctgtggggccgctgggccgaagtggcggacgcggatggaaagtcggacatctacggcctcatggctactgcgtatcgcgcgatggagcaggacggcgaaagcatgattcgccgccgtaccaggcgtcagtcggacggtctcgcggtcccgctacagcttcaggtgctcgagatcgactggctggacggcaataagaacgggtctgcttcgggcggtggccagatcatcaacggcatcgagtacgacgcgatcggtcggattcgcggctactggttgttcggagcgcatcccggtgaggccgtgcgcggctctgtacgcctgagtagttcgttggtgccggcgtccgacatcatccacctctataaccccgtccggcctgggcaggggcgcggcattacgcgcttcgcaccggtgatcgcgcgagtgcgcgacctgatgctgtacgaagacgccgagctggcccggaagaacctggaagcccgacttggcgtgatcgtcagtggcgacatcgattcgatgtccaacgcggacgatgacggcccttcccagctcggctcagatcgcgatcaagtcactgacctggggccactgcccagcggtggcgttacccacatcaccggcgcgactgccttccagactgtcgagcccaagccggcaggcggctacgtcgaatactgcaagttcaacgcgcacatcattactgctggcatcggtgtgccgtacgagtcggccaccggtgatatgcgtgaggtgaatttctccagtgcccgcatccggcagatggagttccgccgtgactgcgagcagatgcagtggctggtcctggtccctcagatgtgtaagccaatctggcgctggtttgatgaagctgccgcgctcggtggcggtgtgcgttccacgggaagcactgccgactggagcaccccccgctgggactacgtcaaccccaagcaagacatcgaatcagaaattgcagcgatgggtgccggtctcaactcgcccagcgaagcgctgcgtcggcgtggctacgacccggaagcggtgtacgccgagatgggcaaggacttcaagcggatgaaagagaccggcgccctcgagctgatgaccttccttcaatccagtggcgcccggaccagcctggtcgacgcctcaacaaccaacgaggaatga

SEQ ID NO: 510529 - DNA, 318 bp, Stenotrophomonas maltophilia
gtgagcaggaacacagtacgaaacaaggtgcgaatcagtgaactgaccgaggagctcgcggtcggcgccgcgctgcgcctgcggtgtgacagcgacgatatacgcagcgttgtggaggccgtggtggcctaccttgtcgaagagtacccagcccaggatctgtacatccccgccagcatgcagagcagtgcctaccctgtagatgcgatccggaaagggatgcaggaacaggagtcggtacggtcgctgtgtagaaggttcaggatcgacagacggacgctgtaccgtttgcttgatgagccttgcgccaatgagtag

SEQ ID NO: 510530 - DNA, 1926 bp, Stenotrophomonas maltophilia
atgatggaggcacagagctgcctggcgttggtgctggcgcgctcgctgcagccgcgacggccgatgagcgtgtcgcagtggtgcgatgagcacatgcgtctgtccaccaagagcggcagcaagcccgggcgctgggtgacggatcgcaacccgcccctgcgcgagccgatggacaacatgtctgcccgaagccccgtccacgaccaggtctgcatgttcccgatccagttcggcaagagccagctggcgaccaatgccatggcttactggatggactacgcccccggcccgatgatgtatgcgctgccgggcgaggtgtccatgaacaaatggatcgcccagaagctcaaccccatgatcgaggtctgtaaagcggtcaagaaggcgctgaccagcaccgccagccgcgacagcgccaaccagcgcacgttcaaggacttcgctggtggccagctgttcgtggagcacatgggcagcccgcagcgcctgaagtcctcgacggtgaagtacctgcaggtggatgagatcgatgaggcgccgcagcagctctccactggcgacgatccggtgaagatgctagacggccgtacatcgtctttcccgaccacctacaagcggcagtacatcagcaccccgggcatcgcagggctcagccggattgcgaagctgtacgacaagagcgatcagcgtcggtatcacgtgccgtgtccccactgcggccacttccaggcgttgcagtggagtggcctggtgtggtcgcccgacaggagtcgcgcgtggtatgcgtgctgcgagtgtggcgtcgcgatcgaggaacactgcaagacagagatgattgccaaggggcgctgggtcgctgccaatcctgactcgcagatccgcggctacaccatcaactgcctgtactaccagtttggcctgggtccacgctggctggacctggtgaaagagtggctggaggcgcagggcgatccagcttccctcaagaccttcgtgaatgaccgcttggcagagacgtgggaagacccggcaatgcgggcagtcaagcacaacgtcatcaaggatcgtgccgagccgtatgcgcttcgctcggctccgcaaggtgtgctggctatcaccgtaggagtggatacgcaggacaaccgccttgctattcacgtcgtcggctggggacgaggtatgaccgcctggacgctggactatgtggaactgcagggcgatccagccgaggaagcggtgtgggtagccctgaccgatttgctcaaccgcgcaatcgagcgcgaagatggcgcgctgctccggccgatggcagtggccatcgacgctggtggccaccgcaccgaggccgtcaaaaactacgtccgtcagcggcgcatcactcgtccaatgtgcatcttcggtgccgtacccaacaacgctcccgtgctgtccaagggcaagctggctgacgtcacctggaagggcaagactgacaagcgcggcatcaccatcaaccacgtggggaccgttgcagccaagcactacctctacagccgtctgtcggccgacgccgagcgcaagcccgagaatcgcatggtccacctcagtgaccagctgccggaggagttctttccgggcctggtgtcggaggtatacaacccagtcaagaatcgctttgagaagaaggtgacccgaaacgagccgttggacacatgggtgtatgcctacgcggcgacccatcacccagaggttcgcatcaaccgcttcacgcgttcagattgggaccttctggaacaacggctggctgcgccgccaagcgtcagcgtttcacgcgaaacgccagctgctgcgtcggaggccgacgctcccactgattcccgtgaaacaccgagcgtgcctcgccggcaacggcccgcgcagcctcgcggcatggggaggcagtggtga

SEQ ID NO: 510531 - DNA, 258 bp, Stenotrophomonas maltophilia
atggcgcatatcgcgctgcagaaggagctggggctgctgctgcctcgcgcggacgtagaagccttcctcgctgagcacgcaacgacattccggggggcgatggagcgcctggccgatacgctggcgccgcagctagccgccacgctggatgaggctgggtgccggcggctggtctgggatgaggtgagccacgctttggaagaacttagccagggcttccgcacgttggcagccaaggcagcggaggctgcggaatga

SEQ ID NO: 510532 - DNA, 558 bp, Stenotrophomonas maltophilia
gtgctgaaccggtacgacctctcagtgcggcgcgcctttgttgggctgcagcgccgggcggggccggccacggcgcaggaggtccgcgcctcctacaacatccgggcgtctgctctgcgaggcaagtaccgcgtggagactggcgagcgtggctacagcgcgggcaagcgcggcaaggatgatttcctctccatctgggcgagcacgcggcagatctcgttgatcgatttcaatggccgctggaccggccgtaaatccaagggcgctacggccagcatcggcctcggcgagtcgaagacctacgagggtgccttcatcgccaccatccagggccgcagggccatacgggtgcgcagctgggatcgcgcccagcagaagcggcacgggcgaggcccggtgcgcatcctgcgggggcccagcccgttcgaaatgctgtccggcgccgatggcaatagccgcgccttggcagcccgtcgtcgcctgatcgatcgattccacaccacctatctgactgagctgcgccgtcagtggcgcgtcaacggaagcaccaatggctga

SEQ ID NO: 510533 - DNA, 2283 bp, Stenotrophomonas maltophilia
atgaccggctcggtcgttctgacggcaggcgctttgccggacctgaagagcagcatcattggcgcgtggggcactgcagttgttgcagagcctcgtacgggcgatacggccattttgccgcccgcgctgcacttcacgttgggcgaggggaccgcagtccccggtagtgtccacatgaagcttcgcgtcggtggggctgatgtggaggtgaccgataacggcgtcggtggtctccttgttggggggcagctgcgcggctcgatcgcgtatgccaccggtgaagtgacgttgcgccccgccaccctgccggatgccgatagccaggtcgcggtcacatatgactggggccagcagctcaatgcggcgccacaaccggtgccggacggctccgggattgtctcctttgtgctgccgcaaggccctgtgcgaccgggatcggtgctgctggattgggtgatcagcgtgcgccgtgatcgcgacgacatctcatcagcgccgcaggcaatgcgcgcgatcgccaaggacgatggcaacggaaacctgcgggccgtctcggtgggcgatgcgagtgccgacacggtattgggctcggtgaactatgcgaccggggcggtaagcctgcaggctggaaagttcatggtccgccaggtgtcctacccgcagtacgagcttcagtccgggcggctgaaggtggtggggtacggccgcttggatgtgctcgctgagttttctgctggcaccatcatctcagtcgcttggctgctgtcgggcgactcctcccagcaagcgcaggagagcttgccgctgcccgcgatgcagctgcagctgacgcccaccatcagtgatagcgtcgttcctggtagcgtgcgcttcagcttccgtgggcggacatacgtggaccgcagcggcggcctgtatcacagcatcgaccctgccactggcgcgggtgtttacgcaggcacgatcgattacacgtcgggagtggtgaatctgtcgcagtgggtgccaggcggaagcaatcaggtccagatcctctccctgctgacccgcatcgctgacccgggcgttacgttcatcttcttccgcgccccgggctcccctctgcgaccgggcatgttcacgttgagggcgagccgcctcgacggtgagctgctgaccgcgacggctgatatcaatggtgatatcgccacctcccagatgcgggggacggtcgattgggagagcggtgtcgtcaaggtgcagttcggcgagctggtgcccgtagctggcaatgagggaatgccctggttcgaccccgcactggtggaaggggaccgcgtctggcggccggctctggtcctgcctggctcgatctacatgggagccgtggtctatcggtcaatccccctgtctgaggtggtgatcggcctctcatctgttcgccttcccagcgacggtcgtgttccagcgttcaagcccgggcagacggtcctgattcaccacacggcaaagcacagtgttgcggcgccccaggcgaatcaggtgctgagttttggccgggcgcgtatcgcagggctggaagtcagggacgcggctgggaagcccgtggatagcgcctggtacaccgctgaccttgatgcagggagcttgaccttcagcgatccgctcaacctttccgcatacacgctgccaatcgtagtgagcgagcgtgtcgaggaccgtcgtttggtggtccagccgcagatcacaggagaaattgaaatcaacactggcctgacccacgactacccagcaggcgaatccctcatcagtacggcgctgcggcttggcgaggcgaatggatcactggacctgcaggcgcgggtcgagagcctgttcgatcaggccgcgtggaccggagcctggagcaacattccgattggcagcccggctcctggcacctacaacgacacggacttccctctcgatgtgaccaacagcgacgccataacggagcgatgggccgttcggttcaccagctcgacgaactttgaagtcatgggggagacggtgggcgtgatcgccactgggagtactacaacggaccttgcgcccatcaaccctcgcaccaacaaggcgtacttcagcatgcgggctgctggctggggtggtggttggtcggtgaacaatgtcgtgcgcttcaataccgtgggcggcctggcaccggtgtggatggcgcggaccacgctacctggtacgccgacaggcgcaaccgactccacccggcttatggtggtgggcaacgtcgctggaggtgcccagtga

SEQ ID NO: 510534 - DNA, 801 bp, Stenotrophomonas maltophilia
atggcacagcccaaagttcgcaagttcgcaggcgatctgcgtttctgggagcacggcgcgaacggcgcccgcattcccgtcatcccggagccggccgacaagttcggcaaccagccgctggaacagtcgtcgttgacgttcagctatgaagctggcgactcggtggagatcaagagcaagcgccgcgacgcgcgctatcagcaaatcatccacaaggattccaaccccggcgtcaccagcgtctcgatcaccgcgctggaagtgccgacggccatcctggcgcgcatgctgtacggcacgctggtggccactcaggtcgcggccggcaccgcgacggacgtatccgtgactgtggctagcgtggacacgccggtgaagctgccgcacaacttccttctgtccgataccgagccgactttcaagaagggcacggtcgacttggtcaagggcacggattacaccctcgactccgcgcacggcctgctgattccgaagtccggcggccagctgcaggcgggcgataccgtggtggcgaactacaagtacgacgcctatctggaaaccgccatcagcggtggcaccacgccgagcaagtccttccagatcctgggcgacatgcaggaccgcatcagcggtgacgagggcctgctgaccatcccgaacgtcgacctgaccgtagatggcgacgtggactggttcagcgatgagccgatccaggtgacgctgaccggcccggtgatcttccaggccggcgaggccgatctgtacacgttcaagatcgcagcgcagtcggcgggctga

SEQ ID NO: 510535 - DNA, 420 bp, Stenotrophomonas maltophilia
atgatccgagccagcgacggatttctcaccgacataggtgcggggctgatcgttgtcgacgatgccgagctggatgaggatcagtcggggccagccacgctcatctcggtccaacagctgtcgcgcgtcggcggtgggtctgcccaggtcaactccgacgcctcggtcacgattgagtttgaggtgccgcgagagagcggagcggtgaaccctcgactgctcgtgcaccgcgccaggtacgacctgattcgcgtgttgaccttcaacaacaagctgctgcccaagggcatcaccacgtttgagttgcttcaaagccagatggcaaccctggaagacgacgcagggcattccgccgtcgtcgctcagatcaccgcgcgggctggtctgaccgagacctttgagcccgtccccaacctgtag

SEQ ID NO: 510536 - DNA, 324 bp, Stenotrophomonas maltophilia
gtgagcgagctggagttcctgcgggacatggacgcgacgatccacgcgtcgttggcccttgccgggatggcctccacggccaaggtgacggcggtgaagagcggaacggtcactgagggcgtgagggtctacatcgatcgcgatgtagagaccatcggcgatcttcggcagtttgtcgccggccgtgtcgaggtgtcctttctgcgtgtagatgtcgaacctgaccagggcgaccgtgtagaggtaggcggcgaggtgtttgtgacctcgaagaagctcagtgacgacggctcgcgcagcgtctggctggtgcgtcgtggctga

SEQ ID NO: 510537 - DNA, 222 bp, Stenotrophomonas maltophilia
atgcgcgctgcggtacgcgaagcgccgttcgccttgcgcggtcacttgcctggtgtcttggtcccgctgcacgcgcgcccgcatgccgaaggcagcgtggtgccgttcattgagggtatcggcctgggtcaatggctggcagtcaactacaacgtggtagagccagacgttgccgatcgcaatggacaggtgctcttccgtttggatgcaccctggcgatga

SEQ ID NO: 510538 - DNA, 432 bp, Stenotrophomonas maltophilia
atgggcaccaccagcacgccgcgcggcgtacgcaacaacaatcctggcaacatcgaccgcacaagcacgccgtggcagggtgaggatcggtctgccgcagctatcgcacgtgagcagcgcttctgcgtgttcctgaccccgcaggctggcttccgcgcactggcgaagaccctgcttacctaccagcgcaagcatggcctgcgcaccgtgaaggagatcatcgggcgctgggccccgccggtggaaaacaacaccggtgcttacgtcctgcaggttgcgactgccgtgggcgtcgcaccttcggaggtcatccgcctggacaacgcggtcactctgagccgtctggctaccgctatcgccaagcatgagaacggcggaatgtactggcgcccggacgtgatcgacgccggtgttgcagaggcgctgcgctga

SEQ ID NO: 510539 - DNA, 270 bp, Stenotrophomonas maltophilia
atgagcaacgacaacaagactctggctgttgatgtgctggcggtgctgcgccagatcgctgatggcgaaggagacgctcaggttctcgctatgcgagcccgcgccgcagtcgccgagctgatcgatcacggcgaccgcctgacggcggcgttccgcgcgcttggtcaatccaatggcatgcaggctcagatcaacgcgcaccgcgagtgcgaagcatcgatgcgggcattcgccgccgccctcgcccgcgtcaaaggagaatcagcatga

SEQ ID NO: 510540 - DNA, 318 bp, Stenotrophomonas maltophilia
atgattcatggaaccttctatcgcagttggggtccccgaggcggcgacggcttcctcggcggaaacgcgccggagggcgaggacgacggccgggcgaagatcatgaatgtgccgagtcgcgtgtacatccaggtttatgcgatgcaggacgccgtgaccttccagtacttggcatcagtgctgagcggtccagacggtgtatggcggcttcagggaatcgaccggacagtgaagtaccgcgtaatcggtacggatgtggctgggagggtcaattcagccatccaagactgggtggtgccagcaaagatggagccgtga

SEQ ID NO: 510541 - DNA, 222 bp, Stenotrophomonas maltophilia
atgcgcgcagcagtgcgtgaagcgccgttcgccttgcgtggtcacttgccgggaattctggtgccgctgcatgcccggccgcacgcagagggcagcgtagtgcccttcatcgaaggaatcgggctcggccagtggctggctgtgaactacaacgttgtagagcccgatgtcgccgatcgcaacggccaagtgctgttccgcctggatgcgccctggcgatga

SEQ ID NO: 510542 - DNA, 393 bp, Stenotrophomonas maltophilia; identical to SEQ ID NO: 509098

SEQ ID NO: 510543 - DNA, 237 bp, Stenotrophomonas maltophilia
ttgctcgcagcgcatggcgcttccgacctcaccctccaccgcaccgccaacggattcgcgccccgcaaccgccccgagaagctgttcacgcgccgcgtcatgaactggctggatgagcgcgtgctgatcaggtacgacgacccgcagctgccgcgcaaggcgaccttgaccgccaccggcatcgccgccgccgaggcggagatcgccaaggcccgcgacctggcaatgacggcatga

SEQ ID NO: 510544 - DNA, 321 bp, Stenotrophomonas maltophilia
atgcgccagacctctcgcccgctccccgattccgtgccgctgtgtggtcccggccatcgacctcacgtcgtggtgaccgagggcgcccctaccggccatcgcctgggcgccccctgcccgccgctgctgcacatcgaatgccataggtgtggcctcgccacccgcccggtaccgatggaaaaagccgcgctggcagagctgcgctggacggatgcaagcctggcacacctgcgcatcccgatctccctgctcgcccgccatcgcggcgaggtccttgccgagatcgctgccgactccccttccacgcccatcgctgcctga

SEQ ID NO: 510545 - DNA, 240 bp, Stenotrophomonas maltophilia
atgaaccgctctgttgtcatctacgggccgcaacgctgcggcaagaccaccaacgcgcaggatctgcgcacacatttcggcctgcaggaggtcctggacgactgggacggacacactgcgtatccgctgcaggacacgcttgtcctgaccaataatccggatgccgttgctcaccactcatcgcgtgtgctgcaccacggctgcgcaatgcgcgaaatgctcgcggaggcccgcgcatga

SEQ ID NO: 510546 - DNA, 915 bp, Stenotrophomonas maltophilia
atgaaggctatcgacttgttcgcaggcggcggcggattcacagaaggcgcacagcaggcgggctgcgaagtggtgtgggcggccaaccattggccggcggctgtcgcaacgcatgcgttgaaccatccgcacacggaacacgcgtgccaggatctgcagcaggccgattggtcgaggctgcccgcgttcgatctactgctggcgtcgcccgcatgccaggggcacacgcacgcgcgtggcaaggaacgtccgcaccatgacgcaacccgctctaccgcgtgggctgtagtttcggcgctcgaatcctgctcccctgacttcgcgctcatcgagaacgtacccgagtacatgcagtggcggctgttccccgcatggtgtgccgctgtgactgcgctcggctatgcaatcagcccgcacctggtcgatgcggccgacttcggtgtcccgcagcaccgcgtgcgggttttcatcgcgctgaccaagagcaagcacccgatccagctgcagctgccaccgcaagatcatgtgccggccagcagtttcatcgacttcacggctggcagttggacgcccatcgagcgaccgggccgggcggcggcaacgctggccaggatcgaggccggccgggctgcatttggcgaccggttcatagcaccgtacttcggtagtggttcgggcctcaccggtcgttcgctggcgcgcccgattggctcgatcacgacccgcgacaggtgggctgtggtcgatggcgaccgcatgcgcatgctcaccgttgatgaaggacgcgccgccatgggcttcccttccacctaccagctgccatccaacaagcgggacgcgatgcagatgctgggcaacgccgtctgcccgccaaaggctcgcgccatcatcaccgcactgcgggaggccgcatga

SEQ ID NO: 510547 - DNA, 138 bp, Stenotrophomonas maltophilia
atggccaccgtgatcgccatcgttgtgtcgttgctcctgctggcctcggtcggtggactgctggtctgggcactgagcgcgctctgccgcttcctggccgcattcgctcccgccccgtccgatacccgcgcgccgtag

SEQ ID NO: 510548 - DNA, 525 bp, Stenotrophomonas maltophilia
atgctctaccgcgcccttgcattggccgcattggtactggccaccgccggtcttttcagctgccagcaggggcgcgtcagtcgcgccaccgccgcgctggacaaggccaatcgcgccctggccactgccaacgccgagaagtccgatcttgccggcaagctggagctggcccaaggcactacccgcgtcgtgaccgagtacgtggaccgcgtacagctggtgcgcgagcgcggtaccaccatcgtcaaagaggttcccgtctatgtcactgcgaccgctgatgccgcttgcgctgtgcctgttggcttcgtgcacatccacgacgccgccgcgagcggcgaccccgccgccggccctgccggagatcctgatgcgcccgccgccggcgttgcgctctctgccgtcgccgaaaccgttgccggcaactacaccacctgccacgccaccgccgcgcaggtagtggccctgcaggatctggcgcgccgcctgcaggccgagcttgagcgacaggcaggtgtgcagtga

SEQ ID NO: 510549 - DNA, 864 bp, Stenotrophomonas maltophilia
atggccagcaaatccgacaagaaacgttccaagttcttccgtgtggccgtcgaaggcgacaccactgacggtcgcaagatcgagcggcaggacattctcgatatggccgagacgtacagcctggacgtgtacggctcgcgcatctggcttgagcactatcgtggcgttctgccggatggcccgttccgcgcctatggcgacgtgctggcggccaaggccgaggaagtggacatcgccggcgagaagaagctcgcgctgttcgcacaggtcgagccgaccgacgacctggtgaacatggtcaacgtgctgcggcagaagctttacacaagcatcgagattgctccgaacttcgcgggaacgggcaaggcatacctctatggcctggccgtgaccgattcgccggctagccttggcaccaccatgctcgccttctcggccaagcatcccgacgaaagcccgctcaaggatcgcaagcaagcaccggacaacctgttcaccgccgccgccgaaaccgtcattgagttcacctcggacgaagaacgcgaagatcgccccggcccgatcgctgcacttctgtccagcctgggcctgactaagaagcccgcgcaggcgccggccaaggaagatcccgagttcaacgtggccgagttcgccaccaagctgttcgatgcggtgggtgagcaggacgccgccatggccaagctgggccaggacaaccgcgcattgcgcgagcaggtgcagaccctctccacccaggtcgccggcatgcgcaagaagctggacgaaaccccgcagacgttcgcccgacgcccggttgttccgggtggcaaggacgtggacgccgccaacatcaccgattgctga

SEQ ID NO: 510550 - DNA, 732 bp, Stenotrophomonas maltophilia
atgcccacggccgttttgattgatggcgcctatttcatcaagcgcttccgaagtatcgaaccgtcgaacagctacaacgctcagcgagtcgccgactgcgcgcacaggtgggccattgctcacttacgagacggccgacgtgacaagacgcggcgcgatctctaccggatctttttctacgattgcccgccgcttgagaagaagatgcactacccgacttcaagtcgctctgtcgactttagcaagtcaaaagaggcgatttttcgtcgtgagcttcatttgttgctcagaaagaagcgcaaggtcgcggttcgattgggtcacctctctacacaggtgggctggaccctttctccggctctcttagatgccatccttcgaaagaagaagtccgtagacgagctgacagacgaagatttccacccggccgtgcggcaaaagggcgtggatatgcgaatcggtatcgacatttcatctctcgcactgaaaaggcaggtcgatcagatcgtgttgctggcaggagacgccgatttcgtcccagccgccaagcttgccaggcgtgaaggtgtcgatttcgtactcgaccccatgtggcggagcgtgccagagggtctcatcgaacacattgatggattgcggtcggtctgcccaaaagcggctccgcgcaagtccacggcggctgaagcggcaaagccatcctgccctactactccgtcgcgcgagaacgactga

SEQ ID NO: 510551 - DNA, 1041 bp, Stenotrophomonas maltophilia
atgtcagccgagctcattcgggcgccagagccggtaggtgagggcgcactggcaggtcatccccgccaactcaccgacggtttcggacgcagctttccgtacctgcgcctgtcgttgaccgaagcctgcaacttccgttgcagctactgcctgcccgacggttaccaggccgacggccgcccgcgcttcctgcaggtggatgaaatcgcgcgcctggtgcgtgcgttcgcggcgctgggcatgagcaagatccgcctgaccggcggtgagccgagcctgcgcaaggatctggacgagatcatcgccaccgtggcggcggtgccgggcatcgccaaggtggctatcaccaccaatggcacgctgctgccgcggcgcctgccgggctggcaccgcgccgggctgacggcgttgaacgtgagcatggacagcctgcagcgcgagcgcttcgcaaccatcaccgggcatgaccggttgccggaaatcgagcagggcctggccttggcgcaggcactgggcctgccggccatcaagctcaatgcggtgctgctgcgtggcctgaatgatgatgagctgccgcagtggatggactacctgcgcgagcgccccttcagcgtgcgcttcatcgaactgatgcgcaccggcgacaacgaagcctatttccagcgccatcacctgcgcgccgacgtggtgatcgagcagctgctggctgccggctggcacgaacgcccgcgcgcggccgacgccggcccggcgcgcgaattcggccaccccgaccatcgcggccgcatcggcatcatcgcgccgtattcgcgtgatttctgcaagggctgcaaccgcctgcgggtgaccgccaagggcgacctgcggctgtgcctgttcggcgagttcggcgtgccgctgcggccgctgctgcagaacgacgacgaccatgacgcgctgctggcacgcatcaccacccagcttggcctgaaagcggccgggcatggactgcaccagggccagaccgggctgaccccgcacctggcctccatcggaggatga

SEQ ID NO: 510552 - DNA, 1014 bp, Stenotrophomonas maltophilia
atgagtggggaattgaatgcggccttccatatggccgatgtccgcgacaagcgcatcacccgccgacgggcggtggcggtgggcgagctgcacgccggtccggtggcctatccgctgatcgtcgagcgccgcctgcccaagggcgatgcgctggtgatggccgagattgccggcctgcagggcgccaagatggcctcgacgctgatgccactgtgccacccgctgccgctggaactggtgcaggtgttctgcgcgccggtaccggaacggcaggcgatccgagtgtggtgcgagtgcgccagcgaggcgcgcaccggcgtggagatggaggcactggccggcgtcaacgcggcgctgctgaccctgtacgacctgagcaagccggtggagccggcgctgcgcatcgaaggcatccgcctgctgttcaaggaaggcggcaagcgcggtgtctggctgcaccccgacggcatggacgatgccgagcgcacgcgtttcaagccgcgtgcgccgaagggcctggagggcgcggcctgcgcggtgatcacgctgagcgatcgcgccagcgacggcacctatgaggatatctctggcccgaccctggtgaccggcctgaaaaagctgggcggcgaggtggtggccgctgaggtgttgcccgatggcatcgagccattggcgggccgcctgcaggccttggccgccgagggcgtgcgcctgtgcctgtgtaccggcggtaccgggctgggcccgcgtgatttgaccccggaggcgttgcgttccttgaacgcgcggccggtacatggcctggcgcagatggtgcgggcactgagtgcacagcacacgccgatggcctggctgagccgcgccgaggtggtgcaactgggcggcatgctggtgttcgcgctgccgggcagcccgaaggcggcggcacagtgcctggacatcctggcgccggtgctcggccacgcactggcgatggtcgatggcggcggccatgcccatgggggcgcggcatga

SEQ ID NO: 510553 - DNA, 1254 bp, Stenotrophomonas maltophilia; identical to SEQ ID NO: 499433

SEQ ID NO: 510554 - DNA, 210 bp, Stenotrophomonas maltophilia
atgatcagcggcatgaagcacttctttagccagttcaccatcgccaagcgcgggcagaaggacaccttctacgaggtcaaccgagatggtgcccttgtgcttaaccgtgacgggcttctcaaatctggcaggatgaaccgccagcttgatgctgcacgcgatctccgtgacctcaaggtcgccgccgacaagggccgctcctcgaaatga

SEQ ID NO: 510555 - DNA, 984 bp, Stenotrophomonas maltophilia
atgacgagcctagccctgctggccgttctattggctgcgggctggtatttctatcggcagtggcgatacacgcgatttgaagcactgcaccatccggggcacccccagtatttcggcgctgctctctgctcggtctacttgttcggcatcagtgccgggctgcatgctttggcggcgcggcattccacctacagcttgtatctaggcaagctccagggaatgttgccccttcagatgagcgataagcagtcggccgaagggctgaccctgcatctggcgattaccctctggtgcctagcccttggggccgcgcttcccatcctgctcaacgatccgttggtgcgaatccgatcactcgcgcagttgattgcctcgcgtcacggcgctatcgacgccatcgagagccttgctatcaagtgcgaagaggatggaaccttggttgcgttgaccttggacaacggcaaggtttacgtcggcctgttggacgagttcacgggcccgagggtggggaaagagtgggtaggcatgactcccgtcgcgtcaggctaccgggatgagaaagggaagctcgtcttcactacctactacgacatcaagctgccggatgacgcgaccatggagatattccaagtcattgtgtcgatgaagcagatcatctccgcgcaggcgttcgatctggagctctacaaacagttccagcagccagaggctcacactcaggccatggccgacaggaaagagcttgtgcctcagcgttcttctttagcggtggacaatacccggcacgccttctatttagggctgccaatcttcctgcttctttcgccttacgtgggcttgaagtccaccattggtggactgagcatggtcattgcggcaggtctgtcctgcatcgcggctgagaggctgcgacgacggcaggtgaagcctggagcggacgtaggctccactgccctagaaactgatgaggtgcatttcgtttag

SEQ ID NO: 510556 - DNA, 351 bp, Stenotrophomonas maltophilia
atgagcatgccccctccccctctgcttgaccagccggtgaccgcacggcgcaagctcatgacgccccggaaccggttcttctggtggtatttgggtgccctgcttcttactggaccctttgggttccttgtcgggccgtttatggcccggcgaggaacacgaagggtagaacgcctctacccggccgaagctcgagtggctcaggcgcgggataaggggttcgcttggtggcagtggtgggccatgaccatcctcaccctgatgggcgctgtcggggccatgaccctcatcagtggactgccgatgtttctgctggtcctgtattcaaagctgatgattccccagccttga

SEQ ID NO: 510557 - DNA, 315 bp, Stenotrophomonas maltophilia
atgaaagcaccgaagcttgccttcgccggcttggcgaccgcttttgcactgactgcctgcggcggaccgccatctgatcgcgatgccgagaaggcgttggcggcccttctcacccagagcggggcgggccagatcaccagcatccacgacttcaagctcgacgggtgcatggaagcccaggacatgtcgggctatcgctgcgacacggccgggaaagtgtccatcgatatcggtgggcgtcaggtccctatcccggttagcaaaaacctgcgctacgtcaaagaggacgggacttggaaggcctacgccaaatga

SEQ ID NO: 510558 - DNA, 543 bp, Stenotrophomonas maltophilia
atgcacgacgcagacaaggacgaagacgcccagagccaggctgacggcaagtcgagtcctatcccacctttcggggacagttcccaggggcacttagtgacaatcctggctggtgcactaggaagtggggtttgggcaatcggaagcgaggcagcaagggtgctgttgactgccgtagctcagttcgagtgccatcaaggcgacagttggcaccttgatcggtccttggtctcgggcgatacggtggaatctcttgttcgcacggggaaaagcagggccatcgacgtcgcaagggcatgcgcgcttggagcagagctgctgtggcatgctgacgccttcgagaggcatgctgcattcgtgcgagagcgcgaggtggagctgattagaatccttctagatttccttgagagcaatggagagggtgagcaagtgcgcgcgctccatgaatctttgctcgagagcttcgctgcggctttcaaagccgagttaaacgcttcgttgccactgaaggaatacttgaagtcgctgccgagacgaatctaa

SEQ ID NO: 510559 - DNA, 1344 bp, Stenotrophomonas maltophilia
atgggcaccctccagctcaagggcgtccagatgggcaaccttcgtatcgaagagctgaacatcaccggacgtgaggcagccatccacgcccaggaaatgctggaccgagccgatgaccgccagcgtcgcagtcgtcgagccaatggatgcacccagtatcccgccccgctgcccattgcctccgcccctcgcctgctgtctgtcgagatcgccgactacgtgaggtccagagacgaccgtaatctggccaaggacacaaccggatctacgctccgcaccctcaacttgcttaagctgacctgcggcgacatccccgtttcgcgcatcgaccatgcccatatttatcgtctgtgggagttgctccggtgggctcccccgttgcttctctccgaccccaagtatcgcgactacacgtatgaccaggccgtcgcgctcggcaaggagctggccgttcctcccctggcccccaagacattggaaaagcatcggcgtttcctgtcgaccttcttcaagggcctagtcgaagccaacgcgatcccagcgtcccccatggccggcttcaagaagttcaaagacgatctggcggtagacgccgacaaagcagagaggctctttgacgaagcggacctccaaaagatcttcgcgcctgagaacttcattccgtgggcgaagtgtcatccccaccggtggtggatgcccatgatcggcctatacaccggcgcgaggatcaacgaggttgcgcaactgaaagtggccgacatcgtgcacgacgccggcatctggtggatacgcatccgggtcacgatcgacccagacctggcacacaagagtcgaggaagaagtcgccaacgcctaaaaggcaagtcggccgtccgggatgtgccgatcgcgcagccgctcatcgacgccggcttcctagactacgtcgaagacatacgccagtgcggacacccgcgcctgttcccccacctttccgccggcgtgaaccgtgagacaggcgactcgaacgcacgttacagccaagccgcgctcaaccagttcagcacttacatgaaacgcttaggcttcaaaaaaggcgtcggcttccacgcgttccgccatacgctagcaaccgagcttcaccaccaggacatcccagacgaggtcattgccctcatcactggtcactcagctaacaaaagggtcgctgtcctgcacgaggcgtatttccacaagaaaccggcatacgctcagaagaagaagattcgcaccatcaagcgttaccagccgagcgtcgaactgcctaagtatcagcggggccagtttgccgatcagctgtctgacccaagcaagttctacccatga

SEQ ID NO: 510560 - DNA, 735 bp, Stenotrophomonas maltophilia
atgacagggattgcgttgcttcgctcgtcatccagcggtgagtcaacaccagatctgaataagcacgagtggaccgatgaagttcgattcctcccgtattgcggtgacctttactgggatagcatgaacgggcagcggatcctgctgttgggggagtcgcactatcggaaggagggggtggccgattcgcttgatgtgacccggtccttcactcgaaatactttccgggggatggcagagccggtccgggaacgcgaggacagtcccttcttcagggcgctggacctggtgctcaccgggcgacaagacttccaaccgctggaagctgcggacgcatggcggcgagtagccttcgccaacctgtctcaagccttcgccggctcccaggccaatcaccgcccccgcaatgaggcgctgaggaagggtggtgacgtgctggtcggggagatattgcctgttcttaggccaactattgtcctcgtcctgggcgggaccacttggcggttccttcggcatggccgccgcgagggaggcattcctccatttgtggcggagcaggtgaaccgtggcgacagcaaaaggcgataccttgaaaaccgagatgtgtggtcgctggattatgtcgggggctcagcgctcatgacctgggtctatcatccctcttggaatgtggacacgtggcaggacagggccggagcactgcgtttcctggcatccctgcggtgccagccctga

SEQ ID NO: 510561 - DNA, 1074 bp, Stenotrophomonas maltophilia
atgagcgaatcagccgaagtgtcaaaagtggtccgcaaaactgctcagagtggcaagttggactatgtccctgtcgttgtcctcaacgagaacacgaggaccaagctgcacgtggtcgggtggctgattcctcacactaaccacaccgagttctctataaagctcgagggtttcaagaagaccaaagcctcgccctgggaggaggatccgatcaagaccatcaccttgaccgagacctccacgctcaagctgttcaaataccttcagactcacctgcctttggcccagcaatctgaagcaggggagttcattctcatcagggcggcgaacggcaccgtcgacctcaccgggcatgacccgcaatccttggtcggcgcgctgaccaaggtgttgtcgcaagcagagctcgtcaagcacttggccagcactgagctgacacatgagttgaccgaggcgcttcggggatccattcggctcaatgagatgcgctcagcggttgctgagctacggtccaccttgggccgtggtgagtcggctgagcaggtctaccaatcttggtgcgaaaggcactgctgggcctttgggaacgcctacgtggtcagggacgaggtgagggcaatcaccacaggagacaacatcgacttgatgttgcctagcgtgattgctgggtatcgagacatcgtcgagctgaagcggccggacatggatgtgctgctgtatgacagggcgcacaagaactactacttctctgcggacgtatcgaaggccattggccagtgccaccgttacctggatatgcttcatgacttcgcagacaagggattggttgaccacaaagaggtagtggcttaccaccccagggccacaatcgtcattggacgctctcatgactggacggatgagcagcagcgagcacttcacggcctcaatcggcgtatgcatggaatcacggtcatcacttacgaccacctcctggctcagggtgagcggttgatagagatgatggtgccgacggcgggccttgaagctgcggcggtcgaggccgtcgaacccgacgacgacattccctggtag

SEQ ID NO: 510562 - DNA, 231 bp, Stenotrophomonas maltophilia
atgagcgttgcagtctacaaagatacccctcatctaaaagtatgcgagggaagctcggagttgggctcgactccatacatctcgttcgaggaatatttgactattccaggactggaggacgcggatattcgcttggagtttgctaacaagccgggtctggaagaagtggaagacctgcggcgcaggctgaagagcgccgggctggtctttgtggtccagcggagaacctag

SEQ ID NO: 510563 - DNA, 1542 bp, Stenotrophomonas maltophilia
atggccatcttccataccgcgatcaagacttttagccgcagccgggggcagtccgccgttgctgctgctgcctaccggggcgggctactgctcgcggacttgctcaccggacagcagcacgactaccgccgccgcagcggtgtcgtcgaaagcttctgcctcgccccgccagacgctcccgagtgggccttggacccccgggagctctgggctgtcgcggaggctgcggagcggcggaaagactcgaccgtggcgagggagttcgagatctccttgccccatgagctttccgaagaacagcgcgcccatctggcattcgtgctcgccgacgcgttggtcgggcgttacggattcgctgtccaagccagcatccattgcccgagcacgccggatggcctcaaccaccatgtccacatcctggcgactactcgtcgcattgggcctgagggctttggcgacaaaacccgcgagctagatgtcgggccgtctggaaaagtagaggttcagtggattcgggagatggtcgctacgacgacgaacgcccacctggaggcggccggctttaccagcaccatcgaccaccgcagtctggctgaacaggccagatcggcaatggagcgtggggatgatttggcggcagcggcgctctcccgggagccgacccaacacctcggtaagcgggcgaccgctctggctgggaaaggcgtggataccactagggcgaggacgaacgaccagattttggaagacaatcaggagcactatgactacttggtgctcaaggccgggttggagggcaagcccgtgccacccgctggggaggagtctgggtcgcgccgtgggcgggtgctcaacagcgatacggccggcctgcccgcgggtatggaaatgaagggggtctccggtgttcgcctgcagcatgtgctcctttcgtctcacggactacccgaccatggggcacccgttagccttgctgagaggattatggacgccttgcgcgacgttgaggagatttccagggcgagggcagacttggccatggaaaagactcgtgctgggttgggttgggcgcagcggctgctttcagctcaaggggagagcgtcgaactccggcagtggatcatcatggctgtgcttcaagtccgtgccctgaagtgcctcatcattagccgggctcgcaggctcttgaacctaaagagtgcaaccaggttgcggcatatggccgagcaagagtgggagcggttcaatgccgactatccgatgggttcaagcggttactcgcgtccggaatggacccagcgccgagggcggcggctttcggtgcttgagacgcgcacggccgagttgaagttggcgcaggagcgggcatcggagcaagagattggcttgatcgacgcggacatcgccaagaaggctgatgcccttgaggcaatgccttctccgccacagcgccaagctctgaagccagcggctcatcagcccttgtcccccgatgcgcccgctcctcgtccgccggctccccgtgggccgaccttccactga

SEQ ID NO: 510564 - DNA, 795 bp, Stenotrophomonas maltophilia
gtgagcatccatccgatcgacacacgggtcgctgtccttctcgattgcgacaacgttccacccgaaatcgtggaccatgccctcctcatggccgctcagttcgggcgggttgtcgtccgccgcggctacggaaaccacgccacgctggccaagcgctggcaggagaccttggtccgacaagcattcaccccatgcctccaatatcaatacgcggcagggaaaaacaccgctgacatggcactggctttggacgccttagaagcaatgttcgatcagcgggctgacacgttttgcttggtcacgagcgactcggatttcgcttacctgtgccgaaagctccgggagcgaggagcgacggtctgcatcgtgggggaggaaaaaacgcctgaggcattgcgcaatgcctgcgaccagttcttcgagtggaagccttcggagcagaaacccgaagcggaagagcaggcctcgggcttgaaaggacaggcgcaaggaaagaccgaaacccccaagccattgcccaagcgacgcccccgtttcttggtcgatgcagtggcccttctcgccgacggcagcacagatgggagggtcatcgtcagcgcgcttggcaactatttaaagcgaacagatccgtcgttctcgccaaacgcttatgggcactccggcctgcttaacatggtcaagacgtatgacctgctcgttgcttcgcaagcgccgggaggccactggctggtcaagctcgcaccggaacagagccctgcggctcaggcttcaatcgcagcagcgtctgacgcctaa

SEQ ID NO: 510565 - DNA, 1329 bp, Stenotrophomonas maltophilia
atgggaacccaggacgaggacatcgagacgcttcttgcgcgcctcaccagctccgacagcctccagcagctgacgttgaaccgaacgcgcaccgccgacggtgtcgtcaccgagcactggcagatcgacactccggaggacgtgaagctttatcagcagatcatggagctgtctgcctcacggcccagcgaacttggggagctgattcgtcagggcgtcccgccgatgccggaggcgcgccgggtgaccaagcccgccattgagaccatcaccttgggcaaggccaaggaggcgtggctggcgagcatcaagggcagcaccctgcccaagacttggaccatcaaacgaacggcggtagagctgctgactcgcttcctgggcgagaaggccaaactccatacgctcactcggtccgacctggcccggtggtatcagcacatgagggacgaaggggcatccacccccaccctgaccaacaagcaaagctatgtgggcgggagaggaggatttttcgagtgggcgatcgcctcgggccattacccgaagggcgacaacccggcctccgggcatgtgagctactcaacgcgggagaagcgggcccggcgcaagttcggcttcaaggcttatgacacccatcaagtccaggccctgtttgcgccggcggccttcgaggccctgcccctgcccgctcgctgggcggccctgttggggctctacacgggggcccgggcctccgaagtcgggcagttgatggtcagcaacatctcggaagaaagcggagtgccttgcatccatatcaccgacgaaggcgaacatcagcgggtgaaaaccgacgtaagcgtccgcaccgtgcccgtccaccccgacttggcggcgctgggcttcctcgagtgggtcgagagcatgcgggccgagggccatactcgcttattccctggagccaaggccgaggccaagaacggccagggcaactgggtgtcgaaggccttcagccgttacttggccgaggtgggcaagaactggcccactgcgaagcggggcttccactcccttcggaaaaccctgattcaagagctccagggcttgggagtggtttccgagctgcgggctcagatcgtaggtcacgagctggacgatgagcaccacgccacctacagccgcgatttcacggccaaagagaagttggaagggctgggggctcattcacccggccttcggaccctgacctatgggctcgacctttccgccttgcgccccctggttgatccgaacctgttgcctgagggcagccttccaaccaaccgccgcaaagcaaggagcaatgcgtga

SEQ ID NO: 510566 - DNA, 225 bp, Stenotrophomonas maltophilia
atggtcgagcatacgaaccaagcgaaacttgcagatgtgatccgcgcgcatcgcattgatctgggtgtcagccaagaagcctttgctgaccacatccagatgcaccgcgcctactacagcaagatcgagcgtggcgaaaagaacctcactctcgctaccttggagcgagttgctaaaggcatgggtacctcgatgtcggccctgctgcgcgccgcagggctctaa

SEQ ID NO: 510567 - DNA, 1092 bp, Stenotrophomonas maltophilia
atggaacaggatgctcgaaaggcccaagttcccctcaaaggcagaggggccgcatcgcgtgtcccaagccgtttcgataccactgcaacagtgggagtcgacgacggctgggagtcggtctaccaggagatggaagacgcgccaccgctgagaactcaggtgcaggaagagcgagcgcgcacagtgatcagccacaactcatcccctgacgttggctttagcgcgtcggtcaacccgtaccgcggctgcgagcatggctgtgtttactgttttgctcgcccttctcactcctacttgagcctttcaccaggcttagacttcgagacgcgcctgtttgcaaagacaaatgccccggagcgcctcagagcagaaattagcaagtcgaactacaagtgcaccccgattgcgttggggataaacacagacggctatcagccgattgaaaggaattaccaaattacacgccaatgccttgaggtgcttgctgatgccaagcatccggtgagcttcgtcaccaagagtgccttgatcaccagggacgtcgaactgctggcgtcgatggccaaggatcggttggttacggtctacttctcggtcaccacgctcgacaggaagctatctgcaaaactggaaccacgagctgctgctccccacgcaaggctgcgagcaatgaatcagctgcacgaggcaggagtaccggtaggggttttgatcgcgccggtcattcccatgatcaccgaccatgacctagaagccatccttgaggctgctcacgaacacggcgctcgggcagcaggctacgtgcttctcaggctacccaacgagattaaggacatttggagagaatggctcgagctgcactatccggaccgcgctgcgcacgtgcttagcttgatgcgacagatgcatggtggaaaggagtatgacgccagctttggcaccaggatgtccggaactggccctgtagcggacttgatccggaagcgctttgaaaagaagcatcgtgaactcggtttcactaggctgccagcgctggccactcatctttttcaacctccccaagacaagtcgccacaggggcaacttttctag

SEQ ID NO: 510568 - DNA, 450 bp, Stenotrophomonas maltophilia
atgaagcgcctgactgccttttgcctcgcggccgcactgacatcctgtgcggcgcatccgaaccgcacgacgaagtgtcagccggcccaattcacttacatcggcaccgagagcatcgacgggctgacctacgggcgcttccaggtcagccacaacgctggtcagccgcttcagctgtgggtggatgagagacgcaggttgaactcaaggaccgctcgcgcagagatgaggcgcacaggcgaagatgcctggcggccttacaacgtgatccttgaggaaatcacaccgggagcgatcgggctgtcgatcgggcaggatgaacagcagagcgttctgttcgatggtgatggcctgttcctgcccggcgcatccagcgcgggcgcgaattactccatcgtggtacaggacgctgccggttgcgaacatcgctcggcaacgttcattccctga

SEQ ID NO: 510569 - DNA, 210 bp, Stenotrophomonas maltophilia
gtgatcgaagctgggcgcgccctgcttgccggtggcatcgtcaatggcggcactgaggccgctgcggccggcggtgacaaacagcagatcgccttcgtggacatcgacggccatcgccaccgctggccacagggcgggcagcagcaggccgatcaggagcaggaggcgatgcatgaggactctcggacaggcggaatgccggaattgtag

SEQ ID NO: 510570 - DNA, 411 bp, Stenotrophomonas maltophilia
atgactacgaaacgaaagcccggcgatgccaggcgcaaggatcttgagcttgcagtctcgcgaattcaaagggggcgagcacgaacagaagctaagaagctcagcataacctccgtggcgcatgaggctggcgtcacccccgctttgatccacaaccattatccagacatcgccgaagcgatccgcgaggcccaaggccggtcgagccgggcgcagcgggatgtgaagcatgagcagttgctggccgaacgtgagcggaaccgggccctccgggcagagaatcaggcgcttcgatcccagttggctcggttggcgtccatcaatgaggtcctgcaggcggagaaccgcgtccttgaagccaagcagcgcgattcgaaggtcgtcgatatcaggcccaagggcgctacatag

SEQ ID NO: 510571 - DNA, 1878 bp, Stenotrophomonas maltophilia
atgaacgcaacagcgttgcaccaggtggactcagatgttccatctcagaccttcagttccgtttcactgaacgcgcatgagcgagatcgccttgtcattagctcggccaaggtcaatggcaccttggtcaccagaagcttgtatggggatggcacctggttgctgaatggtgccccgcccaacgtggcgaagggccatgcaaggattgacttctcaagggtgcccgaggagtttcgtgccgcagccaaggagctgatgtacctgtaccattttcgtggtcgagaggggtccggtaaggccgcggccaccacgcttgtgggagtgttcgatcagtccgtgcagttcttccgctatcttgtgtcgatcaaggtagaggcgctctgcgatgtcagtccaatggtatgcgctacgtatgtcgccgcctgcaaggcagagcgtatagttcgcaagggtgacggcaagcctctgtctgcggaggccttgggagggcggttctctgccgtcgaagttctgtacgagatgagcttgcttacgaacgacccgatgccctcgcacccgtggccagaaagctcggccaagcatctcgcagggctcaccggttcgagtaagcgaagcaaaacaccactaattcctgacgatgtcttcagtgcattgtttcatgaggcatggtcgcttgttcagagaggttctgccctacttgacctacgtgacactcttgagggatttccggatacctcagtagccttatccagctctggtgccaatcgagccaagaaccgtcagctcaaattgctaggctgggatagaggcgttcgaagcttcggagtagagctgaataggcttcgcacggcttgctacattgtggtcgccagcctctctgggtgtcggaaccatgagttggcgcatctccggtcctcggcctgctacagcacgcgaggcgaagaaggtgaggtctattggtggatgcgggggcggagcgataagaccgcagtcggcgacaccgaatggatgataccaacggctgcggtgcaggcactagcggtcatggaccggtgggcgataccgctacaggaagagttggtgttagaaatccaacggatgactgaggcgaatccacttgatcccgaaattgccgaggcacaacgacatgtcggcgcggtgttcatcggcgctgacaaagatcgatcgggccgggtacggatactgaccgacagcgcgtggaacatcgctctcacgtctttcgcacggggtatcggtctgaactgggttcttagtacgcatcagttccgtcggaagtttgccaactacgctgcacgcagccgtttcggtgacctgcggtatttgcgcgagcatttcaagcactggtcgcaggacatgaccaatgatgcgtatgcactcaatgagtcgcaggagattgagttgtatggggagatcctggaagagctagctgcgatcaagcaaggggttgccgaccaatggttgagtcctgctgaaccactagccggcggctatgggggcagactcaccttctggcggagccagaacgagaacatcgttcttttcaaggatcgggcaacaatggtccggtcagtggcggagagccatgcaatccgtagcaacgggcacgcatggtgtactgcagacgacaatcggtgtattggaaacactttcgagaagacgcgctgcagtggttgtgacaatgcggtcattggtagcgttcatgctcatctctaccagcgtctctatagcgatctcaaggatgtcgccaagtgcgaagacattggacaaggtgggcgattgcgtgtacttcgcgaccttgagcgctgtcgcaacgtattgctttccctgggacacgatccggatgctcacgcccaatga

SEQ ID NO: 510572 - DNA, 1704 bp, Stenotrophomonas maltophilia
atgacaggaaagcgcaaggtccacatcaggactgatcttcatcagcctcggatagcacagcaccacgaaggtggtctcctgaaatcgggcgatgatgacaggaagccgcctgcggcgacgctggtgaacttcggttttaatgccgtcggtgcgcggacctacgacttcgccagacactacgcggtgggaatagacgaaatcaccagcgcctgtcagcgtcaaatagagcgcttcctgtgcaagcaggacgcagagttagaggtaagcacgatcgccggctatgcacgctctgggctagacacctttcttccctacctggctctgcgcgcagccgctctccggcgcgccttgaccctagccgacatagatcgcgacgtgatagatggctacctccgacatcttgcggattcaggtgccacccgctcagcgcagaagatgcgatacgacaaaacgaaggcggtgatccaagcgcttggtcgccgcgggcttatccatttattcgatgcagggactgagcgaacctttccggcgaacccctttccgaacagtgctagacaggtcaagggcgagacgccactactgcgaaaagagcgccaagcgttcgccgcggcagttaagacggcagtgatgccgatcttccgggaggacgtaagtgttactagtgaactgctgtcatacgcacttctgatcattgcactccacactggacgcaacaccactcctcttcttgaaatgggtgctgattgcctacgcccccaccccaaagagaacacagagttcctcgtcctctggaagagaaggggctacaactccagcaaagtagcacttcgtgcagatggacaagacgatcgcacgattgagtcaatgccgggcgtcaaggtgcctatcgttcgcctgatccggcgagtgatagaactttccaagcccctgcaggccgaagcagaagcacatcatgccggtaggatctggctctatcgcagccgccagcgaggcagaagtgggtatgtcactgcgctgaacgactccacggtctccaacgcgattcagaccctcgtcgctgatgcggggctagtcggcgcggatggaaagccactgaggataaacgtctcccgcctgcggaagacgttcgccaatcgcatcttcgagttgcttgatggtgacctaggcagcactgctgtcgcacttggcagcacaccgagggtagccggacgcaactacatgaggccgggagaacggtccagtcgcaactggcagttcatgggcgaggtgcttacccaagaacttctcagccgaacgatcggggcgactgagcggacgccaaccggccgctgcaccgacccaagcaataccacgtattcctccacgacagccgacggcgccgtgtgcttttcctttctcgactgcctgcgctgccgcaactatgtggtgactggtgaggatctctatcgactcttcagcttctactggcgagttctccgtgagcgggatcgaatggatgcccgcatttgggagagacactatgcccacattcctcgacttatagagcgtgatgtcatcgcgacggggttacggaggaaggtcttcaagccggcggacgtcgatgcagctcgtgagcgtgctcgccacgaccctcacgccttctggaggtttgattctattgcgtcacttgacgatttccgccagccattggaagagactgcatga

SEQ ID NO: 510573 - DNA, 480 bp, Stenotrophomonas maltophilia
atggtggccctcgatccctccgacggagagggcatgatgaccaagggcggcaagcctcgagatatttggatttcgaggcgtcttatgagcgatctctatcgctacagcgtccttgtccgcggcgaactagcgtccctgagcgataaggcccatcccacactcttcctgacgcaggatggtagaccttatgcgaatcatggaaagcacatcgaagtcatcgtacggaagaacgggctgaaggcagggttccgaacgcatccgcacatgttgcggcacacctacgccactcatatgcttttagctcttcagagggacagagcagcacaagcggtagagccgctcgtgtttgttcagcgccagcttgggcatgtctccatcgagacaaccatgatctaccttcaccttgtcaactccctggtcgatgatgccgtccttgcttacgacgaagagctgaatgacctggttgatacgctctcatga

SEQ ID NO: 510574 - DNA, 876 bp, Stenotrophomonas maltophilia
atgcggaaacgttccgacgtcatggggttgccggccagcggccggcactacccgggtcgggaattgccgaagccggcggttggtagtgccggccgctggccggcagatacggaaacgttccgacgtcatgaggttgccggccagcggccggcaccaccgtgtggggaattgccgaagccggtggttggtagtgccggccgctggccggcagatacggaagcgttccgacgtcatggggttgccggccagcggccggcactaccgtgtggggaattgccgaagccggtggttggtagtgccggccgctggccggcagatacggaagcgttccgacgtcatggagttgccggccagcggccggcactaccgtgtggggaattgccgaagccggtggttggtagtgccggccgctggccggcagatacggaagcgttccgacgtcatggagttgccggccagcggccggcactaccgtgtggggaattgccgaagccggtggttggtcgtgccggccgctggccggcagatacggaaacgttccgacgtcgtggggttgccggccagcggccggcactaccgtgtgaggaattgccgaagccggtggttggtagtgccggccgctggccggcagatgcggaagcgttccgacgtcatggggttgccggccagcggccggcactaccgtgtggggaattgccggagccggtggttggtcgtgccggccgctggccggcagatgcgcaaacgttccgacgtcatggagttgccggccagcggccggcactaccggtgcgcggtgtcggcgcgcggcggtgggcgagggggcctgaatcggggacaatagcgtccccgccgccccacgcccgctcccgatga

SEQ ID NO: 510575 - DNA, 516 bp, Stenotrophomonas maltophilia
gtggccgcagccgctgacaaaaccaagaagacagccgagaaggacaaggccgccaagccgcgtagtccgatcctgatcaccgcgctggtggccgtactggccgccgctgccgccggtggcggcgtctggttcttcacccagtccaagcacgaagacaaggccgcgcaggccccgaagaagaccgcgaccccggcaccggcccagtatttcgcgctggacccggccttcgtggtcaacctcaacggcccggtcgatggcccgcgctacctgcagctggaagtgcagctgatgacccgcgacccgtccgcgctggaagcgatcaagacccatgcacccgccatccgcgcacgcctgctgatgctgttctcgcaggtcagcccggaccagatcgccgatgtcgccggcaagcagaagctgcaggctgcgtcgctggccgaagtgcagaaagtgctcaaggccgagaccggcagcaatggtgccgacgacctgctgttcaccagcttcgtgacccagtaa

SEQ ID NO: 510576 - DNA, 336 bp, Stenotrophomonas maltophilia
atgaacgatatcgacgccctcgaacccactccggcccagttcagcagcctgcaggccgatgaggcgaacggcccggacctgaacctggacgtgatcctcgacgtaccggtgacgctgtcgctggaagtcggtcgcgcgcgcctgccgatccgcaacctgctgcagctcaaccagggttcggtggtggaactggaacgtggtgccggcgagtcgctggatgtgttcgtcaacggcaccctgatcgcccatggcgaagtggtggtgatcaatgaccgcttcggcgtgcgcctgaccgatgtggtcagcccgagcgagcggatccggagactgcgttga

SEQ ID NO: 510577 - DNA, 792 bp, Stenotrophomonas maltophilia
atggacgccgccacccagatggctgccgacggcctgcaggccttcggcatgatcggcaccgtgctgtggaccatgctgcgcatcggcgcggtggccatggccatgcccatggtcggcacccgcgcggtgccggcacggatccgcgtgatcctggccggtacccttgccatcgcgttggcaccgctgctgccgccggttccggactggaccggcttcgatgctgccaccgtactgaccatcgcccgcgagctggccatcggcgtgtccatcggcttcctgctgcggctggtgttcgaggccggcgcgatggccggcgaactgatcgcccagggcaccggcctggcctttgcgcagatgagcgacccgcttcgtggcggcacctccggcgtgatcgggcagtggttctacctgctgttcggcctgctgttcttcactgccaacggccatctggcgctgatctcgctggtggtggacagctaccgggcgctgccgatcggcgcgccgctgccggacccgcacgccttcttcagcatcgctccgaccttcctgctgaccgtgctgcgcggcgcactgaccctggccattccactgaccgtggcgatgctggcggtgaacctggccttcggcgtgctggcgcgtgcagccccggcactgaatccgatccagctgggcctgccggtctcactgctgctgggcctgttcctgctggccctgctggccggggaaatgggcccgccggtacagcgcctgttcgatgccgccttccaggctgcggacgcggtcacacactga

SEQ ID NO: 510578 - DNA, 2109 bp, Stenotrophomonas maltophilia
gtgagcgcccggccctccaccggattcaacacccgccgtgccctggaaatgatccgccagggccttggcgcgccactgatcgtgctggccctgctggccatggtcgtggtcccgctggccgcgccggtgctcgatgcgctgttcaccttcaacatcgccatctcgctgatggtgctgctggcggtggtctacgtgaagcgcccgctggacttcaccatcttcccgatcgtgctgctgatcaccaccatgctgcggctggcgctgaacgtggcctccacccgcgtgatcctgctcaacggccagaacggccacgacgccgccggcaaggtcatcgccgccttcggcgaattcgtgatcggcggcaactatgcggtcggcatcgtggtgttcgcgatcctgaccatcatcaacttcgtggtcatcaccaagggcgccggccgcgtttcggaagtgaccgcgcgcttcatcctcgacgcgatgcccggcaagcagatggcgatcgacgccgacctcaacgccggtttgctgacgcgtgaagaagccaagctgcgccgcgaggaagtccgcgaggaagccgacttctacggcgcgatggacggtgccagcaagttcatccgcggtgacgccatcgccggcatcctgatcctgttcatcaacatgctcggcggcctggccgtgggcgtgctgcagcatggcatgccgttcggcgacgcggcggccacctacaccctgctgtcgatcggtgacggcctggtggcgcagctgccggccctgctggtctccagcgcggtggcgatgctggtgacccgcgcctcgcgttcgcaggacatggcccaagccatgaccggccaggtgttcggccagtaccgcgcgctggcgatcaccgccggcatcatcggcgtggtcggcctggtgccgggcatgcccaacgtcgctttcctgacgctggccgcgatcctcggcttcatcgcctggaaggtctaccgcaagagcaaggccgcagccaccgacccggcagccgccggcaatgacgcggccgcactcaacgcactcggccgcccggcggcagctgcgccgaccgccgaactgagctgggacgaactgcgcccggtcgatccgctgggcctggaggtcggctaccggctgatcccgctggtggacagcaaccagggcggcgaactgatggcgcgcatcaagggcgtgcgccgcaagctgacccaggacgtcggcttcctgattccgtcggtgcatatccgcgacaacctggaactgcccgccaacggctaccgcgtgctggtgcacggcgtgccggtggccaccgccgagatccaccccgaccgcgaactggcgctggacccgggcagcgcgctgggcaccctggagggcattgccggcaaggatcccgcgttcggcctggatgccacctggatccagccgcaccagcgtgcccaggctgaaacgctgggctacaccgtggtcgacccggccaccgtggtggccacccacctctcgcacctgatccgcgaacatgcgccggaactgctcggccacgaggaagtgcagcatctgctggccaacctggccaagagcgcgcccaagctcgtcgaagatctgacgccgaaggcgctgccgctgtcggcggtggtgcgcgtgctgcagaacctgctggtggagcgcatcccgatccgccagctgcgcaagatcgccgaggcgctggtcgaacacgcgcccagcagccaggacccggcggtgctgaccgctgccgtgcgcaccgcgctgggccgcttcatcgtgcaggagatcgccggaatgtcggcggagctgccggtgttcaccctcaacccgcaattggaacgtgtcttgcaggagtccacgcagggcaacggcgccgcgctggaacccggactcgcagagcgactgcaccagagcctggccgaatgtgtcagcaagcaggaagcgcgaaacgagccggcggtcgtgctggtaccgggcccggtgcgcgccgcgctggcgcgcctggtccgccacagcgttccgtcgttgtcggtcctggcctacagcgaggtgccggaggacaagcgcctgaagctggtcggaacgatcagctga

SEQ ID NO: 510579 - DNA, 744 bp, Stenotrophomonas maltophilia
atgaaaggcgcagcccagtacagggaagtccagcgctcggcggccaacgaggtcatcgcccagcattcggacctggtgcggcgcatcgcccaccacctggccgcgcggttgccggccagcgttgaagtggacgacctgatccaggccggcatgatgggcctgatagaagcgtcgcgcagctacgacgccgaccagggcgcctcgttcgagacctatgcctcgatccgcatccgcggttcgatgatcgacgagatccgccgtggcgactgggtgccgcgctccgtgcaccgccgtgcacgcgatgccgccgccaccatccgccgcctggaacagagcagcggccgcgccgccagcgccaccgaagtggccgccgcgatggagatgccgctgcccgaatacctgcggttgatggaagacgccgcacgtggccaggtgctgagcctggagtcgcgcatcgaggaccagggcgagctggacaccgtcgcccagggcggcccgaccccgcagcaggtactggagcgtggtgagttcggccgcgagctgggcaaggccatcggccacctgcccgagcgcgaacagctggtgctctcgctctactacgagcaggaactgaacctgaaggagatcggcgcggtgctcggcgtgagcgagtcgcgggtctgccagatccacggccaggcggtgctgcgcctgcgtggccggctcaagattttcgaggcggcggacgccggcctggaagaatga

SEQ ID NO: 510580 - DNA, 1830 bp, Stenotrophomonas maltophilia
atgagcgcggtatccgacgacatcactgccgacttcatcatcgaggcacaggaaatcctggatcgcctgggcgaacagctggtgtcgctggagcaggcaccgcaggacaccgagcagctcaacgcggtgttccgtggataccacacgctcaagggcggtgccggcttccttggcgtcaccgcgatggtcgaactgtgccacgccgctgaagaggccctgggcatcgcgcgtgccgggcaggcggtgctgcaggcccaccacttcgacgccgcccagcaatcgctggactacctgcagtcgatgctggacgccgtgtcctccggcaccgagccaggctatgcgccgccggacctgatcgcgcagttcgacatgaacggtggcactgccgcgccggtcgctgcggccgcccctgcggcagctggcagcgacctgatcaccgacgacgaattcgaggccctgctcgaccagctgcatggcggcaacgcaccgaccgcggtcgcgccggcccggaaggccgacgacggcctgatcagcgaagacgagttcgaagcgctgctggaccagctgcacggtggcgctgcgccaggcgcgaagcctgctgccaccgtcgtggcggcacctgccgctgcaccgcgcccggcgcccgtaccggcgcccgccgccaagccggcggccaagccgatggccgaggccgagcacaccgtgcgcgtggacaccaagcgcctggatgcgatcgtcaacctgatcggcgaactggtgctttcccgaaaccgcctgaagaccctgcgtgcacgcctgcgcgacgaggagctggaccgcgccgtatcgacgctggacatcgccactgcccgcctgcagtcggcagtgatgcgtacccgcatgcagccggtgggcaaggtgttctcgcgcttccccaaggtcgcccgcgacgtcgcccgctcgctgaagaaggaagtggacctggagctggtcggcgccgaaaccgaactcgaccgcaacctggtcgaagcactggccgatccgctggtgcacctggtccgcaacgccatcgaccatggcgtggaaatgcccgatctgcgcgaagcacaaggcaagccccggatgggccatgtacgcctgtcggcgcagcaggaaggcgactacgtcagcatcgaggtgcaggacgatggcgccggcatcgacccggagaagctgcgcgcgaaggcgcgtgagaaaggcctgatcgatccggaagccgccgcccgcctgagcagcgaggagtgcctgcacctggtgttcctgccgggcttctcgaccaagcagcaggtcaccgacatctccggccgtggcgtcggcatggacgtggtgcagtcgcgcatccgcgaactgagcggccagatccagatccagtcggaactgggtcgtggcagccgcttcctgatccgcgtgccgctcaccctcgcgatcctgccgactctgctggtgcaggccggcgaggacgtctacgcgctaccgctggcacgcgtgatggaagtgcttcacgcgccgcgcacctcgctgggctggttcgatggccgcgccgtgcttgatcgccgctcgcacaccctgccgctggtcgacctgcgccagtggctggatgtgacgccggccgcgtcaaccctgctgaccatcgtggtgctgcaggccggcgaagcgcgcttcggcctggtcgtggaccaggtacgcgggcgcgaggaagtggtcatcaagccactgccaaaagccctgcgcggcctgcgcggttatgccggtgcaacgttgatcggcgatggtcgcatggcactgatcctggacgtggacggcatacgctga

SEQ ID NO: 510581 - DNA, 741 bp, Stenotrophomonas maltophilia
atggatagactcagcctcattggactctttctcgccctggcctcgctggtcggtggcagcatcctcaagggcgccggcctggcgtcgctgtggtcgcctgcggcgttcgtgatcgtcatcgtcggcaccgttgccgcgatcctgctgcacacttcgccggcggtgttcaagcatgcgttcaagatcgtgcgctgggtcgtgcgcccgccgcacagcgatcgccgcgaactgatccagcagatcgtcgagtggagcaacatcgcccgtcgccagggcctgctgggcctggaatcccaggtggaagcgcagcaggacccgttcctgcgcaagggcctgcagctgctggtggacggcgtcgagcccgaatcgatgcggcacatgctggaaatcgaactgggcagccaggaacaccaggaccaggccggtgccaaggtattcgaggcgatgggcatctacgcgcccacgctcggcatcatcggtgccgtgctcggcctgatcgcggtgatgaagaacctggccgacccgagcaaactcggccacggcatcgccgccgcattcaccgccaccatctacggcatcgcctcggccaatctgctgttcctgccgatcgccgccaagctcaagagcgtgatctcgcacaacacccgcgaccgcgagatggtcatcgaaggcctgatctcgatcgcccagggcgagaacccgcgcaacatcgaaaccaacctctccggcttcctgcactga

SEQ ID NO: 510582 - DNA, 1017 bp, Stenotrophomonas maltophilia
atggcccgccgcaagcaccacgaagagcacgccaaccatgaagcatgggcgatcccctatgccgacctgatgacgctgctgctcgccttcttcgtggtcatgtacgcgatctcctcggtcaacgagggcaagtaccggatcatggccgacgcgctcaccgatgcctttggtggtgcgccgcgcacgatcaacccggtgcaggtcggcaacaagcaggtgcagggcggcggctgggacagcccttcggtgatcaagtccggcaccaagatcggcccctccgcgccggcgccgtcgcacgacccgaccctgctgccgtcgatggcctcgcagatgcgcatgccggtctccgtccacaaccaggaacagatcgcccgtgccgagcgccagctcaacggcatcgccgaccgccttaccgctgcactggcgccgctgatcgaccgcggcatgatcagcgtgcgccgcaccgagttgtggatcgaagtggagatcaacagcgacatcctgttccccaccggctcggccgcgctggacgtgcacgcccggcagacgctggccagcctggccgaagtgctgcgtgacgtgcccaacagcgtgcgcgtggagggccacaccgacaacgtgccgatcgccaccgccaccttcccttcgaactgggagctgtcagccggacgcgcagccagcgtggtgcatctgttcgccgaccagggcgtgcagccgtcgcggctggcaatggtcggctatggccagttccgcccgcgcgaagagaacgacagcgcgcagggccgcaaccgcaaccgccgggtgatggtcatcatcctggctgacacatcgcactcggtggatccgctgggccagcgcctgaacgcagccaccggcgccaccgacagcaccgtcaccgaacaggccgccgcaactccggccagcgcccccacctcccccatcgcaccggtgaagttgccgccggtgccggctggcagccgcgtcggcgccgccgttcccccggcaatgaaggagtaa

SEQ ID NO: 510583 - DNA, 783 bp, Stenotrophomonas maltophilia
atgcgcatctgggcagtcgccaaccagaagggcggagtcggcaagaccaccaccaccctcgccctcggccgtggcctggccgcccttggccatcgcgtgctgctgatcgacctcgatccgcatgcctcgctcagccgcgccttcggcgtgccggtggatccgccgccggccggcgtactggaactgttcggcgccccgccggcagatctttccagcctgtgccatgccagccacatccatggcctggactatgtctgcgcgcagtcggcactggccacgctggagcgccgcagcgccaaccagcccggcctcggcctggccctgcagaacgcactggcgcgtcaccagggccagcacgactacatcctgctggactgtgcccccacccttggcctgttgatgatcaacgcacttgccgctgccgaccgcctgatcattcccacccaggccgagccgctggccctgcacggtctggatggcatggtccgtaccggcgagatggtcgagcgctcgcgccgccgcccgctgccgatctcgatcctgccaaccctgttcgaccgccgcacccgcgccggcaacgaatcgctgcgcacgatgcaggatcgccacggcacccgcgtctgggaagacgccattccgatcgacacccgcatcagcaatgccgcaggcctgaccctgcccagcgctggtgaggactacccgggccgcggcctggccgcctatcgccgcgcactgaactggatcctcggtgaggatgcccgtgccctggagcaggccgcatga

SEQ ID NO: 510584 - DNA, 1215 bp, Stenotrophomonas maltophilia
atgaacagcaccggcgtactggacgactacctggacgaactgctgggcgaagcgatcgccccggcggccgtcgtgctgccaacgccggacagcgccgccccggctccggacagcacatcggaaccggaacgcgagccgacctgggatgacctgccggccgaggtgatctacgaaaccgacaccgtcgccgcggggcctgccgtggacaacgccacgctcgaagccgccttcgaggcggccacaacggccgagcgcgagcccacctgggacgatctgcccgccgaagtgatctatgagacggacgctgttgccgttgccccggcagaggatgacgcagcactggaagccgccttcgaggccgccgcaatgccggtcgccgctcccgagcgcgaaccgacctgggatgacctgcctgacgaggtgatccacgagacgaccccggccaaggccggcccggagcccacctgggacgacctgcccgacgaagtgatctacgagaccgacgcggccgacagccatcagttcgcccacactgacagccccggtctgcaggctgcgttcgaagccgctgcgggtggcgaggatgtccccacgccgccaccggccgtggttgcgcccccggcaccgcgccctgcacccgcgcccgccccggccgcgcgtgctgccgccgcgccgccgccccgcgttgccctggatgccccggccaccaaccgtcccggtacctggcaggagctgcaggcgcaggcgcaccagcccgccagcagtccgcacccgcagaaccgccgcgccggcgagcgcacctcgcgctggctgcgcctgcgctgcgggacccaggcctatgcgctggaactgttgaaagtgcaggaagtggtgttgccggtgccactgctgccgttgcgcggcacggcaccggcgatgctcgggatcatgaacctgcgtggccaggtggtgccggtgatggacctcggcctgcacctcggcgccgcagcggcagaagacgatgcccagacccgcatcgtggtgctggaagaggacggcgagaccatcggcctgcgcgtgtcggcagtggaagatgtcgccaacctcaccgattcacagatcgaacccccggataccgcccgcatctgccagatctccaatgatctgttccgcggcgtcgcccgggtcagccagcgcccgatgatcctgctggacgccacacggctgttgagttga

SEQ ID NO: 510585 - DNA, 309 bp, Stenotrophomonas maltophilia; identical to SEQ ID NO: 498726

SEQ ID NO: 510586 - DNA, 1992 bp, Stenotrophomonas maltophilia
atgagcatggacctgcaacgcttccacgccaccttcttcgaggagagccgcgaaggcctcgacgcgatggaggctggcctgctggccctggaatcggggcagcaggacgcggagatcatcaattcggtgttccgcgccgcccactcgatcaagggcggcgccggcaccttcggcttcgatgccatcgccggcctgacccacgtgctggaaacgctgctcgatgagctgcgtgccggcaagcgggccctggaaggccatgccgtcgatgccatgctgtcctcggtggatgtactgcgcgccctgctgcgcgaagccgaacatggccaggccgcagaccccgctgcggtcgccgcagtgaaggcgcgcctcgaagccgttctctccggccaggccgcaccgagcgcgccggccgctgccgcagccaaggtggacgatacgccggaagcctggcagatcgggttcaccccggcaccctcgctgttcatgagcggcaacgacccgttgcgcatcatccgcgaactggaacacctcggctcgctgcaggtggccgcgcgcatggaacgcctgccgggcttcgcccagctcgacccgctggaggcccacctggcgtgggacctgggcctggtcggcaaggtgccgcgcagcaagatcgaagacaccttcgcctgggtgctggacgactgcgaactggacatccgtccggccgcgccgccgagcctggcaacccaggcgcccgttgctgcatccccttccacacctgctgccgtcgtgccggcagcgcctgctgcgcctgccgccggcggtgctgccacccaggaagccgaaacgtcgatccgcgtcagcgtcgacaaggtcgatgcgctgatcaacctggtcggcgaactggtcatcacccaggccatgctcaagcaggtctcgcacgcgctggacccggtccacgccgagagcctgttcgccggcctggaccagctggaacgcaacacccgcgatctgcaggaagcggtgatcggcgtgcgcatgctgccggtcgacgcggtgttccgccgcttcccgcgcctggtccgcgacttgtccagccgcctcggcaagcaggtgcgcctgcgcaccgtcggcgagggcaccgagctggacaaggggctgatcgagaaaatcgccgatccactggtgcacctggtgcgcaactcgatcgaccacggcctggaaatgcccgacgtgcgtcgcggcgcgggcaaggacgaaaccggcacgatcaccctggccgcttcgcaccagggcggccatatcgtcattgaagtgagcgacgacggccgcggcctggatcgcgccaagatcctggccaaggccaccgaacgcggcctggccgtaccggacaacccgaccgattcgcaggtctgggacctgatcttccagccaggcttctccactgccgatgcggtcaccgacctgtccgggcgtggcgtcggcatggacgtggttcgccgcaacatccaggcactgggcggtgaggtccagatcgaaagcagcctgggtactggcacccgcacgctgatccgcctgccgctgaccctggccatcctcgacggcatgaccgtggccgttgccggcgaaaccctgatcctgccgctggcctatgtgcttgaggcgttgcagccgcaggccgaggacattcgcagcatggccggcgaaggccgcgtgctgcgcgtacgtggcgagtacctgccgatcctctcgctgagcgagtactacggctacggcaaccgtgcgccgggcagtgaatcgctggtggtcgtggtcgaaggcgatggccagaagatcgcactggaagtggatgaactggtcggccagcagcaggtggtggtgaagaacatcgagaacaactaccgccgtatcggcggggtgtccggtgccaccatccttggcgacggccgcgtcgcgttgatcgtcgacatcggcggactggtgcgctcgttgcggatgccgcaggccgcctga

SEQ ID NO: 510587 - DNA, 654 bp, Stenotrophomonas maltophilia
atgggtggcgttggcgtcggcgatcttgccgtccatctggccggcgatgtgggtgcccagcgccttcatcgcagcgaacaggtcgcgacgcgccgggcgcgactgctcgtcggagatctgctgggcccgagcgccatcaccggcggccacggcgtcgcgcatcgccttgttggcggcgaagtagcggtccagctgtgcgctggccgcgcgatagagttcacgctccttggccagcgccggcagcgccgagtacgcggccagctcgtcatgcacggccttggcggtgtcgtccatgcgcttgttgtagtcggcgaccttctccggctggtcgagcatgctcagctgtgcaagttcataggtgcggaattcccccagctgcgagcgcgcctcgcccaggtgctggaccgaggggatgtcgttgccagccatctcgcgcaactgcgcgttggcttcgctcaggcgcagcagtgcgaaggcgccgaggatcagggtcatcaaggtggtgagggtgaaccccacggccagcttgcgggcgatgggcagatcttggaaccacttcatgcagggtgctccaggtgggcagagtgccggcgtctgtgcgccggttcgggggtggttgcagagcgaacgggggtgcccggtggggttcggtga

SEQ ID NO: 510588 - DNA, 1413 bp, Stenotrophomonas maltophilia
atgagcgcagtcaccgtgttccgcaccttcgttgcggccagcctgtgcacggccctggctgcctgcacgatgggtccggacttcgtacgtccgcaggcggaactgcccagccactggcagagtgaggccgtcgccggcaacgccatcgaccaggacgcggcctggtgggccggtttggacgatccgctgctggggcagctggccaaccaggtgctggcggccaacctggacctgcagctggcggccaaccgcgtgcagcagagccgtgctgcacgcggcatcaccgccgccgatcgcctgcccagcgtcagcgcgagcgccagtggcgtgcgtgcacgcaacagcgaggtgggcctgaatgatccgtccggcaacggcggccgtgatgactacgggctgttccaggccggtatcggcctgagctgggaactggacctgtggggccgcgtgcggcggcaggtggaagcggccgacgcgcgcgtgcagatggccgaggaggatgcacatgcagtgcgcatcgcgctgctggcggaaaccgcgcgtgattacctgcagctgcgcgcgacgcggcagctgctggcgatcaccgaggacaacctcagcatcgcccacgacatcaaacgcctgaccgaagcacgccaacgccagggtgtggccagcacgctgcaggtgtccagcgcggccgcgcaggtggcatcgctgcaggcacgcatcgcgccgttgcggcatcgcgaatcgcagctgcgcaatgcgctggcgttcctgctggcgcagccgccgcaggcgctggacgcgcagctgcaggatgcacgccgtgactggccggcgttgccggccgtagcggtggggctgcccagtgaactggccgagcgtcgccctgacatccgtcgtgccgaagcggcactgcatgcggcaacggcaggcatcggcgtggccaaggccagtttcctgccgcgcatcaccttgaatggcgacgccggcttccaggccaagcagctcgatgatctggatggctggaacgcgcaccgtttcagcatcggtccgtcgatcagcctgccgatcttccagggcggacggctgaaggccaatctcgcgctgagcaggctgcagcagcaacagtcggccctgcagttccgccgtaccgtgctgcaggcatggcacgaagtggatgacgccatggatggctacagtgccgagcagcagcgcacggtgcagctgcacgtggcagtggatgagagcgagacggcactgggggcggcgcgccggcagtatcaggccggcgtggtcgacatgctggacgtgctgaccacccagcgcatcgcactggacaaccaggccgcgctggccaacagccaggccaccgccgcgatcgcgcgtgtagagctgtaccgcgcgctgggcggaggctggtag

SEQ ID NO: 510589 - DNA, 1359 bp, Stenotrophomonas maltophilia
atgcgcatcggaatcgtcgtcgactcggcctgcgacctgccgcaggacttcattgccgagcacaacatcgtgctgctgccgatcaccgtccgcatcggcgaagccgtgctggccgatcaccgcgatgagcaggccacgctgagcttcctgcacgcgcacgtggccgaacacggcgccgaggcggaaaccattcccttcagtgtcaaccagatccgcgacctgttcctgcagcagctggtgatcgattacgaccacgtgttctgcatgaccatcaccaagacccgcagcccgatccatgacaacgcgctgcaggccagcttcgccatcctcaacgactacaagccggtgcgccaggcggcaggctacaactcaccgttcgcgctgcgcgtgctcgatacccagaacctgttcgccgcgcaggcggttacggcggtggaagccgtgcgcctgcgcgagagcaacgccagcgtgcagcagatccgggagcggctggaggaactggccggcaacgtgcacggctacatggtcacccgtgacctgtactacatgcgtgcgcgcgcacggcacaagggtgaccgcagtgtcggcctgctcagcgccgcactgggcagcgcgctggacatcaagcggggtgctgcatggctaccgcggcgagaccgggccggtggccaagatcaagggattcgacaatgccgtgcagaagctgttcgcggtggtcggccagcgcgtacgtgccggactgatgacgccgacggtgtgcgtcagctacggcggagaactggacgagctgcgttccctgcccggctacgcacagctgaaagaggtctgcgccacccatggcgtgaccgtgtacgaatcggtgatgagcctgaccggcatggtcaacgtcggcaagggcgcggtcaccgtaggcttcgccgatgggccgcatcggttcgaatgagcgctggccacggccggaatctgcacatcgattccactgcggttgtgccagtcttgccgcacttcaaggagaactccatgcctgcgcagtaccacatcagcctgcccgacccgtccaaggcccgcggcaacgaccctgacctgtccttccattcgcagggcgccgccggtttcgccgaagagctgcaggatgccctgcgcagcggcacgctgttcgagcgctggaaggccaagcagcccgacccggacgcggtggaaccgcagtggggcgtgaccgatccggacgccaccgtgaccggcgagcagaaggacctgcgcatcaacctggtcgccaccacccgcatcgatagtgacgtgttcaagcagcgcctgcgcctgctggccggcagccactgggaactgcgcgacgtgcgttga

SEQ ID NO: 510590 - DNA, 402 bp, Stenotrophomonas maltophilia
atgctccttcgcggcacgcctctgttgatcgccctgctgctgcatttgctggtggccctgctgtactgggcgctgatgccgatgggaatgaactggtatcgcgaccatttcggctttgcttcacatcgtgacatcggcctgggcatcgcccagttctatctgttctggatgttcattggcgcccagccgctgatcgcggtgctgcggccactgtttgccaagctgctggtgctggcgattcccctggcgttcgcgagctggacactgatgcacaaccatccgctgcgcctgctgtacttcaccctcgggcccggcctgctggcactggccgcgatcgccatttccgcgtggtatgcatcacgcaaccgcctgcctgccgccacggacaccgccgatgcctag

SEQ ID NO: 510591 - DNA, 1140 bp, Stenotrophomonas maltophilia
atgatcgcgctggcccgcaagaccctggcctatgagtggcgccggttcctgccggtggtgctggcgatgtgcttcgccggcgtgctgctgatcgtgcaggcggcgctggtgctgggcatcttcggtaccgccgcgatctatgtgaaggcatcttcggccgatatctgggccggtttccccggcacccagagcgtcaactacggccacgcgatcagcgccgatgtggaaagccacctgcgcatggatccggatgtcacccgcgtcgaaccttacgagtgggtggatggcgaatggcgctccagcgcgcagggtaccggcaacgtgtcggtgtatctgtccggcatctccacccgcgacgatgcaatgatgttcgcgcgcatcctgcctgccgacctgcgtgcacagctgcgcgaaccgggtgcggtgatcgtcgacagcgccgacctggatacgctgggcgtggacctgcagaacaaccgcgcctggatcaatggcaaggccgtgcgcgtggttgccgcgcagccgggcctgcgtggccttggtggtgtcaacgtactggcttcgctggataccgcgcgcgccatcgccggtaccgacccacatgagggcagtacctacttcgtggcgggcctgcgctcgccggacctggccgaccgcgtgcgcgatcgcctggccgcgtcaatgggccaggctacgccggtcgagttctggaccgcgccggagttcgccagccgctcgcagcagtactggctgttcgacaccggtgccggcatcgcggtgttgttcatggccgtcatcgtctgcttcgtcggcgcggtgatcaccaaccagtcgttcgcgtcggtggtggctggctcagtgcgcgagtacgccacgctcaatgcactcggcgccggtcgctatgcgctggcgcgggtggtgttcgagcaggcgttgctgatcggcggtgtgggcatgttgctggcggcggccttcagtaccgtggtgctgttgatcgcgcagacccagcgtgttccggtgcagctgacaccgatggtgatcctcggctgtgtcgcgctggttgcggtgatggccatgctctcaagcatcatggcggtgcgcagtgtcgtccgctccgatccatcgttgctgctgcgttga

SEQ ID NO: 510592 - DNA, 1464 bp, Stenotrophomonas maltophilia
atgctccttctacacgttggcgggctggtggtcaggcgtatcacttcagtggcagtgcccaggaccgggcgcggactctccctgcaggcagtgctgcgccccggtgcgttgttggcaaccctggccctggccggctgcatgtcggtgcccgtcccggacctgcctgatcgcacacccagcgcctggacccaggtaccgcagggccagggcgtggcggtggacgccaggcagtggtggaaggtgctggccgacccggcgctggatggcctggtcgatcaggcggtcgccggcaatctcgacctgcagcaggccaccttgcgcctgcaggccgttcggatcgtcgctggcacgtccgactcgcgtttcctgccggaaatctccgccagcgccaagcaggtgcaggacgccgccgctgtcgatacctacttccatgccggcattgaagcgatctgggacctgggcctgttcggcgccgccgagagtgcgcagctgagcgcgcaggcttcggctggcaatgccgaggcgctgcgcaatgccgcgcaggtcgcggtgatcgccgacgtggtgcgtagctatcttgacctcaccgtggcacaggcccagcaggacctgctggcccggcagcagactgtggacgaccgcggtgaacagttggccctggtccgccagcgcctgcgcctggatgaacccggcgagctggaccgcctgcgtgcgcgccaggcggcgacccgcgcagccacggcgcaggcccgcgaaaatgctgacaacgcggcccgcgcgctggcattgctgctgggccgtgacggcccggacccggcctggcgcgcctaccgaacgccgccgaagctgggcacgttctcgttgcagcaggtcccagcggacctgttgcgccatcgtccgcagatcctgctggccgaatcggaggtgatgcaggccgccgccagcaagggctcggcgcgcgccgcgatgtacccgcggatcagcctcggcggctccattctgtatgcctacaacctcacccagaacgcgcgctccaattccgactccagtccgtcgatcggtccatacgtcgatattccgctgtgggactggggccaacgccgtgcgcgtttccatgccgatgagaagcaactggacgccgcgctgctcgggtatcgcaaggccgtgctggaaggcgtgagcgaagtggaaggcgcgctgggcagccttgcacgccaggacagcagcatccagtccctgcgtgcggccaatgatgccgccaaccagcaggtcaagcgccaggcgaggcaggtgcagctgggcctgtccagcgagttcgatgggctggacacgcaacgtgccgcgctcgcttcgcaggcggatttgatcggtgcgcagggcgcacgcgtgctggcgtttgcgtcgctgtaccgcgcccttggtggcgcaccgctgccggtcgaggctgagggcgaaccgcaatga

SEQ ID NO: 510593 - DNA, 279 bp, Stenotrophomonas maltophilia
atggacgaaaccacgcagcagaatgccgcgctggtggaggaagcgactgctgcggcgcgcgccatggaagaccaggccgtgcagctgggcgaagccgtggcgcgcttccggctggcatcgcagggcgtcgccgctgcgccggcacgcttggcaaatgcaccgcagccacgtcaggtcgcggccgccctgcccgtcaccaaggcagcaccgacacggccgctgcgggcgtcggccgcccagccggcgctggctgccgagggtgattggcaggagttctga

SEQ ID NO: 510594 - DNA, 441 bp, Stenotrophomonas maltophilia
atgaacgggatcgggatcgatgtgagcaagcgccgattggatatcggcacgacagacggccagaccctgcaggtcagcaatagcccctctggctatgccgagttgagcacttggttgagtacgcggccggccattcagatcgttttggaagccaccggcggctatgagcagactgtcctggacttccttcacaaggccggccatccggtgatccgtgccaacgcactgcgagcgcgtagactggctcaggggctgggtaaagtggccaagacggaccgcttggacgctcttgtattggcgcagatggccgcgctggtggaattgccttcctatcagccgctggagccctggcagcggaaactgcgtgagtttgtgcgggcgcgtcgacaaacgatgcaggcactgaccgtagcccgccaacagcaggaaaatggtgactga

SEQ ID NO: 510595 - DNA, 1614 bp, Stenotrophomonas maltophilia
atggcgcgttcaagcaacccgcacggccgctgccatgtcacgagcaagggaggctcgggtttggaccgattcaaaaaggtagttgaactgagcttccgcatccggccagccgggatcgcactcgcggccgtctatgcgctgagctgcctcgcctcgcgtcagttctcgctggatcagttcttcctgcccgcaggcatccgagcagcggcattgctgatcgtcccgacccgcctgtggccgtatctgctgctgggcgagtatgcgtacttcgcaacgctgcgcatccccatgatcgacacctatggcctggactgggtcatcctggcctcgacgctgctgatgccgatggcgatgctggtggtccacgtgcaccgcaggaaaatgccgtccgaggcagccacgggcctctggctcctttcattgtcgatctgcacggcactgttcgtcccggctctcaacctgagcatttcatatctgctctggtcaaatccgccgccgagcaacctgctggatgcagtggatcggacaatatttggccattttgcagccatcatcaccctcgtgccattggcgttcctctggtcgcgacggcacgtcgaacccggctgggcccgccgttttgtcgcccccaccgtctcggcgatcctgatgatgctggtactgggcctgtgcatgcagctgaccagcgccagcgcccatacgacgcggacgcatatggtgctgctcgctgcactgcctgccattgccctgaccttcatgcatggatggcgcggcgcggccatcgcaatcccgctgttaacgctgccgctgcatggcgcgacacccagcaccgggctgccctcctccttcgatctgggcacgttcgccacccagcagaacatggcggtcatgagcgttgcactgctcgcactgggttccagcatcagctatcaccatcaacgcgcacatgcccgttggcagggtgaacggaacgccctgcgtcttgcacgcagttcgcaccagagcagtgaacgtgaactccgcgagcgcgccgcccacctcaaacacttgggcgaaggcatggacagctcgctcattgaaatggtcagctggctgaaatcgcagggccaccacgcagtggccaacagcctgcagcacgcttcttccgtgcactcgcgcctgttccgtgaacaagccagcctggtctatcccacaggactggaacaggtgggtctgtacgtgacgctgcaagccggcggtgcatgcgaaatctggagcaacacccaccgcgtcacgcaaccccgactgatgggcaacccatgcctgctgaccgtggatctgcaactggccatctatcgctccctgatcgaggcagtgtcactattgctggaactggagaacgggcagctctgcgtgcgtacccgaagcggtcaggtaggcaatcgccgtggcttggttgctgtcgtgagcctgctcgaccgaggttgtacgctgtctacgcgcaccagccagcaggccgtcgagcgcctggccgggcgggtacttgcctacggcggcgcgatccactgcaagggcaatcggctgcgactggtcctgcatgaatcgatcacccacgcgtcgccggtggcagcctga

SEQ ID NO: 510596 - DNA, 999 bp, Stenotrophomonas maltophilia
atgcgcaggttcgggggagttgcaggcggtgtatttacccgcttgaggggatttgaagatcgaattcggaagctgggggcatcaggcgcctggctgtgctgcgtgctgctgatcggctttggcttgtcgccagccgcaatcgcccaggagacggtcacctacatccacaccgatgccttgggctcggttgtggccgagaccgatgccaatggcaccgtggtcaaacgctatgactacgagccttacggcgccgtggtgggcggggaagtcacggacggaccagggtataccggacatgtgagcgattcggctaccgggctgagctacatgcagcagcggtacatggatccgcagttgggtgtgttcttatcggttgatccggtgacggcgtatcagaaaccggttgagcagttcaataggtaccggtatgcaaacgggaatccgtacacctacgtagattctgatggagaagccggaaaagttgcatggctcgtcagactcaccgcaaaccaggcccataagattgcacgactgactcaggagcaggccgtcagtgcgcgccgggcgcagcagaacgtgatagcggacagaagacaagtagcgaggcagattgagacatccgcacacggggcggagggccagctcaaacatgtgggccatgaactagaggggggcggcaaaggacttccgcattaccagacagagagcgtaaggggacactccttctggggtaaggtcagcgtcggcgcactagctctggccggtacgcttgagcaagttgctgattcggcagagtacattcctgacccggttcctagacctgctgagcagtctgatattgcaagatggaatggcactatgggtgcgatcagcgagaagactggcctgcctatgccgggcgtaaagatggggaaggatggtggatttcagggttattttcgagttgacggaaggcttgattctaaaaggctggatcaagagctgagcaaggggagatag

SEQ ID NO: 510597 - DNA, 297 bp, Stenotrophomonas maltophilia
atggccgtgctcaacgatatagattccgagcttgtggcaaatgaagccgtgcttggcttcacgcttaacccagtcctccaccccagtctatcgacaaccgggcagtggctttccgatggaagttttgagtgcgatgacgaggacccggcctatggcaagcacaccatgatcacgttctggtcatacggcgaaagcgcagcggatgcgttcgagaatctagcgcgaaccttctccaacctccagcaggcttgtgaaatgctggacactgaaatcaacgctgctattgccggcgtctga

SEQ ID NO: 510598 - DNA, 1512 bp, Stenotrophomonas maltophilia
atggcatggattgagattgctgggctcaaacacatcgagtcgctgaagttcgagatacccggtcccggggtccacgttctggcgggatcaaacggtgctggcaaaaccacattgctcgcatgcctgaggcgaatatttgacagcaactccttccgccgccacttcgcgacgtcccgcgcaagtgatcagcttgaccgtgtggattcagcacgtattagctatcacagcgggaatgttggcgtgacgtacgcctatgctggcgagcgctgggtcccgacaccccgtggcaacagctcaatcctgcgaaacctgggctacccggctggctactacttcggtgcgactgccgatcgaatcacgcctaatccggaggacttcgcgcctcgtcgcgttcgcccagcggcaccagaaattcgcgaagcggccaacaggatattcggtacatcgaagttcgatcaccttcgtaacatcaaccttcgaccgggatcaggaagcaaggcgttcctgattcagaccgcagccgctccctttcgtgcacagtactactccgagaggaacttcagtcttggagaactatgtgtgttgaagatgcttcgagatcttcaggcgattcctcacggttcgcttctcttggtcgacgagctggagctagcgctgcatcctcgcgtgcagatcgccctgcttcgacatctcgaagcaatcgccggagagcggggtctgacagtaattttctcaactcattccgttagcctgctgaaggcggtgaaacgcaggcagatcatgttcctcgaagcatcggggtcggaggtaacgacggttgtgggatgcttccctacctatgccctcggagggattgcgtccacagaggaggctgcacctgatgtcttagtctacgttgaagacgacgcggctatgtacatcagcgaagcgctggtccagatgacaatcagcgctttatatgcagacgaacagcgcctctacccaactgtgcaggtggtccccgtcgggccgttcatgagcgttatcaagatggtacgtcgaggctcttcaatgctgccgaatacaacccgcgtgacaatgctcttggatcgagatgtgaaggatgagagtgttgtagggtggcgcgcaagcggaaggcacgacatgttggcaattttgcaggaggtggagcctgaaattaactatctcccttggacgcctgaagttggagtcgctgagtacctgaaaaactcaaccgctgtagcgcagcaatccattcgagagaagttcggcgaccatcggattcacatatcgcaagatctggttggtgcgcttcccttgcaaccaggtggtccacagcgggaagcctgcaaggcagcggtttcaagggtggttgaacatatcagggctatcaaggctacacagtcacgtgagcacattacacgccagcttttcgaggtgtttgccgaacactattttgagcagaatagagcgatagttatggctttggttgcaccgatagttcgcgggtga

SEQ ID NO: 510599 - DNA, 456 bp, Stenotrophomonas maltophilia
atgactcgcatcgcgtccccacgagagatcctggatgcagctgaagcacggcgcgaaagtctcgcctcacagtggctcagtgcagcacaggtcaatgccgggctgaacttgaagttcggcagaggctgccacagtgcaagtgagttgcgacgtcacgggaagctgctgggcgtgtatgtcacgcaccccatcggcagctaccgctacccgacctggcagttccgcccagatggccagcccgttgagcgattagccaagatcctagcagtgttgcgggactttggtcctttccagcgtgagccatatggtctgcgtcgcagtaccggttggggcgaggcggagtggttcttgtcgccgcacgtgttgctttggggcgcggtaccggccgcgatgctgagtgtagacccagcccgcgtgttgcatgcagtgcagtgcgagttcgaagaggatgtctga

SEQ ID NO: 510600 - DNA, 450 bp, Stenotrophomonas maltophilia
atgaagccgacgatcttggcacttgaccttgagggaacgctcatctcaaacgcaatcagccagattcccaggcccgggctctactggtttcttgaggaaatccagacgctgtttgatcagctgacgatgtttacaactgttcccgaagatcgctttcgcagcatcgccacgctgttggctcgcgaaggcagtgccccggcctggttcgtggagctgccctacatcaggtggtcgggaaagacgaaagacctacgtctcgcctcgccaaatctgggtgaggcactactacttgatgatcacggcccctatgtccatcccgggcaggagcaactttgggtccaagccccgttgttcggttctccctattcgtcagacgatgatgggctcaacctggtactccatcgtttgcttgatcgcatccgtaatgcggacgctgacttgcgcccctag

SEQ ID NO: 510601 - DNA, 1263 bp, Stenotrophomonas maltophilia
atgattacctttgatcccccagcgcttgaagcgagtttgcgtgacgcgatcactcgattaggtagcgccttcggaatcgattgggaaggaagtgaactggatcccagccttgatctggatctacgcgaggacgctgttctttctttagacacaatggtcaggctggatttccccagttcagaagagtcagctaacttgccggtaaaagagttggtggcccttgcgcttgaggttacggatcaggcgacaacctgcgacggtctcatctatcactcgagtcttcgaacagtagtcagagtgaagtcacaggaccttcgatctgagggattcgttgaaaagatcagctcattggaatccagtgccggcaggaccatcgccgaggtagccgggcgtcccgcatcaattgctctgttgtcgctgtcgacacacttcggtgcagcggttgtggtaatggatcactactacgacaaatacaatccaccgctgggctgggatgaggtttttgtcgaagtacaccatccgcaaggggcaacgaaagaagatgccaatgctctagtacaagcctatctttttgagctgcacgtcaccctaggcttggaattctcggaggctccccgcccagtcgattttgacatcgagtaccccgaagacgaggagatcggggacttggtccaaagggcagccagcatgaggccactacttaccgggccaggcctcttagaagtactttccgagttcaatagcgcaaacggcctgcatgtcgacgacgccgcgctactcgtctacgcaaagtgcattgagtacgtgtctgccacggtagtcagggagaagcagtacgaggaccttcgtaagcgtctattgtccagagatgcgctcagccccaatgcagagttcatggatgggctactcgttctcttcgaggagaatcgaatcttcacccgcgacgcagaggcgctgcgtttgtcgattgagcgctgctgtgatccgcttcctatgaagccacatgcaccacggattcttcggagcttctccaagatcgaaccaggcagttctgcggagcagcgcagacaggcgctcgtggacctggctgctgtgctctctgcgtctaggaatcagctcgctcacgccaaggccaactatcgtaccactgggaaggagtgcccacctgagcagctttcgggcttggtctcatgcgcacgaattgctgccgagcagtgcatccgttggtacgcttcacgctcagatgagctacgccgaacctga

SEQ ID NO: 510602 - DNA, 324 bp, Stenotrophomonas maltophilia
atgcatagaaatggggtagagctagggcggtttgctcgaaagctcgcgggcatcagcggctctgtcaaggatcagtactacatcgcacttaccgaggagtactacgatatcttggagaagtacgggaaccacaagcctattgactacttgctcacgcagctgacggagaagccgagcaccgggtctgaatggctaacctatgtagtgcggtggctcaaggctcgggtcgtcaccatactcatcttctctcactatttcgtagcgatgacctttgttgggtacgttttctttaagctcttcctggccatcagaatggtagaatag

SEQ ID NO: 510603 - DNA, 288 bp, Stenotrophomonas maltophilia
atgcgcgaagcccggcatagggctgggatgacgcttttttatgtgtcagagcagaccggcgtcgatcctgggcagatctccaaaatggagcgcgggaaaatggtcacgctctccaaaaatgttcaaaaaatttgcaactttctaagattgcctgcttttccggggccgtcacccaagactgagcttggcgcgagggttgatgcgttgatagcaggagttccgggcagcgaggccggggttgccaaacttatcggcgcaatcgaggagctggtccgaagcacgacctag

SEQ ID NO: 510604 - DNA, 1209 bp, Stenotrophomonas maltophilia
atgacacgcgcgctaccccagcctccaccactctcgttgccagagtatgctcttaaggctcgaagaactaatcgcttcgagaacacgcccgacgagttcgacaacctgcggttcgggtactttggggagacgggaggactgctcgcctcggtaaagaagtctgtacgcgatcagttgacagatccggagagcgcgctagccgccgaagagcttggcgacgcactctggtacctgttcagcacggcggcctttcttggcatctcgcctaatgagcttggcgaacactgcatccgtcgactgcgcaaacggttcggagacaacgatcgccccgtgtctgaacccgtaagctttaggcagattgacggacttcttgatacccacaaagaaggatgggatctggacagagtcaggcagctcggcaaacttgctagtagcgccgggagcttggccgacacgtcgttgactcaacttcaagcgctgagccccccagcccagcgggaacactttggcaccctgtttgcagaatgggtcctcacctgtggatgcttcgacctgcgcgtcgagagcgttgcgcgcgacaacctctccaagatttctagccgatggccgggtgacgagaggatctatccagcctacttcgacccagacaccaagttcggtgcccatgagcagttccccagggtgtttgagatcgagtttgtcgaacgtgatggatatgtggtccagatgctcaacggcgtatttatcggggatcgcctcaccgataacagcaacgaggcggacgattaccgctttcatgatgtttttcatctcgcctacattgcctatcttggatggtcgcccgttgtgagggggctgcttaagcgcaagcgaaagtcggacaggaagattgatgagaacgaagacggcgcgcgcgccatgatcatcgaggaaggcattgccacctggatcttcaatcacgccaaacagtttgagctctacaatggcgtgaaggccggcaaactcgattacgggcttctgaagcagatccagagcatggtcgatggctacgaggtggcccgatgcaagctgtggcagtgggagctagcaatcctgaagggatttgaggtgtttcgcctacttacaatgcaccgtggcggagtggtcaaagttgacatggctaaccacgaactttcgtttcgacctattgatccccaagcaacgcaatga

SEQ ID NO: 510605 - DNA, 672 bp, Stenotrophomonas maltophilia
atgaccccaaacgccttcgttaaagcactctccgcccttagcctagacaacgttttcaatccgtatgcggatgtttgccctgtgcacgatcgtatggatgcggctgagtgcaggagaaggaatctacgcacctacctagcagcggtgtcagagattggcgtggacacgatctggatgggtagggacttgggttatcgaggcggtcgtcgaaccggcctcgccctcaccgatgagttccatcttccggagctggccaggcgctatcccggctcgcattcgcaccaggctacgaaaggccccgcccttgcagaacgtacagcagcagagatttggtccgcaatcagagcaatcgaaacgcccccgctcttgtggaacgtattcccgcttcacccacacgagccggacatccccttcaccaaccgtcgattcacagcccgcgagctctcccaagttgaagagttgaatagcgttctgatctcttggttgaacattcggcacatcgttgcgatcgggcaggacgctgcgtcgtatgcgcagcgttttggcgtcaaggtgatcaccatacgccatcctagctatggaggagtccgggaatttcgagaaggcatgcgtcgcttctatggactgccagccaacgccttggaccgggcctatcaagcgactctgctgtga

SEQ ID NO: 510606 - DNA, 798 bp, Stenotrophomonas maltophilia
gtggctaaggtatttacaggtgaaaggctagttcctgtctgggtctccgcagtgcgtagcctgaacgaagcccctcagaggacggatcgaaactatgtcctggagattgcctcctcgacgatcctcggaggcggcgacttggacgtcatcaacgaagttgacggtgtgcttagagcccggggcgatggcggtggcgttttcacagttgccgggaccatctttccgcaaggaccatatctgcgttttggccgtcccgacttctacaaacgttaccttgagcccatgaagtcagggaagaagcaggggacatgggggacgtacgcgatgcgcatgatggatcgcgcccaccccaaatccggaaagaccagtaatcctctggaaacgatcgttagcaagctccggacaaccaaggacgaccgcaaaattctgtccgcctacgagctcggcgttcacgatgtgaacgacctacttgacggcgaagtaggttgcgagcttcccatctacgagccggcgatagacggagggcgcgcgaccaacatcccctgtctcagccacttgagctttaagctcgccccttcgaagggcgcggtcgatctgaccgcagtctatcgatcgcaccactacgcgaaaagagcccttggcaacttggtcggactgagtcagctattgcactttgtcagcaaagagtccggctacgaccccggggtcttgacctgtgtgagtacgctggctcacttggatgtgagctcgttcggaggtgccgatgctgcagccgcgctgataaaacggttgccttag

SEQ ID NO: 510607 - DNA, 633 bp, Stenotrophomonas maltophilia
ttgatcatcaaggaagaaatagccctgccgcaggcaaacaatgctgcacgcgaccaagggcagcgcccgacctgtattgcgttcgccctatcggagctaaatctccgattcgctccgcagagtgaggtgctgagtcccgagtatgtctatcaaggtgccgccacactaacgtccaattgggcctcgggtgatggtgtctccttaggactcgcgctccaagtggcatcgttcgggcaacctaccgagcaggacttcccgtatcaggcaacggagccatcaccgcctgtttcgttgccgccagttggtttgcgcctctatggaagagcgctggatctgcttccgcacgatcctgattcaattgccgacgcgattcgaaggaatcttcccgtgggcatcggcatgaggttgactcaaagcttcttcattccggcgagcggagtggtcacgtttgagcagttgcccctgtccaacgcactacatgcagtagcagttgttgggcttggcagggccgatgacggcgccccctatttccgaattcgcaacagctggggcgacaagtggggagcacacgggcaggcatggcttcccgaaatttacattcgcgagcacgttatctgtgcgtttggagggtga

SEQ ID NO: 510608 - DNA, 1017 bp, Stenotrophomonas maltophilia
atgctccctcacatcaagaacgccgctaggcgagccgctgagatctatcaagactccggtgccaaggcccgtgtggagcacgatggctatacgcgtgtcgatccctttttaatcgcagggagggaaggcgttcctgtacttctgcgacccatggacaagcttctcggggcgttcatccgagacgaggtgtccggcatcctcgtcaattccgagcggtcggcgggactgatccacctgacgtgtgcccacgagctcggacattacttcatgggtcacggcactacagccgacgattcgatggaatttgggcccaaagtggaacgtcaggaacaggaggcggattggttcgcttaccaactgttgacctctcgcagtctgctcgcaaatatcatgcgccgaaagggctggagcattcagtcactcaagcacccggttacactttaccagctgtctctgaggctcggaattagctatacggcgacggcttggtctctcgcacgacaaaaactcttgcatactggtgaggtcaaggaactcctgaagatccagccgatcgacatcaaacaggcgctgctcaaaggacagaattttgaatctcgtagggaggtatggctcctcgacgaaagtgatcgggcgagcgtgctggagccgcgtgcggatgaccaggtcttggttcgtttgagaagcaatgcctcatcgggctacctctggtcgttgactgagctagcatcggaaggtttccagattcgcccgatatcgtgtcgaaccgaagaggtggtcgatccgaggcagatcgttttcggcgcagccaccgcggaatttctactgacctacgacgaccctgcgagtcttccagacggcgaaacgcgtgccttttctatgcaagagcagcgaccttggttgaaggggggcgaagctatcgcgacgttcgaaacgagggctaaatttgagcaaatcgagcctggtctgacgcgagtcgctaagcggaacttgttgagcgaggcgtcgatagcttga

SEQ ID NO: 510609 - DNA, 363 bp, Stenotrophomonas maltophilia
atgactagtctcgaaaaggatgctcagcgggcagggatggcggagcggctgcggcagtctcgggagtatgtaggtctatctcaggaggaagttgccatcgcccttgggatctcgcgtccagcggtaactcatatcgaatctggcagtcgaaaagtggaggcgactgaactaaacatcatggcgcgcttgtaccgaaggacgcttgaatacttgctcaccgggagggagccaccgccgcaagcaccagagcagttggctttcctggcgcgggcaatcaagggtctctcaggccgtgacctcgatgaggtggcgcgtttcgccgaatttttgaagcaatcaaccaaggtcagtcgaaaggagtaa

SEQ ID NO: 510610 - DNA, 282 bp, Stenotrophomonas maltophilia
atgaacgacaaaaagcaggaaatcgaagcgtgtcttgagaagttctgggacgatatggcgattgatgtcggtgaggatcctcaagacactggctccctgatcggtgcgcccttggattcattgaccgtgatggaggtgatgctggaaatcgacaagttgctcaatcgaaagattccagcggacatcgtgatccgcaaaggtggatatgaatcgcgggagcaattcgtcgaacaattgaccgcggaggttctaaagtacgtggcggagcatcccgatgactag

SEQ ID NO: 510611 - DNA, 270 bp, Stenotrophomonas maltophilia
atgtcgcgtcagccaaccatttcgtacaacactggcctcggggttgatgggaggccaaaggcaattacagctgattactacctggccacgactaaggatgtgatgcagttctattgcttcgatgaaccggcagaacagggcagcgagggcaggtgggagctcatcgatcatttggatcgaacgcgtctactcggcgccggtgacatggcgacggccaagacttgggctaagcgcctgggcctcaagtcttggacctatgtccgcgtctga

SEQ ID NO: 510612 - DNA, 2523 bp, Stenotrophomonas maltophilia
atgaacgccggcgacggagtgtcgatgtctcatgtgccgcagttgcgcgcattgctctttactgatttgtgcgactcgacaagtttggtcgagcgtatcggtgacgcggcggcggcgaacctgttccagcaacatgacagattagtgttgcgactacagcaccaatggaacggattgttgattgatcgctccgatggcttgttcctggtgttcgaaaggccgatcgatgcattgggcttcgctctcgcctatcaaaatggccttgcagagcttcccacggcgaatgacgtcccgctgatggcgcgcgccggattgcacgttggcgaagtgattctttggcgcaacagtgccgatgccgtggcggtaggggccaaacgcgttgaagttgaagggctcgcaaagcccatggcggcgcgcctcatgcagctcgcgctacccaggcagatcctcgtttccaacatcgccgaatcagtcatgcgccgctcgacctcgagtcttggtgagcagtcgaaccacctgaagtggcgttcgttcgggcgatggcgcttcaagggcgttgcccagcccatggagatctttggcgtgcagggggctggcatgccaacttgttcgcgaccacggcccacccccaaggccaatcggctactgccgctatggcgcaggcccgcggccgtggtcgctcagggttgtctgataattggtgtcgtggccgtcatctggttcgcgacccgtcctgaggcggcaattgcatttgccgaacgagactgggtggtgcttggtgatgtccgcaatttgacgggcgaaggcgtactcaatgaagggatggagcaagcgtttcggattagcctggaacagtcgcgctacgtaaacgtgctgggcggactcaaagtacgcgaaacgttgacgcagatgctgctggctgaagacacacccgttgccccggacattgccattcagatcgccaagcggaatggcgcgcgggctgtactgctgccgacaattcgggaggtatctggaaaggtgcgggtgtccattgaagtggtagatccatcgacggaacaggcggtgtataccctccactccgatggcattggtctttcttcggtcctgcgatcgaccgacgtggttgttgcccagctccgaaatcgcctaggtgaagctgtcgccgaggtgaagcgtgcctctgcaccgcttccgagagttgcaacatccaacctcgatgctctgtacgcatactcgcgggcacagattgcatatggcgaaggtcgtgttcctgagtcagtccgcctgttcgatgttgcgatcgggctggatcccggcttcgcaatggctcatgtcggcaaggtccgctcgctggtggcgctcggtcaccggggcgaggcacggaaggaactggaagctatcgagccgttgagttcacgcctgagcactcgcgaactgttgtacttccaagcttgggagaaggagatggtggcgtcgagtgaggctgcatcgcttgacgcttggaagacacttgcagatctgtatctggaccaccacggtgctcatgcaaatgtggcgctcggagagctacagctgggtcgctatgtcgaagcggaacaggctgccaggcgctcaagcgctagccagaacgggttgaggagcgccgcgctgcagttattggggcgcacgcagattgcacgcggcaagttctccgaagcattggacacacttggtcaaagcgtgacagcagctcagggacagcgcaatcgccacttggccgctgcgcttgcagctagtggcaatccttcggctgcgcgcgatgtgctgtcgaccttgccgacgaacgggccgtctgcatggctggaggggcgatctgtagagattgacaaccagcagggcattgaagcggtcatcgccgcgagaaaatctgccgagagctgcgaggggcccgattccatctgcgagttcctcgaggttgtcagcttggtggtatcagtagcagcagatcagtgcatcactcctgcggaggtccgtcgggtatcggagccgctgctcaagcttgcagcggaccagaatgagtttgatcgtggtcagcgtctctacttcgctcttgccgcgatctatgctggtcaacgttccggtatccacgttgatcagggggcgctatccaggctcggcgagctggccaggagcatcaaggacccgcgaggtgagcagctgtttgccatggtccaaattaatgacaaacggatgcgtggggatcgtgcgagtgccgtgcaggaaggccgtgccttgatagatggatcggagcttttccaagtgcacagcgtactggcgatggcgctggccgaggatgcggagcacgttgcagaagagcaggagattacctggctacgcacgcatcgaggagtcgcctatgcggagttcgcaggttctgcagtccttcaggcgttgaacgtccgtgacagccgcttggagccccgcacgataagttgtcgaacaacggcactgagccacagggagctatcagggagtgggtga

SEQ ID NO: 510613 - DNA, 291 bp, Stenotrophomonas maltophilia
atgtcgacgaaaaaaaaaccactttccccagccgatgctctgaagctgctcgatcttctcaccagcaacgaatcatttcgcctggcgttccaggccaatcccgccgctgcactggttcagatcagtaccgatgcggccgaggcctccgctgaatgcttgatgcctggcaagctggccgatgcctcgacgctggccgcggcgcgcgatcaactgctggagcagttcacgacccgggccatgttcagcctcccacattgcttcatcgacaacggcccttcacccactccctga

SEQ ID NO: 510614 - DNA, 576 bp, Stenotrophomonas maltophilia
atgctgtcattggtgataaagcgtactttgaaggcgcatgctgtggcccggccgggcgaggacatggagtttctgaagaagaacattccctcagggggagggctacatcccttggaaacctacgtcatctctctggatgttgatggcctgcaggcgggtgtgtaccactaccatccgattgagcacgctttgcgcgaggttccacatgaggagacagacttgcggaggtccgtgctgggattcctggcaggtcaggattggttcgcggatgcgccgctgcacatcgtgcaggttgcgcgtttctcgcgcagcttctggaagtaccgaaagcatcccaaagcctatcgtgcagtgttgctggatgccggccatctctcgcagcagtggatgctgtctgcgactgaactcggcttggctgcctatgtgacagcggcgatcaatgagatagacgtggaggtgctactggatctggacggtattgaggctagtccggtaatgatgtgtgggttgggctggcgagcggagatccaaagcaccagtgagttcgacccgctggagcgggtctggcgcgactga

SEQ ID NO: 510615 - DNA, 1179 bp, Stenotrophomonas maltophilia
atgacacgcggtaggaaaaggaagttcaacccggagatccctggtcacatcgaccagggatctctgccgcgcggcctgtattgggaggatggccgttggtatgtgctggatccgcatcccgagggtgtcggtcggatcaagaccacggtggccaacggtaaggccaggctgtcggaccttcacgccatcatggaagggcgcggtggtggcagcgtgcgcggctcgctcgatcacctgacggagatcttcaagaaggccagcgagtacctcgacctctctgccaagtcgcagcaggggtacgactactgcgcggcgaaagcctgcggatatctactgcgcgacggccgcaggcttggccagcagcgcgtagagcatctgtcggtgccggtgctgcagcgcgttgtcgagacgatggccacaggtcggccggccatcggcaagctgccggcgatcatcccgacgcctgcagcagccaatcgcgtggccagctacctgcggcggctgttcgcctggggcatccgtcacggccactgtgctgccaaccccgctgacggcatccgcaaggtccgcgagaagcgcgatgcacgcatgcctgaccatgattcgttcgaggccgtgctgcgctacgcccgcgcgtgcgccgcgctcaaggcccacaccgccggcagctgcccgccctaccttcccgccgtcatggtgctggcctatgccgtgcgcctgcgcggcatcgaggtggacacgctcaccgacgccaacgttctgcgcgagggcatacgcagcaatcgccgcaagggttcccgcgacaacgtcacgaagtggacgaaggaactgcgcgacgccgtgaggtggctgcaggcgtacaggcaagagcggatggtcgcccatggccgacccacgccgatcaacccggaacagcgccgcctgatcgtcacagagtcaggaacacccctgagcaagtccgccttggacagcgcctggcagcggttgatccgacgtgccatagccgaggggatcatcgacagggagagccgcttcgcacttcacggtctgaaacatcgaggcatcaccgacagcgaggacaaggcatccggtggccacgtaaccgaggccatgcggcagctgtacgaccactctgtgccagtggtaaaagcagccgtgaaaccaaagaaagaccgttaa

SEQ ID NO: 510616 - DNA, 225 bp, Stenotrophomonas maltophilia
gtggcgcagatcctgcacttcaccgatctccaacggatctgcgcccctgacggcccgccccccacaccggcaacggtggagcggtgggcgggggatcaagggattctgtataagtacgaccgtcgcggccgcatctggacaactacggatgcggtgaacgtcgccctgggcctgccggcagcatcggcacagccccccgaaatgacactgctggacctggtttga

SEQ ID NO: 510617 - DNA, 273 bp, Stenotrophomonas maltophilia
atgactcagcagcagaaggatccgccgcgcccgctgccggcatgccccagcggtcaccctgccagatacatcatcgactgccggcggatcgaggcgcgtggtggccacttcatcgaatgccgctgcagccgcacggcgaagcatccgaccttcgacttggcatgggccaactggcacaagcagcacagcctgcatcccattgccgtcgctgcggatgaggcgcggccgagcaacgtggtgcagatgcctctgttcgccggatcgaggggatag

SEQ ID NO: 510618 - DNA, 231 bp, Stenotrophomonas maltophilia
atgaacctcgaccgtgtaattcaggtatcgctctatgcgcagcgccgtggcgacaccggcgcgctttccaccggtgagtcgctgactgctgccttggtgctgaaccgtcatgactggctgactgaaatgggctacaccgtcgcccaggcactcgaccggatcgactcggattccattgagcacctgtccgatgctgcacgttgtgtcgcggagggcgtcgaccatggctga

SEQ ID NO: 510619 - DNA, 177 bp, Stenotrophomonas maltophilia
atgcttgagctgatccttctctgcctcgctccggccgccggcggcgcggccctgcacaagctgtggatcacccgcccggcccgccagcgccacagcggtctggccgtggggcagatcccgcagctgctccgccgccgcacccgcatggccgtgcgccgcgctgggggtgctgaatga

SEQ ID NO: 510620 - DNA, 315 bp, Stenotrophomonas maltophilia
atggctaactcccgccgcctggccggcatgaaggtggccccggctagcctctcccgtgtcctctacggtccccagcgcagcgggaagacactgcacggcaaggccatcgcagcgagcctcgggctgcagcacgtgcgcgacctggacgacgtccaactgtcgggcgaccgactgcagcgccacggctacctctatttggcgaatgcccgcgactacgcgcaacgcgccgccgacttgatcgggagcgagctgctgcccatcggtagcgcgctggccatgatcggcgccagcagcgagggggtggcccatgcttga

SEQ ID NO: 510621 - DNA, 426 bp, Stenotrophomonas maltophilia
atgcacgacatgatcggcaacaccgaccacaccagggcaaatacggaggtttccggcaccggaccaggggcgaaggctatcacgggtgacggactgtgtggatttgcccccaccggcgacaaggcctgcagcgcaaccctgaccatgcacatcacccacaaccaggtgatcttcaccgcccagctcgatatgggtggccataagaccgcccagcgcgtgctcgagcggcgccggggcagcaaggccggctgggtgctgaccgggggctgcgaggaattcgctgtcgacggggactggatctccgccgagctggccgccctggctgaccgcctgcccttcccgttcgaagtggccaacatgctgccgagcgccaaggccagccacagcgctgtggccgctgccgctcaggaggtggcccatggctaa

SEQ ID NO: 510622 - DNA, 2694 bp, Stenotrophomonas maltophilia
atgcaggaagagatccgccagcaggttctgtcgcgcatcgagcgcgactacggcctcaagcaccgcaatggcacgccctacatgcgcggcggcaagtgcccgcactgtggcaagaaggagctatacaccagcttccagaccccctgggtactgcgctgcggccggcaggccaagtgcgggcaggaagtgcgtgtgcgcgacctgtacgacgacctgttcgatgactattccaaggccaacccgcagacgacagaagcgccgaacgcagccgccgatgcctatctggccaccggccgcggcttcaacaccaagccgctgaaaggcctgtacacgcaggagagctactacgaccgggtcaagcgcgaaggcaccgccactgtccgattccccctggtcaaaggcggctggtgggagcggctgattgatcgcccacaccgcttcggcaagatgaaggcgcgctttgcccccggcgagagctatgccggggtgtggtggagcgcgggcgcgaaggatctgctgcgtaccgcgcgccaggtgtggattgtggagggcatcttcgacgccatcgcgctgctgcagcgcggtgtctgcgccgtcgccgccatgtccagcaatgcctaccccgagctgtcgctcaaggaactgcgcgacgctcggcccaacgacctgcccaccctggtgtggggactggacaacgaaccgagcgcccgcgcgtacaccgtcaagcatgtgcgccgcgccgagaagctgggcttcatctgcaaagcggcacagatcgagcagccaggcgataagaagaccgactggaatgacctgcacctgcgcgcccaagcggcagaggaaggcgatgacgtctggcaggcggacattgacctggcactacacaatggcgcgctgctactggccaagaccgccatggaaaagggcctgatcatctacgagcgcgagaagcgcacgcagttccatctggaccaccgcaaccggctgtactggtttgagttcgacccggcgcggttcgacaagctgtgccgcgaacagggcacccgcaaggaagacatcgaggaagaactggacgaagaacaggtggagaagatccgccgcgcctgctgcaacgtgcgcgagatcgccaactgtttcccgaaggcgctgtactaccagcgaaacgaagtcactgacgatgcctggtactacttccgcgtggagttcccgcacgatggcgccgctgccacaggcaccttcacatcgtcgcaggcgctcaacgccccatcgttccgcgaccggctgggccacattgcgcgcggtgccattttcgatggccccgccggccagctgctgcagatcatgaagatccagctggacaacatcaaagaggtccacacggtcgattttgtgggctacacccccgatcaccaggcttacatctttggcgacctcgccgtgcgtcacggcgagattgcccaggccaacgccgaggactacttcgacttcaagaagctgcgcatcaagaccacacagcgctccatccgcatggacattcagcgcgaccacgacagctatcgcaccgaatggctgcagtggttgtggacctgctttggcaccaacggcatggtggccctggtgttctggttcggctcgctgttcgccaatcagatccgcagcacgcacaagtccttcccgttcttggaggccaccggtgaggccggcgccggcaagaccaccctgctgaccttcctttggaagctgctggcgcgcagcgactacgagggcttcgacccggctaagtcatccaaggccggccgcgcccgcgcgatgggccagacctcgggtatgccagtggtgctgctggaaggtgaccgcgacacaccggatggcgcgcactccaagtcgtttgagtgggatgaattgaaggactactacggcggcggcacgctcgctacccgtggtgtgcgcaatggcggcaacgagacctacgagccgcctttcaggggaacgatcgttatcagccagaacgcggcggtaagtgccagcgaggcgatcatgacccgtatcgtcaagctgcacttccgtaagccacacgccaccacagagagccgtcaggcggcggacaacctcaacgccctgcaggtcgagcatctgagctacttcctgatcaaagccctgcgcgccgaagcacaggtgctggagaagttcggcgagcgcgtgcgcttctacgaggcgaagctgcgcgagaacaaggatctgcgcatggagcgcctgatcaagaaccactcccagatgctggcgctgctcgacggcctgcgcctggtagtggacatccccaaggagatggtcgaggaaacccggcagaagctggtgggaatggccttggagcgccagtcggcaatcagcgcggaccatcccctggtcaatgagttctgggagacctacgagtacttagaaaccactggaaacggggaacggccggtcctcaaccactcgcgggatccgcagcgcattgccatcaacctcaacgagttcgtggccaaggctgcgtactacagccagccggtcccggatctcaaaaaattgcgcgacttcctgcgtgattcccggcgttacaagctgctggacgcgaatctcaccgtcaacagctgcatcaaaaccaacacggccggagcgggcgtagccgttcggtgttgggtgttccagaagtaa

SEQ ID NO: 510623 - DNA, 282 bp, Stenotrophomonas maltophilia
atggacaagaacaatcccggctcactgccccctcctgccagtaactccggtacgccgctacccaagggcttgaacgccaggagcaagtacagccaggtcgtcagcggagaagactacgaccgactgtggcgcatcgcctacgcggtggagttgatcgcggcattgccggcagaggcggccaaggtgttgggcatcacggctgaccacacgtccgccgttgccgagtacatctccgacgacctgcgcgggatcctctcccggtccaagccagcagacgaataa

SEQ ID NO: 510624 - DNA, 291 bp, Stenotrophomonas maltophilia
atggacgccgttactccctcccttcgcccggtaatcgagctggatacgtcggtgcccggcatcgtcctgcgctgctcgttcgaccagagggacatgctgtatctcgccctggtacacctcgccagcggtgcgccgctgaccgtttcggcgcaaaccagcgacaccatccgttctgcagcgatttacagcctgcagtgcggctcgatggtgtacctgctggctgacggtgaagcgcagcgattcctcacgtggctccgcaacggcggcagcactccgaacggagcgaactga

SEQ ID NO: 510625 - DNA, 240 bp, Stenotrophomonas maltophilia
atggcgcatgacgccccttccacgcccggcgcaaactccgcgcgtcagatctcgctcgttttcggcttcatcgccgacacccttgaatggccccatgtcgactaccaggcgctgatcgtgcgcttggaggccaccggcaagcctgcgctgtccatcaccctcgatgacgccctggcggcctacaccgcccagcagagggcacgcagcggcgacgctgatggccagcagggggcgcactga

SEQ ID NO: 510626 - DNA, 378 bp, Stenotrophomonas maltophilia
atgagcgctccgaccagcagccgcgcaacgttctcctgcgaagcctgcgatacgccgttgctcaagcgcaccagccgactgcaacaccgccatctgcgttcggatgtgtgggtgtgccagaacccgctgtgcggagcgacctacgcaggcatttccgagctgaccagcatcgcaagccccagcgggattcctgatgcgccggcatgcgaactgccaccgacgccgggctacaccagggcactgctgcagatgcaatggaagatggagcacggctccaggcagctggacatgctggatgcaatcgcggtggtcgaaggctcccggcttgatgccggcagcgtcaccgacgcacggccgccccaagcttctgtcccgtaa

SEQ ID NO: 510627 - DNA, 312 bp, Stenotrophomonas maltophilia
atggcggcacaacggattggtgtaacgaagctgcgcacgccagaggaagcccggcagttccttcgcgacaacggcatcactgttgtcgagttcgcgaggcagaacggcctggaccgtcacgcggtcaacgatgcacttcgcggcgtcggcaagggcaacttcggcaagtctcaccaagcagccattgcgctcggcatcaagcgcgatccggattcttgcacaaaacccgccaattcccgacagaaacccacacggggtgccacgtcgggcaaagccggtgccgccaaggtggggagcaagaagcggaaatga

SEQ ID NO: 510628 - DNA, 438 bp, Stenotrophomonas maltophilia
gtgagtgtgggcgaccggctgaaggaagaaaggaatcgactgcgcctgagtcaggaggccatgggcatggcctgtggcgtgacgaagcgcacgcagatccactacgaaaaggatgaggtcggagcgagcgccgcttacttggcactggcccatgatttgggcatagatgttgcatatgtattggtcgggaagcgcgaacggctcgctccctctgacgttgatctgctcgatgcctggcgcgctgcgccagcgcccgcccgtgctgctgcgatgacggctttgaccagcagtgtttcccacgccagtaccctgggggcggcccctcgtacgcagttcaacgacgccaccatcggccagcagttcagcggcgatgtggatctgcgcaaccaaaaggtcgttgtcaagcctgcgaaaggatcaaacaagaccgcacgctga

SEQ ID NO: 510629 - DNA, 606 bp, Stenotrophomonas maltophilia
atgaaggagctgttattgaccttggcgctggctggtctcaccgggtgttctctccccgcagccccgcaggccgaaaaggcatcagtgatcgatactgcccaggcgccgagcgatagcgcgattgatccggcggcgatagcaaagctgcatccgaaccttgtagcggtcgatacgcaggcgttcgccacgccgccccgactggtgatgacgatcaagggcgacgggtggggcgagtcggacattctgttcggattcgccggtgacgcgacttctgtgcttaagaagatggcaaagaagaagatgattccagttgaccacggcattaccttcatacttcgggttgaagcggaatccagtggccagacgcaagagcgcaacgccctacacatcgcggttgatcagcaggttgtgcagtcagttgccggtggcgctgatatcagcgcacaggcgcttctggattcttcggacgttgaattcaatggccggttggggcgcgggatcacagagcgattctgcgccgacgacaagtatcaaggcgcaggtggtttactgcgcactgtggaattctgcaaccaaacactgggcgatcaggattcgtcgtcctga

SEQ ID NO: 510630 - DNA, 1038 bp, Stenotrophomonas maltophilia
atgaacggccgcaccggctacccggtccccgcctggcgcgtcaccctggacggcaaggatctgaccgaccgcatcgccccgcgcctgatcgagctgaccctcaaggaatgccgcagcggcgaggccgaccagctggatctgcggatccacgaccatgacggccgcatggcgctgccgcgcaagggcgtcacgctcaccgtggcgctgggctggcgcgatgccggcctgatcgacaaaggcaccttcgtggtcgatgaggtcgagcacagcggcccgcccgacgtcatcaccatccgcgcccgcagcgccgagctgaccaagacgatgcggacacggcgggatcgcagctggcacgacaccacggtgggcgcggtgatcggcgccattgccggcgagcacagcctgcgcacgcgcgtggcgcccgccttggccagcctggcactggaccacctggaccagtccaacgagagcgacgtggcgctgctgacgcggctgggatcgcgcttcgacgcggtggccacggtcaaggccggcaacctggtgttctcccccatcgacagcggcaccacgcccgccggcatcgaactgccccacgcatcgatcacccgcgccgatggcgacagccaccgtttcagcgaggccgagcgcgatacctacagcggcgtgcgtgcgtactggaacgacaagaagggtgcccgccgcaaagcggtgctggtgggcgcgtcgaccaacgccaagaacctgcgcgagacctacgacagcgagaagaccgcacgggagcatgccgatgccgagtggaagcgcgtgcagcgcggcgcggccaagatggattactcgctcgccctggggcgagcggatctgtacccggagcagcgcatcgacgtgtccgggttcaaggccgagatcgacgggcgcacctggttgatcgcagaaaccacccacagcatcaccggcagcggtggctttaccacttctctgatgctggagaccagcagcagcggcactgcgaacacgggcgatcaggacgacgaatcctga

SEQ ID NO: 510631 - DNA, 402 bp, Stenotrophomonas maltophilia
atgatgatgtgccttggaaccttcgtgttctccctgcgggacggcgcctatgagcagctgacccgcgacctgtcctggcgccacgcccgcaccgagcgggtgggcgcacgcgccgcgtcgcagttcgtcggccccggcgaggacagcgtgcaactgagcggcctgatcgcgccgccgctgaccggccagtattcgtcgctggccaccctgcaggaaatggccgacaccggccagccgtgggcgctggtcgccggcgacggcaccgtgctgggggcgtacgccatcaccagcctcaagcagacgcacagcgtcttctaccccgatggcacgccgcgcaaggtcgagttccagctcggccttgaccgcgtgccggatgaggcgatggccgaggaccaggcatga

SEQ ID NO: 510632 - DNA, 2862 bp, Stenotrophomonas maltophilia
atgagcgagaacatgcggctgcgcgtcctgctggacgcgattgacagggccaccgggccgatgcgccgggtcctgggcggcagccaaaccctgaccgcctcgctgcgcacccagcgcgaggccctgcgcggcttgaacgcacagcagcgtgatgtgtccgcattccgcgagctggcggagaagtccaaggcgtcgacagcagcattgaaggaccagcgcgccaaggtgcggcagctggcggcagagatgcgcgcggccgaacagccgagcgaggagctggcgcagaagttcgccgccgccacccgcaccgccgggcggatgaagtacgaagtgagccgcaacgccgagcggctgcaggcactgcgcacccggctggccgatgccggcatcagcaccagccagctgggcacccatgagcgtcgcctgcgaactgacatcgtccgggccaacgaggccatcgatcagcagcagaagcggctgacagcgctcaatgccgcccagaagcgctcccaggcgctgcagaacgcgggcctgaaagccactgctctcggcgcaggcatggccttcggcggccgcagggcgctcgacgcggccgtcctgccggtgggcgaggcggtcgggtttgaatcggccatggccgacgtgcgcaaggtggtcgacttcgacacgccacgccagttcgcgcagatgggtctggacatcgaggatctgtctcgccgcctgccgatggtgcccaacgagatcgccaagatcgtcgctgccgccggccaggcgtcaatccctcgcaaggagcttctgcagttcgcagaggacgccaccaagctgggcgtggcattcgacaccaccgccgaggatgccggccagaccatggccacctggcgcaccgccttccgcatgggccaggccgaggtggtcaccctggccgacaagatcaactacctgggcaacaccggcccggccagcgtgcagaagatcagcgacgtggtgaaccgcatcggcgcgctgggcgaagtggccggcctgcagagcggcccgctcgccgcgctgggcgccaccgtggccggcatgggcatcgagtccgaggtgtcggccaccggcatcaagaacatgctgctcaccctgtcctcgggcgaggcggccaccaagcgccagctcgccgcgttcgacaagctcggcctcagctccaccgcgatggcccaggccatgcagaaggatgccggcggcgccattcttgacgtgctggagcggttgaaggaactgccggcggcgtcgcaggccgccaccatgaccaccctgttcgggcgcgagtccatcggcgcgatcgcgccgctgctgaccaatctcgatctgctaaaaaccaacttcgacaaggtcaccgacgcccagcagtacgccggatccatggagaaggaatacgccgcgcgcgtggccacctccgagaacgccatgcagctggccaagaacaccatgctggtgatggccgggacgctcggccgcacgctgctgccagacatcaaggccgcctccgaggccgtgggccgcgtcgtgggcggcttcatcgcctggacgcgggagaacccgcagctggcgcgtgcgctcaccgtgagcgcggtggcaggcgctgcgctggtgacggcgctgggcgcgctgctgaccgtggtcgggctggcatcgatggcgctgggccagatcagcggagcggtggctctgctgtccggcggcggtggtgtaggcgcgctgattgcgcgcttcggcacgttggccgcccaggtgctgcccacgctgctcaacgtcggccgcgccctgattgtggtgctggggggcatcagctggccggtgctggccatcgccgcggctgtcgctgtcgtggcggcggtggtgtggaaatactgggggccgatcaaggccttcatgatcggcgtctggcagggcctgcaggacgctttcgcgcctgtgctggccgagctgcgcaccgccctggcgccactggcgccgctgtgggatcaggtggcatcggccatcggcaaggtgtgggagtgggttaaacagctgttcgtcccgtttgaggccaccaccgaacagttggaaggcgccaccagcgccggccgcacctttggccagttcctcgggaccgccctgacgctacaactgcgcatggcggtcaaggccatcggctggctggtcactgccgccaccaccatgcaggcggtggtcatgcgcgtagtcggcggcctggcgcaatacctgggtggcgcatggtctgtgatcgtcggcttgttcaccggcaacggtcagcgcatcacccagggcctgcagagcatgtggaccggcatcaacaccctgctggccagctggccggcgcggatgatgcaggccggcgtagacatggtcatgggcctggtcaacggcatccggtcgaagatctccgccgcgacctcggccgtgtccggggtgggtcggggagtgatcgatcaattcaagggcatgctcgggatccacagcccctcccgcgtgttcgccgagctgggcggcttcaccatgcagggcttggccaatggcctgcaggcgggccagaacggcccgctggcggcgctgcagggaatcacccgccgcatccaacaggtaggcgctggcgcggcgctggcggcccttgccgggccagtcggtgccgttgacacccggccgcctgtgtcggccagccagagcgcgcctgcggcctccttcgggaagatcgagatccacatccacacgcagcccggccaggacgcgggcgacatcgcccggcaggtccgcgccgagttcgaagccatgcaacgacagcaacaggcccgcgcacgttccgcgctgggcgatagggagtaa

SEQ ID NO: 510633 - DNA, 333 bp, Stenotrophomonas maltophilia
atgaccgccaccaccgccccaaattcgcagaaggccgcacgcaaggccaccatcaccttggaagagccgctgcagcgcggcgacacgcagatcacctccgttgacctccgccgccccggatccggcgagctgcgcggcctcaagctggtggaggtgctgaacatggatgtcagcgcactggccaccctcctgccgcgcatcaccaacccgaccctgaccagcggcgacgtcgccgcgctggatccggccgatctgctgcagttcggcatggaaacggccgcttttttcatgacgcgggaacaggcgactgcccagggctacccgaccgcgtag

SEQ ID NO: 510634 - DNA, 510 bp, Stenotrophomonas maltophilia
atgggcctgccccgcaaactgaaaggcttcaacacgttcaccgccggcgagagcttcctcggcgaggccaagaccatcacgctgcccgagctgaaacgcatcatggaggcctaccgtggcggcggcatgagcggcccggtgaagatcgacctcggccaggatgagatccagatcaaggtggtctatggcgggctgatgcgccagatcctgcgccagtacgccgagaccagccacgacggcgtgcagatccgcttcgccggcggctaccagcgcgacgacaacggccaggtcgacgcggtcgaggtggtcatccgcggccgccacgaagggctggaattcggcgacgccgaggccggctcggataccgagttcaccgtcaccaccgcctgcagctactacaagctgacctggaacggcgaggtcctgatcgaactggacctggtgaacatggtcgagaacgtcggcggcatcgaccgcctgatgtccctgcgcaacgccatcggcgcgtaa

SEQ ID NO: 510635 - DNA, 1164 bp, Stenotrophomonas maltophilia
atggactaccatcacggcgtacgcgtcgtcgaagtgaacaccggcgtccgcgccatccgcaccgtggctaccgccgtgatcggcctggtggccaccggcgatgcagccgacgcggtgctgttcccgctgaacaagccggtgctgatcaccgacatcgatggcgcgatcaccaaggccggcaccaccggcacgctcaaggcagcgctggaagccatcgccgatcagaccaagccggtgctggtggtcgtgcgcgtcaaggaagaagacaacgacggcgagcagtccatcgccgtgatcggcagcaagaccaacggcgagtactcgggcctgcaggccctgctggccgcagaggcgcagctgcgcgtcaagccgcgcatcatcggagcgccgggcttggatacccaggtggtggccgccgagctggctgtgatcgcccagagcctgcgggcgatggcctatatcagcgccggtaccgccaagaccgtcaccgaggccaccgcctaccgcgagcaattcgcagcgcgtgagctgatgatcatctggccggacttcaccgcgctggacagcaccaccggccagatcggcatggccttcgccgtcgcccgcgctttgggcctgcgtgcactcatcgacaaggaacagggctggcacaagaacatctccaatgtcgcggtcaacggcgtcaccggtatctcgcgcgatgtcttcttcgacctgcaggatccgtccagcgatgcgggcgtgctcaatgccggcgacgtcaccaccctgatccagatgaacggctaccgcttctgggggtcgcgtacctgcagcgacgatgtgctgttcgcattcgagactgccacgcgcaccgcgcagatcctgaaggacaccatcgccgatgccatggctgtctacgtcgacaagccgatgcacgcctcgctgatcaaggacatcatcgagagcatcaatgccaagttccgcgagctgaagggcagcggctacatcatcgatgccaaggcctggtatgacccggacgccaacacgcagaccacgctgaattccggcgcgctcaccatcgactacgacttcacgccggtcccgccgctggaaaacctgatgctgcgccagcgcatcactgacaagtacctgggcagcttcgcctcggccatcgccaactga

SEQ ID NO: 510636 - DNA, 354 bp, Stenotrophomonas maltophilia
atgcgtggcatgtccgccaccaccggtcgggccatcgaaggcgccgtgcacctggcgcagtccatcaacgacgtgctgaccaccccgctcaacacccgcgtgatgcgccgcgactacggctcgctcatgcccgagctgatcgatcagccgttcaccggccagacgcggacgctgctctatggcgcggtggccaccgcgctgatgcgctgggaaccgcgaatccgcatcagcaagctctccatctcgcagggggatgcccccggcgcgtttgtcctggacgtggagggcacccggaccgacgtcacccagggcagtggctacacccgcctgaccatccccctccgcttccgctaa

SEQ ID NO: 510637 - DNA, 420 bp, Stenotrophomonas maltophilia
atgcttccccaaggctctgccctcatcaacgccgagttcttcaacgagcttgagcgccgtgctggtgccgtgcagacctgtgcggagctgcaggccttcaccgaggacgcgctcggctcgctcaacgcgtccctggccgccatcaaccagcagatggcgatgctggcgccgatcctggccctgctcactgcgccaggagcggacccctccaagatcgtcacttggatcaaggacttcatcaccgcgttcctgacgccctacgtgaagccctacaccacctatgccgcgcagctagccgcgctggcagcggccatcgcgcagctctccgcaacactgcagactcgtgcggcccacttcgacggctgcgacctgagcattccgatgccggtgccgccgccgtcgctgccggacgacctctga

SEQ ID NO: 510638 - DNA, 522 bp, Stenotrophomonas maltophilia
atggctctcgacctcgcccgcctcatctcaaacctgatccgaaacggcaccgtttcggcagttgacgttgacgcggagcgatgccgcgttgcctcgggcgagctgaccaccaactggatcccgtggatctccctgcgcgccggcaccacccgcacttggtccgcgcccagcaagggcgagcaggtgattctgctttcgcccgagggcgacaccgccaacgccgtggccctgctcggcctcaactctgaggcatacccagcgcctgcccataaggcggacctgcacatcgtgcagcacggcgacggcggcacgctctcctacaacgagaccctgcaccgctacgagatcaagctgccggcaggcagcaaggtggccgtcatcgccacgggcggcatcgagacaaccggcagcgtcgcagcagcgggcaacgtctccgcaggaaccggcgccagcggatcgttcaccacggctaccggccagaccgtaatggtctcggacggcgtcatcaccaacatcttctga

SEQ ID NO: 510639 - DNA, 1452 bp, Stenotrophomonas maltophilia
atggccaactatcggaccatccacacccgcaagggcctgatgaaactcaacgccgcccgcttggggggagcctccctgatcgtggctcagatggccttcggggatggcaacggcaacccggtggatccgcaggagggtgacaccggcctggtgcgcgaacgcttccgtacacctatcaaccgggtgtaccaggatccagagaacccgctgatctactacgccgagggaattctgccggcaacggctggcggcttcgtcatccgcgagatcgccgtggtcgacggcgacaacgacgtgttcgctatcgccaatacgccagaggtctaccagccgctggcctcagagggcgccatcggcgacggcatctatcgcgtcgcctttgcggtggccaatgccggcaatgtgcagatcacgctggacccgaacatcatcgtggcctcgcgtgcgtgggtgctcaacaccgtcgacgccggccaggtcgcacccggcggcaccaccgggcaggtatggaccaagatgagcaacgccgatggcgatgccgactggcaaagcgcggatggaattcaggtcgtggtgaacaccatcgaggaacgacagacgctggtggccagccagcgtacggtggatctgagcatcaccaccaccaccggcttggcggtgtatatcaatggcgtacgcatcggacgcggtaccggtgccgacgaatggaatcccgacgaagatctgcttactcgactgcatctgggcaaagactacccggatggaacccgcctgattgcagtccagaatgagccagccggcagcatgccgcacgcgctggagcgctcggccaacctgggcgacgtgccggacaaggcagccgcgcgtggcaacctcggcgtgttcagtcgtgatgagacgcgacagatggccccggcgggaatggttgcaactttcgccggccccaatgcccccaccggctggctcaaggccaacggtgctcaggtggcaaagtctgcatacgcggagctatatggagtcatcggagatactttcacccccgcaggtcactcgccgagcgttggctccttctttcttcccgacttgcgcggcatgttcccccggttccttgatgacgggcgtggccaggatccgggtcgagcgcttggcagcactcagggcgatcagctcgccgcgcacaaccatactggccgaaccggcgatgccggcgatcatgcgcacgactcctcattcggtgagggtaacaagtacaccgctgcagccccctacggcatgagtccccatcgcccaggtaaccgcaatgccggtgccagcggtggtatcgactacgacaactatgcgtggcaaacctccaccgatggcagacacagtcacgacttcgtgaccagcgtagccggtggcagcgaaacccggcccaagaacgtggccctgctggcatgcatcaaatactga

SEQ ID NO: 510640 - DNA, 765 bp, Stenotrophomonas maltophilia
atggcccgcgtcctctttcccgtagctcccctgggtatcaccattcccggcgcccccgtggtcgatgcagtgccggcgttcccgtacgagcccagcctgatcgctggcgccatcggcgattggatcttcggccccgaccaggtctcgctggcaacgatctctggcgattccactctgactgctcaggcagaaacccacacttgggccgacaacagcgtcacagtgaaagccttgggcgaagccttggtcaccaacatccttgaaccggatgccatgacgttctgggtcgcgttcaagtggcgcaataccaccggcaagaacagcatcgtggtgggcaacatctcgccgccgctgtccgccggcggcttcgcattggccaacaatccggccggcgaagtgcgcatcgccacctacggcgcaaaccccaacagcttgccggtctccgacaacggcgcgatcccggccggcctgcgggacggcgattggatcctggtgctggtcagtctcaacggacaacgcgttatcactcgcatgaccggatccactgtcgtaacggcgccgctggccaatccgcgcgtgaaagggtcggtgaatcggatcgccctcggtaatgcgtacttctccggcaacgccacctacacgcccgtggacgtcactgcggctatgtttgggtgcatggataccagcctggacgccgagcgtctggaaagcctctacggagtgctccagcgccgtctgatccatcgcggcatcgtcgtgcgctga

SEQ ID NO: 510641 - DNA, 2130 bp, Stenotrophomonas maltophilia
gtgagcgtcagcaacaaggtcgatcagttcatcaaggacagcgatattgcccatttcatcgtgcatggaccggcaactgagacggtggaaaccgagggcggtccggtgccaactttcgccagggccgtgcatggcctgaccgatcttcccgagcgcgtgcaactgctggagtccctgcagggcgcagatcgcgttggctatgcgacctgggcagaggcggtcgcggccactgtccgcccgctcggtgcgatggtcgagatccccgtggagaccgatccgggttcacatgtggacccggtgaagccaggcaaccagatcgttcccaacggtggcctgtacatccagcgtgaggcggggcttgagtggatgcgcccggacacattggcagcaaaggccaatcggacggacctggtgccgatcaagcagcagctgcctaccaaggccgagcgtgagccgctggttgaatcgctgtacctggtggaatcgccaatggttccgctggtaggcatcaccagcaagtccggtgaggtccagatcccgttgcagtatgacccggcgtcgggcgacctcatcaaccgcggtcgaacggtgctgaccgatatccgcgcgggcgaacacctggcagatctgcatcaggccgagatcggcgatatcgtgcccatgcttggcgtttccgatagcaatggcgtaacgcagattgccgtgggctacaagcccgcgctaggcgcactgattgtcgatgggcgaactctgggcgaaggagagtatccgctcacgtatgcggatgcgaccgccaccatcgacggtacccacatcattgtgcgcggcgcgctgcgcaccgcgtccgggtccatcccgatcagcggtgttctcgacatggccccaccggccccggtgccggtcaacaacgtcgcctataccctcaaggccaacggcgaacagcgctggtacgtcaacgacaatgcaccgctgccctaccgattcatcagcgatgtggcctgccgacacaacgacgcgccgttggcggaaggcgccgacttccatgtctggtataccggcggcaagctgcgtggtgtcgtcggcagtggcacgcgggagatctccctcacctataagggccttccacagcgctatgacctggtcgtggccgatgccatcaccggtgcactgtcgatcgttcggggaactgcacgcaacattgacccgcaggagtatctgccttctgtacccactggcaagatcgccctgttctccgcgttctgctatggccagacggtgcgcctgtacagcaagacccgctggcagggcatcaccaagcgcggccgcgacatgagcgcgctgcgtgagcacaaccgcaaggcactggcgccgattcgcgcagccttggcacagcggcgcgatatcacgctggttggatacggcgattcgatcaccgccatgggtggcttcgcaccgcacaacgccccgaacactgcggcccgtgacctgaagtcgttcttcatccagatgccggccgatacctatgccgctatccctgcattggatttcggcgacggcggcggtgccatccacagcgacctgggctggaatcggcagctgaaggcgtttctggaacacacctacggtgtacaggtggagtacctcaactacggcatcggcggaaccaccagcggtaccggggagaatgcaggtcgtcccaacggcctgaacccaacgcgcctgcagtacgtggtggattcggtcgcacagtccagcaagccagtgctggtcaaccttgccttcggcatgaacgagctgggcaatggcgccacggtgaccaacatgaccgagcttgtgcgcaccttccagtcgctgggcgccacggttcagatcctcggcgtccctcgtcccagcagttacggcggcttcggcagtctgcccgcctggcgctacaccaacgaatccctttatgccgtggccgtggccaccggcgctgcgttctcgcccaccgcgcccttcttcgatgaggaacagctcggctacatgggcgttgctcctgaatccttcgccgccgccggcaacatcaatcacgccggaccggccgagttccgcttcctcgctcaacccatcatcgccaacttcgagatctga

SEQ ID NO: 510642 - DNA, 648 bp, Stenotrophomonas maltophilia
atgtctagcctgctgccaccgaatgccactccgcaggaggtggccgttgcaaaggccaccacccgtctgtcggaagtccccgtgcccttcgcgtccactctggatccgatgcgcacaccagaggacatgctgccctggttggcgtggtggttcagcgtagacacctggggcagcgattggccgacctatgttcgtcggcggacggtgcagcaatctctgacgatccatcgccgcaagggcacggtgggcgctctgctcgatgcgatcgatgccatcggcgtacccgtcgagatcgaggaatggcaccagagcacgccgcagggtgctccatacacgttccgcgccctggtcaacgctgtctccacgcctttccaagagaaggatcttcaacggctcctacaggcgattgaagacaacaagaaccttcgctcgcacatgaccgagctggtgccaggtctgagcagctacgccaacccgttcatcggtgggctgacctcagttggcacagatcgacaggtgcaggcgaggtttcaggacatttcgctgctgttggttgcattggaggaaggcgaacaggaggtcgccaactccgtggaccggcttcacacccatctcaacttcacgatgcccgacagggccaaggaataa

SEQ ID NO: 510643 - DNA, 894 bp, Stenotrophomonas maltophilia
atgcctactttctctgccgtcgacctgtcccgcctgcccgctccgagcgcggtcgaagtgatcgactacgaggttctgctcggccagtggctggacatgtaccgcgcgcaggatccgtcctacagcgctgtggtcgagtccgatccggtctacaagctggccgaggtaggcgcgtatcgcgagatgctgctgcgccagcgcgtgaacgaaggcatcaaatccgtgctgctggcatacgcagaagattccatgctcgatcaccttggcgcgttcttcggcgtcgagcgccgcgttgtgactgaggccaacccgttgctcggaacgccggccgtgatggagtcagatgcggaattccggcgccggattcaaatggcgccggagggcttctctgtcgctggccctgccggcgcgtacatctcgcacgcactggccgcagatccacgggtgttggacgcctcagccgacagcccacagcctgggcatgtgacggtctacgtcctctcccgcgagggggacggtaccgcccctgatgacctgcttgccaacgtcgccactgcggtcaaccacatcgacgtgcggccactcaccgactttgtaaccgtcctgagcgcagcggtcatcgaatacgagatcgaggccgtgctcgatatctaccccggcccagaccccgccgtggtgctgcaggctgcgcgcgatgaggtggcgacgtatgccgagaagaattcacgaatggctcgcctggtcagccgctccgccttggatcgcgccctgcatcaggaaggcgtggtcgacgtcaccttggtcagccctgcggagaacatcgcggtgggtgtgggcgcggccagccgctgcaccggaatccgcatcaccacccgcacggtgagcgatgtctag

SEQ ID NO: 510644 - DNA, 453 bp, Stenotrophomonas maltophilia
gtggatgagctgacctcactggaaagctggatcgggccgctgctgcagcggcttgagccttccggccgcgctcggctcgctcggcgcatcgcccaggatctgcagcgcgcccagagtgagcgcatcgggcagcagcgcgccccggacggtagccagtacgcccgccgcaagaaccagaagcggcagaagggtggtcggatccgccgccgcaagatgttcgcccgcctccgacagtccaagcacctcaaagcacgcgggaacgccaacgaagcctcagtgttcttcatccgccgcgccgccgccattgcccgcgtccaccaggaaggcttggtcgaccaggtgcgacgcggtggtccgcgcgtgcgctacgagcgccgcgagctactgggtttcgccgatggcgacaagcagcgggtgatcgacacgctgctcaatcatctgtctgggttgtag

SEQ ID NO: 510645 - DNA, 414 bp, Stenotrophomonas maltophilia
atgaagaagccggcctccctacgcgccgcgattgaggccgctgtgcccgagctggccaccgacaaagatcgcctgcttgccttcatcgacaacggcagcatcgtgtgcacctgcgtgcaatcccgctcgtttgagtggcgctacacgatgaacctgatcatcaccgactatgccggcgaccccaaccggctgtggctggcgctgctggattgggtgagggtgaaccagtccccgctgctggctggcccaagcctgcaggaacagatccgcttcgaggtggacatcttggccgacgacaaggtcgacctggacatcaaactgccgctcaccgagaacgtggtcgtcgccccggacaaccagggcaatgggatcccttccgccgtcgatgagccgatgccgacgtggatgagctga

SEQ ID NO: 510646 - DNA, 579 bp, Stenotrophomonas maltophilia
atgggcctgagcatcgatccgatccgcccgtacctgatcacggtccgctgggctgctgcgctggccctggtgatcggctgggcgtggttctggcatggccaaggcgctgccaagtgggagggcaagtacaacaccgagcacgcggcgcaccaggcggcgctggccgcacacgccgctgtgctggatgggttggccaaggccaccgccgagacggccgccaaggcccgcgcagcggctctggcgttggcccgcgaccgcaccgacaacgatgcccgctacgacaagaaggtggatgatgcgaaacaagcccgtgatgaccttgctgctgctctgcgtcgtggcgacgtgcagctgcagccgtggtggcagtgtggtgctgcgcccggatccaaccccggtgacgctgcagcccttgcccaaggcgaagatgcagccgccgaccttcgggcagcggacacggcagcgactgttgaggacgccgatcacgccgacgcctggatcagctggctccaggacgaactgaccagcacccgccagcagaccgttgccgccggctgcgcggtacaggtcgagccatga

SEQ ID NO: 510647 - DNA, 672 bp, Stenotrophomonas maltophilia
gtgaccctgaccgatgacattcttgcccgcgccatgcagatgccggcggcgcgcgtgcagcgctggacccagccgctcaacgccgccatggccgagttcggcatcaccacgggccgccaggtcgcctacttcctcgcccagctgggccatgaaagcgtcagcctgacccgtgtcgaggaaaacctcagctacagcaccgccgagcgcgtggtggcggtgttccgtcgcttcgacctcaacggcaaccgcaagatcgagccggaagagctggcccacgccaagggcttcctgaacaacccgcagaagctggccaacttcgtctacgccgggcgcggcggcaacggcaacgacgccagtggcgacggctggcgctaccgtggtcgcggcccgatccagaacaccctcaaggacggctacgctcgcatgggcgtcctgctgggcctgccgctgctgcagaacccggatctgctgctggatccggtcaacggtgcgcgtgccgctgcggcctactggaaagacaacggcctcaaccgctgggccgatgccggcgacgtgctggccctgagccgtgccatcaacctgggcaacccgcgctccaaggccaagcccgagggtctggaagaccggatcgcccgcaccaaccgcgctctggcgctgctgggggcggcgtga

SEQ ID NO: 510648 - DNA, 279 bp, Stenotrophomonas maltophilia
atggctgagatcacaaccttcctcgccctggtggccagcctggccatctgcgtgcgcctgatcacctaccgcgcccacacgggcgctacgcaccggccaggggcctccctggtggcgtgggtgctgatcgcctccaccggcgggcaggcgctgcagatcctgctgtacggcccccgcgcacacgtcagcccctggcagctgggcctgctgctggtggtgctgctgctgaccttccagtccaagggcaacgtcgcccgcattctgaggaccgacccgtga

SEQ ID NO: 510649 - DNA, 354 bp, Stenotrophomonas maltophilia
atgaccgaaccaacctccaccggcaccctcttcgcgctggccaccagcgtcgggctggcttcgctgctgccgggcgtcaatcccgacgccctgattggcgcctttgccggcgccaccctgttcgtggtgtcggccaaggatctgctgctctggaagcggctgttctacctggctgtgagtgtcgtgcccggctacatgggcgccaccgacgtcatgcgccgcttcgggctggagtcggccgggctggcggccttcctgctggccgcctgcgtggtgacgatcaccctgcggctgatcgagggcagcgggagcatcgacttcaaatccttccgccgcggagatcgaaatggctga

SEQ ID NO: 510650 - DNA, 210 bp, Stenotrophomonas maltophilia
atgctggtcatcgcagcccaaggcgacaccctggacgccatctgctaccgctacctgggcaccactgccgcgtgcgtggagcaggcgctggcgctcaatcccggtctggccgcgctcggcccgatcctgccccaaggcacctccgtggtgctgcccgacaccaccaccccagccgccgccacgcgcccgctggtacagctctgggactga

SEQ ID NO: 510651 - DNA, 465 bp, Stenotrophomonas maltophilia
atgtctgcattcatcgcccccggcaagaacgcacccagcgacgacatcacgtcgggcagctggtggccgtccatctcgccgtcgcaggtgcgagaggacatgaggatcacgggcacggtcaccgaaccgcgcctgcgcagcagcctggtcaacgctgtgaccacggtgaacaccgcgctcgccgcgtgggcacagcgccaaatggccgaaggccacgaatcgctggccggcattcctgccgatgcgatctccggcgtctcgcgcctggtgctgctgtaccgccgcgcggtggccacctacgccgccgccgagctgaccgagcgctaccgctcctacgacgcaaccgacagcgccaaccagcgcgccgacgacctgaccccgtccatcggcgagatccgccgcgatcaccgctgggccatgcgtgatctgcagggcctgccgcgtaccacggtggatctcatctga

SEQ ID NO: 510652 - DNA, 825 bp, Stenotrophomonas maltophilia
atggccgccagtcccgccaagcaacacctcagccgcgttcgcgcggctgaggaatcagcccggcgccagggttcggcgccggtggacaacgcgtccgaatacgagctgcacatgatgaagctgcaggaccatcgcctgcgcctcaagcagatccagtcgggcgaggccaagggcaaattcaaagccgagatcctgcacgattacgccccctacctgcagggcgtgcttcaggccgatgccggcggcgacgatgaagtggttgccaccctgatgctctggcacatcgatgccggtgacttcgccggggcgctgccgctggccgactatgccctgcgccacaacctggccatgcccgaccgcttcgcccgcaccaccggctgcctcatcgccgaggaagtggccgatgctgccctacgcgcccaggttgccggtgccgacttcgatccggcggtgctcgatgccaccaccgcgctgacggccacgcaggacatgcccgaccaggtccgcgccaagctctacctggccgccggccgcagcgtgatccgcgctgacgacgtcgaagacaacccgccgcccttcgaccagctggtcaaatgcgtggccaacctcaaccgcgccctggagctggacacggcgtgcggtgggaagaaagacctggagcgcgcagcccgcctcctcaagaaacatgctccgcccaccgtcgacgccgcgcagagcaccgcagcggatggcaacggccacaccggtaccggccccgcgccggatgccggtaccgacagcgctggcaccccgccggccgctgaaggtgccaccgggcagagctaa

SEQ ID NO: 510653 - DNA, 1017 bp, Stenotrophomonas maltophilia
atgcgtaatcaaacccgcttgctgtacacggcgttcctgagccagatcgcttccctcaatggcgtcgccgacgctggccaggtgttcagcgtcgacccgaccatccagcagaagctggaaacccggatgcaggagtccagcgacttcctcagccggatcaacatcatcggcgtcaacgaactgaagggtcagaaggttggcatcggtgtttccagcaccatcgccggccgcaccgacaccaccggcaacggtgagcgctccccgcgcgacgtctccggtctggacagccagacctacgagtgcaagcagaccgacttcgacaccgcgatccgctacgcgctgctggacgcctgggcgaagttccccgacttccaggcgaagctgcgcgacgccatcgtcaagcgccaggcactcgaccgcctgatgatcggtttccatggcaccagcgcggcggcaaccaccgaccgcaccgctcacccgaatctggaagacgtcaacatcggctggctgcagcagtaccgcaccaatgccccggcccgcgtgctggatgaagtgaaggctgcttcgggcaaggtggtggtcggcgtcgatggtgactacaagaacctggacgccttggtcttcgacgcggttagcaacctgatcgatccgtggcaccgcaaggatccggggctggtcgcggtggtcggccgtggcctgctgcacgacaagtacttcccgctggtcaacgccgaccagccctccaccgagaagctggctaccgacatcatcctgtctcagcgccgcctgggcggcctgcaggtggcggaagtgccgtacatcccggacggcaccctgctggtcacctcgctggaaaacctgtcgatctactggcaagagggtggccgccgccgccacgtcgtggagaacccgaagaaaaaccggatcgagaactacgagtcgtccaacgacgcctacgtggtcgaggactacggcttcggctgcgtcgtcgagaacatcgaaatcaaggaagcctga

SEQ ID NO: 510654 - DNA, 882 bp, Stenotrophomonas maltophilia
atgtcggatcccaagaagaagtaccgcagcaagttcttccgcgtcgctgtggaaggcgacaccaccgatggccgtgtgatcgagcgtggctggatccagcagatggccggcagctacaacccgtctctgtacggcgcccgcatcaacctggaacacatccgcggcatcctgccggacagcccgttcaaggcctacggcgatgtggtggcggtgaaggccgaagaggtcgacatcgacggcaagaagaagctggcgctgttcgcccagctggagccgaccgatgccctggtgagcatggtcaacaacgacaagcagaagatctacaccagcatcgaagtgtcgcccaacttcgccaagaccggcggcgcctacttggtcggcctggccgtcaccgacagcccggccagcctgggcaccgaaaagctgtccttcgcggccaagcatcccgaggccaagctgttcgatgaccgcaagctcaacgcggagaacgtgttcaccgcgtcgtgcgaatccagcatcgagctggaagaggtcagcgctgacggcggcgacgccaccggcaagctgctctccggcatcgccggcctgctggatcgcttcactggcaaggccaacccgccgccggcaccggtgacgccgccggccccggagggcgcagctgatgcgcaggcgttcgccggcctggccgaggtgctgaccggcatccgcgatggcatcaaggccaacggtgagcagttcgccgcgctgcgcaaggacctggacgaaagccgcgccgagttcagcgcgctggagaagaagctgtccagcaccgcttcgaacacccaggccttccgtcccgtcgtgaacggccagaccggccagaccgccttgaccgactgctga

SEQ ID NO: 510655 - DNA, 1770 bp, Stenotrophomonas maltophilia
gtgaacgacgtcgccgcccaactccagaccgacagccgcagacaggccaaattcctgtactggatgggctggcgtgtcaccgagatcgcagaggcgattggcgagaaagagaaaaccatacacagctggaaggcgcgtgacgagtgggaccgcgccgacaacgtcgaacgcatcggcggcgcgcttgaacagcgattggtgcagctgatcctcaaagacggcaagaccagcggcgacttcaaggaaatcgacctcctgcaccgccagctggagcgacaggcgcggatccagcgctaccagggtggcggcacagagaccgatctgaatccggctgtggccaaccgcaatgccggcccgaagaagaaggaacgccggaacgagttcagtgaggcagaggtcgagcagctgaccaccgcgtttgtcgatggctgctttgactaccagctggactggtacaaggccagcaacctacgcacccgcgccatccttaagtcgcgccagatcggcgccaccttctacttcgcccgcgaggcgctgatcgatgcgatcaagacgggccgcaaccagatattcctgagcgcatccaaggcgcaggccttcctgttccgtggctacatgcagtcgttcgtgcgcgagacgctggacaaggatctcaaaggcggcgacagcatcgtcctggccaacggcgcggagctgttctttctgggcaccaatgcccgaaccgcgcagggctatcacggaaacttctacttcgatgagttcttctggacgcatgggttcgatgagctgaacaaggtggccagcggcatggccatgcacaagaagtggcgcaagacctatttcagcacgccgtccaccatggcccaccaggcgtatagcttctggaccggtgagcgccgcaaccggggcaaaccggccgacaagcgcatcaagatcgacacctcgcacgatgcattggcgggcggtcacctcgggcaggacaagctgtggcggcagatcgtcaccatcctcgacgccgagcggcgcggctgcgatctgttcgacatcgatgagctgcgcgaggaatacagcgcggacgccttcgagaacctgctgatgtgcgggttcgtggacgacagcgccagtgtgttccccctgagcctgctgcagacatgtggcgtcgacagctatgtggattgggcaggcgactaccgtcccttcgcccagcggccctatggcgaccgaccggtgtgggtgggttacgacccggcagagacgggtgacagcgccggcctggtcgtggtggcgccgccaagcgagcagggcggcaagttccgcgtgctggaacgcttccagttcaaaggcaacgacttcgccgcgcaggccgagatcatccgcaagatcacccagcgctattgggtcacctacatcggcatcgacacgaccggcatgggcaccggcgtggcccagatcgtgaagaccttcttccccaacctggtcaccttcagctattcgcccgaggtgaaggccaagctggtgttgaaggcctacgacgtgatcagcaatggccgattggaatacgacgccggcatgctcgacctgacgcgctcgatcatggccatcaagaagaccctgaccaagagtcaacggcaggtcacctataccgcagggcggagcgaagagacgggccacgccgacctggcctgggcgctgttccatgccctgcacaacgaaccgcttgagcgcccgcatacctcggcgcggcgcagccgattggagatcaacgcatga

SEQ ID NO: 510656 - DNA, 1002 bp, Stenotrophomonas maltophilia
atgaacgacctcgccgcacctgcggctcccgcccgcatggtcagcttcaccttcggggatccggtaccggtgctggaatcggggggcatcctcgactacgtccactgctggcagaacggacgctattacgagccgccggtgtcgctggacggcctgtcgcgggcgacccgcgccaacgtgtacctgggatccggcctgcggttcaagaccaacatgctggtccgcaccttcaagccgaacaagatcctatcccgcgaggcgtttgagcagttcgccatggactgggtgcacttcggcatggggtatctggaacgccgcaattcggtgatcggcagtgcgatggcgctggtgccggcactggccaagtacatgcggcgcggtgtcgagccgggcaccttctaccaggtccgcggctggaaggatgagcatgagtttgagccgggcagcgtgttccagctgcgggaggccgacgtcaaccaggagatctacggcttgccggaatggatgccctcgctgcagtcggctctgctgaacgagtcggccacgctgttccgccgcaagtactacaacaacggctcgcacgctggcttcatcctctacctgaccgacgaacaggtcgatgacgccgacgtggatgcgctgcgcgagtcgctgaaaagcacccgtggcgtgggcaacttccgcaacctgttcctgcattcgcccagcggcaagaaggatggcctgcagctgatcccggtcagcgaggtcgccgccaaggatgaattcaccggcatcaagagcgtcacccgcgatgacgtcctggcatcgctgcggatcccgccccagctgctgggggtggtgccgcagaacgccggcggcttcgggtccatccgcgacgcctacacggtgtggggcgagacggaattggctgcactgcaaacccgcatgctgcgggtgaacgactggctcggccaggaagtgatcgggttcgatcccttcgacccgaaggtcttggggtga

SEQ ID NO: 510657 - DNA, 672 bp, Stenotrophomonas maltophilia
atgtcggagtggctggacgggtgcgtagtgcttgcgggcgtggtcgtgcgcacaaccattgagggtggcgcgaagcccgatgtgacctggttgcaaacctatggacaactgattggcgtcgccataggtgctgtgctcacaggagccgtagcgctccttctggcgatcatgaacaaccgcagcagtgaccgcaggctgaagttccagcaggatcacgatcttcagcgcgacaggcagcgtatgacgcgggagaggcttgaggaactttacgtcctgaccgggcactggaccttaggtctagagcagtatgggcttctagggttgcgccttgcacgagggcagctcacttacgctgactatctcgaacttcaacgtgagcaggctgataacccgcagatccagatctcgcgcatggacctactgctgaacgtgtacggctcccaagaggtcagcgaagcggtggcaaaggtcagagatctacgaggcgcattcaacaaactgctcacccgggtcgagaacttcagcaaaataccgagtagttccccgttcccctacatagctaccaatcctgtggatgaatcgctctacacgaagatggacaacagcgttaccgctatcgtccaagcggggcgcagcctcttggaggctattgccactcagataaagagctaa

SEQ ID NO: 510658 - DNA, 345 bp, Stenotrophomonas maltophilia
atgaccctgccctccggcttccactggaccactcgatccgccagcctcccgggggagctgccgaccgtgatcgtgtgcgacggggtatgggtggtggccatgttccagcgcgtggacgacggcagctgggtggccaccctcgaccggcatcggaatggaccaggtggaccgtccaggcgctgcagcagctatgagcaggggcgtgccggcgctgagatgtgggtggccaggcacgagacccggctacgcgacgacgtcgaccagatccgccggtaccgcgaggcggtgcaggcgaaccggctggccaaggccagcatcgatccgcctttcggctggatgggataa

SEQ ID NO: 510659 - DNA, 978 bp, Stenotrophomonas maltophilia
atggcatccattcgacccctcggcaaccgataccgcgcgttcgtcaaagtagacggccggcgcgcgacgaaagtgttcgacacgaagcgcgccgcgttggcctgggcacaggagcaggaggcgcagctcactggcagccagctacccgacaagacgctggaagaggcgttcaccaagtactccgaggaagtcacgccgagcaagcgcggcggtcggtgggatcgcgtgcggatcgcccgcttcaaccgcgaggacaagatcgcaaagcgccggctgcttgccctgtcggctgctgacctcgccgactggcgcgatgcccggctgaagcaggtgaagcccggcacagtggcccgggagatgaacctgatcgccgcggtgctggaggtcgcacgccgcgagtggggctggctgaaggaaagccccatgcgcgatgtgcgccagccgaagaagccgaaggggcgtgcgcgccggatctccggcgaggaagtcgaggcgctggccaaggccttcgacgtgtgggatacgctgaaagtggacacccagcgcaaccggattggcctggcgtttctgttcgcgctggagaccgcgatgcgttcgggcgagatatgcgagctgcggtggaccgacgtgcacctgaccgagcgctacgtcactgtgcgcaccagcaagaacggcgacacgcgcgaagtgccgctgacggcgcgcgctgtgcagatcctgcgcgcgctgccactggggtttgctccggtgtttggcctgtcggcatcgaagcgcgacggcctgttccgcaaggtccgagacggtgttcccaccatcaaggacctgcatttccacgatgcgcgcgcagaggcgatctggcggctgtcgaagaagctggacgtcctggagctggcccgagtgattgggcaccgcaacctgtccagcctcctgatctactacagggccacggcctccgagctggctaagaagctcggctga

SEQ ID NO: 510660 - DNA, 255 bp, Stenotrophomonas maltophilia
atggccgatgagatcgacgtggccaccatcgccgccatggcgcgcgatgcggaaaggctcaatgcggacgcgtgtgccttcatcctcggcctgaccaaccgcgagggcaaggtgaatcgccgcgccttcctcgaacgcgtcgcagtccgcacgacgttcccgaagccgatggtcctcggcgccaagaaactgtggaaccgggaagccgtggtgatgtgggcagaggacgaggcgcggatcagccgagcttcttag

SEQ ID NO: 510661 - DNA, 591 bp, Stenotrophomonas maltophilia
atgagcgaccatctccaactgctcgccgagctgcgctcggctgcaaagaccatgagcatcaaaggcgtcggcaacaccgtcacgcacatgctggcagcgcagttgatcgcgcgtgctgccgatgccttggctacgtcctacaccccagagcagatggcagggtcgttccgcgccggcctcaacactgcgcgcatgcacgatcacgacgtgaacccatctgcgcccgactggcgcaatgcgccgcccgaggcgcagttctgtgccatggacagcgacggccagtggtgctggtacacgtctcgcccctacgccgagcgattctccggcttcgagggctgggacgccgacaccggcgctaccgagatccgcggcctggccttctacccgaactggaaggacaccctgcaggaacgccccaagggcggcaccggcggtgcagacgacaagggatcgctggataccgaacagctgctcgtgatggcggctcaggcccaacgcgacgcagcgggcgattcctccgtgattgccgcccgcatcgatcagatggtggacgaagtgcgcagcgcaaagggggtggccaatggccgatga

SEQ ID NO: 510662 - DNA, 666 bp, Stenotrophomonas maltophilia
gtggctgaggaaaatgccatcgacaggctcctggagcgagggatcgtcgcccgcgagttgatcgcctacatgcttcccggcatcgcttggctggcggagcatcaggacgaaacattccgcctctgctaccacgacgaagcccgcaaggtgatcgtggagaacgtaactgcggccaggctgatccagcgagcgcgtgagcttggctggaatcctggcgatatgctagagggtcgtccggagtgcatgttcgacgaagccatctaccactgtcgccgtggcgtgcattggtacgcaaccgcgtgcgatgacactacagagatgctgcctctcggatttccggccagagagcttgctgctgcgcaaaaacgggatgaccgccggtacagcccggaagccgagtcgcgcaggaaggctgccgagcagcgccgccggcgcgcggcggagcgcgcagaagatcgcgcggtccacgccaaggtgaaggaagtcgtggagatggtgacggctgacctgatgaaagaggccagcgagaagggccaccccatcgcggaaagcactgcacgccgaaaggcgtggcgtcatgtgcgcaagaccgacgacgggatgtattacatgctctgcaagaagctgcgggcgatgaagaacaacggcgagaaggtgaaagtatga

SEQ ID NO: 510663 - DNA, 387 bp, Stenotrophomonas maltophilia
atggcaaagaagattgtaacccccgagcagcccgtaccgaagatcgacctggccaacgacacccactggatcgagatgagctggaacgacaaccccctgcctccgttcataaaggggcagctgcatcgtattgatcggtgcatcgtcggcgcagcggccgtagccaatgttctgcatcgcttcgagatgggcttggacgatgttgaaaacaccggaagcggcgataagttccgcgtcgtctatccacacatgtccaagaacgatatggatcgcctgcgcgtcgggatgcgcgagcttctagacctagcagaaaccacgatcgaagacgtgcgcgacgaccgcgacgggatgattgccgcattcatgaaggagcagacccgtggctga

SEQ ID NO: 510664 - DNA, 198 bp, Stenotrophomonas maltophilia
atgagtaaggaaaaccctacccagcacgaaccgccggaaaatcggcgggctggatcaaaagtcatcaatcagagcgagggcggactgatccgcatcggagacagcatcgacgttgtcgttctcaaggcacgcgacgggcacgcacgggttgtcatcagcgcgccgaggcatctgtccattgccgccccaaaacagtga

SEQ ID NO: 510665 - DNA, 153 bp, Stenotrophomonas maltophilia
atgacgccccgtcatctcacgcgcaacctccgcagccggatggtctggaacaggttcgagcgtttcgccctgacccacaattccgcgcggcatggatgcctcttcatcctcacacgttccggctctggctgttaccgccgcatcgaggactga

SEQ ID NO: 510666 - DNA, 216 bp, Stenotrophomonas maltophilia
atgcacctgggaaccaacactgccggtgggtccgacccggcagaaccgcaggaaacctacacggtcatcctgagcagtggggacgagatgttcctcgtccccgcaacctcacccgaagaagcggcgcggagcgcggtggccagctgggccacccgatacggagaggtcgttgaagctgtccgggtttgccggactggcgaaggcaatccgcaatga

SEQ ID NO: 510667 - DNA, 708 bp, Stenotrophomonas maltophilia
atggatcagaaccacactctcagagaccgccttgtctcgctcatgtccaagcaagacgtaaggctagtaacggtcgcccaagcctgcggcgtgacctcgcaagcggtcgtcaactggcgcaaaagcggaaaaatcgacaggaggcacttccccgccctgtcccgcctgtttggcgtccctctggactactggctcggcggccccgcggtccagccggtaaaggtgcacgcttacaagattcagggcatcgatggggaggacggcctggacgtagaccgggaggtaatgctgcccgtctatgacattgaggtatcgggtgggccgggagttgtggttccagacttcgtcgaaacgagataccggctttcctaccagatggactggctcaatcgctgggatgccaagccggaggacatcttgatcgccaggatcgtgggggcatcgatggagcccaccctctacgacggggacaaggccgtaatccatcagggccgcaaggacataagaaacgaccgagtctattccctgatctacgggggagaggcacgcgtgaagaggatcttcagacaagccgacggagcactccgcatcgtgagcgacaatcgggacaaggaccgctacccggatgaattcctcggaaaggacgacatgagcggggtctacatcattggtcaagtcattgaaaagatgggaagtggcgggctataa

SEQ ID NO: 510668 - DNA, 264 bp, Stenotrophomonas maltophilia
atgaacagcgaagctctcgaacgtgcaatcaggattgcggggaaccaggtgaagttcgccgctgccatcggcgtcaagccgcaggccatcaaaccctacttcactcgcggtttgagccctgagcgctgccccgcagccgaggcattcaccggtgtgacctgcgaacagttgcgcccggacctccgatgggaacgagacgccaccggcagggtcgttgcgtattcagtcccgttgcagccagtcgataccaaccaaagccgataa

SEQ ID NO: 510669 - DNA, 339 bp, Stenotrophomonas maltophilia
atgccacacgatcacaccccgggtaagcccactggcgcgccgcgccatatcagcgactgcatgcaggacgcgatggcgcacctgaaagagcgcagcgcgcgcccactggtaaagctggcagagcgcctgccggacggccgcattgcggtcctggtgttcgaccgcacgcagcagcacgacgagccgctgtacgacttctactgcagcgggccggaatcggccctgatgtggatttctcagatggccgggaagtcgtggatcacgaaggagcacattgaggcgttttcgatgctgatcctcagtgcattcgatgaagtagaggaaccgcatcgtggctaa

SEQ ID NO: 510670 - DNA, 1029 bp, Stenotrophomonas maltophilia
gtggctaatgcaaccgatgcccgcatttccgtggggctgccaggccacccgaagacgaagaagctggcgcgccgtctcggcgctgctggcccgctgtactgcatttacctgttcttgtgggccacggccaaccgcagcgatggcgacctgtccggcatgaccgacgaggatatcgagctggcgatcgactggacgggcgaggagttcgcgttcgtgcgtggcatggccgacgccggattcctcgatggtgaagagggccagcgccggatccatgactgggacgaacacaacccgtgggcagccggcgcttcgagccgtagccagaaagccaagtgggccaatctgtgcaagtaccagggaaaggaagaagccgaacgcaagatgccggcctatgcgaagcgcctccgagaagctgcgaaagcgctcgaagaaggatcgaagaaggaagcgaacggatcgaatgaggatccttctaggactcctacaggcgatcctagtaggagcgaggaaagcggagataggactcccccatatccatctccaattccatctccaattccaattccatctccatctccatctccaattccatctccagaagatgaacccactgtcgtgggtttgtcgtcagccgacggcgacgccgcgactggcgaccacgccgaacctgctgatgccggggaagggcaggacctgctgggcaaggtgccgaagaaggcaggcccgccaccgtgcccgcacatgaagatcatcgagctgttccacgagatcctgccggaactaccggcggtgtgcgcgtggaacgaaacccggcagcggaagctgggcgcgcgttggaaggaacgccgtgagcagcaggaactgacctggtggcgatcgttcttcgaggcggtgcgggacatgccttggctgatggggcagcgcaatggtcgtgatggtaggccgttccgatgcacgctggagtggctggtcagcccgaccaatttcgtcaaggtgatcgaaggtcattacctggacggtggccgatga

SEQ ID NO: 510671 - DNA, 1440 bp, Stenotrophomonas maltophilia
atgatccgctacgacggggacgcgcagacgttcaacctcgatgccgaggcggcggtgctggccggcctgctgctggacaacgatgtgctgtcgagcgtgcaagactggctgacgccttccgacttctacagccccgaccacgcccggatctacgagtgcgtgctggagctatgcggcgagaacaagctggccgacgcgatcaccgctggcgagtggctgctggataagtgtggcgaggacggccgccatctggaggcgctggcgagcgagatcgctggaggcgcttacacccgcgccaatgtgatcccacacgccgagatcgtggtcgagcattcgcgcatgcgccgattcatcgacacctgccagcgtgcgctgaaggctgccacgggtaggagcgggcactcggcggagcagcttgcctcgcacctggcgtcgcagatggccgacattgcgccggtgcgcgcggtagggccaacgccatatcgtgatgtggttcggaagttctccgccgagctgctggctcggcatcgtgatggcatccctatcggcttgcccacaccctggaaggacgtgaacaaggccatcggcggcttgcgcaatggccaggtgatcgtgatcgcggcccgctccaacatgggcaagtcgctgatgggattccagctggcgcggttcaccggcatgcgtggcgaccaggtggtcgagttctccatggagatggtcgatacggacgtcgtggccagagacgtggcggcgatgggcgagattccgctgcagtggctcgtcggaaacagtgacgaggaatccgcagcagactcggatatctactggtccaaggcggctccgaccatggacgagctgatgaaggcgaacatcctgatcgatgacgaccctcagctcagcgcgccgcagatcgttgcccgtgccaagcgcgtgcaccgccgcaagccgctccggctggtagtggtcgaccacctgcacgagatggcattgccgggcaagcaggacgaggcactggagcgaggacaggccctgcgagacctgaagggcttggccaagttcctcgattgccccgtggtggtgctggctcagctgaaccgcgctggggcgaagggcgaccgccccaaggtgaccgatatccgcggctctggcggtatcgaggaagtggccgacgtgatcctgttcgtgcaccgcccggacgtctacaaccccaccgacaggcccggcctcgtcgaggtgatcgtgggcaagggccggaacatcaagaccggcaccgtcgtctccctgcgcaacgagtaccagtaccagcgtgcggttgactgggatggtccggcctatgagttcgacgatgcaccagcgccggagaagccgaaggcgcagcggacactggtgccgcgtctgggcggcaggagccggcaacggcacggaggccaggatgactga

SEQ ID NO: 510672 - DNA, 219 bp, Stenotrophomonas maltophilia
atgactgatctcattccctccggcccgcaggcgcttcgcaacctagccgacacgctggagcagcaggccagcgtttacgacctgcgactgtggcgcgaccgtggccagcgctccacggttgcggaggcgttccggcattccgcgtccatcgcccggcagcaggcgaacaagctggagcggatgaccgagcaactgcggggcgcgtccgatggccggtga

SEQ ID NO: 510673 - DNA, 723 bp, Stenotrophomonas maltophilia
atggccggtgagcgcggcgagatccacaccagggcggcgcgcaggcttcgagcctgcagccccgctgctcgcgggacatggttggatgtgcaggcccacctgcaggcgcagccgacgcccggcgctgcccgggtaaccctcgcgcagatcgccgctgccactggcgctgccatgccgctgctgtccgagctggtcgcggccggtgtgctgatcggatccgatgcgggcggggcaccgttcacctgggcagcaagccatggccgcagcgaaggctcaccggtggtgttggtgcccgatgacggagaggcgtgctggtactgcccatcgatggtggtgggcgagtacatccggcagcagcaggcgctgatcgcccgtaggcgagttaaggcagtgaggcggcacaagggctgtgcatcaccacggttggaccttggtgaagcgaaacccagcaacggcaatgctgcgccatcggcagacacgagcgcccgtgtgtgcttggagatgcgcaaggcaggggtgcgtggctcgatcccgacccacccgtcgctgctcgcagccatcgtggaaggtggaacgccggaaatgttcgctgaggcagcaagggatgctgctcgattggggaagggattcatctgggccgtggccactgtccgggcgaggttggagggcgccgagcggtcagcctcgcgcgcgcgcgcgtttggattcgggcagtcgcgatga

SEQ ID NO: 510674 - DNA, 255 bp, Stenotrophomonas maltophilia
atgggggtgcgtatggtgaggactgatgccgtagagggccgcatcgattggttccggctgctggacgacctggcgcgcgcaggcgttccggtcagctccgtggcgcagcacatgaacgcaccgcgctctacgatcctgggctggaagcagggcgcagagccgaagtaccgggacggcgagctgctactcgacctgtggatggcgatgaccgggcgcagccggcacgaggcgccacgcgtggaggtcgtgaggtga

SEQ ID NO: 510675 - DNA, 303 bp, Stenotrophomonas maltophilia
gtgatcggcgtgcccgtggtcgtcgccgcctcgcggcctttgggcttcccgctgctgctgctgctggtgctgcgaagtggggttgccccacccgggtccgccgcggtcgccaaggcccgcatggtgcaggtcctgcccgctgatcgggaggcctgcggcgatggttactggctgcgggtgggcctgaaggagatttacggcagctggctcgcgccgagcaggtacatctacgatccgggcaagcctcgataccgatgggtggtagggcggcgccggcgtaactccgggaatccccgggcttaa

SEQ ID NO: 510676 - DNA, 537 bp, Stenotrophomonas maltophilia
atgcccccgaagaccctgacgccccgcgtccccggcgaagccttgccgcccaccgagaccgatgcggataccgctgccgcaggtgctgacgtcgtggatgccgccggcggtgccaccgaccccgccgaccaactgcgcgccgagctggaggcaatcgcctcgctcaacgtgcccgaagtgctggaagccctgccgaccctcagccgcgacgagctgatcctgctgcacgccatcgagacggacggcaagggtcgcgtcaccgtgctgggtccgatcagcgaccagctggacgtgcttgcagctgctcagggcgagaccagcaccggcccggccgatggcacggccgctgctgccggacgcctgtccgacgcattgaacgctggcgatgccgacgccgcctggaacgatccgcgcggacatgctgcggcagcaaagaagcgccgtgccggcgctggcccgatcaccaaggccgagcagcctgcagcggtgctgacggccgagggctgggtcgtgcccgaacctgagccgaaggcctga

SEQ ID NO: 510677 - DNA, 348 bp, Stenotrophomonas maltophilia
atgtgcggcaacaaggccaagattctcgacccggccgggctgctgaccggcaagaacgccaagtacgcggatccgctgggcatcacgaagacggccgtaggcgacccgaccggtgacctgcgcaaggaacgcgcgcgcctcgctgcccaggttgaagccgaccggaaggcgcaggaggacgcgaagaacgtcctgccgcgcgcacgcaaccttgccgcgctggacgccgccgattccaccgccgcctccctcaactctcgcctgaagcgccggagcgcctttgctgtgtcgctcctgcagggcggggcaaccccatcgtcgctgctggccagcggaaacaggagctga

SEQ ID NO: 510678 - DNA, 228 bp, Stenotrophomonas maltophilia
atgtgcggatccaagaagcagccgaaggtggtcgagcgcgacctggtggccgagcagcgcgccgctgaagccaccgccgcgtccgaggccaacctggcgctggccagccgccgccgccgccgccgcgagagcagtctgctcaccctgggcgctgatggtctgaccgggcagcgcggcacgtcgctcttggcgcaggcccagggccgctccacgctcgggggtgcctga

SEQ ID NO: 510679 - DNA, 1599 bp, Stenotrophomonas maltophilia
atggacgcagggcgcatctgcaagcggctcaacgatctgaagtcgcggcgccagccgcacgagaccgtgtggcgcgactgcttcgagctgacgttcccgctgcgcgcccatgggttcaacggcaatgtggtcgacgcccagcaggcgcagaaccagaaggcgcgcatcaccgactcgaccggcaccaacgcggcgcagatcctggcatcggggatcatgtccggcctgacgccggcaaactcgcgctggttcgagctggacgtggacagcgagacgccggacgacaagcgctacctggacaacgccgccgagacgatctggctcaacatccatcagtccaacttcgacgccgagggcttcgaggcctgcctggacaccgtggccgctggctggttcgcgctgtacgtagaagagaaccgggagcagggcggctactcgttcgagcagtggcccattgccggcgtctacgtgaccagcactaggcgcgacggcctgatcgacacctgctatcgcgagcattcgatgaccgccgctgccgccgccgagaccttcggcctggccaacctgagcgagccgacgcagaagctggtgaaggagaaacccgacgaccaggtggctttcatccacgcgatccagccgcgcacgccgtttgcggtcggggcgcgcatggcgaagaacctcccattcggctcctacgtggtcgaggcgaagaacaagcacctggtacgcgagtcgggttaccacgagttcccggtaatcgtgccgcgctggcagcgcatccccgacacgtcctacggtgtgggccccgtgttcgaagctctgccagatatccgccagctgtgcgagctgaaggccatgaacatggccgcggcggacctggccatcggcggcatgttcgtcgccaccgatgacggcgtgttcaatccccgcacggcgaagctggggccgcgcaagatccttgtggccagcgaggtcgacaacatcaagccgctcggcactggcagcaatttccagctggccgagtacatggtggcggacctgaaggcgtccatccgcaaaaccttgatggccgaccagctgcagccgcaggacggcccggccatgacggccaccgaggtgcacgtgcgggtcgagctgatccgccagctgctggggccgatctacggccgactgcaggccgagtacctgcggcccctgatcgagcgctgtttcggcatcgcttaccgcgctggtgtgctgggcgagccgcccgaatcgctggccgaccgcgactactcggtgcggtatgtctcgcccatggcgcgcgcgcagcgcctggaagaggtcaccgccacgcagcggctgttcgagggcgcgggcatgatctccaaggctctcggtggcgatacgtctgtgttcgaccgcctcaatcccgacgcggcgctggagctgatggccgaggggttgggcgtcccgcagcgcgtgatgctcaccgacgacgagctgcaggccaagctgcaggcgcgacaacaggcggctgagcaggccaagcagcagcagatgggcgagcaggccatgggcatggccgcgcaggcgcagctgcaggggcaggccgcatga

SEQ ID NO: 510680 - DNA, 249 bp, Stenotrophomonas maltophilia
atgacccgggtcacccaagtaacgccggagatgtacgcgcgcgtcttcgagaaccatgccgagggcgcgctgatcctggaggatctggtccgcatgttccatcgccccgcaaagctgaccggcggcatcgacgcgatcctcaacacctaccaccgcgaaggctcccgggccgtcgtggactacatcgttacccaatgcaaccgcgcaaacggagtggacacagatgagcgaagtgacgaacaacaatga

SEQ ID NO: 510681 - DNA, 825 bp, Stenotrophomonas maltophilia
atgagcgaagtgacgaacaacaatgacggcggccagggcggcgctgaagggcagcagggaagcctgctgaatcagggcggcgggcagggaggtggacagaacgactggctgccggagaagttccgcaccgtgaaggaaggcggcagcgacctggacctggaagcctcggcccgcaagctggccaccagctatgccgaactggagaagtcgcgcggcaccaccggcacgctgccgaagaccgcggccgagtacgtgatcgaaggcctgcccgatggcgtcaacgtcgacgaggtaaagggcgatccgctgttcaaggggatcatcgaccgcgcccacgccgccggcatcccgcaggaacacgtcaacttcttcctgggcgaatacttcggcttcgcgccggatctgctggccggcaatgccgcgatgagccagcaggacgcacgggccgagctgtcgaaggtctggaccgacgaccaggccatgcagcagaacctgggccaggcgttccgcgctgtgaaggcattcgccgcagaaggcgacggcgccggctcgctggcccgcctgcaggagaagttcggcgacgacccggacttcctgcgcttcgccgcatcggtcggtgccgagctgagcgaagacaccccgatcagcggcaacccggcggctgagcaggactgggatgcgcgaatcgcggcgatccgggccgatccggcctacatggacgcgaagcacccgcagcacgaccagaaggtgcgcgaactgtcggacctgtaccagaagcgctacggcacccagcagcgccagctcggcgcatccgcaactcgctaa

SEQ ID NO: 510682 - DNA, 258 bp, Stenotrophomonas maltophilia
atggaaaaccaacaccgcaagatcaccggataccgcgaactggatcaggccgagatcgacctgatgaacgaggtcaaggccaagggcgtcgagcttggcgagctggtaaagaggctggaaggccaccaggctcgaatcactgccgagcatggcagcggcgacgccgagccgttccgctggatcgccatcggcaagacccatctgcagcagggcctgatggccctcactcgtgcggtggcgaagcccgagagcttctag

SEQ ID NO: 510683 - DNA, 867 bp, Stenotrophomonas maltophilia
atgagccagtacatcaccgaagcgttcgtgcagcagttcgccgacaacttcaagcacgtcgcgcagcagaccgaatcccgcttccagagcgcggtcaccatcgagagcaacatcgtcggcatgtccaagtcggtgaaccgcctgggccagcgcaacgcgcagcgccgcctgacgcgccacggcgacaccccgatcaacgaccagccgcattccacccgtttcattgacctgctggactgggaagacggcgacatgatcgatgacctggataaggtccgcatgctcgtggacccgaccagcgattacgtcaaggcgatggtcaatgcgattaaccgcaccaaggacgacgtggtgatcggcgcgctgggcggcaactcgcgcagcaccaccggcaacatcgccctgccggcgtcgcagaagatcgccgtcaacgcctcgggcctgaccaaggccaagatcatccaggccaagaccctgttccgccgcaacgaggctgacgccatcggcggcgaggaactgtacatggcgtacagcgcccaggcggcggccgacattctggccgacaccaccctgacctcggcggacttcatggctgccaagttcctggaaagcggcgacgtggtgggcaagtggatgggcttcacctggatcccgtccgagcgcctgccgaaggtcggcaacacccgcttcctgtacgcctgggcgaagtcgggcgtcgcgctgggcatcggcaaggacaccaccaccaaggtcggcgaggacccgggcaagggcttcaacgtccgcgtgtacgccaagcaggccatcggcgcggctcgcgtcgaggaagagaaggtcgtcgagatcgccacgcaggaagcggcctga

SEQ ID NO: 510684 - DNA, 519 bp, Stenotrophomonas maltophilia
atggcagtagtcaacaagggtagcgccgcgatcaccgcccgcgattccgctcccaccctcggcgtctcgcagctggcgtccaccaaggtcgccaccggccgcgtcaaggaatcgatcggcgtcattgcggtggccaacggcgacagcatcggcagcgtgctgcgcttcttctccatccactccagctggcgcgtcggcgccgtgctggcgtcctgcaccgcgatcaccaccggcgcggcggatatcggcctgtatgacctgccgacccgcaacgctggtgcagtcgtggatgccgacttcttcgcctcggcgcaggacctgtcggcggcactggacggttccaacgtgctgcgcgagtcgggcctggtcaccgtggaaaagctggaatggccgatctggcgcttgctgggcctgcccgctgacccgggcctgtactacgacgttgcggccaccctgaccggtgcggccaccgcggccggcttcgtcgcactgaagggtcacttcatcgacggcaactga

SEQ ID NO: 510685 - DNA, 612 bp, Stenotrophomonas maltophilia
atgatccaaaccgcaaccgccgtcagcatctgctccaatgcgctgctgtccctgggcgccgagcccatctccagcttcgatgaggcagacggctacgccgacctcgaccgagcgaagctctgcgccagcctgtatccgcaggtgcgcctgggtgtgctgcgcagccacccgtggaactgcgcaatccgccgcgtgcagctctcgccggacgcccagccgcctgccttcggctacgccaggcgctttctgctcccaggcgactggcttcgcacgctgggcgtgggtgaccgaggcgaccgcatcgacttccgaagcgaaggccgctacctgctgagcgacgctgtggtgttcccgctgctgtacttggcggacgtggacgagagccagtgggattcgctgctggttgacgccatgaccgcggcgctggccgcacggctggcgtaccccgtcacccgttcggccagcatgatcgaggtcaagaccgccgagctgcggcagctgatgcagcaggcgcgctccgtcgacggccaggacgacccgcccgagacgttgggtgacttcccgctgatgacgtcgcgccttggcggctacggctggggcagccaccgatga

SEQ ID NO: 510686 - DNA, 2214 bp, Stenotrophomonas maltophilia
atgaaagcgaacaccgtcaagaccaacttcaccggcggcgcgctctctccgcgcctgtacggccggaccgatatcgaccgctaccagagttcagccaaggtgctggagaacgtcctggtgctggtgcagggcggcgtggagcgtcgctacgggcttcgctatggccagccggccaagcacggcgacaagcacgccgagctgattccctacgtgttcaaccgcgaccaggcctacatgctggagtttggcgacgcctacctgcgcgtgttcctgcaggacgggtcgcaggtcgtgagggaaaccacccctggcgtgttcgtcccctacgagatccagaccgactatgccgaggccgaccttgccgcgatcgactacgtgcagagcggcgacaccatgttcctgtttcacgagagctacccgacccgccgcctgcgccggtttggcgatgcggcgtgggtgctggaggatgtgccgtgggtaaacgttccctatgccgaggtgggcctgcgcccggcggccagcatcaccctggacagcgccgacctcggcccaggccgcacgctcaccgccagcgcagccgccttcatggcatcggacgtcggccgcgagatcgagaccgagggcgggttggcacttatcaccgcgtacaccagcaccaccgtggtgaccgtcgacgtcctgacgcctttccctggcctggtcattcccgccggcgagtgggtcatcacggggagcccgtttaccacgctgacgcccacctggtcgggcggcaccggtaacgagcagcctgcagtcggcgcggccatcacactcacgctgagcgtcgctggatggcgcactgatgacgttggcaagtgggtggatatcaacgccggcctggtgcagatcaccgcagtgacgtccgccacggttgccagcggcgagcttcgcaaaaccatgtcggcactggtggcaggaccggccttcgcgtggtccctgatgggcaacgcctggggcggagccaacggctacccgcgcaccggcacgttctacgagcagcgcctctgggcgggcggctcccggctgttcccgcagaccatgtggggctcgcgcatcggggaatacctggatttcgagctgggggccgaagctgacgatgccatctccctgtcggcagccagcgagcagcaggacgccatcacccatctgactaccttggggtcgctgatcgccctgagtgccggcggcgcggtgacggcgcgcggcaccgatgactcggccatcgccccgaacgccaagaacaagatcaagtcgcagcccaacttcggctgcagccgcgtgtcgccggagcgcatcggcaacgagctgatgtatgtgcagcgggccggccggaagatccgcgcactgtcagccgacagaatcgacgccgacatgttcgctgcaccggatatcaccgtgctggccgaacacctgttcaagcccgggatcaccggcatggccttccagagcgagccggaaccggtgctgttcgcgactgtcgccgacggcactatcgccacctgcaccatcgatcgcgatcaggaggtcattggctggaccacccagaagacgcaggggcgtttcgacgcggtggcggtgctgcccaccgaggacgggagccaggtgtggaccatcgtcattcgcgaggtgaatggccagcaggtgcgctatgtcgagctgttcgacccggagctgttcaccgacagtgcgatcaccggcaccagccccaccggcgagaccgtgtgggatggcctggaccatctggaaggcctgaccgtgaaggtcaaggcagacggcgtggaactgaacgaccgcgtggtgactggcgggtcgatcaccatcgagcgaccagccaaggcaatcgaggtcggactgaaattcactccgcgcgtggagctgctgaggccggccctgcagacacaggaaggaacgtcccaaggtggcgccacgggtatctccaggatcgtctgccgcttcctcgagaccaccggcggcacggtcaacggtcagacgttgttcggccgcgagatggggctgggcgcactcgacaagccgccggtcctgttcaccggtgacaaggcgatcgaaaagctgggatggggcaagggcgacttcaatgtcgtgatcgaacagccgcagccctatccgttccacctgcaggcagtcatcacaaccatctcggtgaacaccccatga

SEQ ID NO: 510687 - DNA, 447 bp, Stenotrophomonas maltophilia
atgatccgtcacgccacccattccgatatcggcgcgcttctcgtgctggctgaggccatgcacgccgagtcgtcctatgcgcgcttcccgttcgccccggccaagctcgcggcgctgttccgtgcgctgatcgatggcgcggggtgcctgttcgtggccgaagaggatggacgggccatcggggtcgccgccggttactgcgaggacttctggttcgctgatgcccgggtggctggcgagtacgggatcttcgtgctgcctggacaccgcggttcacgcgccggcgtacagctgcttcgggagtacgtcgcctggtgcaaggcggcgggtgcggatctgatccaggccggcatcaccacgggcgtcacgctcgatcggaccgtgaaggtctaccagtcgatcggcttcgagccgaccggcactgttctcgaatacaagggggaatga

SEQ ID NO: 510688 - DNA, 480 bp, Stenotrophomonas maltophilia
atgggcgtagccgcaattcctgtgatccagtggggcgccacgcttctggctgccggcgctgccgtgcaacagggcatcgaaacgaagaagtacaacgagtacctggccgaccaggcggaggccgaccagcgcacggcccagagcgcggcggaggtggaggcaatgcgcatccgcaagcaacgcgacaaggtccggtccgatgcgattgcagagctggcatcgtccggcgtggacgtgaacagcgatacggcgcttcggatcgaccagcagatcgtgcgggattccgaagaggacgcgttcctgaccttggctggtggcgtcgaccgctccaaccggttggcggcggaggccgatggctatcgcatcgcaggcaagcaggcccgtaccgccggcttcgtgcgcgccggcacgtcgctgctgagtaccgctgccaacaacggccggggctggaagcgtccggcgactgcaggaggcgcctga

SEQ ID NO: 510689 - DNA, 2100 bp, Stenotrophomonas maltophilia
atggccaagattcccatgggtggcttcggccgcggtgctggccaggcgccagttgtgcagacccgggttggtccagccggggtgggcgaggttgcccaggccgttggcgagctgggccagaccggcatgcagatcgccgaccgggctcagcgtgcgcaggaggtggagctgcgtcgacagaaggaagaagctgagacggtggcacgcgcgcgcgccctgaatgcacagctcgactatgagatcgaggtgcaggacgccacgctgcagacggaggacgcgatcaccaccggcagcatggattaccgcaaggctggtgaggacttcacccagcgcgtgagccagatcaaggcgccggatatcgatggtctggccccggaggcgaaactcgcctatgaccgcggcatccagcgcacggcgcgcaccggtgagctgaaggtgcgacgggcagtgcagactgcccagcgcggtgaactgcgcagccaggtgacggccggcatcgacaagctggggaagatcgccggcatgcccgatgcggatatcgatgcgatcaacctgcgcggcgaacagcttgtgacgaccatggggctacaggccggccttgacgacaacacccgcgcgaagatgctccaagacttcaaggaccggaactggacgtcgcaggccacccagcgcgccatctttgcgcgcgagaacccggaagccctggccaagctggaacacgacctttccgcgtccgatggctactacgccgacaagctggacgccgagaagcgcaacgcgctgctggccaatgtgaccacccgccagcagacgctgctggatcgggcggagcgcgcccaggatcgccttgatgccaagggcgagcgagtcatcgccgcatacgagcgccaaatctccatcggcgttccgacgccaccggatcagatggcgaagtgggccgatacggtgaagggaacaccggccgaggccgagttccagagcatggtcgagcaggagaagacggtgcagcaggtgctgcgcctggccccggatcaacagcaggccttcgtgcagaacctcgaagccaagctgatgaccgacggtggcaccgttgcgcagaaggggaacctggatcgcctgaagaacgctgtgcaggcgaaccagcagcagctgctggatgcgccactgctctacaacgcctcgcgtgagggcggcacggttgagccgctgaaggtgcaggctttggcctcgccggcggatgcgtgggaggtcggcgcccaactcaacgaccgcatggccaccatccagagcatgcgcaagcgctggggcagccaggtgcccgagcggctgttgctgccgcaggaggtcaaggtgttggcggacacactgaaggagaagacggccaaggaccagaccgcgatgctgggtcagctgcgcaccgctgtcatggatgacaagctgttcaacaaggtgatgcagcagctcgcgccggacgagccggtggtggcgttggccggcatgctggcgaccaaggagcgggccagcaccacgctggccacccactggttcaagccgaacaagacggccggcgcgcgcgacgtcgccaccaccatgctggagggcaatcgcctgctgcagggaaagggcgaccgccagttcccgctgccacctgatgcgcagttccgctctgcgttcaacgacaagatgaaagaggtcttcgcaggccgccctggcgccgccgatgtggcgatgcaggcggtgcgggcctactacaccggcaaggccgctgccgatggggacgtgagtggcgtggtggacgatggccgcctttcggaagccatctcggcatcgctgggatcggtagtagacgtgaacgggcaggggaaagtcctggctccatggggcatgtcggccactgacttcgaggaccgggcggaggctgcgtttatcgctgcggcgcggaaggccggtcttcccgattcgacggtgaatggtttcggcgcgttcggcttggtccagcagggcgagaacaccttcttcgtgaagggcggaatgtccttcctcaatggcaaggatgggtcgccgctggtgatccgtatcgacgggagcagccaaccgtga

SEQ ID NO: 510690 - DNA, 2409 bp, Stenotrophomonas maltophilia
gtgagcgtatttgagatcgacgaacagggcggtaaggcgctgagccagcgcgttaccgacaatcccctcgacctgtcgaaggtcacgcccggcatgttctccggctttttcccggcagcgggcaaaggtgcgatgcaggcgttctctacttcgttcacggcagccgcaatgtctgcgtccccagcggtaggggcgcgagatgactacctcagttcgttccagagccctgattcgctaaagctggcgcgatccgtcggcttgaaaggtgacacgacggttccggaaatgacggggcaggagtggtacttccagaatgtggtcgacgacgttggcaaaaatgcctacgactattggacacccgaccctgcgcagacgggcgctgcggggcggattgtgaacggtctgatgcagtccataaccccccttgttctggcaggcggaaacccttctttgctggcattgaacgagggagtgggtgcccctgcccggctggtaaatgacggggttgatgcaaagacagcgaccggcgtcggcattgtgtcctcggttgctgcagttgctggcgtcaagctccccccggctttgggatcgacgctggcgcagcgcgttgcttcgggcgcaggcctgaaccttgcgttgggatccggggcctcagccatccaatatgaggcgctgaaggctggtggatacaagcagcaagcccaggcatacgatccgttgaacgttgaatcacgcgttctggacttggtgacgggcgctgcgtttggcggcatcgcgcatctgcaggcgccgagcgtgaccagtgcgcagcgtgatgcggtgctgacggctgccaacgccgaacacctgcaggtgaacactgcacctggcgttcccgccaatgatctgtccagcgtcgcgcatcagaatgcgatggcgtcggcaatcagctcggttctgcgaggtgagccggtcgacgtggccggcatgatcgacgctgctgagttcctgccggtgcgtcgtactggcatccctgcagagtcggccgcgaactacgagatggggccggcacgatacgaagcgtatcgccgcgtgctggagtcgggtggagatcccaacgccaagaacggcgccagctcggccaccggcatcgatcagttcactgccggcacgtggcgccgtatcgtcgcccaggccaagccggattgggcgaaggggctgaacgacaaccagctgctggccgcgcgcagggatccagcgaagtcgggcgagatggcccgcgcgctcgacgcccagaacacggcagtgctggaggctgccggcgccgacgcaaccgcgcacaacctgtacgcggcacatcacttcggcgcggagcgaggtctggatttcgcccgggcggccgacgacacgcccatggcgcgcatcttgagcaaggctcagatggacgcgaacccttacctgaagggcaagaccaagggcgacgcgatcgccaattgggacgaacgcgcccgtcgcggcggcatcgaggtgccagagactgtgcgcatggtgcgccaggatgtggccaccgccaccgccaccggccctgctgcggaggttgcgccggcagcgacgaccacgccagcagaggccgcccagatcgtcgatcaacggctcagcacgctggacgacctcgcccagcgggaccggttgagcccggaagaactggccgcctaccgtgaagaggacgccgcgctggtggaggtcatccggcggcaggagcagctgcagcgcaacaacatcctgccagccgacccgcgcgagcgcatcaccgccgaagacttcgacgcgctgaccgctcgccgcgttgagatccggcaggcaatcgagcgctcgaacaacgccaagggttacgagacggtggcccagcagctacgcagccgactcgaacgcatcgatgccgattccgatctggtggccttcgccgaccggatcagcggccgcgaccagctggtacgtggctcccggccggcgctaccggagaccggaaccacgccgcccatggaaaccgcccgtcggccgcgtcccggcagccagccggctgcggcaggcccggactggatgacccctggcgccctcgatgtggaggccgctggatctctggcaggtctggcgcgggctgaagccccggccatccccgcaccgcgggatgcaccgacggcagcggcgcgccagcagcatccgggcggaagtcaggattccgccgacgtggcgcagcaagctgctgtagaggcggtggcagccaatcccgacctgcagatcaccctggaggatggaaccgtcgtcaccgccgccgacgcgctggcaagggccgatgccgatatcgcccaggcagagatcgattcccgcggcttcgcagccgccgttgcatgttcgctgaggttcacctga

SEQ ID NO: 510691 - DNA, 2580 bp, Stenotrophomonas maltophilia
atgaggtctgagtgcattgatgcggtaagtctggccatcggccgccgtctgaacgccgccgaggtgaaggggatcgaggaccggatcagccgccacatgcggcaggcggcggtgcgcgatccgcaggcggcgctggcgcgctcccccgagcagcggctgaccgaagcggcgaggacagcggcgcaggagctggtgcacgaggcggcgaagaagaagcagcgggtggccctgacgatcctggcgcatgaccgggtgcagaaccacctgaagcagttcgccaacaagttcgacggcctggatcgcatggtggccttccacgcagatggccgcgggaacgctttgtccgtggagactcgggccaagacgatcgagcgcgattctctccgtcagatgctggacacgctggaggccacgaacccgaagttcttcggcctgctggagaatccggagggcgtcgccaacctggtgcgcgagttacacgggcagacaaccggggacgccgatgcggctgccggggcgaaggtgttccactcgatcaccagcaccctccgcgaacggttcaaccgctcgggcggtgacgttggccagctggatgactggggcatgccgcaccatcactcgcaatcgcaggtcgcgacggcaggccgggaggcttggctgcagaccctttccgcagaagagcggaggaaggcaaagttccgtgggacgccgccgccgatggccttcgcccgcgatgcttggatccgggacgtgattcccctccttgaccgcaagcgctacatgaacgaggacggctcgcggatgactgatctggaggtggctgacttcctcaaccacgcgtggatgagcatcgccactggcggaatcaacaagctcgagcctggccgcggcggcgtgggtggtgggatgcgcgccaaccgcggcaacgagtctcggcagattcacttcaaggatggcgacgcctatttgcagtaccagcaaagctacggggagcggtctctctatgaggtgctgaccggccacatcgcgggggtgtccaaggacattgccttggtagagacgttcggacccaaccctgatcttgcattcggactgttccgcgacaaggccttgcaggagcaggtccttctcaacccgggcgatgcggggaagctcgaaaagcggaagaccaactccgagaacctctacaacctggtggctggccgaacgctgccggtggcttccaagagactggcggagaccttcgacacggtgcgtaactggctcgtgtcctctcgcctcggatcagccgtcatcacctcgttctcggacgacgcgacgatgtatctgtccgcgcacgttaacaagctgccggccatgcgcctgttcgccaacgaactggccgcgctgaatccagccaaccaggtggagaagcgcatggccctgcgcgccggccttgccatgaacacgatgctgtcgtcgctcaaccgattcggcagcgacagcctcaccagcacgttctccagcaagctggccggtgccacgctcagggccagcgggctgaatgcaatcactgaggcacggaagcgtgcctacggcgtaaccttcatgcacgcgctgggggcggtggtgcgggatcacgggagcctgaaagcgatcgatgctgccgaccaccggattctgctgtccaagggcatcaccgacgccgactacaaggtgtggaagctggccaatctcgaagactggggcggcgggaacgacaccatgctgaccccggagtcgatctaccgcatccccgactcggcactcgccagcatgggtgacccgaccaccttgcggcagaacgccgcgacgcgcctgctgggcgtcgtgttggaagaaaccgacatggccatcatcgagccaggtgcacgagagcggaatctgatgatgagtggcctgcagcgtggcacctggaagggtgagctggctcgttcagtgtttcttttcaagtcgttccccatcgcgatgctgacaagacacctccagcgtggctggtctatgccgaccggcaccggccgcgcggcgtacctcgccacgctgatcgcctcgaccacggtgatgggcgccatgtctatgcagatcagcgaagtgttgaccggccgtgatccgcgaaagatgaccgacggtcgattctgggtggcggcaatgctcaaaggtggatcgctcgggctgtatggcgacttcctcttctcggacactacgcgctacgggcaggggccggtggcctcgctgctggggccggtcgtggggctgttcgagagcgcattcgggctgacccaagggaatgcgatcaaggccgcgcagggcaaggaagtggatgcgggggcggaggcggtgaggtttgccaagagcaacatgcctggcgcgaacctctggtactcgaaggccgtcatggaccacctgatctttcaccagctgcaggagtatttttctccgggctacttgcgcagaatgaagcagcgcagcgagcgcgagttcggtcagaaatactggtgggaacccggtgaggcggtgcctgatcgggctccaaatttggaagccacagcgggagaaggatga

SEQ ID NO: 510692 - DNA, 315 bp, Stenotrophomonas maltophilia
atgggaccaggttcgatttttgtggggatggtggtgagtacgttggcaccgcttctgttgatgtttccgctcagctactacgcaatggtcaaggggcgaaatctgaactacgggtggaagcggctgacggccgccttctttgcggcccttctgggtggagggctggtgtacgcaactctctgcgttgtgcttcgaatcggcacaatggcagcggagccgaccttagatctatccatcatcctgatccacgtggttcctctgcttgcatccgtccttgccctttgggcattcaagtcgaggccgccgaaggggtaa

SEQ ID NO: 510693 - DNA, 327 bp, Stenotrophomonas maltophilia
atgcgtgacgatcagcgccagcgcctggcggacatttccgaagccctggccgaggtggccatccgagacgcagaccccgcgaactggacggcggccgataagccgctgtgcgacatgaccaaggaagaacggggcgacgcggcctggtgtcgcaagacggcggtgcagtcggtggcactgctgggccgtctgcagcagatcctgcgcgatacgggtggcaggaagccgggcgatgacgaggacccggaatcggatatcaagcgcgccgagagggaagcgaacaggctgctggagcggatcggggcgagggcggatggcaacgcctga

SEQ ID NO: 510694 - DNA, 1671 bp, Stenotrophomonas maltophilia
atggcaacgcctgatcggatccgcatcaccccgaagatcagcttcctggccttcttcttcctgtgggccgagcgcatggggtgggaggtgcccgagctgcacatccgggtctgcgtgttcctggaggatgcatggcgcagcaactcgccgcttctgctgctgatgctgccgcgcggccacgccaagtcgaccatcctggaagtgttcaacgcctggatctactactgctggcggatgacgcggatccttcaccagtccgagtcggacagcactgctttgaagaccagccgcggcacccagaacgtgctgcggaatcacccactcacccgtgatctgctgccggcgagcatgggcactatcgagcagtggtgggtcgagagcgccgctgcgcatgatgcgcgcaacgccagcatgtacgcacgcggcatcctgtccaacaccaccagctcgcgcgctgacttcatccagaacgacgatatcgaagtgcccgggaacatcggcacacccgaggcgcgcgagaagctgcgctacaggttgggggagcagatccacatcgctgtccctggcgccccgaagctctacatcggcaccccgcacacccacgattccatctacgaggacgtgaagcgccagggtgcaaaggccatggtggtccgcatgttccgtgacgaataccgcatcgagaaggctgagcgcggccgctaccaggttggattccaccccgagttcgtgttcatggggatcggcgaggcggcgcggctgctggttgaaggtatcgactacaaggtcgagggcaccgtgctgttgctggacaatccggccggcgcactgatcgactgctatgccggggcggcctggccggaacgcttcgacgcagaggaaatgcagctgcgccgccagcagacgcggaccatcggcgaatgggattcgcagtaccagctgcatgccaagcccgtgacgcgtgtgcgcctcgaccctgatcggatcgtcccctacgagctgcagcccgtcatccgcaaggcgaacggcgcgacggccatgttcctcggggccgtgcagattgcaggcgcggcggtgcgctgggatccatccagcggcaagctgcggtctgatgtttctgctgtcgcggtcgtgctgcaggatctgttcggtcggcgctatctgcacaggatcgagcagctgaccggtgaggtggccgagttcgacgacagcgggaagcgcatcatcggcgggcaggtgtggcagctctgcaacctggtcgaggaattgaacctgccgcgcatcgttgtcgaaacaaacggcattggcgggttcgcgccggccgtgctgcgggcagcgctgaagcagcgtcggctggtcccatgcgcggttgttgagcagcagtccacggtcaacaagaacaagcgcatcttggaatcttgggagccgctgctgctggcgaacgggcagctgtgggcgcacgttgacgtgctgcgcggcccgctgtgggaccagatgaaggactggaaacccgaagtgcagaaccagcccgatgaccttctggacgccggcgctggagcgctgaccgacacgcctgaacgggtgggcaaaattgtcgggaacccgcacgccacgccccgcgaccattggggcaccggcgctggggtgtttgaggtcccattcgagcgctga

SEQ ID NO: 510695 - DNA, 249 bp, Stenotrophomonas maltophilia
atgaaagagcagatcacccaagaccttgccgtggccgcggcgaagattgccccggccgccggcgtaacggtcggcacgtacaaccccgggtacacgctcagcgacgtggccgtggtctgcaccatcgtcttcaccctggcgcagacgttcaccgtcgtggtgaagaactggggcgattggagcgcatggtggatggcccgatgggccaccgtccgccgggtgatcgccaaggtggcccgccgtggctga

SEQ ID NO: 510696 - DNA, 543 bp, Stenotrophomonas maltophilia
gtggctgaccaggcaccgagcggcaagggccgcaagtttgggtttgccgccgccccggccgcgctgatcctggcgctggtggccgccctcggccaggacgactccgcgcacgagagccggaagtatttgccctatcgggattcgggtggcgtctggaccgtgtgcgccggcatcaccggtccggccgtggtgcccggccgccgctacacacccgccgagtgcgggaagctcgagcaggactatgtgcaggccatgctgcacaacatgggccgctgcgtacgcggggaattcgagttccacgaggtgaaggcctggggccacttcgcctacaacgtcggcaccaacggattttgcgccagcaccgcggccaaacgactgaacgcaggcgagcgcaccgcggcctgcgatgaaatctggaaatggcgcttcgtcaccatcgatggcgccaagcgcgattgctcactcccgcagtggcggtcgaagtgcggcggaatcatcgaccgccggcagtgggaaatggcaacctgcagaggaaccctgtaa

SEQ ID NO: 510697 - DNA, 267 bp, Stenotrophomonas maltophilia
atgcgactccttccgattctgatcctgccgctgctgctgacgtcttgcgcattgctcgggaggcgcacgaccgagccatacgtgccgcctgccgggtgcagcgaacgagcgattgccctgcggccgccgccgccgccgagcggtagcgacctggagaagtggaagaaatgggccgcggcctacgttggcgccgttggcgcctatgaggacagcgagaacaagcgcggccacaccgcggactgcctggaccagcaccgcgggaaatag

SEQ ID NO: 510698 - DNA, 1545 bp, Stenotrophomonas maltophilia
atgaccgtccccgcatacaccgggcccaacacgtcaaccgccaacggcgtgacgaccgtgttcccctacagcttcccgatcctcgatgccagtcacgtcctggtgaccgtaaacggtctccccagaatcctgggcgtgcactacgacgtgacgggtgtcggcaacctcgccggcggcgatatcgtgttccatgccccgccggcggcggcctcggtcgtagaccggcggcggaacatgccctacacgcgggagacaaactacacgaatctgggcgatttgctggccagcacgctgaacgcggaccaggactccccggtgatgatgatccagcagctcgctgctctggcgctgctgatcgagctcgatcccgatggcagtgggcagttcgtgtggaacgcacgcggaaaccgcatcatccgtgtgggcgatgcaatcgccgacgctgacgccctgaacaagcgcacggcgctggtgctgatcgagcagatccagaacggcggcggcaccgtgggtgtttcgccgcggctgtggaccttcgtcggcgacggcgaggtgacagatttcccgctggccggagctgacgtaacggatccgctgttctacgacactgcggtggagctggccgccaacgcgggcaactacaaggtttcccgcccggtcgacgccaacggcgtgggtgaattcctgatcgtgccaggcgtcagcggcgcaccgcccgccatcaggttcctgcagcctctcggggacggagtccgcggcttcaccaccctgcgcggctacgcgcggccctggatcggtcagcagccgatctacaccgtcgcaccccgaatcatcagcgtcaccggcaacgtcacgctgggcggggacatgcacaacacgctgatcctggccaactcgccgaacccgatcaccatcaccattcgcgcgaacaccggcggcggcgcggactggaaggaaggtcagttcttctctgtgcagcaagtcgggaccggccaggtcaccctcgcggtgcagggtggcggcgcgctcactgtgccggagtcgttccaggccaagagtcgggcaatcgggagcatcttcagcgcgacctgcaccgctcccgatgccgacgcatggaccgctgcgggtgacctgctgcgcgcggcgtccaatcccgacctgcagtgtttcgtgctgcccgatcgttcagcgctgatcgggaccaacatcaccaccggcaccaccaagggctcgctggtgctgccatatggcatggtcctctcggcggtgaaccagcgcggcatctacgccagcctgtccgaggcccagcccagcggcactccgctcatggtcgacgtgaagcggaatggcaccagcatcctcaacgtgaaactgaccttcgacaatggcgaacgttccacgctgacggctgcgctcccgcccacgctcgtgccgggcggcgacgtgctggccgctggggacgaaatcaccttcgacgtgcagcaggtcggggccgccggcgcgaagggcctgcaggtgtatctggtcggccagaggtcgagctga

SEQ ID NO: 510699 - DNA, 744 bp, Stenotrophomonas maltophilia
atgatctgtttcttcccgcgcggcgccctctttgctgcaatgactgcggttgccggcgtggtgagtgctgcaccggcaacctccatttccctgatggatgcgaccgagcaggcttcgctgatcgagagccgccattcctctggcgagggcgctgcggtgtcgtcgatgagcaccaggtactacgccagtgacgaaatgcatttcagctgggacggtcagcaggtgctgacgttgtgcgagggtgcggtgtatctgaggtttcccgagggcaagccgatgatgttgactgcagagcagcgtcagatgtttgcttaccaggccatgatgtccagtcttggagcaatcgctgccgttggtgccgcatcgggcgaatccctggaggtggcggctgatggcagcgagacccgcagcgcgggggagagtccatgggcctatggggtggagcgcttcgaggtgaccacccagcgcatgcaggatggcgcggtgcgcgtgcattcccgcaagaccgagatcgtgaacacgacgccgccggcgcgcccggacgacatgttcagcaccgaagacgaccaggcggcacgcctgtccgagttggcgccggtgggcagctggaccgaggtggttgtccatgaggggccgcggctgccacatgtggatccggcgatgtcgttgaagggctggatctcgatgggggacgaccaggctgcgacggtgggtgaggcgcgcaagctgcacgagtgcaagtga

SEQ ID NO: 510700 - DNA, 243 bp, Stenotrophomonas maltophilia
atggattgcagcattgtacttgttgcgcctgaacgggcgcgcttggccgaaaaatggccgtcaatcatcagcagggctactcggcccaccacgttcgtccgagtccaccgctggctcgccctcaacgacgacgcgaacacatacaagctttgcacggtgctgtttgtcgccgccctggcattggccactgcttcccctacgtcactcgctgcatgcctggaggtgatctatggctgtttctga

SEQ ID NO: 510701 - DNA, 825 bp, Stenotrophomonas maltophilia
gtgaatcgtgatccttttgacttctttaaagacggcccagttgcgtttttcgatgaaggatcttgggaaccaggtgacctcctcactcgtgagtacgatgaggggttggcgttcggggtgcttaaagagatggtggaagatgcgaggtcggcgctagaaggcgttcgcgccgagggcgttcgagcgattcttcagcttgctgatgcaatgcttcacgccggtgcttttgcgggtttgctcagggatgagcatggcgaacccgtggcatggacgtcggagacagcgttgagggtgagccatctagcattgctgccgtttgttcttgagtctcttagcagggattcgttcctactcggggacgcagagcttgggatcgaggccttcgaggtgacgccagctaggttctgtgcggcatatctactgagagcgaccttctcagctctcgattttggctatgaccgcggtatcgatgatctcccgatctgctatctgatgcaggcctcggcggtctatggatacctatctgtcctgagaaatggggaggcagactccgtacgccagatcgtgattcaaggagcgaagagcgaaagcgccagaacatcggcgtctcttcggtggtccaaggatccgagccgcgacatgtggtctgcggtgtttaccgaatggtcaaagtggcgagatgatcgtagctctatgcccaagccggcagacttccggagggcaatgcagcttcgtttccccgatctcgtcgacggcactctcaagaataagatgtctctgtgggagcgccagttccgtaacgatgcaggcagagtgtcacgctag

SEQ ID NO: 510702 - DNA, 252 bp, Stenotrophomonas maltophilia
atgttgctttgtgacgtcccccaagtccttcaggcagaaggcgagctggaatacgtcgacctgatcacgcgtgctggcttcgccaaagacctggtgggcaagatcaactggcactacctcctgcatgaggatgggtgtcccggggaggtcggcgaggcatgctcctgcggcctggtagtcgcctttgtaggccccacggcggtggtcatggtggatagccactatgcctaccgaactgaccccatcaactga

SEQ ID NO: 510703 - DNA, 753 bp, Stenotrophomonas maltophilia
atgaatcacaacgccattgcccatgctctatgcggccgatatacgccactgacagagcactccggctacatagagtccccttttgagtatcccatcgacgggacgttgatcggcgcctatgtcttggacgcagggaatggaacggtccgcgtcacggacgatggtgacgttgcattccatgttgctgtcgctggagcggacatcacctctccaagactcaaggcctaccggtcggttgcggagacgtatggcatctctatgagcgacgagggtgtgctcgcggccgtatgtagagaagacgaactgacagaggtactggcaaggtacatgcaggctgcggcgatgatagccgagaagggtgtgcgccatcgaccgagggacgatgagcgtttcgaacgcatcgtccatcaggtgctcctggcgcgctacggtgagcggctgagtcggcgcccggaggttgtggggttgagcggacatctccttcgcttccctttctccatcaccactcagaatggtcgtgaagcctatatccagaccattgctgcggacgctgaagtgattcaatggaaggctgtgtatgaagctggtggcaagttcaaagatgtgagagcagcccgagccaatgcgccgttggtcgcgatcttggagcgatccagagacgctgaccgtgcgagccgtttctttgccgacacggcttcagttgtggtctatgaaggtggacctctggatttggacttcgcattggcggcttag

SEQ ID NO: 510704 - DNA, 285 bp, Stenotrophomonas maltophilia
atgacgaaagcaacagagaacatccttgagcgcctgctcgcgtgcgaggcgcaacttgaggcacagcgtggctatctgaaggcgctggaatatggccttcgagcaactgtgatctcccatcccgatccaagcgagttgtctcgcacctggggcgcgttgcttcctggaattgcggagaagcacaccgatgatggcggcccggtattcgcagccgccatcacacaggtattgatgttgttgaccgagcaaatcgatgaagcatctaggagtcttgaccacagttga

SEQ ID NO: 510705 - DNA, 429 bp, Stenotrophomonas maltophilia
atgcccaacagggcggttgtatttgtcagcgaagcgctcagcgacctgaccatggcccgcctgtctaagatcatggcggacgcagagcgattcaatcgtactgccggagttaccggggtgacgctgtttgatggacagaggttcctcgcttacatggaggggccgcccgacggcctggatgtggccttctccagagcagcgggtgccaccagccattcaagcctgatcgagattgcgcgtgggagggtcgggcagcgccggcttccctactggccgatgcgttgtatccccctgtcgccaccggagctggtgcagctggtgcgggccgactggacttccttcctgcagcggggaagcgatcaagctggcccggccaccgcgatggagatgctggtggcattggtggaaccattcgccgaggctgcataa

SEQ ID NO: 510706 - DNA, 426 bp, Stenotrophomonas maltophilia
atgaggccgatctttctgcttcccatcttatccgtagctggatttttgcttacggcatgcacaggtgaaccccaggagcacgcgagtctgtctagaaactcaactgcggagcaatacgaggatcgcgaagtcgtggatgacgtaactgtagccgagagcgcagagccatccgaagctccttctgagtatcctcctgtcgatgcagaggactgggaggccataggcaagccgtgcactgaggactgcgctgggcatgaggccggctaccagtgggcagaggataagggcattgcacatcctgacgactgtggcggcaattcacagtcgttcattgagggctgcgaagcatacgccgagggcgtgcagcgagagagcatttcgggcaccgagtgcgaggatctagacggcgacggattgtgcgactaa

SEQ ID NO: 510707 - DNA, 930 bp, Stenotrophomonas maltophilia
atgccaatcaccaagcgtgccaacggccactatcaagttacagttggacacggcggaagaacgcatcgcaagacttctagacactggtcgttcaaagacgcgaaagagtacgagcgcaggtacatctccgcgctcaaggacattgcggccggtagagagccggaacgagtaatcgccgatgcggtagagcgctggttgacggaccatgtgccgcgcctgcgctcggctaccaagacgaaggcccatgttcgggcgctcctgccctacatcactggccggaagctggtggagattgcccaggtatgggctgagatcaaggcggcggagatcggaaaggccccggccacggtcaaccacaaggggcgcatcctgcggcagatcagtcggatggcgtggcgtgagtggggctggctggagcggccagctgctatcgggctgctgcccgagaagccccgcgagacgttcctcacgctcgatcaggtcgaagcgctggctagggcttgccccaacgctgcggcgggcgactatgtgcggctggcggcatatacgggcatccggcgcgggcatctgttgaggctgactcggcacaacgtcaagggagggttcatccatctggaccgcaccagcaagacgcggacgctccaactggtgccactgcaccccaaggtggcagggatcgcggcgcggcttccgctgggcgcctcagacgatcaggtcagggattcgtgggccaaggcgcgtgaggcgtgcgggctgcagcacgtccgctggcacgacctccggcacacatgcgcctcctggctcgtccaagctggagtgcccctgcacacggtgtcggaggtgcttgggcacagctccatggcaatgaccaggcgctatgctcacctgtcgccggagcacctgacggatgcaatctgcaagatcccgtag

SEQ ID NO: 510708 - DNA, 360 bp, Stenotrophomonas maltophilia
atggacgagttaccagccgcactgccgcttgagcaggagatcgccctactgaggcagcagctgaccaccctccggatcgacctttctggcaaggactggctgacggcggaagaggctgcgcactactgcggcgtgtcagttagccagttcaatgcgagggcgcatgaatacgacctccatccacgcaaattcatgggcaagaagctctacgagaagtctgccctctatcaggcaatctacggcgccaaggcttgggcgcgcccatcatcgactgctgcccccctggtggcgacgtcccctcagatggaggaagctcttgcccgtctacggcgctttgaccagcgcagagggaagcgctga

SEQ ID NO: 510709 - DNA, 228 bp, Stenotrophomonas maltophilia
atggactctgctcagaacatccgcttcattcgccggcaggaggtggagcgccggaccggtaaaggtcgttccacgatctatgcgtcgctgcagcactccaacaagcgcttcgatccgagcttcccgcgacccgttcgcatcggcccgggctcggtggcctgggtcgaaagtgagatcgaagactggatcaagctccgcattgctgagcgcggcgcgagccccgtctag

SEQ ID NO: 510710 - DNA, 1035 bp, Stenotrophomonas maltophilia
atgtacaagaaggaagagaacatcgtcagccaatgggctgaccggatgattgagcacgagggtagtgcctggatcgtccgtccctcgaaagactacccagcacagatcgtgcaggttgatcgagtgatgcgcgctcttgtgaagtcaaaggctgaaatgttctggagccgccgtgttgttggactgacacggacggctgtacacccggtcgcgcgggctctccgccagtgcgtcaacatggactatggaggcataaagagtcatttctccaagcagaagctgagcccctactttgagctgctggcggaagaattccttagccaccgagcggatgctatcgaaggcgtgagcccggacgtggcagaggcaaacgcatgggtcgaacgcatccgagcgatcgcgcggagcagcgaattcactcaattggtggccacacaggagcgcagtgcccggaagaatgccaaggcagccttggactacctgcaggccctgtatcggcagcactctcgtctctgcgtcgttcgtttggacgtaggttacagcgcagcccatcgcgaactgctgtcaggtcgtaacgtggatcccgtgcgtatcaagcgcgacttggccacttgcttgcgcaagctgcgccgaagctacccagccttggtcgggtacgtctggaagttggagttcggaccgagcaagtcctaccacgttcacctgatggcattcctcaatgggcatctggttcgccaggatgtgcgggttgcgcaggcgattggtgagttctggcaggacgaagtgacgcattccgatgggagctattggaactgcaatgcccggaaggagttctatgaacgaaccaattccctgggcatagggatggttgagtacgatgatgaggccaagcggcggcggcttgagtacagcctgctctacctgaccaaggcggattactacgtccgcctaagcgagcctggcttgggccggacctttggcaagggacaggctgggggcgactcgctcaaaaagctcgggaggcccaggatgtag

SEQ ID NO: 510711 - DNA, 597 bp, Stenotrophomonas maltophilia
atggaggtcgagttcagcctccgggttctgccactgaagtgggcgggcacctacgcagaagtctggagcgatctgatcgaccgtgtggaggaggaccgccaccttgccacgaagttggacaaggagatccaattgctcaggtccatgggtatggtgcccgaggttcacgagctgattgaagcggcaatgctgttcctccgcgaagcccagattgcccatgatgactacgatgctggccgcgcttgggccgctcttgtgaggtgcaactactacctcgggacctgtagctcccacgcgacccagcttgagctgactgctctgggcgggcggatcactggcagtcgaatcatgccattgaggaacatggtagtggagatgctgaaggcgatgcccgacaactcccgtgccacaaagcaagatctgtgggcggagatcctgccggccatgcagcagttcgggaaggatcatcaggctagaagcaccaacccgcgccagctactgcagcgttggaccaaccatgatccggcggtccatccccagttcgcgcgagtagtagagggaagcctcaacactcgggcccgtcgcaaggttcgttaa

SEQ ID NO: 510712 - DNA, 1698 bp, Stenotrophomonas maltophilia
atgcgcacccccaccatggcaccacgccgcgcgcgtgcccatgacttccgacgccgctaccgcctgacctgtgccgcactggccgtgctggcgggcctgctgctggcgcgggccgctgacgtccagatcgtccatcaccactgctaccggcaccaggccgaagcacggatgctccgccaccatccgctgcgcgcgcatcgcggtacgctgtacgaccgccacggcatcgtcattgccggatcggctcctgtggcatcgctgtggatcgacccgcgcgccttcttcgacgcatcaggttcagtcgagcagctggcctcggtactggatgccgatgcggcggtgctgaccagactgctggcgcgcaaccggcaacgacgcttcgtctatctgcctggcttccgtcgcggcgatccagcccgccttgaagcactgcaggccagggcacccataggcgtccacctgcagcaggagttcaaacgcttctatccacagtcggagctgttcgcgcagaccatcggcgtcaccgatatcgaaggccgtggccttgaaggccttgagcgcctgttcgacgcgcgcctgagcggacaggccggctaccgtgacgtcatcatcgatcgcaagggccgcccggtcgaactgcgcgaccgtggccgtcccgcgtgtcccggcgaagacatcgtgctgtcgctggacagccgcatgcagcacatcctgcaggcaggactcggaccggcagtacagcgccacggcgcggctgccgccagcatcgtggtgctggaagtcggtaccggccagatcctggcgatggccaactggcccacctacaacagcaatgcgcccggtaccggcgccgccgatgcacgccgcaaccgtgcggtgaccgatgtgttcgagcccggcagcacggtgaaacccttcaccgtggctgcagcgctcgaggccggcgtgatcacgtctgccagcacgttcgacacccacccaggctggatccgcaatgggcgcttcaccacccgtgactatcgggatctgggcgtactggataccagcgacgtcctgaaaaaaagctcaaacgtgggcatatcgttgatttcgcaccgcctgagccgcgagcagctgcacgcgatgtttgccgcactgggcgcagggcatgtctcgggcagcggatttcccggcgagcgcaacggtgtactggccgctcctgctgcatggagcggcaccagcaagcagaccctggcttatgggtacgggctgtcgatgaccacgctgcagctggccaatgcctacgcaacactggccaaccatggcctgcgcgtgcaaccgaccttcgagcatggtcgcgcaacagcggtgagccgtgccatgcccgcaaacgtggccgaccaggtgctggacatgattgccaccaccaccgagcccggcggcaccgcgacgcgggcccgcatcagcggctatgccatcgccggaaagaccggaaccgcgcgcaaggcggctgccggtggatacgcacgccactacatgtccctgtttgcgggggtcataccagcgcgacatccacactatgccgtcgccgtggtagtggacgatcccgatgcacgccgcggaggctacggtggtggagcagtcgccgcccccatcttcagcgagctgatggggcgcgttctgcacctgcaggacatcgcgcccgatgcgccacgctga

SEQ ID NO: 510713 - DNA, 429 bp, Stenotrophomonas maltophilia
atgcgactgaacctcccgctgatcctgtttctgttcgccatgccggtagccaccacaggggcggcatcgtccagttctcccatcgaaccacctcgtgcagtgctgctcagccagatcgaccagggcatggcgaacgccgtggcatgggagtacgcgttcaacgccatcgcctcctgtgatgtcgcacggatcgactacaccctgcgcaaccagcacgacagccatcccgtccaggtccagccgctgctggatgccggctacaccgcaacctatcgcacggccgaaccctatccggtcctgcaggaccggctggccacgctgcgcgatgcggagatcgcctgcatggctgttgccgatggccgcagccacgccaatgtcatcgaccgtgcttccgcactgctggcctacatcgccgggcaaccgctgtaa

SEQ ID NO: 510714 - DNA, 1527 bp, Stenotrophomonas maltophilia
atgactatctccgccaatgaccgccgcaagacctacgtggggaacggcgtcgccaccgcgttcaacgggccgagggcgttcctgtcgagccacatccaggtgttcaccggcacgcacccggtctaccaactggtgccgccggctcagtacaccgtgacaggactgcgggcgaacgccagcacgatcaccttcaacgctgcgcctgctttgaacctggacatcttgatcctgcgtacggtgccactcgatcagccagccgacatcaccaaccagggtgcgttccttcccgaaatccatgaggacgcattcgactaccgagtgatgcagcttcagcagctgctcgacaatggcatgcagctcgtccaagacccggaaagcggcgagtttgtctgggatgccaagggcagccgcatcatcagggtgggggatgccaagggcgatgccgatgccgtgaacttccgtaccgtgctggtgctgatcgagcagatccagaatggtggcgggtcggtaggcatcgcgccaaagttctggtcgttcgaaggcgacggggaggtgactgattttccgctggccggcgccgacgtgctggatccactgttctacgacacggcgctggagaagacggccggcgctggggactacctggtatcgaagcctggcgacttccagattctgcccggtggcgacggggtggctccggccattcgcttcacgacggcgccggccgatgggcagcgaggctttaccaccctgcggggctatgcccggccctggatcggcgaaacaccgatctatacggtcgcgccccgcatcgtgagcgtcactggcaacacgacgctggccggtgatatgcacaacacgctgatcctggccaactcgccaaacccgatcaccatcacgatccgcgccaacacgggcagttcgatcgattggaaggagggccagttcttctcggtgcagcaggtgggtgtcgggcaggtgacgcttgctattgaaggcggggggcaactgaacgtgcccgatctcttcgagccgaagtcgcgtgccaaggggtgcatcttcagcgcgacctgcacggcgccggatgccgatgcgtggtcagcggctggtgatctgcttcggagcgcggcgaatcctgacctgcagtcgttcgtgctacccgaccgatctgcccttatcgggacgaacatcacggcgggaacgggtaagggctcgctggtgctgccctatggtgtggcgctttctccggtggcgcagcgcggtatctacgccagcctttccgaggcgcaggctacaggcacgccgctgacggtcgacgtgaagcggaacggcacgagcatcctcaacgtgaaactgatgttcgacaacggcgagcgttccacgctgactgcctcattgcctccgacgttcgtccccggcggcgacctgctggctgctggggacgaaatcactttcgatgtgcagcaggtaggcactgccggcgcaaagggcctgcaggtctacctggtcggccagaggtccagctga

SEQ ID NO: 510715 - DNA, 324 bp, Stenotrophomonas maltophilia
atgaagctggtatcgatgaagcgggatgcggataaggacgaccgcgacgacagcaaggagtgctgcgaaagcgcgcacaccccggattatccatggggcactcgcctttgcctggaagacgagcagctgcagaagctgggcctggaatcgatgccggcagcaggtgcacgcctgcagatcggcggcgtgggcgaggtgatcggcttccgtgaggaacaggtcgatggcaagacccgcaggaccctcgacattcagatcaccgagttgggagtcgaaggcttgggccggccgatcgcccagcgcatgtacccggataaggagtag

SEQ ID NO: 510716 - DNA, 276 bp, Stenotrophomonas maltophilia
atgtccgaagcaaccagcaagagcgcccagcgctccaacaaggccgtgcgcggcagcctcccacccgaaggcaccagcggtgccctctacgaggtcaccaagcgcgcgcacaagatcaacggccgcgactacgagccgggcgaaaaggtgttctgggccggcacacctggtgtgctgctgaagcctctgaacgacgaggccaaggccgcggtgaaggaagcagacgctgcgcgcgccaaggaaaaggctgcggccgaagccaagaaagcgcgataa

SEQ ID NO: 510717 - DNA, 441 bp, Stenotrophomonas maltophilia
atgatcctcgacgcacagaacgagttctccaacggccaggcggtgaccgccacggccatctccaccaacgtcatcgacaccggtaccgacaagaacccggtgaaggacttgggcggcccggagccgatctatctggtgatccaggtggacaccgacttcgccgctgccggcgctgcaaccctggccgcgagccttgaatcgtccgcggctgctggcctgacctcggccaatgtccacttcagcaccggcgcactggcgttggccacgctgaagggcggcaccactgtggccgtggtggccctgcccagcggtgactacctgcgctacctgggcctgcgctacacggttgccaccggcccgatgaccagcggtgcggtgtcggcgttcctgacgcgcgatccgcagctgtaccgcgcgtactgggctgctgtcggccgctga

SEQ ID NO: 510718 - DNA, 1005 bp, Stenotrophomonas maltophilia
atggctgttatcggaaacaccatgccgaccctgctggaggcatccaagctgtacaccggcgatggcaccccgctgccggtggccgaactgctgaccgagcagaatcccatcctcgacgacatcccgtggttcgagtcaaaccagaccaccggcgagcgcctggcggtccgcaccggcctgccgtcggcggtgtaccgcaagctcaacgctggtatcccggccagcaagagccgctatgcggacgtcaccgagtcgaccggcatgctcacctcgctgggcaagatcgacaaggcgctggccgacctgtctccgaatccggccgacttccgcgtgcgcgagaacatgggccacttcaccgcgatgaaccagacgttcgcggatcgtctgttctacggcgacacggacatcaacccggagcagttcctgggcttcgcgccccgtttcagcacggctgatccggacgacgccgagaacgccgtgcagctgatcaacggtggcggcaccggtaccgacaactcgtcgatctggctgatcggctggggcaaggaaggcgcctacggcatctacccgaagggttcgaaggccggcctggtccacaaggactacggcgaggagctggtcaaggacgccgacggcaacgagttcccggcctaccgcgactggtttgaatggcaccacggcatcgccgtgaaggactggcgcaacatcgtccgcgtcgcaaacgtggacatgagcgctctgaccaaggacgcctcggccggcgccgacctgatcgacctgatggtccaggcggttgagcagatcaacgcgccggaggccgtgaagctggcgttctacgtgccgcgtaccgttcgcagcttcctgcgccgtcagatcaccaacaaggacaacgtctggctgtcgatgggcgaagtcgctggccgcaaggcggtccagttcgacggcatcccggtgcgccgggtcgacgccctgtcggtcaacgaatcggcgatcaccttcccgtaa

SEQ ID NO: 510719 - DNA, 699 bp, Stenotrophomonas maltophilia
atgtcgactgaaaccgccgataccaccagcaatcaaaactctggcgaaggcgagggcagcaacaccaccaccagcaccacgggacagcagggcaccggcgccaatggccagccgggcaccgagggtacgggggatggaggtgacgcgaagggcgctaccggcaaggacacccagggcaacgacggcaagaccggcaagcccgaaggtgacaccgccgcaggcgcaccggagcagtacgaggcgttcaaggtgccggacgggttcaccctggaaggcgaccgcctcggacaggccaccgagttcttcaaggccaagggttggacgcaggagcaggcccaggaggcgatcgacctgtacacccgtatggccggcgaggacgcggcggcactgcagcaggctgtggaagcacagcgcctgcagcagctggagcagtggggcgaacaggccaaggaacagctcggcacgaagtacgacgagacggtgagcctggccaccaccgcggtgaaggccgtgaacgaccctgagctgaccaaggcgttcaacgagctgggctggggcaaccatccgagcctgatcaaggcgttcgcgtttttcggccgtctcggccgcgacagccccatggacgggctcggtggttcgaccaccagcgggaccggtgaccgcagtctgggtcagcgcatgtacccggacatgaagtaa

SEQ ID NO: 510720 - DNA, 360 bp, Stenotrophomonas maltophilia
atgagccggccggggcgcagccagaaggacatcgaccaggagcgccgggaacgccagctggccgcgctggagcttcgccagctgcgcgaggacgtccgcaccgtactggcggagcctgtggggcgtcgtgtggtctggacgttcctgcaggccatgggcgtggacaccagcgcgttcaacaccaacgccatggcgcagtcgcgcgccatcggccggcaggaggccgcccaatggtggctcttggccatccgcgacaactgcccggaacgcgaatcccagatgcgcgccgaggccaacagtgcactgaagcggctgcaggcgcagtcgcagcaaccagaggaaaacgagcatgtcgactga

SEQ ID NO: 510721 - DNA, 1707 bp, Stenotrophomonas maltophilia
atgatggagctgcgtgcgcactgccggcgccgcaagaaggccatgcaggacgctcagacggactgggtgccggactggcgccaggtggccgagtacgtcgacccaacgcgcggccgcttctacggcgagaacgacaacaagccgcgcaagcgcaaccgcgccaaggtgatcaacagcaccgcgaccgaagtgctgcgggtgatggcggccggcatgatgtcgcacatgacgcccaaggcgcagccttggttccgcgtgaccacaccggacccagcgatggccgagcagttcggcgtccgtgtctggctggacgatgtggcggcgcggatccgggacgccctggctagcagcaacttctacaaggccatgccggtggtctacaccgaggatggtctgttcggcactgctccgatgctgatcctggaagaccccaacgaggtcgtgcgcttctactcgctgacggccggcacctacgctgtcggcctggacgatcagcagcgcgtcgactcgctgtggcgccgttacaccaagaccgcgcgccagctggagcagcgctacgggcaggagaagctgccggcgcgtgtgcgtgaggcactgccgcagaatggcgaccgcacgttctgggtcgaatcgctgatcgagccgaatccggacgagcgccctggcatcggcccgttggggctgcaggcgccgcagtaccgggcctatcgcgaggtggtgtggatcgacggctgcggtgagggcgagagcggggtgatcgacatcggtggccactacgaggcgccgcatgtcgtggctcgctggaacccggtcgcggaggacgtctactccacctccccggcgatcgactgcctcggcgacatcaagcagctgcagtatctggaaggcgagaagctgcgcctgatggaaatggtgtcagatcccacgctcggtgcccccgaatcgctgcgacgcactggtggtgcgcggctgcgtaagggcgggatgatctacctgccgcaggattcggtgaacgccaacgtagccccggtgtacaccccagaccccaggggagtgcagcaggtccgggaagagatcgccacgatcgagcagcgcatccagcggtctttcttctaccagctgttcctgatgctggaggccctgggcgacaagaccgaccgcactgccaccgagatcgccacccgcaaggaggagaaggcggcggtgctggcgccgacgcttgaatccatcactgacgaggtgcttgatccggtgatcatccgggtgtttcgcctgctggagcgcgctggccgcatccccgagccgccgcagattctggcgtccgtaccgctgaagatcgaatacaccagcatcctggcccaggccgcgaaggcagctgcagttggctccatcgagcgcacggtgcagttcgttgcaggcgtcgcgaaggcaactggcgatccatcggtcatggacaaactggataccgaccaggtggtcgacgagttcaatgccgccgtcggtgggcctgcctcgatgattcgcggcgacgacgcagtggcaaacatccgtgccgaccgctcccaacagcagcgccagcagcagctcgcggctgccgcacagccgctgaaggacgcgacccaagcgctgaagactgccagcgacacggtgcccgaggaaggctctgcggcccaagcgctcattgatgccatgcagggtgctgcatga

SEQ ID NO: 510722 - DNA, 1467 bp, Stenotrophomonas maltophilia
atgagcggaaacgaggcagtcctccaggcccagcggcgcatccgcctgtggcgcgcggagccggttcggttcgtggtggattgcttcggggtcgagccggacgcgtggcaactggaggcactgcaactgctgggcgggccagccaagccgaaccgtaagctgtgcatgaaggcgtgcaccggtcccggtaagtcggcctctctggcgtggattggctggcaccgcctggcctgctttgcggcgaagggcgaacaccccaagggtgcggcgctgtcgatcacggcggacaacctgaaagacaacctgtgggcagagctggccaagtggcgcagccgctcgccgttcctggtggatgcgttcgagtggacgaaggagcgcatctacgccaaggatcaccccgagacgtggttcctgtcggctcggtcgttcgccaaggatgcggacgcggacgccatcggccgggcgctgtcgggcctgcacagccagttccctttcatcctcttggacgagacgggcgagatgccggcggcggtcggtaaggcggcgcagcagattttcaccggatcgccgaccgatgcgctggtggcacaggcgggcaaccccaccagcaccgctggcctgctgtacgagtcctgcggcagcggtagctggccggtgatcaccatcaccgccgacccggaggatccgaagcgaaccccgcgagtgagcaaggaacacgcgcaggagatgatcgacgaacacgggcgtgagaacccgtgggtgatggcgaccatcctgggtctgttcccgcccagcggcttcaactcaatgatcggcatcgatgacctggagaaggcgcaggcacggcactacaggcccgagcattaccgtgctgccccggtgatcttgggggtcgacgtggcccgcgagggcgacgacaagagcgtcatcgcccgccgacagggccaggtgctgtacccgttggacagcatgcgcatccctgacaccacgctggtagccgcccgcacgtccaccgagtacgacaagcatgaggctgatgggctgttcgtcgacgagacgggcggttatggcgccggcgtagtggatgacctgcgtcggcggcagtaccagccggtgggcgtgaagttcggcggcagcccaatcgacgcgcgctacttcgacaagcgcagcgaaatgctgttcctggcctgcgagtggatccggtcggtgggagcgattccggtggatccggacctgcgggaggaactgctggctctgcgcttcacgtaccagaacgacaagttccgggtcatccccaaggacatgatcaaaaagcagctcggccgctcgcccgacaaggctgatgcgctggcgctgacctttgcgtacccggttattcgccggccgcgtgaccccgacggcgcacccatcgaggcgcgccaccacgctggccagcaggccggtgaaccctacaacccgttggcctga

SEQ ID NO: 510723 - DNA, 468 bp, Stenotrophomonas maltophilia
atggcacgcccaagcaagtacagccagaagctcgccgagcagatttgcgaacggctggctgatggcgagagcctgcgcaccatctgtagcggcaacgggatgcccaagcgctcgacagtcttccggtggctgacggagaaccaggcattccgggaccaatacgcgcacgcacgcgaggcgcaggccgacgcgtatgccgaggacaccgtcgatatctccgacgaggagtgcacgatggtccgggcgagcaagcacgggacggctgacgatgacggcgaggggaatacggaggttgtcttcgaccccactgccgtggcccgcaatcgtctgcgggtggatgcccggaagtggtacgccgggaagctggccccgaagaagtacggcaacaaccagacggttgagcatcgcgggcgcgtctccctggagagcttggttgccgggcacgaggacgggtcggaacaggaatga

SEQ ID NO: 510724 - DNA, 468 bp, Stenotrophomonas maltophilia
gtgaaccgcatcgccatcgcagtcgccgccttcgccctgtggtccgcagccatgttcggtgccggctgggcctggcgcggcgaccgggcagagggcagggaagccgaccagcgcgccgccggcgccgaggcagtcgcggaccaggtgaaccagacccgtgccaccgagcacgcccaggccgaaacgctggccaccatcggagcgaagcatgaagaagaccgcactgcggccgcgaccgtccctgctgctgttgtggctgacttgcgcgctgggcgcctccagctgcgcgacgacctcgccacctgcagcaccagcctcctgtcccaagccgtcgccggcgccgtcgaacgtgatgcgcacgccgaactacgagcagaggttgcgggagctgctgttcaaatcggccgcgacgccgacaaccacgtccgcgccagccaagccgtgatccgggcggacagggagcagtaa

SEQ ID NO: 510725 - DNA, 531 bp, Stenotrophomonas maltophilia
atggcgagccgcttgattatcagcatcgacccaggcctgaccggcgccatcgcggcgctggtggacggtgcgcctggcccggtgatcgatatgccgttgcagaccgtgggcgagagccaggaagtggacgcccgggcgattgcgctgtttatccgtgcctcgcgcgatatgaacccaggtgcggccgtgtctggcgtcatcgagcgggttcgtgccatgcccccgaagcgcggtcctgacggcaaggaagagcggaaggcgggaccgcagtcgtcgttcaacttcggcgaccactacggcaaagccaaggcggtgttcgagttgctgggcgtcccgtacctgcgagccgagccagcgagctggaagcgctggttcggactgaccaaccagggaaaggacgcggctcgtctgctggcgatccagcggttcccatccgccgcagaccagctgacgaggaagaaggacaacggccgcgctgatgcgctgctgattggcctgtacggcgacagcctgatcaggggcggcgcatga

SEQ ID NO: 510726 - DNA, 147 bp, Stenotrophomonas maltophilia
atgaccaccccggggaccttccggcgcctccgcggccgcaccacctggccgaccggccgcacgtcgacccgctcgccgacccgcttcaacacgaaccacttcccacccattcgcatgagcgtcaggacgttggctccggccagctga

SEQ ID NO: 510727 - DNA, 216 bp, Stenotrophomonas maltophilia
atgcgagaagcccaatcgacccgcgccgcagagcgcgccaagcgagaacgccaagaactgcagcagcagctggccgagatcgagaagatgttcatcggcgtacccacgcagccagagctgctggtagaacttcgccgggtggccaagaacggatcgccagccgaggcgaggcagctgctggcgtcagtgcagcgcgtgcttgcccctctgcagtag

SEQ ID NO: 510728 - DNA, 243 bp, Stenotrophomonas maltophilia
atgccgcccatggatatcgccacctaccgcaaagaaaaggggctgtcgcagtcggcgttcgccgatctgctgacggcatcgggctcaccggctacgcagggcctcgtctcccagtgggagaagggcgcaacgattccggccgaacgggttgtggagatcgagaaggcgacggggggagaggtgaagcgccactccctccgccccgatctctggcagaccccggaagccgaggctgccgcctga

SEQ ID NO: 510729 - DNA, 726 bp, Stenotrophomonas maltophilia
atggaaaacagccgtaaatcgaagccaacaccggcggatatcgccgccgccgcgaagctcaaactggagtggcaggcgcgcgcgcggtcccttgggttgacccaggaccaagtcgctgacgaactgggcatcacacagggagccgtgagccagtacctcaacggcaagatcccgatgaactatcggacgctgctggtgttctgccgcttgctcggtatcaacgacaccgatgtgcgtcgggacctaccggagcagcagcttctcggaccgccgaccgacagcggcgactgggcggacattgaaggctatgcccaggcgatgggcctcggtggcggcccagaagcccaggagtacgcggaaacgcaccgtctgaagttccgcgccgagtcgctggcgaggaagcggctgcgcccggacgcgttggctgtaatgtacggccgcggcgacagcatggaaccgcgtatccacagcggtgatgccgttcttttcgacactacagacacccggccacgcgacgggcatctgtacgtgatcatggtcgacggcggcggcgcggccaaggaataccaagtgaagcgctgcgaagtgatcgacgacctggtgttcttcaaggccgacaatccgcgaggcgaccacaactggcgcaagccgaagcgcatggacagcccccgtcacccaatccaggtgatcggccgcgtgcgatggatcgggagctgggaagaatga

SEQ ID NO: 510730 - DNA, 369 bp, Stenotrophomonas maltophilia
atgagcatgccgagtgagcgccaagccggtgccggaccggcggacacttccccaacagttggcgagcttgaatccctgttgcctgttgttcgagaaagcgggaaccgtacgttggagtttgtgctgctgacgcacatcatgaccaaccaccttatgcaggcggctccgcactaccgacgttctctggatgtgctttacgacgacatcgacgagcttctcgaggatggtccagtgagtatccccgcgtctgatgttgccgccgtccgtttgctggccgacaggttagccaatgctgtcgaagacttggacgcgtgcctagccgaagctcgcaccatcgcggacaagcttcacccgaaccaagtccgataa

SEQ ID NO: 510731 - DNA, 318 bp, Stenotrophomonas maltophilia
gtgacgccgcgcaccctgaccctgctgggcctgctggtctgcgaggccacggacgtcgagaacagcgcgagcgtccgccgggagcgcgtgggcaaggcgcacctcgacctgttcaacgaactgcaagccgaggaccgccgtgtggccgaagttttcgccgccgcgcacgcctccctcgcagcccgcgacctggcagaccagatcgccgccgacgaccgcctgcgcgccgctctcgccgcgtgcgcacccaccgacaccgatcacaaccgcgaggccgtggacggcctgtgcgtggaggaaaacgacgatgcgcgctga

SEQ ID NO: 510732 - DNA, 516 bp, Stenotrophomonas maltophilia
atgttccaacttgaaaagcacgatgcggagttctcgcatctgagcctgcggaaagagaaccacggcgagaacagggtccccgccgccaccatcacgttcactgcggcgtccagctcgctgatcctggacatcatcgacaagaagctgcgcccgtcgttctacgaagagccgtccagcggctcgcagcagaacctgccgatcgacggcaactacctcaccgctctgaagttcccgtacctgaaggaacagaagatcggcatgaagatcaagggctacgagttggagattcacagtctcctggaacacatcgagccgctgttcttcgccgatgcagagctggtgatcgagaaagtctcgttcatcgaaggcggcagcgtcgagctgaccctgaaggtcaacaccaccatcgagtccgatgacttcgcgccgcttctcgaagcctgggatcgcgggtcagtgagcatcagcctcacgccgccgagcgctgccgcgcagcaggaagacctggccgcgtaa

SEQ ID NO: 510733 - DNA, 993 bp, Stenotrophomonas maltophilia
atgaaccagatcgtcaccatcgaggattcggtctacggcaccaaggactctttcgcctcggtgctgactgatcggtccatcaacttcgaccgcgaggcggagttcgccctgcagacgctgtacggcaacgactacgcgatgaagatcgcgatgcagaaccggacgtcggttatcgcggcggtcgtcaacatcgctgccatcggcatcagcctcaacccggcgaagaagcaggcctacctggtgccgcgcgatggcaagatctgcctcgacatcagctacatgggcctgatggatctggccatcgactccgggtcgatccgctggggccaggccgagctggtctacgagaacgacctgttcgagctggtcggggtagacaaagagccaatccacaagcgggcaccgttcagccgaaaccgcggcgagattgtcggcgcctacgtggtggtgaaaacccccgaaggtgattacctgaccaccgcaatgtctgtggatgaaatcaacgacatccgcgaccgctcgtcggcatggaaggcttgggtatcgaagaagaagtcctgcccgtgggtcaccgactggggcgagatggcgaagaaaaccgtggtgaagcgcgcctacaagtattggccgaagaccgagcgcctggaaaccgcgatccaccatctgaataccgatggcggcgaagggctggcggtgatcgagcagcaggcgcagagccgcaccgccctgccgcccccggaggacaccgaggaacgcatcgagctgtacgccagcctgcaggacattgcgtccgccggcgtcgacgcactcggcgaggcgtggggaaagctgaccaaggagcagcgcgccatgatcggccagggcgggctggctgcattgaaggcagaggcagagaaggccgacgcggagctggtggaacccgaaggcgcccccagcatcatcgaccgtatcgacagcgatatcgagcgcagggaggccgcaggatgcgcctga

SEQ ID NO: 510734 - DNA, 285 bp, Stenotrophomonas maltophilia
atgcggaagccgatcccgccgaacgctaccgcccgcgacctggtgcgtcgctacgtgcacgaagacggcaagagcctgggcgagctgtccaccgcatggggctgcaagcccttcagtgtgtggcgcgtgttccagcgcaccgaccggccgctgcagccgcaccacgtcgagggcgccatcaccgcgctgcagctggacgagttcgacgccaacgagctgcggctgcgtgcggcgcgcgaagccggctggaagatcgacccgttctacctgggcaccgacgcatga

SEQ ID NO: 510735 - DNA, 291 bp, Stenotrophomonas maltophilia
atgacccaccaccgctacgaccgccggctgccgaagcgcaccgagggcttcgcctggggccggtccatcgacaaggtgctgggcggccacgtcctcacctaccgcctgttccgccgcgacctggccgggaagctgcacatcgagacgcggacgtttcagctcaccgaccaccgccggcacatcgcgctgcagctgctgatcgcacgccgccagctgcgcgagcgcgtcgacgccatcggctatgccctgatcgaggccgaacaggcctcccaactgcaggaggttgcatga

SEQ ID NO: 510736 - DNA, 945 bp, Stenotrophomonas maltophilia
atgaataccaacgacaaaaccctggcggacgtgcagcccggtgggagggtgaggctgcaacaggcgcttcccccggaaggctatgccggtgcatggattcgttcggcatatggtcagccgtcaagcttcacgtactggaacatggaggtcgcctacgccgctggttggcaagccgccctctccgcccagccctccccgggtggtcagggggatgcgcttttggaatcgctggtcgcccggtggcgcaaggacgccgacgaggtcggaatcagcgacaacacgctctgccagaagatcgcgaactgcaccatgcgtcacgcggcagaactgcaagaagtactcgccgcccgccagccggtgggcgatgacggtcagccgatggttcttgtctcacaggagttcaaatggcaggccgaatatgacgccgaaatcacgagcgctgtggccctcctgctgaggaacaaccaaatcggactcagcggaagccagccggaaatggtcgaagcgttgctttctatcgccgcccgacagccggtgggggagccggtcaccgttgaggctgtggcaaccgttcggcgcaacggcgatggcgaccgctacatcgactggctgtcggagggcgggattgctgatctggaagtgggcgacgtgctgatggtgtccgaccgggcaatcaccgatgaaaacggttcgggcgaggtctacgccaccccgcccgcgcaggccgtggacctggggcagcagcaggacgctgcacggtggcgggccattgcgccgcacctctcggtcgaatgggacgaggacgaaatgctcaagcgatggacgtggatcgactttaagggcgacgccttgagcgttcctacccggacgcgcgagtcctacgccagtgtggacgaagcaatggacgcagtgatcgacagccaggcggtgggcaatggccgttga

SEQ ID NO: 510737 - DNA, 207 bp, Stenotrophomonas maltophilia
atggccgttgacttcccgcgcggttgggagattacccgcgccactgctcccgagtatcaccacaaccgttgcagctacaacacgcacggaatgctatgcgactgcgatgtactcatgaagcaccacgagtacctggacattgagcggttacatggggctggtgggaaggtactgaagcatcttccgaaggagccgaccaatggctga

SEQ ID NO: 510738 - DNA, 150 bp, Stenotrophomonas maltophilia
atggctgaccagctgctcaccgccgcattgacctggtcgattgccggtgccgggttcctggccggcatcgccaccctgtgggcgatcagccgcgcatgccgcgccgcgcgtgcagggctgcgctggtgctggcgaaaggcggtggcctga

SEQ ID NO: 510739 - DNA, 363 bp, Stenotrophomonas maltophilia
atggacgcatacgagcaggccaagcacaccgcccgcgtgttcctcagcgaagcacgatcgcgccgcgccggcatgggctactggttcagcgtgaacggtgccgagagcgcactgcgccgggccatccacctcaacccgcagctgcgacggcaggccttcccgctctgggcagagtcgctgggcatgaccgagggcgtggcggtcgttcaccgcgagacgggcatgcgcggtgtggtgcacgtaacgatggggctgtacctgacgctcgcgcccggtcctttcgaaaccttctggcgcgccgccgatttcatgctggtgccggcctccgctgctgcgcccgcccagatggaactgttcgcatga

SEQ ID NO: 510740 - DNA, 183 bp, Stenotrophomonas maltophilia
atgaacacccaacttttcccccgcgaaccgcgccgcatgaagcagccggccaaggacgtgctgcgcgagcagctggtgctcgcggccgatgaagtgatccgcctgcgcgctgaggtgctgcgcctgcgcggcgagatttaccaggcaaccgagcagctgcgcgctgcgctggccacgaactga

SEQ ID NO: 510741 - DNA, 249 bp, Stenotrophomonas maltophilia
atggctacgaacaagacgcgcgagatcaccgtcgcggaactgcatgccgacctgcaaccgatcgaagtcgtcgcagtgcgcaccagcctgggccactcgtcgatctatcgcagggtgaaggaaggcacgttcccgaagtcgtacaagatcggcgcacgtgcggtatggttgaaagaggacatcgaccgtttcatcgcttcgatcacgcatccacagaatgtgggtcaaagcatgggacgtgcggcctga

SEQ ID NO: 510742 - DNA, 1959 bp, Stenotrophomonas maltophilia
atgaagcgctggaatgtgcttgacatcttcttcctgggcgtcgaaggtcagcgccgcatagtgactctaaagccggaccaagtgaacatcattacgggtgcttctgggaccggaaagtcggctcttatcaaggccatcgattactgcctaggatccagcaagtgcgaactgccggcgcatgtgcgtcgcagagcgctcgcggtaggcgtgcgatgggcaaagggtgatgagcaaatcatcgtcggacgaatcattccgccggttggacaacaaaccagcggaaggatgtttgtttccaaagggcgagatttggaaattccctcgagcgtagatcgctttgagggcagtagcacggtctccgcagctaaggcttttttagagcgagcttttggcatcggcgacacagatagtccggctactgattttgtgtcgaaggggcgcgcgagtgttcgtcaagtcacgccctatcttttcctaaccaaagaggtcatcgacagcgagacggtgttgctccacggcttggaaaaactggagaaagctaaagacattgttgcaaccttgccttactttctgcgagcaaccgacgaggagagcattctcgcggagcgtcgtttgcgtcagttgcaaagaggtctggagattgcagaggcaagggagcaggcgaaggcatcctccgatagcttaatgatgaatcgtgcgctcggactactaacagaggctagacagattggactcgtgcgcgccggtgcgtccttctccgaagagcaggaggtcttgcaagccctgcgggaaattctgagcgggcgtatgatcgaaggagagcagccttccgacgacgagctttccgtgctgcacgcatctcgtcgtcaagttcttgcacagctagaagttgtgagaagaagatccagagcgaccaagtcggcgatcagagagtcttccggctaccagggggcggtgaagcagcaacatgagaagttaatgcttgttgatcacttaaagttgagcgatgtttcacatgtctgcccagtgtgtgatagcccgtcggatcgaggtcgggaagtggcagctgcattgcaatcagctttgttcaaggtgcgcaatgagagcatggttgccgaccgtgtcaagcctcagttgcttgaggtcgatactgagttggatagcgaagcgcagcgcttaaacaatgagcttcggcgcatagatagccgcattgaaggttggctaggtcaaagtgaaagagcgcgcgagctcaccagcctggcgcagcttcacagccatctaaaggggcgaatctcttactttgtcgagaatattgttgatgagtcgccaaggttgggggtggacttagaggctttaagagcagagattgatgagcttgaggcacttgcgaacagggacgctaggaacgttcgactgcagatcgcggaacgcaaggtatccgggtttgcatcagaagcgctaaaacagttgcctaccgtcgccccgtgtgttggagctgaactagagtttctatcgagaggtccagatgtagtgatgatcgagggtggtagcaacgcggtcctccgtatgcctgatgtgggatctgatcagaattacttggctattcacatcgcactgtgcttcgctcttcatcgctactttgaactggtaaattcacccgtgccgggattgttagttctggatcaggttagccgcccctatttccctgccaaaggtgatgattatgacgtcagtgaaatcggggctggcgtagaagatgaggatactcaggcgatgaggcagcatatcgatttcctttttcgagagacgaaactccgcagcggtctccaagtgctcctgatcgagcatgcctattttgctgatgacgcgaggtatagggaggctactcgggagcgttggaccaggaagtcaaaggaggcgctgatccctctcgattggcctgtgcgcaaggatgcctga

SEQ ID NO: 510743 - DNA, 1227 bp, Stenotrophomonas maltophilia
atgtccacggaaagcgattcaggtcaatcgggtttacactcagctgaggcatctgcgctgggcttctattaccaatcgttgtttgctctaaagacattgctcgagttggactcggacaatgccgctgtagctatcgagcgactggacgatgtagaggtagttgcggataagcagacgctgcttcttcagttgaagcactcgttgagcgccacacctgccccaatcaccctggcttcacgagcgctttggaagacgctcaaggcgtggatcgatacgctgccgaagctatccattgcggaaacagttctgcatcttgtcgcagttgggcatgtcccagcaggaagccctctcctagcacttttacaggaaggatctgaccggggggagctcatcgacgcgctggtcgccgaggccactcgtgttgttgaaaagcgtgcagaagccaaggctgcgaagaaggatttgccatacgctgaccgtgctgacgggtgtgaggccctcttaaatctgcccgcgcttggtcgcgaagcgctagtgagaaggataagaattcaccctaattcgcccaatatcgcgctgattgagagtgaaattgctaagagtttgaagttgttgccatccgagcagcgggcgctcgtggcgtccaggctcgtcgcatggtgggacagagaagtcatttattcgctgtgcggtcagcgcgatagagccattgccaagttggaagtccaagctcaaatctcgtcgatcatcggggagattgagtctggtttgcttcatgcagacttctcaggagccaagcctccgccttcgcacgagcctgattcgatgcttcttcgacagatccgccttgtgtgcggcagtaagacagacgagaacaaggcgaccgtggaagaatggcgtgcccgcgctcaacgctccaagtgggttgaggataatcccgctatggcttccactatcaatcgacacgatgaacacctttgcgaagagtggtcgaatcgacacgaacaaatgactgaggactgtcagttttctggtgagtctgaaaaatgcacaaaaggcttggccttgctgcgttggacgcatgaggatgccccgggagccgttgaggcaattgcggcaaagtggagcgctgtgttctacgtgaggggcagctaccaggtgctagcggtggataagagggtagggtggcatccagactacatccaccgtctggaggatgacgtgtga

SEQ ID NO: 510744 - DNA, 1584 bp, Stenotrophomonas maltophilia
atggccatctaccacgccaacgtcaaaactttcagtcgagccaaaggccactcatccattgccgctgccgcttaccgcgctgggcttcttctcgaagacacgcgcaccgggcaacgtcacgactaccgccggcgagatggcgtggtcgaaacacgctgcatcatccctgaccatgcgcccgactgggccctggtgcctgccgcactctggacggaagcagaggcggcggagcgtcgcaaggactctactatcgcgagggagttcgagttcgcgctgccccacgagcttgacgatgaccagcgatcgtctcttgccctcgccgtggcgcgggcgttggtagatcgttacggttttgccgcacaagccagcatccacagtcccggcagcaaaggcggcatgaactggcatgtccacatcctcgcaaccacccgtcggcttggccctgacggcttcctggacaaaacccgagagctcgacggaggccctgcgggccgggccgaggtcgagtggatccgggaactggtggccgcgacgacgaatgcgcatctggaagctgcgaacctggacgttcgcgtggatcaccgcagtctgaaggcccaggcagacgacgcgctggcacgcggcgacctcgtggccgctgcggtgctatcgagggctcccacgcgacacttggggaaggacgcgtcggccatcgaacgccgaggggagcactcagagctaggggagaggaacaggtccattcaaaaggccaacggggatgcctcggatgaactgctagcaacgtttgaacaggaaggccgggccatgcaggttccagaggggcacgatgaagcgcgggcccaacaggaggcgaagcgatcgagcatcaatcagtcgcttgccttctccgatggccagatcgtcgtctcaaagggattgggtaaagccattgaccagaggcgcttagacggcagcgacgaggatgtgacaagcgaaggcccgtctgttgaggcaattcggattgagctggtccgccaaggtgaactgctcagggatcaattggtcgtccatgcgctccattccacgctgaggttggtcaatgcactggcgagcggagaagtggttcccgaagagtgcaaggagcatcgttctgcgctcaacgggctgctaatcggcttgaagaggttcgccgcagcgttggtccgtttcccgaagcgccttaaggctgtgcgtcgttcaatcaggttgcgccacatggccgagcaggcgtgggacgacttcgtggcgaaccacccggagcccggtgtgtcttggacggctcgtgagtgggccagacgccgcggccgccggttggcagctctggagcagcggtctgctgagttggccgcagcccaagctgccgcaaccccggagcaagaggcgatcgtggccgaagagctgcggttacgggctgagtgcctggaagctgcgagccgggcggtcttggcgcgttgctctggtcccgccgagccagcaacagaagcgttgcagactatccaggaggcgacggtcgcggtccacgcgccccagctgggcctgcgcctgcggcgcccccggttgcactaa

SEQ ID NO: 510745 - DNA, 1629 bp, Stenotrophomonas maltophilia
atgcatcttcctccacacctccaacgcattgcagatgagcttacgtcggcgccgttgactgccctcggcttagtggacccgacaggcttgtctagagagacagtcatgatggcgaagtcgttcgctgctgccaccgcaatggcccggcagccttcaccggaagatagccccgctgcaagcccaaaacctgcttcagagttacaggctgagcttttccagctgttcaacaatctcttcagcggcatcacgggtcgcgcgcacggcctcatcgatgacgagaaggaaataaagccactcatcctgtcgcgcatccaggatcaaccaagtctatttagctcttctgtcaatcgcgccattgaagagctaaaagagttctatcagaagcatgtggtagagaccttccgacatgctaagaccttgggtggaatgaggctcgtgaccggaggccagaggacattcggaccatccgctctgaatgccgtccggatcacgggtctttacgctgacacccagctcatccccgatcccatctatcccttcgtaggatcaaacctgagccttaacgctgtccatctacagctcgccatccagctcttctatgtccttcgtctgcgccctttggttgaagctgagttgccggtgccccccgtcttcgtcttcccgagcttcgaagaacagcttgaggaacgggatgcgcacaccaaacttggtatcgaacagctggccgtgaggctactcggccccttgtgcaacggagaagtctcttccatcgagggtgtgttcgactatgccctgcaccatgaagacgcgttcctagcagcattgatgccctccggtctctttgttgcgcccggggctcggcccaacattattctgccgcctaccgaagccgccagtcgatacctccaagagcttgaaggcgtcagggcaactgactatctggaagaactgaagcggctgcccacgggcgtattgctcacctacggagttttggagcggctgcgcccccaatatcacctactggaaaatgccagtgaaatgggagctcagcccttgctgtctcaaccggttcattggcactacttcgaaaagatttctttggccagtgcaatggaactccggtcgaaagacattctatctgagcaggcttttcagaccctcaggtcaattcaggacgacagcctttcatggctggccaacatcccggttgcagcgcttgccaacctactggtcaacaatgagcaccgctggttccgagaggagcttaataaatacaccagtcagctggcgacggccggtcccattgagaccgacgcaatggttagggaggtcagccatggtttgagctccctggttcaaagacagaagaaggtcctggcggagatcgagcgcaaatatgccccgaagaaggccgcagccgtggctggcggtatcataggtgcgagcgccgcagcaacggccaccctacttcccagcttggcccctcttatcgctgccgccgtcccggcagcggccattgccggcgctgcttggggttatgggagggagaaggttggagaacaggtggaaaagcgacaggcagcgaagtccgtgttgggagttctcgccactgtgaggcctgctagctag

SEQ ID NO: 510746 - DNA, 696 bp, Stenotrophomonas maltophilia
atgaataccgatcaggtgatcagtttcgtggtagcggggaccggagcgctggccactgtgctcactgccgtcgccacctacttcctcttcagggtcacccgtgtcctagccgtagaaaccaagcgcatggcggaggcatccgctcagccccatgttgtagcgacccttgtgcccaaccgttggtccctcactcactttgacctcaacgtggacaacactggcaacgctactgcctacgacatcgcgatccacttcgaccctccacttacaaacggaaagccgcgttcgggcgacgcaatccctctccagcgcctcagtgtcctaaagcccgggcagggcttgtcgagctatctctgcgagttcgcgcacctcaaggggaatgtctatcaggttgagatcacgtggcgcaaagcagcgaatgcgagtgaaattcaatccaacatctacacgttgagcatgaacgaccattcaggcgttagccgcctcggcaacgacccgctgatccagctcgcaagttcgctcaagcacattgacgagcgacttagcccagttttgcgcggatcggtcaggttgaaagtggacagcttctcgagcgacgatcggcaaggcgagagagacaaagataggagggcgatcgaggaacggaggaagaagaacttcccggatggcgatgcaagttccgaccaaagcgaataa

SEQ ID NO: 510747 - DNA, 1752 bp, Stenotrophomonas maltophilia
atgcaacaactggacaactacctgcgagcgcctcagccgggctacgctgtgctgatttccggggactggggcgttgggaagtcttaccaatgggaacgctacgccttgcgactgtcagagcgttcgccgatcaccatttctgcggcggggcttgagacgctggaggatctcgaacggactttgctccaggcatcaataaccctagcagtccccggtgtcgttgcagaagtgggatctgtgctcggaaaagcattgcttcgcgtggcaaaaattgagccaaaagacattacttggcgcgcggaactgacccgtgaaaagactgtggtttgcatcgacgatatcgaacgttttgcaggtcccttcagcatcatcttcggctttgtcgtcaatctcattgaccgcagtggtgttcattgtgtcctcatcgctgacgaagttcgcgccggagagaggttcgatgattttgggaagtataaggagcgaattgttggagctaccatccatatggagcctgatctgccggagttttgtaaactgaccattaatggcttctcggacgacaggtcgcgtcaggttcttgaaggaggagtcgagcagattactagcctcatcgagagtgctcgcgtcaccaacttgcgaacagtcaggacggtgatcggcgagatgaaaagattggccgaagcgcttccgcaggactcaatagatcaatttttcaatagtcctctgcccagcgcggtgttcttctggacagttgcccttgcccgtgatgccaatggacgcgagttggtcaggaaggtcttctcgaccgatcaggtgggcatcatgcttgcccttcacgacgtgatgaaggagaaggggcaggccacggaagatgagacatcctccctctcatccacgctggagcaacttggactaagcgcggctgtccacagttggccagcgtcgcaagagttcatcgatcacatgcgtggatcggcggctgtcgactaccaaattatcgcagctcagtttgggctgctccccgaggttcggccttatgatcccctcgcgatcatcggagattacgcctctgctaccgatgaagaagtgcaggcggccatcagttgcgcccaggccgaactggtaacgggtggtcaggatggtcaaatggtcaagctgtctcggatcttcagcatctatcgaagcctctattttctcagcttcaaaggggtgttcgtcgagacgcaagaagagtggacccaagcggtgctgcggcgcctggattactatctgaacgcacctgacctcatcgattgcgatggttatgaagtttggccggccgactacaatgccgaagaaaaggaagttatcgctaagtgtgacgagatcgtagaggtcgcccgacaacatgcaaaggaagtggcgagcacaggtgcactttcctggattctcagcgggaaaggcgtggcgcccgatacagacaccacgcctgtgttcagttccgcaccgccaccggaggacttcctggcaaagcttcgaggaagcggcatagcggctgtcatccgcttgactaaagctttccggaagcggctcagtgtcatcaattcgcctgattacgtgggtggggaccgggactacgcccagcagctcatgatctgcatcgagcggggcgttccctccaagcgcccaatgacgttgcttgatgcggaactcaggcaagcgatgacctaccttcgctccttcgttcaaaaagttgataggtataagcgctaa

SEQ ID NO: 510748 - DNA, 966 bp, Stenotrophomonas maltophilia
gtgaggaagacactgatttttggaaacgggctgggaatggcactcgatcccaatctgttctcgcttgatggcgcgattggacgggcatgggagggtgagggcatctttgatccggagacccgggcgctggtgcgctgttgtctagtagacgatggcgacacggagcggccccatggggaggacgacttggatgcgcttcagttggtcgtgtcgtcgtgtgattttctggataggatgagccaaggcggagcgcattggcttagtttgcacggacagcagttccctgccgctgtgcgtaagtttctttatcagacggccctccagttccatcaacgtgaagtcgttcttccgatggagttcgcgcagccgctggccgctttccttcacgatacgcattctcacgtcgcgaccctcaactacgacaatctgctatatcagcgaatgatcgaagcctacgtcctgagaggctacggtggcgcattggtagatgggatgctgaccgctggcttcgcttgcgagaacttggagcgtagacaggggagaactttcggatactaccttcatcttcacggctcgccgcttttcgtagaccagggtggcgttacccgaaagctggcgcaggcagagttgagagaggctggggatgttgtgggctcgcatatcgtgcttacgcacgtcaagcataaacccaccgtgattgcggcctctcccttgttgcagagctattggaaccacttggagctggctctggctgaatctgaggaggtcatcttgttcggctattcagggctggacactcacctcaacgaactgcttgagcggcgctcccctgaaagaattcgcgttgttgagtggcagggtgcaggggagcaggctgagcgcgagctattctgggggaagtccttgggcaagaatgccaccgttcttcgcttggctaacgtgttggatttcaccgagtgggcctga

SEQ ID NO: 510749 - DNA, 1053 bp, Stenotrophomonas maltophilia
atgtcggtagatctgcgacggcgctcagtggaggtggtgcaaaagaccattgcgcggctacaaactgagaagtcgcgcgaagtaggcaaagcggcggctgagcgaaagaaggctctggatgcctcggccgcggcggcacggacgaagtcgttgcctacgaagatggccaagcttaaagaggcccagcggtatgaggcgagcgcggtagcccttgaaaagaaagtcgctgacctggaatccaaactggcgcgggagcaagtgaagcttagtgatgctaataggcagctcacgaccgtgctgcagcaggacgagagaaagcgggcggctatgcaaaagcgtgaacgtgcgtcccaagtcgcagagctctcgcgagttcaaggtcgtctaactcagcacgaccagctccatcgaaccacggcggacacgttaaggcgtttgcaggagcttcccgagcgtcttacggtgcttttccttgcctccaatcccatcgatcaacagccgctccggctagacgaggaggctaggtccatccacgagatggtgcggaagtctgagcaccgcgacgtcgtgaggctggaatctaggtgggcggttcaaccgctggatgtgcttcaggccatcaatgaatgcaagccgggtgttgtgcacttcagtggtcacgggtctgaagatgatgaaattttgttccaagacagcgccggccgaacgaagctgattagtaaagaagccatcgtgcagaccatgatggctgcatccggcgacattcagctcgtgttcttcaatacctgtttttcccacagccaagcggccgcaatcgtagagcacgtgccctgcgcgattggaatgaacacagccatcggcgatcaggcggctcgcgtctttgccgcgcagttctattccgcagtaggatttgggctttctgtagcgatggcctttaaccaagccaaggcggccctcatgctggagggaatcaatgaagcgcggacgcctgagctgttcgctgcgccaggggttgatctttcaggcgtatttcttgtccggccagaaggatag

SEQ ID NO: 510750 - DNA, 465 bp, Stenotrophomonas maltophilia
atgaccacgcattcttacgctcatgtcggttgcgcgacggtcctgctgggaggcgccggcctgttgctcgtagccggtgggcttgaggccctggagcagcagggggccccgctgggctggctcgccatcgcgggcggcttggccatctgggccatcctaggccttctctactggatcaacgcccgggcttaccggcgccaagaggaggcccaaggccaatcgtacgccccctccgcaccccagcgcggcgggttctggaaagggttcttcgtgacctgggtcatcgtggcggctgcccatctggcctcttttctgggcatgggcttcgctgacctgctgccacatcctgagcaagcccgggcgatcttcagcctgctcgtcctggcgttggcgccggcacacgtggtggtgccggccttgggtggagtggtctacaccctggtccgatcgacgtcgtcgccgtag

SEQ ID NO: 510751 - DNA, 339 bp, Stenotrophomonas maltophilia
atgacacagctcgtttacgacaacatctttgacgtagcagtcgatgacgaagcggagtcggccgacttgaagttcagggctgaactcatactggctttgcgggcgtattgtgatggtcgtggctggacgagaaaggatatcgcgggtctgctggccgttccccaatcgcgtgtcagcgagatgatgacgggaaagctccatctggtttcaactgacagattgatatcttacgcttcaaaacttggatttgctttgcatgcgtcgtataagaagccatcgggatccaagagcggcacaatcaagatcgatgttgagttggacgagttagagatcgcttaa

SEQ ID NO: 510752 - DNA, 378 bp, Stenotrophomonas maltophilia
atgccaaaactaattttcaagtttgcaaatgccggtgcgaagagagcatacgaagacctgccccaagcaattaaggtccaatttggtgcggacctgacggcagtgcagaatggccaaaagccgttttcggcaataaaagatgtgagtgccagtgtaggggtaggtgccatcgaacttatcgagaatggtagtcccgcctatagggtcatctactgcgccaagtatctcaataccgtttatatccttcacgcctttacaaaaactacaaaccaatcagacaaagcaaacatggaaacggccgagctacgtcataaggggatgatggccgaagttcgtgaggcgcagaaagaggaaaagaaaaagcgtcgtgggggctaa

SEQ ID NO: 510753 - DNA, 1464 bp, Stenotrophomonas maltophilia
atgcgcatcccccatcatttgagccggtcatccaccggccgctggtcgttcgtccagcgcgttcctactgatttgcaagccgtgctcgattgccggctcatcaagcgcaccctcaagacccacgatctcgcccaggcgcacgtgcgtgcagtcgtgcttggagcgggctatgctcggctcttcgcacagttgaaggatcaacgcgtggacaagctcagcaagcaggaagccgatctgctcatcgctcgcctgacgagcgccgagaacctccgtgaactgacgttggaccgcacgcgtcaaccggatgggacggtgacggagcggtggcaaatcgacagccccaaggacctcaagctgtatcggcaattgatggagcttgaagcaactgcgggagggttttcccaatccctcgctagagccgtgccgtctttgttcggctctgcagacgccggcagccacaaaagtcaggcctccacgcctgccattgagacgatgacgctgggcaaggctcgggatgcattcttggcgacgctcaagggttcgaccctgcccaagacctacacgatcaagaagacggctattgaggcattggtggcctacctggggccgaaggcaaaggttcacgccatcaccaggtccgatctggcgcggtggtatcaggacatgcgcgagaagggcgcttccacgccaacgctcactaacaagcagagctacatcggcgggcggggaggctttttcgagtgggccatggcgtctggccactacccgaagggcgacaatcctgcctctggccatgtcagctactcccagcgcgagaagcgggcgcggaagaagctggggttcaaggcctacgacagagcccagatccaagccctgtttgcccccgaggcgctcgccaagctgtccgaggcggcccgctgggcctccctccttgggctctatacgggggcgagggcgtcagaggtcggccagttgctggtccgagacgtgttcgaggaggacggcattccgtgcctccgtatctccgacgaaggcgagcaccagaaagtgaaaaccgaggtcagccttcggacggtcccgctccatcctgagctcctcaagatgggcttcctggattgggtcgatgtcaagcgtaaagccggtgaaaccaggctgttcccggcggccaaagccaccgccgtgaacggacagggcaactggatcaccaaagcgtttagtcgacacttggctgaggtcgggaagaattgggagccagccaagcgcgggttccattcgctcaggaagacgtttatccaggagctgcagggggctggagtggtctctgagctcagggcgcagatcgtggggcatgagctcgatgacgagcatcacgcgacttacagccggttattcagtgtctgcgaaaaactgtcgggggtagggcagcacagccccggactgagtgttgtagattatcgactttaa

SEQ ID NO: 510754 - DNA, 1800 bp, Stenotrophomonas maltophilia
atgaagatcagacatatcgcggttgcactggcggcactattgccggccggcaccgctctcgcgcaatcgggctatgcccatctgacccccaggcagatcgggtacaacgagaacctgcctgacaggtatgcggtcctggatttttcggtcacctctgctgactggatggaccgggtccgcctgccgtccatccagcgccatcacgacgccatgcagatcaacatcgtgaatcagggcgcgcggggcgactaccttgagatcaaggggaagttcgctcacctgcccgacgccgtcaacagcatgatcgcgtccccattcaccgccctggcctaccgctccaatctggccacgtccaagtggcagctgcttcctgccgcctatcgggagatcgacggtcccaacgaagcgcgctggcgcattccctcgaacgggcgcaaacccgcgacggtcctgaacctgcgcaatggacagcatgtgggtgagatcggcctgccggacggtgcacagccctttgacacggtcaccatccagcacgatgcagactgggccagcacagtcatcccgggcgatacgctgttccctggctcgcgattgacgatgcagaagggcgatgtccagcattacgtattcgatccctactggcgcacctggaagctcagttacgccagctaccggcccgtctcgataagctccgccaaggagtatccggttggaccacgatcggcggtcaacatgacgcccacgcagtggaagccctatctggaaatgccatcgagcgcgacagaccgtgaccgccgcgtcgtgcagtattcgagggatattgagcctatcagctacatcggcctcaacatcgatgccgattcgatctttcaatggaaaggtcgcattccagccttgcccggcgacaggctcgagttcatctacatcaatgatggcggctgggggtcgggctactggcatccgctgcacttccctacccacaggattgatctcaagcagcttgctgggggaaagctcgtccgtccgaatgcagcggtgacctggatcaccgccagcacaccagccacactaacccttccaaccgcctacacgaatgatccaagggtggtggtacagaacacggccacgcgagcgatgagcgtcgtcggcccgggcctgtccgatcaggttctagccggtgagaccgtggcataccgggccattgattccagccactggaaacgggagacctattcgatcgacatcatgttcgccgtcgcgacccggctcggtgaagtcggctccaaggccatggcactggagctgatgcgcgagagcctgagcaagaccaatgaagctctggacaactcgggcgccaacttccgcttccgcgaagccggggtgcgcgagatcaacgtcccctcctacctgcccactgaagtgatcccgcgctggatggcggattatcaggctgcttcagtgattggtgacagcggtgccgatggcatcttcgtgggtggtgttgccgacggatgcaacggcgtctatcactcggcacctcgcaaacagttcgtggtggccatgaacctgctctgccccaccgacatgctccgtgaggaaatgggcaaggcattgggcatgaaggtcaatggcaagcagggcgtgccagtcatcggctctggcaacacgctgccgttgtacgcgaccccgacccgcttcgtggacgatggcaaccgcgccatcaatcccggacagcgggacgaagtgcagcacatgaacggtgttgcggaagaagtggcccgctacggctacccgcgttga

SEQ ID NO: 510755 - DNA, 384 bp, Stenotrophomonas maltophilia
atggcgaccttcctctcctcgattggactgagtttcgtcagcaagaccatcggcattgacagcgctgtttaccggatcacatggcgcgatggctcgaagaccaccctggtcatcacgccctcgtcagttgacagagcccgctatgtgcaaggtgaaagtcttgatgcgaagggcaacaagattccggacggtgcagccaccgatccggaattggctcgtgggttcgtaggtagctatcgtttcgacgatcgagacgaactcgaacgatgggtggactcggcccgcctctatggggtgaccatgtttccaagcacgccacaaggatcacttcagatcgtctgtgaatgggatggaagaaacatcgtctgccgactaccacgttga

SEQ ID NO: 510756 - DNA, 126 bp, Stenotrophomonas maltophilia
atggtgcgttacgcgacctgcagcggactatcgggatttggtgttgaggtggctaagaacattccgaccaacttcggccccgttcgactggccatgagtgttcccccaattccgctttcctcttag

SEQ ID NO: 510757 - DNA, 234 bp, Stenotrophomonas maltophilia
atgcggactgacctgtgggatcaattcggcgacctggttggcggcagcccgaggctgatcgccacagtcaccgcgcacaactccgatggcaccagcagcctgaccacctatgacggcgtgcagatgcgcgccttcgggcagctgcagctgacggttccgtataacgtctgggtgcgtgccggcaggttggtggaagctgctccgaacctgcccctctatgaattgaccgtctga

SEQ ID NO: 510758 - DNA, 1026 bp, Stenotrophomonas maltophilia
gtgatcaacacggtttctcttgttcgcctcccggatcgcactcccattgaggtcacgcagatctcgctcagctccagtcgcggcacgtggggatggacgttcgatatcgagctcgcagatccgcagcagctcgcgctgctgaagcccaccgccgccgggcccaggcagtttgaggtcaccctcaacggctacgtttggacaggcatcatcgagagcttccagaaacaaagggagtttagtggcggtggcgtgcgcctgagtggtcgctcacgcactgcgctgctggccgcgccgtacgcaccggcccgggtgaaggccaccacggaagatcgcagcatggcgcagctggtggccgaggagctggccgataccggcttcactagcacgtacgacaccgtcgactggaccgtgccagcaggtgcttggttctatgacgccagcacgccgctggacgccatcagcgcgctcgccgaggcgagtgggggtgtcgtccaatcggaccccgccgcgctcgccatgcgcgtgcgcgctgcctatccggccagtccttgggattggcgcaccactccgccggaccatgtgctgcaggaagacatcgtgctgacggagagcctgcagatgcgcagcgcgccgctgtatgacgctgtcgtggtgacgggtgagctggcaggcaagggcgtcacctgcaaggtgcgcaagtcaggagaggaggggcgcctctacgctcagcaggtcagcagccccctgatcaccgtgccggcagccggcgcggagcgtggcaggaatatcctgtgcgatcgcggagagcaggcggccgtcgacctgacggtgccgctgttcgctcagccgctcaaggccggggaggtcgggttgctgttgccgctggatctggttgaagtggtcggtgccgatggcacctggcacggccaatgcgagtcgctgcggatcgaagtgtctgccgacgatagggccgtggtgattgagcagacagcaaccctggagaggcactacaccgatgcggactga

SEQ ID NO: 510759 - DNA, 1002 bp, Stenotrophomonas maltophilia
atggcctcactacctcgaatctatcgctctaccgatcccggtgccccgcagttgagcggcgtggctggcagccttgtggcactgctcgacgcggtactggtcaatgggtatggggtgggtgccgatttcaagcctggcgcgggctgggttcgaaccttcaccgcgaccaacaagcgcgtctatcgaaacaatcacgtggatggttcgggcggctatcttcgcgtcgaggaaccgagtgcgacgcccgggtacgcgtacgcgcgagcctacgaaacgatgagcgatgttgacgttggcactgggccagcacccaccaccgggcagcgcgccaacggaattctcctgttgaagtcaagcgagaacaacgggaattctaggctatgggagatcatcgccacggatcaggcgatgtacttcttcgtgaactactacaacctgccgagttcgaatgcatactcaacgatcccggcattcccattctttgccggagacatcgagtcatttgttccaggagacaaatcgcacttcatggtaggtggaaacgcgatggtcaccccgaccaacagcgttggggatggtttgctgtacacgacaacctcgctctatggtggcatgcctagcagcgtctgttgttatgcactcagggcctacgcacagcagcccggatcgatccctctgcatctggtaaatccgagctatggcaccgaaggaaatgcgattggatcgggtggcgttgtgtttccagatccgatctctggcggtgtcttgatcgaacggccgctgatgaaggaaggggcctatctggcgagggggtgtctgccaggtgcgtactctccattgcatgcgcggccatttctgagtggtgagatgttggtcgatctcgatgcgtttccggggaagactctttacgtcaaatccttcaatgtgttgaacggtaattcgctgtctatgttggggccgtatgcaggtcagtttctgatcgacatgacggcaaagtggtga

SEQ ID NO: 510760 - DNA, 3603 bp, Stenotrophomonas maltophilia
atgacgatccttgcaaccgatatcaagatgcgccagtcgcagcgccttaccgacaaccccgatggcggcggccgcatggtccaggccgagattgtcgacggcgccatgaacaacctgttccccgacattggtgatgaagagcggaccacgggccgttccacgctgcgcaagatgttcgtgcacgtggatacgcccggcccggacgtgctgaaggatgcgatcgcggtgctgatcgacccgccatccgatccgcgcgtgacagtgaccatgttcgccaccggctcctacagcgatgtgcgcctggacgcgaaaaaccgggtggagagctacatcacccgcggcaccgaatcgcggttcatcctgctgggcgaccacttcatcggccagatgaccatccaggtctacaccaccaaggatgcgccgagcccggacatcaacgacaacctgagcctgctgacgctggctgcctcgggccgcgatcccggcgagcagtacgtgcgggtgaagaatgtgctttctcggactacgcggacgttcaccgatgaccagggcgccttcgagcgcgatgtgctggtgatcgagctggtgaatgcactgctgctcaacttctacgggcaggaggtcatccgctactcggctacgaagccgggtacccgggtctatgagaccaacgttgtcgatgccaccagctaccatagcgtgaagcggcttaccgcggcagggaagccgggtgacctgtctgtgcagatcgactcgccctatgtgccgattgtccccacgtccaccgcagagaccgccgtgagtgatgtcttggctggcatgggcactctgagccatgttccttcggggccggccaacagcctggcgctgagcttcagcagcacgttcgcggcgggtgttacggtcacccgcttcctcggtaccggcatggcagtcgggagcgtgaaggtgctggtgggcagcatcgagctgacggatgacggcaccggcggcctggcctctgcagcggtcacaccgtggacgggctccgtcgattaccagacgggtgctgtgtcgcttgttcactccaccggtgtgggcaataccagcatcagcatcaccgctactccggccggcaccattgccatgcaaggcttcaccgatgagatcggggtgacccagaacaaccagggcatggtctggctggcccagttggtgccgctgccggcaccgggcactgtcgtggtggactaccgcgcgctcggccgctggtatcgcctgagcgacaacggccgtggccagctcgttggcaagcccgggcagggcagcggcaccatcaactacatgaccggttcgctggtgctgaccaccggtgcgctgcccgacctggacagcagcatcatcagtgcctggggcacctcgatcattgccgaggcccgtgcaggcgacaccaacatcaagtcgcccgcactgcggttcatgctcggcaatgccggtgccgcccccggaaccctgcgcctgacggtgcgggtgggcggtgcggatgtgaatgtggtcgacaatggcgtcggtggcctgctcatcgcgggacagcttcgcggttcggtcgcgtatgcaacgggcgagtgcctgctgcagctggatacgctgcccgacgccaatagccaggtggcagtcaactatgactggggtgagccgctccatgccgcgccgcagccggtgccggatggaaacggtctggtgtcattcacgctgccgcaggggccggtcaaaccgggctcggtgatgctggactgggtcattaccgtgatgcgggatgcctacgatctggcctccgcgccgcagcccatgcgcgtcatcgccaaggacgacggcaatggcaacctggtggctgtctcggtgggcgacactgctgccatcaccgcgctgggggccatcaactacagcaccggcgcggtgagcctgcaggccggaaagttcatggttcgtcaggtgtcgtacccgcagtacgaattgcgctcggggcggttgaaggtagtgggctatggccgcgtggatgtgctggcgcagttttcggcaggcacgctcgtttcggtcggctggacgctggctggtgctggcacggaatcggccgaagaatcgttgccactgccgccggtgtcgctgcagctgacgccgaccatcagcgacagcatcgtgccaggcagcgtcaggttcagcttccgtgaccggacctatgtggaccgcagtggcggcctgtaccactccgtcgaccctctgacgggggcgggtgtctacgccggcaccatcgactacaccgctggcgtggtgagcttgacccaatggctggccggtggcgccaacagcgtgcagatccagtctctgctgacgcgtatcggtgacccgggcgttgccaacagtttcttccgtgcgccgggctcgccgctgcggcctggcatgttcaccctgcgcgccaaccgcctggacggcgagctgctcacggcgacggctgacatcaatggcgctatctccggtgcgcagatccgcggcacggtggactgggagagtggcgtcgccaaggtgcagttcgggcagttggtgccggttgctggcaatgaggggcagccctggtttgatccagatctggttgaaggtgaccggatctggcggccggcgctggtgctggccggttccatctacatgggggcggtcgtctaccgctcgatcccgctctcggaggtcgtcatcggcctgtcgtcggtgcggctcccgagcgacgggcgcgcaccggccttcaagcccgggcagaccgtcctgatccaccacaccgccaagcatgtggtggcctcgccccaggcgaaccagaccgtttcctttggccgtgggcgggtggcggccatcgaggtccgggattcgctgggcgcaccggtggatgcggcgtggtttgtggctgatctggacgtgggcacgctcaagttcagtgatccgctgaaccttgctgcctacgcgctgcccatcacgatcagcgagcgcgttgaggaccggcggctggtggtgcagccacagatcacgggcgagatcgagatcaacaccggcctgacccatgactatccagtgggcgaggcaatgatcagtacggccctgcgtctgggcgaggcgaatggctcgctggatctgcaggcgcgggtggtgaacctgtttgatcaggccgcctggtcaaacgtatgggccgatgcgccctccggcagcgtggcccctggtacctacaacgacaccgactatccgctggtggtgaccaatgcggacgcaatcactgagcgttgggctgtgcggttcacgtcggcgacgcagttcgagctgatcggtgagacggtgggcgtgatcgcttcggggaacacaacctcggatcttgcgccggtgaacccgcgtactggccagccttacttccgcatgcggaaagaagggtggggcggcggttggtcgaccaacaatgtggtgcggttcaacgtcgtgggtggtttggctccggtgtggatgattcgcacgacgctgcctgggacgccggaagtggttaccgattcaactcgcatccaagtaatcggcaatatcgaaggagccgcataa

SEQ ID NO: 510761 - DNA, 417 bp, Stenotrophomonas maltophilia
atgagccgagttgtcctggccggggttgagcttccggcagatatgcaatggacggacgagttcactgcttggcgcgtcgggcagcaggttcgtaccagcctgaccggggcgctgatcgtccaggagtctgcgcgacaggccggtcggccgatcaccttacagaccacccgggatggccaggcgtacgtcggcccggtgcggctggatgtgctgcgccagctgcaggagctgagcgggcagctgcaggttgccccgttgacgctgatcctgccggcgcacaacggcggtgaccgcacgttccaggtccggtggcgccggaccgagggggctgccgtcgaggctgagccctgccgattcgcggtgccggcgctcgatgccgactacttctccatcacccttcgccttatgacggtctga

SEQ ID NO: 510762 - DNA, 324 bp, Stenotrophomonas maltophilia
atgagtgaggtcgagttcttgcgggatctggacgcgtccctgcacgccgcattcgctgttgcaggcatggcgtcagtgggcgcgcatacggcaaagaaggacggtgtggtgaccccgaacgtccgggtctacgtcgaccgggatgtggagaccatcggggagcttcgccagtttgtctcagggcgcgtggaggtggcctatctactcgcggacgtggagccggagcaaggcgaccgcgtcgagatcgccggcgaggtgttcgtgaattcgaagaagctcagtgacgacggctcgcgcagtcgatggctggtgcatcgtggctga

SEQ ID NO: 510763 - DNA, 492 bp, Stenotrophomonas maltophilia
atgatccgcaccctcatcgtcgccatcctcctattgctgggcgtcgtcgtctggcagcgcggctcggtgtccatcgcgcaccgtgcggccgaccaagcggcggccagccgagacgtcatggaaggcgagcgagacgctgcccgtgctgaggccgatgcggcgagcgaagccctcagggctgaacgcagaagtgccgccgccgcgaacagccttgcttccaagtacgaaaaggaaaagaacgatgcgcagaaagcgtctgatcgcctcattgctgatcttcgcgttggcaagcagcgcctgcaccagcgttggcaagcgttcctcgccaccgcagagctgtccgcagccgccgctgcccgcagccagcctgatggtcgagccgacgaccgaatcgaaagtgcgggccgagctattggcgccgccgcccagtgcgacgcccaggtgagggcgctgcaggcctatgcgcggctctgctcgggaggctcgaaatga

SEQ ID NO: 510764 - DNA, 576 bp, Stenotrophomonas maltophilia
gtggccgctagtccgaacagcaccgccggcaagcccgatggcaagtctccgggcggccccttggctctcggatcagcagtgctgctggcgctgttggcgctgttcgagagcggtgggagcacagtgaccattgtgtacgccgacaagctcgccggcggcttgccgacggtgtgtgatggcctgacacgccatgtgacggacaccccgatcatcgtgggtgagaagtggtccaaggagaagtgccgggtcgagaccgagcgtgccgtggcgaaggtccagcggcagctcatgaagtgctttcggattgaaccaccgcagcgcgtgtttgatgcggcgtcgtcgcatgcttggaacctcggtgccaccgccacctgcagtagcagctccatgaccgcatggaacgccggccactgggaccttggatgtcggcgcttgcaactatctgacgacggacgcccagtctggagttacgtgaaggcgggcgtcgcagccgatggaaagccggtctaccgcttcgttcaggggctggccaaccgccgcgccaaggaacgagccctgtgtgagggaagggcatga

SEQ ID NO: 510765 - DNA, 300 bp, Stenotrophomonas maltophilia
atgaaagacccgatcagccaggacctgttggcagcgatgcttaagacagcgccgaccgcgaccgtggcggtggctacgttcgatccagctaagcacctcagcttggctgtgatggtggtgacgctgctggtgggcctctcgcagttcttcaccaccgtggtgaagaactggggcgactggatgggctggctgtccgcacgctgggtcgacggagtgcgtttgcggcactggggtgcccacaggatcggtcgagctggcgttgccgttgcgcgcgcatggaggtggctgcgtggccgctag

SEQ ID NO: 510766 - DNA, 354 bp, Stenotrophomonas maltophilia
atgaagaacgcacatcaggacggtcgcgtgctcgacgtgaccctggccgctgacaccaagagtggcgagctggtggtacagggcaagctggttgccgtcgctgtcaccgatggcaaggccggcgagatcattgcgacgcgtgtcgaaggcgttttcgaggtccccaaattgcccgccgccgtgttcgctgtcggcgccaccgtcaactgggacaccgctggcggccacgccattgctgctgcagccggtgccggtcaggtgggcgacattggcttcgctgtatatccggccgaggccggcgcactgaccgttctcgtccggctgaccccgggctctgccgcagcaggcgcgtaa

SEQ ID NO: 510767 - DNA, 2226 bp, Stenotrophomonas maltophilia
atgcgtgcaaccctgctggccagcgtgatcagcaacagcatccgcgcagacgcggcaaccgaagccgagctgggcccagcgctgtatcaggtccgggcggaggccgatgtcgccgacgtgatgatctatggcgccatcggtggctatctgttcgaagagtcggtgtccgctgccgacctggtcgagcggatcggccagatcacggcgggcaccatccacgtgcgcctgaacagtgtcggtggtgttgtcgcagatggcatggccatccacaacgcgctgcaggcccatccggcgcacaagatcgtcaccgtggaagggcaggccgcgtccatcgcctcgctgatcctgcaggctggcgatgagcgccgggtctacgccagctcgctggttatggttcatgcgccacgtaccgtggccgccggcagcgctaccgcgtttcgccagaacgcagaggcactcgacgcgcacgcgtcggcaatgctggaagcctatgccgcccgctcaggccggcgcgaggaaatggagcggctgctaacagacgacgccgaccactggttctccggtccgcaggccgtcgatgccggcctggccgacctggtggtggacgccgaccccggtgccacggcgatgtggtcgtcggcatctgctgtcgccatcagtggctatctgcaatccatcgagggtgccggcacgcctgtgctggcccagctgcgccgcagcatcgtcgccagtctctctccgcaagtattcgcctcgcttcccgaggtcagccagtcggccgtgatcggccatatcgaggatccaacaatgaagaagcagtacagcactatcctcgcgaacgccggtcgacagagcccggcagtcgcaaccaccgctgccgcgccagctacccctgtcgtcgctgcggctcctgccccggtgccgacctcgggcgatgcggtccaggccgctctgggtgcattgcgtgagcgcaacacccagattcaggccatcgcgttgccccacatgggcaacgcgcaggtccgtgagtatgtggatggtgtgatcgcgcaggcagactccaacatcaccgccgacgcggtgggccgccacatcctggcgctgttgggcagcaacgctgctccgctcaacggcggctcgggagttgtcgcaggcgctgatcagcgtgatctgagccgggctgccatgtctaatgcgatccaggctcgtgccggcctggttcaggcaacggacggcaaccccttccgtggcatgtccatgaccgagatcgctcgtgcttgcgtacagcaggccggcgtggacacccgtggcatggagcgactggaagtggtcggtatggcgtttacccacagtagctcggatttcccgcagctgctgggcgatgcctcgcgccgggcgcttctgcagggctatcaggaggttgaagagaccttcgaccagtacacccgagcggtgaacgtgggcgacttcaagcccactaatctggtcggtctgggggccttctcggatctggacatcgttccggaaggcggcgagtacaagcagggctcgttctctgagcagtcgcaggccatgaaaatcgtgacctacggcaagctcttcaccatcacccgccaggccatcatcaacgacgacctgggcgtgtttggcgacgtgccgcgcaagatgggccaggcggcacgccgcacactcgccaaggccgttttcgacctgatcaacagcaacccgatcctggctgacggcaagcgcctgttccatgctgaccacaagaatctcctgccggccgcgttgatcagcaccgccagcgtcggcgcgatgcaggctgccatgcgtctgcagaaggatgctgatggcaacctcatccaggtgccgatgcgtggcctgctgacgccggttgccctgagcggcctggcaaagaccgtacgcaccgcccaattcgccgtgggcgcgggtgttggcagcaacgaccccaacatcgtgcgcgaaacctttgaagtctgggatgacggtcgtctcgacgccaaggatgcacaggcctggtacggcatctccaacccggcttacgtggacgggatcgtggtgggctacttggacggaaaccagacgccgtacctggagcagcaccagggcttcaccgtcgatggcgtgtcttggaaggtgcgtctggatgcggcgccggccattgcggactaccgcggcatctacaagaacccgggcaacccctga

SEQ ID NO: 510768 - DNA, 1533 bp, Stenotrophomonas maltophilia
atgtcctccgcgcagatcgccaaggcacgattgggcgccgcactcggcgcggatcgcgccattcaatcggcgcgggcgcagatggctccggtcatcgcccgcgctcacgaagtcacgcggccgtcgcgaaaccgaaagctggcgagggactggggcagcggcaatgccatcgcaggcatggatgcgcgccagctccgcgatcaggcccgccatctggagcgtgacttggacctggcggacaacgcgctgaacgtcctggtccagaacacggttggcgcaggcatcgacgtgctttctgcacctcgactccccgggcagccgatcaaccgcgatctggcattgcagctcgacgacctctgggacgcttggtgggacgcgcccgaggccacccggacgcacgactacggcatgtgccagcagctgctggcacgcagctggttccgcgacggcgatgcgttctaccaggacctgatcggcgccgtgccgtacttcgagcacggcaccgttgtgccgtacagcttcgagatgttggaagccgacttggtgccgttggatttcaacgatccggcgcgcaacatcctgcagggtgtcgagcgcaacgcctggggccggcctatcgcgttccacgtctacaagagtcatccaggcgacccgatgggcacgcggctggagaccaagcgggtttctgccgagttcatgcattgcatcgcgctgatgaagcgcctgcaccaggtgcggggcctcagtgtgttcgcgagcgccatgtcgcgcttcgaggacgtgaaggactacgaagagtccgagcgcattgctgccaaggtggcggcgtcgatgacgttccagatcaagaagggcggcggcgagcagtacggcgcagatctgggcggccaggcggtccttcaggatggtgttccgattcgtgagctacgccttgcccccggtgcgatcttcgatgatctgctgcccggcgagtctattgagagtctgggtaccgaccgaccgaatcccaacgccgccacctggcgtaaggaacagttgcgcgctgctgccggcggcatcggcgtgagctattccagcctgtcgctggactacaacggtacctattcggcacagcgtcaggagctggtcgagaagtggggtagctacctgatgctggccgagcgcttcattgccctgtgtgtgcgaccgcagcgcatgcgtttcgtggaggcatgcgtgctttcgggtcgcgtgcgcctgccccgtggctggacgctgcgggacctggccgcctccacgtacgtccgcccggtaatgccgtggattgatccattgaaggaggcctacgcgcgaggcgaggcggaggaccgcggctgggtgtcgccgcagcagaacacgcttcagtacggcaacaaccctgctgaggtcctgcgtcaacgtcaggactggcaggaacagtcccagacccttgcgccgccggcgcccaacaccagtgcggaagcgcgcgcccaagtcctgggccagctgacgcgcgatctttccaggagcgaatga

SEQ ID NO: 510769 - DNA, 201 bp, Stenotrophomonas maltophilia
atgctggatttctacatcgacgcggaggtcgccgtactttcgggccagaccgttcgtatcggtgatcgccagttgacccgggcggacctggctgagatccgttccggtcggaaagagtggcaggctgccgtgctgcgcgctgactcagtcgccggtcggcgggcgcgctgggccaatgccgatttcggtggggagacctga

SEQ ID NO: 510770 - DNA, 333 bp, Stenotrophomonas maltophilia
atggcaaaacgtaccgagtcagccgaagagctgagggagcggattctggccgccatgcgagccgacatcgggatcagcgaacgcatggcactgccgttcgttgaatcggtgatgcaatgctttgccggtgagcgaccatatttccctgcggcgcctcgggagtacccgatggctgaaataaaggctgcgctggtagctgggattcccgtgaaacaggtcatgtccaagtttgacctttcccgcgcgaagctccacgacctgttcccgggagggctaccacgggccacgaaaacgcaactgtccacgactttgacaaaagtggagacaaattag

SEQ ID NO: 510771 - DNA, 1920 bp, Stenotrophomonas maltophilia
atgatggaggcacagagctgcctggcggcggtgctggcgcgctcgctgcagccgcggcggcccatgagcgtttcgcagtggtgtgacgaacacatgcgcctgtccaccaagagcggtagcaagcccgggcgctgggtgacggaccgcaacccgccactgcgtgagccgatggataacatgtccgcccgtagcccggtgcacgaccaggtctgcatgttcccgattcagttcggcaagagccagctggcgaccaatgccatggcctactggatggactatgcgccgggcccgatgatgtatgcgctgccgggtgaggtgtccatgaacaagtggatcgcccagaagctcaatccgatgatcgaggtgtgcgcagcggtcaagaaggcgttgaccagcaccgccagccgcgacagcgccaaccagcgcacgttcaaggacttcgctggcggccagctgtttgtggagcacatgggcagcccacagcgactcaagtcctccaccgtgaagtacctgcaggtggatgagattgatgaggcgccgcagcagctatccactggcgacgatccggtgaaaatgctggacggccgcacgtcgtccttcccgaccacctacaagcgccagtacatcagcacgcctggcattgcaggactcagccggattgcgaagctgtacgataagagcgatcagcgccggtaccacgtgccgtgcccgcactgcggccattttcaggcgctgcagtggagcggcctggtgtggtcgcccgacaagagccacgcgtggtacgcctgctgcgagtgcggtgtcgccatcgaggaacacttcaagacggagatgatcgccaacgggcgctgggtcgcggccaaccctgactcgcccattcgcggctacaccatcaactgcctgtactaccagttcggtctggggccgcgctggttggatctggtgaaggaatggctggaggcgcagggtgatccggcctccctcaagacgttcgtcaatgaccgcctggccgagacgtgggaagacccgtcgatgcgcgcggtcaagcacaacgtgatcaaggatcgcgccgagccctacgctctgcgcttggctccgctgggagtgcttgctgtcacagtgggtgtcgatacccaagacggacgcctcgcagtgcacaccattggctggggacgcggcatgaccgcatggaccttggactatgtggagctgcagggtgaccccgcagaggatgccgtgtgggttgcactgacggaccttttgaatcgcgccatcgagcgagcggacggcgctcttctgcgcccgatggccgttgctatcgatgccggtggccaccgcacggaggcagtaaagaactacgtgcgccagcggcgcgtcaccagaccgatgtgcattttcggcgccattccgaacaacgctccggtgctgtcgaaaggcaagctggctgacgtgacctggaacggaaaaacggacaagcgcggcatcaccattcaccacgtaggcaccgtggctgcgaagcactatctgtatagccgcctctctgccgatgcagagcgcgccgtcgaatcgcgcctagtgcatttcagcgatgaactgccggatgagtacttccccggtctggtgtccgaggtctacaacccggtgaagaaccgcttcgaaaagagggttacacgcaatgagccactggacacctgggtctacgcatacgctgccgcgcatcacccagaggtccgtctgcatcgctacacgcgagcagactgggacgttctggaggcccgactgttgcttaccgtgaacagcacggattcccgtggaactgaggcagcgcctgccgaagtcgagacgaagagtgtttcgcgtggaacgcaacaggtccggccgcgtagcagcggactggcgcgagaggggtgggcactgtaa

SEQ ID NO: 510772 - DNA, 231 bp, Stenotrophomonas maltophilia
atggcagagatcatcagcttcccgcagcgcatgcgcttcaccgcgatccgcacctacgacgccgcatccggcatcggcggcgtggtcgcggtcctgttcgccccggcgcgcaaggctcttgtatgtagaccgattcatgccgtctcagccggccagatgtcagggcggatcgcagcaagggccaaaggctcgcagccaagctcgccaccgatctctactgacgccagctga

SEQ ID NO: 510773 - DNA, 327 bp, Stenotrophomonas maltophilia
atgagcgtgcagcccatcctgccggcggagcagcgattcgccaccggccatcagggcgagtcgctcgtcctgatggtgtgccagggctggctctgggccggcctttacaccgccgcgccgcgcgagtcgctcctgaaggtcgccgccagcgccagccggagcgtgggggtatcgcaccactcgctcaccctcggcggcgtctccttttccctcaaccgacttgccgcacaggccgcgcaccgctggctcgaccgccagggcgtgcgtgttcgttcgatctcccccaacaaccgcgctacgcgccgcacgcgaggaatcgccgcatga

SEQ ID NO: 510774 - DNA, 246 bp, Stenotrophomonas maltophilia
atgaaccgctctgttgtcatctacgggccgcaacgctgcggcaagacctctaacgcgcaggagctgcgcgcacacttcggcctgcaggaggtgctggacgactgggacggccacaccgcgtatccactggagggcacgctcgtcctgaccaacaatccgcacgcaatcgcgcaccattcgtcgcgcgtcctcgatcacggctccgcgatgcgcgacatgtgcacggcagcccatgagatcgattga

SEQ ID NO: 510775 - DNA, 393 bp, Stenotrophomonas maltophilia
atgagcagcgaatcgcacacagctactgtcatcgagcccggcaggccgggtagcacctattccgatggcccggtatggcacgccttcggcctcagtcgtgctgcctacctggtgctgccgcgccgcaccttgcaatccatgcccttggactggcaagcgcgttttgtcgcgctgatccaggaggcgcgccggacattgcctgatgaggctttccctcagtaccaagctgtccggctcaaagacgggcagtacgcagccgatcccaactgccgctaccgccgcatgccgccgtttccccaccgccctaccgaagacgcgcccgccagatgcgatgcgccgctggctggcgctttcgtgaacaccttcactcaattcgatcaggccacccaatga

SEQ ID NO: 510776 - DNA, 693 bp, Stenotrophomonas maltophilia
atgaccgcgaatctcacgattcttccaacaaactgccccgttctgcgcgaggcattcgaaacgatcagtgcgatcgctgtcgaagctgtgtggctgcccaaccaggcgaaggccatcacgctcgcccaagcccaaaccgcgctgcgcgacctgcatcaccgcctgcctcgctcgcaggatctgcgcgtgttcgaaaccgccgtcgccgcctatcgcgccaccctgcgaagcagcatgcaggatggcgacacgccgctctgcgatacaacccgcgcccggctggcgcaggccgacgaactgctggagctggtcaggaatcagagccgcactgtcatcgatcctgcggacccgtggcgcggcctataccacccgagtcgcctcccagcgcgcagcgccgagggcgagatcccgtgccatcccgacgtgccgatgtgggctgacggtcgcgagtgctcactgcgccccttgttccttgcacaaggcttcgatgtccacgttgcctttggcgacttttccgaggaagccatcgagtccggcgaccagcgctactgggacgagatgcgcgcatggcaacccgtcggccccacgcccgattggcgcttggcctggctgggcgataccgaggacggccctgccgcctggttcgtcttgccgctcgccatcgaggcattgaagaagcgatccgaaacgtag

SEQ ID NO: 510777 - DNA, 549 bp, Stenotrophomonas maltophilia
ttgaacgccatcaccatccgcaccaagggtgaagcggagatcttcatctccagcgaaaccctccgccctggtcacctgatcgagctcgatgacgatcagtccatccaccagtacgccaccggccacacgaagttgttcgccgacggaaccagcgccgctggtaccgacccgcgcaccgaccacgtcgccatcatcgaccacgccaccggcctgatgtgggcggtgaagtccatcggcgacagcgatggcgacccgatgagccaggccgactgcgagaaggcctgcggcgagctgcgcctgttcaaccacgacgactggcgcctgcccacccgcatcgagctggccgccctggtcgatgacacccgccacgaaccggccatcgacacctcacttttccccggcgtgctgccgcgctggcactggaccagcacgccctgcgcctggtccccggcgtccgcgtggggcgtcagtttctacgacggcaacgtcagcagcagccgccgcgacggcgacgggttcgcgttggccgtgcgtcgtgccggtcagtaa

SEQ ID NO: 510778 - DNA, 426 bp, Stenotrophomonas maltophilia
atgaaccccatcaccctcaagaagatcgccgccgacggttccgagctgccggatagcgccaccgaccacgtcgccgtgttcctgcccgactacggtctgaccttcaccgccaccaacatcgtggacagcgacgttccgcatgccgattgcgaggccgccgccaaagccctggacctgctcggccacaccgactgggatctgccaaccatcgaggagctgcagctgctgatcgaccgcagccgctactcgccggccatcaacaccgacttcttcaagggcatcgagaacgactggtactggtcgaagacaccggccgcctggtccccggcgtccgcgtggctcgtcaatttctacggcggccacgtctacgacctccgccgcgacggcgacgggttcgcgttggccgtgcgtcgtgccggtcagtga

SEQ ID NO: 510779 - DNA, 444 bp, Stenotrophomonas maltophilia
atgacctcccgtttccagcccccacccatcatcaaggccgccgaacacatggcggtcgagatcgaaaacgccgttcgccggttcggtcgctaccaccgctaccagatcggtagcgacctgcgcacgcgttcccagcaggtgttcatcaacgccaacaacgcatggcgcgaacgcgccgagcaggcgcgatgggtggcggtgctggtgcgggatatcgatgccctcaagcagctcctgcagattggcaagggggttggcgccttcgccagcttccgccagttcgaaatgcttatccgcctggccgaagagctgggtatgcaggcgggcggctggcgccgcagtctgcgcgaggtctcccatgcccagaatgcgcaagccgatggcgccgcgcagcgtggcaagaaactgagtacccgtaccgccctcgcgagggccaactcatga

SEQ ID NO: 510780 - DNA, 1368 bp, Stenotrophomonas maltophilia
atgacgaagccgcgctatccgcatccgggctgcgcggcctggtcgcaagtgtatggggaagcggccgcctggtccccggcgtccgcgtggaacgtcaatttcaacaacggcaacgtcaacaacaaccaccgcaacaacaacgggttcgcgttggccgtgcgtcgtgccggtgagtttcagggagaggtaggcctgcaggagttgtaccaggcatggcggcgcgcacgccgccagaaggttccgagcttcaaccagcttcgattcgaccaccgctgggcagacggactgctacagctgcagcgtgagctgctggccggtaactgggcgccacgaccctctacgtgctttgtggccacccggcccaaggcacgcgagatccacgctccggacttcgccgaccgcgtggtgcaccactggctggtgccgcagctggaagcgctgtgggagccgacgttcatccacgacagctacgccaaccgcaaaggccgcggcagccatgcagccgtgaaccgggcccagcagttcgtgcgccaggtgcacagcggccagggtggcggctggtatctgcagctggacgtggccaatttcttcaacagcatccaccggccgaccctgtggcggatgctgcgcaatcggctgcagcgccaaggcgcgcccaaggtggtccagcaggccacccacgcgctgctgcgtcggtctccgctgcatgcgggggtccagtaccgcgccactgccgctgagcaggcgcaggtgccggcgcacaagcgcctagccaatgcacggaccggtcgaggcctgccgatcggcaacctgtccagccagttctttgccaacgtctacctggacgcgctggaccagttcgccaagcacgtactcaaggccaagcgctacctgcgctatgtcgacgacttcgtgctattccacaacgatcgcgagcaactggccacctggcgcgatcagatcgaggccttcctgcgcgacaccctgggcctgcgtctcaaggctgagcagaagctctgccgtctgacggacggcctcgacttcctcggttacgtgatctacccgacccacaccctcgctcgccgccgggtggtcggacacctgcacaccgcgctggccgagtgggaagggaagcacgtcgacggcggccagctgcgaggcacaccggccagcttccgcgacctggccaaccgcattgccagcttcaccggccacctgcatcacgcaagcagccatcggctgatgcgccgtgtccatgcccgattcccctggctgcgttctgcagcccgtccgcgccggttcagccacagggcagaacggcgcatccattcgatcaagtggcaccagcacaaggagcagcacgcatga

SEQ ID NO: 510781 - DNA, 795 bp, Stenotrophomonas maltophilia
atgagcaacgaaaagaagacccttgcggacgtgcagcccggtgggagggtgaggctgggcgatcaggcagagcgggcacgattcaaagaatggtgggatgccgctcgcccgcttgaaggttctgtcttcccctacgaaatcgcatgggcagcatggcaagccgccctctccgcccagccctccccggcaacgtgtaaggaaggcttacaggttcagccctccccgggtggtcagggtaaggcgcccttcgctttcagcgagcgcgccaagtcggatgcactcgaggccggccagtacgcgttcactgaggcagatggcaaagaccttggctacaccgcgtgcatcgaggcatgcgtggacgcgatctgcctggtcctggaactgcccgagcacctccccgccctcgccgcccgccagccggtggcatcaaatcagccgtccggaaattccggagcactggccgttgatggcgcccgtcaggcggtgggggagccggtggcgttccgcgttcactacctcagcggtaaaacaggagaggtgattgagactggcaaatggtgtgatgctccagtgccaagtttcattgatgagtcggctaccctgttctgtgggaacacccagcggttggagttggcctacgccgccccgcccgcgcaggccgtggacctggggcagttccgggagttagcgcagcgctgggccgacaaggccgattttgcgccgagcccaatgaccgcaaggtcgtgcagccaacagttgatggccctgatcgacagccaggcggtgggcaaatga

SEQ ID NO: 510782 - DNA, 240 bp, Stenotrophomonas maltophilia
atgaactggaacgctaacgacaacaagcactaccggggaccaatcgacagaatatatgtgtcgatgtccgaatcgtatgaggtgaactacttcatcgatcagtacctgaagacgcgtgggtatgacatgactgatgagaatcgctcccgcgtgggtaaaaagttgcagctttatcaagggagcgcaccttggaagcgtgatgacctgaacgcttttctcgatcggggttggcgcacctga

SEQ ID NO: 510783 - DNA, 615 bp, Stenotrophomonas maltophilia
atgcaactttgcccctactgcgaaaagggtgaactgcacaccttcaccgacagcgagaccatcatgcacgggggcaagcaactgctcgtgccaggtgtgctgctgtcgcgttgcgatgcctgcggcgaagagatggcgactccggaacaagcaaaggtcaatcagcgcttgttcgcagatgccaagcgaagcgctgacgggctgatgagctcggaccagattcgtaactggcgcaagtcgctgggttggtctcaggcgcaggctgtgacgcttctgggtggtggagccaatgcgttctcaaagtacgagcgaggtgaggtagtccagtctcgacagatggatttgctgatgcgcctgctggctcattcgcctgaggcgcgggaagtcttgccccggatcgtggcgggagacttgcaatgcgtgggcgcggttcgtgttcgtcttgaagatctaatgtgtatcgatgccggcgacctggcttggtcgccgattcgtactcttgaggcgaccgctgccgcgctatatcggtgggatgatgcagcacctcgttcagtgcgttcagcaaatgatgaccgctatgactggtcgcaacagcacatggcgattgcactgtga

SEQ ID NO: 510784 - DNA, 270 bp, Stenotrophomonas maltophilia
atgaatcggaccgtccaacgcgatgtgaccaacttgggctatggaatcaatgaggtgtgcgagtgcttggaagcgcttacccccgccgattatgccggccgtttcgaggctgcagctcctgacggatccaccgttgagttcgatgtctacaagccgtgctttccccatggtcgcgggatagacgccctctacgtgaaactgagcgagcgctcgaacgctacgcttccccaggtagctctgggctccttccatcttcagagaaaaggttga

SEQ ID NO: 510785 - DNA, 195 bp, Stenotrophomonas maltophilia
atggacgtgacgatctggcacaacccggcctgcagcaattcgcgcggcgcattgaagctggattacggcttcccgatcagcaacctgctgcgcggccacgtgcagatcttcgacggctacggcgagagcctgatcgactacaaccacaaggccacctacgtgggcgtgggcgtgtccctgctggagtggttctga

SEQ ID NO: 510786 - DNA, 1161 bp, Stenotrophomonas maltophilia
atgacgcgcgccgaggctggaatcgagtgctttcactcgcagaacaggaggcaggacgcgaccgtgagggcagttcccatcatcatcgcagcagcactggccgcacccttgctggatgcgcgcgcggccagcgaagaccgcaatgcagcgccccacttcgatctcggtggcgcagttcgattcaactatggttggctcgattacgggcccaccagccgcctgcagctggagctgcttcgcgccgacatcgatgccggcagcgggcctttctccttctccgcccagtaccgttggtacgatggcttcaacgccatccatcacgcctacgcgggctggcagttcaccgacgccacgcagctgaaggccggtatccagcaggtgccgttcgggctgctgcccacggtctcgcagagtttctggttcgggtccgggtactacctgggcatcgaggatgactatgatccaggccttgtggtgattcaccaggccggcaataccacctggcacctcggctggttctcgggtgacgagtatggaaccggggcgcgctacgatcgctattcgttcgatgtggcgcagaccgacgcgttgccgtatcgcgaacggcagcggttcaatgcacgcgttgagcaatcgcgcgactgggcgggcggcgagctgctggttggcgcatcggccttcgcaggcaaggtgcagaacacccgcagccgccaccatcacaaccatcaggccgccgccgtgcacgcgcagtggaagcgcgatggctggaccacccagctgcaatgggcgcggtaccgctacaacgttcccggcgagcgcatcgcgctgtcggcgttccaggccccgtttgaaatcgcggccgaggccgatgtgcccagtgccaacgttgcctattcctttggcccgcgcgattggctgcacgatgtgacctgctacaacaacctcagcatgacgcgcccggtggggcacagcagcggggtgcgcgactcctggcagaacgtcaccggctgcagcctgcagaagggcgtgatgctcacttatgtcgactggattgcaggccgcaacatgtggtttgccggcggcgatggcatcggcatcaacactggcggccggtcgcgctggcattcgcggcttaacctcaacatcgggttctacttctga

SEQ ID NO: 510787 - DNA, 888 bp, Stenotrophomonas maltophilia
atggcacgacgcaacttcaatgacctgctggctttcgtgaccgtagcgcgggagggcagcttcacccgtgcggcaggtgtactcggggttacccagtccgcactgagtcaggccatcaagaccctggaagagagtctcggtattcggctgctgacgcgcacgacgcgcagcgtttcgccgaccacggccggcgagcgcctgctgcagtcgatcggcaaccacttcgacgacatcgaaatggagctcgaagctcttactgcattgagggacacaccggctgggcaggtcaggatcaccagcggcgaccacgtactgcgcacggtgctgctgcccaagctgatgccgctgctgcaccgctatccggacatccgcatcgagttcgacgtcagctatgcactgcgtgacatcgttgccgaccgcttcgacgccggtgttcgccttggcgaatccatcgacaaggacatggtcgccctgcccatcggcccacgcctgcgcatggccaccgcagggacgccgggctacttcgctgcacacggaatgccgaaggtgccaggtgatctgaccggtcaccgatgcatcaacatccgcctgcccaccagcggtggactgtatgtgtgggagtacgagaagaagggtcgcgagatcaatgtgcgcgtggatggcccactggtgttcagcacgtcaccgcacatggtcgatgccgcgcttgacggcctgggcctggtgcatctgcccgttgatgagctggcaccccatctggaaagcggccgcctggtgcgggtactggaggactggtgcccgctgttccccggctatcacctgtattacccgagcaggcggcagccttccccggcgttcagcctggtgctggaggcattgcgggtttag

SEQ ID NO: 510788 - DNA, 1230 bp, Stenotrophomonas maltophilia
atgagttcactcaatctccccccggctggggcaggcatggccgcgcctgtccgctcggcatcccccagggaatggggcgcggtgttggccctgtcactcggcgccttcgcgctggtcgcttccgaattcatgccggtcagcctgctgacgcccatcgccaccgacctgcaggtcagtgaaggccaggcaggccaggcgatcgcggtgtccggtgcatttgcactggtcaccagcctgctggtctcgccactggccggacagcttgatcgcaaatggctgctgctgggcctcaccaccgcgatgatcctctcgggcacgctggcggcactggcgcccagcttcccggtgttcatgctgggccgtgcgctgatcggcgtggccatcggtggcttctgggccatgtcggccgccaccgccatgcgcctggttccttcccaccaggtgccccgcgcactggccatcgtcaacggcggcaacgcgcttgccaccgtcattgcggcgccgatgggcagttacttcggcgccatcatcggttggcgcggtgcgttcttctcgctggtgccggtggctgtggtggccctgctgtggaagatcgccgcgttgccatcgatgaaggcgaccgcggggcgcgcgtcgtggaatgtgttcgcgctgttgaagcgcccaccggtggcgtggggcatggtgggcgtgagcctgttcttcatgggccagttctcgctgttcacctacctgcggccgttcgtggaagccacgctgcacgtatcgccttcgacgctgtcactgttgctgctgttgatgggtgctgcgggcctggccggcacgttgttgatcgagcccttcgtgcacaaggcactcttccgcacactggtgctgctgcccgcactgatggccgtggtggctgggtgcatgatcctgctcggcaacacgctgccgagggtggcggtgttgttcgccctgtggggcctgcttggcacgtcggcgcccgtggcctggtggtcgtggctggcccgcactttgcccgatgacggcgaggccggtggcggcctgatggtggccgtggtgcagatggccatcgccatcggtgcgaccgtgggcggcctgctgctggaccaccagggctaccgcgccacgttctggttcagcgctgtcctgctgctgggctcggtggtcacctcctgcatcgcggcgcgctcggcgcagcaccatcgcctgcctgtgcattcctga

SEQ ID NO: 510789 - DNA, 987 bp, Stenotrophomonas maltophilia
atgcactacagctccctgggccgatcgggcctgaagatcagccggctgggtcttggcaccatgaacttcggcgagcttgccgacgagccaaccagcttcgccatcatggatgccgccgtggacgctggcatcaacttcttcgacagcgccgacgtctacggcggaccgcagtcaccggacatggcgcagggcttcggcgtgtcggaagagatcatcgggcgctggttgaagcgcggtggcaagcgtgacgggctggtactggcgaccaaggtgtaccagccgatggggctgggcccaaatgatcgccggctgtcggcgtaccacatccgccgcgcctgcgaggccagcctgcgccggctacagaccgaccacatcgatctgtaccagatgcaccacgtggaccgggccacgccatgggaagaaatctggcaggccatggaacagctgatccgcgaaggcaagatcacctacgtaggcagcagcaactttgccggctgggacatagccaccgcacagggcgtggccaccgcgcggcacgcttttggcctggtggccgagcagagcctgtacaacctgacccagcgcacggtggagctggaagtgatcccggcactgcgctaccacgggctgggcctgattccctggagcccgatcggtatgggcctgctgggcggggtgctgaagaaggtcgccaatggccgacgcgctaccccgcacctcctgcagcgtatcgaacagctgcgccctcagctggaagcgtatgaagcgttctgcgatgagctgggcgaggcgcccgccgacgtggcgctggcctggctgctgcacaacccggcggtgaccaccgcgctgagcgggccgcgcacggtggaccagcttctgcagaacctgaaggcgcctgcgctgaagctctcagatgcctcactggctcgactggatgcgatctggcctggccccggtggcgaggcgcccaatgcctacgcctggtaa

SEQ ID NO: 510790 - DNA, 477 bp, Stenotrophomonas maltophilia
atgtccatgcttctcggcacgttgatatccatggccgcgcctgcgaccggcagcggcccggccggcggcaatctgagcataacgcctgctggcagcgcatcgtccgtggcgggccctgctgactacttcaccggcaacgtgcgcatcgatggcgggttccaacgcgctgcgccggcacgcgtaggaggtgcaacggtcacctttgagcccggcgcacgcacggcctggcacacccatccgctgggccagaccctcatcgtgaccgcgggcgtgggctgggtgcagcagtggggtcagccacgccagcagatccgtccgggggacaccgtgtggatcgcgccgggcgtgaagcactggcatggcgcaagtgccgcagtggcgatgacccacatcgcgattgccgaggcggtggatggcagcccggtgacgtggctggagaaagtaagcgacgaagagtattcggagatgagcgaatga

SEQ ID NO: 510791 - DNA, 1038 bp, Stenotrophomonas maltophilia
atgaagacgctgctgctttctctggtcctcgcgaccatccccttcactgcaattggacaggacatgacccgcggcgccgacaacttctatcgaagcacccagctcatcagcgaaaaagtgcacttcaataaccagtaccacatgcagatcgtcggcaatctgtacgtaccgaagaaccacaggcctgggcaagcattgcccgcgatcatcgtgggccatcccatgggcgcagtgaaggagcagagtgcggatctctacgcacagaagctggctgaacaaggcttcgtgaccctggctatcgaccagtcattctggggtgaaagtgcgggcgagccccgcaatgtggttgcgccggatatctatgccgaagccttcagtgcagccgtcgattacctgggaacgcagccacaggtggatcgcgaacggatcggcgtgcttggcatctgcggcagtggtagtttcgtgatcagtgcggccaagatcgacccgcgcatgaaagccattgctaccgtcagcatgtacgacatgggcgctgcgaaccgcagtgccctcaaccactcgcagagcgttgagcagcgcaaggccgtgattgctgcagccgcccgccagcgctggattgaagccgagggcggtgccacgcagtacacctctggcaccgtacatgtgcttgaggcagacacccatccgatccagcgcgagttctacgacttctaccgcacgccgcgtggtgagttcacgccggccggttcatcaccgcagctcaccacccacccgacgctgaccagcaacgtgaagttcatgaacttctatccgttcaacgacatcgagaccatctcgccgcgtccgatgttgttcatttcgggtgatcaggcgcattcaaaggaattcagtgaggaggcctaccggctggcgggacagccgaaggaactgctgtgggtgaagggtgcgggccacgtggatctgtatgaccggaccgatctgattccgtttgcagcgctggcggcgttcttccggaagagcctggacggaagcatgtga

SEQ ID NO: 510792 - DNA, 657 bp, Stenotrophomonas maltophilia
atgacgatcaaggcattctgggacgatccctatcggctgcgccatgacgcgcgggtcagtgctgtctcgggtgatgagatctggcttgatgaaaccattttcttcgcgttctccggtggccaggagagcgacgctgggtccattgggggccatccggtgctggaggcccgcaaggacggcctggatattgcctatcgattgcccgaagggcacgacctggctgcaggcgatgcggttgcggtcgagattgatggcctgcgccgctatggcctgatgcgccaccatttcgcggcagagatgatcctgcagctggtgtatgcgttggagccgggcatcgacaaggtcggcgcgcatatcggcccggccaaggcccgcatcgatttcgcacggaatggcagcatttcggcgttgtttgacgcgttgcaggcccggtccgcagccctggttgcggccgacatgccaatcatcactgccttctccgatgagaccaaccaccgtcgctactggcaggtggaggggttcgcgcagatgggttgtggcggtacccatccacgccgtaccggagagatcggcacgctctcgctgaagcggaagaaccagggcaagggtgtggagcgcattgagatcaccctcgacgcccggccgttcccggcatag

SEQ ID NO: 510793 - DNA, 1902 bp, Stenotrophomonas maltophilia
atggaacaagcgtttgccggcggcgagcctttactgcctctgtacggctttctgaagttcacacagggccgtacctcttcaccaaccctggaggttcgcttgaaacgctcacgcaccacgcttggccttgctctgtgcctggcaaccacgtccgtatttgcgcagcatcccacctgtgaaaccacctattggacgccggaaaagctcggtttcaaagagcagctgcccaacacctacagacctccaggcatgatctgcatgattacagagttcactgtcaatgacagggactggatggacaagatacgccttcctttcgaactcgaaacactggagatcatcaataacgcaacctccagcggcaagacgctggaaattcatgactcgatctgggacgtccccggccgagcgctcaagctggctgccgggcgtgccatccacttttcctcgcggaagagggggctgccggcgattgcctgggatcgcacgtcgcagagccctcccaatacatcgcgatggcagattccacgtaacagcgagctgatctccatcattaatctgcttgatggcaagcatgctggtgagctgattctcccttccgaagggagggcgttcgactcgatcaccatcaagaataatgcggcatggccgaccagtgtgctgggaacacacacgccatttcctgctcagcgcatgcagattgcatcgggggaatcggtccgggccgaattcgaccccatcgcacgtcaatggatgtgggcgcacgcgccgtacaaggaaaaatcggtacgagatcgcttccgccgtgtcgcaacccgtagtgtcatggagctcagggatggcgagtgggcttctccggtagccctccccttgaatgcctacgaccgggatcgggtcattctgcgctcggatgcaacctgggactcgcagatcagggtcaacaatggtgatcctgccagcgagtatctccctctgcgccgcggtgatgagtatgagttcgtgttcgttgcggaaaagaaccgctggcatctgctgcgccagcccagtcgttcaattgacacaaccgaccagcaggaggtgcgactgaaggatgagggctatgcagtgatagaggtggccgcaccgactggcggttcgaccacgcccaacgtcgtccttcccaagccgcgacagggccttcgagtagtagccgtgggtcatcctgtgaagacgatgaacatcatcgccgacaatctcaatgtgcctgtcctcaactatgagaagatcgcgtttcgcgtaaacgacagtggcctttgggagcgtgaaaccacgactatcgacctgttgagggtgctcgacatgagctccaatgagattcgatacagctgggaagcactggcgctgatggatgagaacatccggttggccaacgaggctctggacaattccggcgctacgttccggtacagactagtcggcaaccccatcgagggcttcacctaccccggtgtggacctccgacgcgtgcccgaatatctcgccgatgatcccaagctccaggcggtgctcaaacagcatcgcgccgacggcatctactatggcggaagcaaccgatgggcatcgtccccggtttgtggctggagccattcttcgcataccgagaagaccctcgtcatcgctacggcgctcacgtgccccacatcctcgttccgccgctgggcaggctttgcactgggggtgcccaacaatacggctccgaagccggtacctgttatcggttcaggagaccagttccccttctatccgacgccacacaggatgcttccggacggccgctgggccttcaatccagggcaggaacacgtgctggagaggatgaactcaagtgcagagtacatcgctcgattttccgacaagtggtga

SEQ ID NO: 510794 - DNA, 723 bp, Stenotrophomonas maltophilia
atgcgactcgttcaagccatggtgatgctgctgatggttgttgcgggaggggcccatgcggacttgggcgtggagcgttcccgtctgatctatcccgcgggcgagccgtcggtaacgctgcggctatggaacaagggagagcgcccctccctgatccaggcatggatcgacgtgggcgatcctgcggccaagccggaaaccctgcgcacaccattgatggcaactccaccggtgtttcggcttgaccccggccagaaccgtgatctggtggttcggaaggttgcggcgcagtcactgccaaaggaccgcgaatcgctgttgtggttgaacgtgctggatgttcccgcccgcgcaacggttacggggtcgggagctgctcccgaatacgcggtcagctggcggctgaaggtgttttaccgtcctgaaggcctgggaggcacgctggacgccgcagtttcggccttgtcctggcgatgggtttcggatcgcgaaggtgcggcccgcctgcaggcagagaacagttctgcgttccatgtcagcctcgctgggctgagcctggagggcgtaccgttgccatttgcgcctgatcgagcggtcatcgcgccacgctcgacatggtcgttggtactcgacccaagcgtgaagacaagtggtgaggtcctgatccgctggatggatgatggcggtaaggcgcaggaacagatcgtgcgtccggcgcattga

SEQ ID NO: 510795 - DNA, 1056 bp, Stenotrophomonas maltophilia
atgaagaacacaatcaatcagagatcaagaatcaatccgctgcgaaacatcatggctatggcgatttccgcttggctgggcatcatcgcgtggaatgccaatgcatgcgttgcggatggcgagaatctgatcaggaccggtagtcgggtctattccgggttcaatgcaggggacgtcattgcggattgggcgagcattgggagcgcgacctttctgcacaagtgcagtccagaccaggctggcgagttcagagtggcagcgactgaggccagtgttggttcaaaggatggttacgaagtattccctaccagcaatgacaacatcggcatgcaggttcgttacagatatccagaggcgcgttatagtaatggagaacaggtatggtccagctggcaaggccttgctgaagcgggtgagataatccacgtagtcacgcatattgggggcgatctatataccgagtatgtgataatggatatcgagcttcgcttcatcgcacttagtgatatttcgggtgatcagtatgtcgggcgctcgcagatcatgcaggtggacgatgagagttttggaacgacgcttcaccagaagactttcgaggccttcaatttatgggctcccgtcgaggccagctgttggtttactgcgttgccatctggaagcaaggtggagctccccgaagcctacagcatggcattgggcagggaaggtgcaatgagcgcgcccgcgtccttcacctggagttggaagtgtgatgcaggaaatcaaggccatagcggtgaaggcgatttcaagtatcttccactgaacccatcgaccgatctcagcagtggccgcatgtcggtgacagggggcgcgaagggcgttgacttgctggtgaccacccgccgcggcggcggcggaacgtacgtgccggtgcagttcgataagtggtatggcggcagcttgggctcggagggaacggagtacctgcaggtgcgctacgtccgcaatgccgaccctgacctggtgattggcagcgccaatggtggcatcacgatccggcttgagccgctctag

SEQ ID NO: 510796 - DNA, 2586 bp, Stenotrophomonas maltophilia
atgagcaaccaccgccaaaacctgccgcgtcaccaccgccttgcggcggctgtgcttgtcgcactgctgccggttggtgccctcgctgcacccgcgctggagttcaatacggcgttcctgcacggcgttgatggcggccagattgatatcagtcgcttcgaacaggacggactgctgccgggcatctacagcgccgacatcgtggtcaatgacatttcgatgggtcgccgcgatattgaagtacgcaccatggaggacggcgaggtccgcgtttgcctggatccggggttcttcgagctgcttccgttgaaaatggacaaggtggatggtgcccgccagcaatccgaaggcgaaccgttgctggcctttccggaagcgaccacatgtgaggcgctgtcccgcttcatcccttctgcgctttccactctggatacaggtgaacagcgtctggaggtttccattccgcacgccttcctggattcgcgaaaaagtggctgggcggacccctcccgttgggactcgggaatcaatgcgctgctgctgaactacaacttcaaccatacccaggcagagcaaggtgggcagcgccgcagtcacatcagtgccagccttgacgcgggcctgaatcttggcgcgtggcgcttccggcacagcggctacttctcgcagaacaccaatggcgaccgcagctatgtggctagccggagctatgccgagcgtgaggtgcgtcgttggaatgctcagttgacgctcggcgaatcgtccaccgcgggcgatctattcagctcggtgaattatctgggcgccagcctgcgtactgatccgcgcatgctgccggagatctatggcagctacgcacctgtggtaagcggcgtggcgcagaccaacgcacgtgtcaccatcagtcagcgtggccgggtgatcaaggaaatcacagtcgccccgggtccgttcgagatcgatgacctgagcaatacctcgggcggcggtgatctggaggtggaagtgaccgaggctgatggccgggtcgagcgcttcgtggttccctacgcttcgttgccgcaactgctacgacaagggcagcagcgctccagcctaactgtgggtacgctgcagggcgtgacgcgcgatgcgcctgcgtttgtggaagctaccgttcgtcgtggcgtgggcagtgcggtcaccgcttatggcggcgcgctgctatcagagggctaccagtcattggtattgggcggtgcgttgaacactcgtttcggtgcgttctccggcgacgtcacgttctctgatgcccagttttccgatccagtggcgggcttcggcaaaagcatgtcgggccagtcctatcgattggcctacagccgcagcttcaacgccgccaccagcttcacactttcagcctatcgctactcaaccgaaggatttctgaccttcagcgatgcggcacgcgtccgtcaggacgtatccgatggtctggacggaggccgcctgtcgcgccagcggagccgcctggatctgaccgttcgccagcggatcggcaaaggcacgctggcgttcagcggaaataccaccgactactggaccgagaatcgtcgcacaaccaatttctcgatgggctacaacggccagttggggcgcgccgcatacagcatcagtgcccggcgtacgcttgagtcatcgttgttcaatagcggctcacaacgtcaaagcaccggcgccttcctgacgctgagcgtaccgttgggcgtggcaccgcgtgccccgcgcctgagtgcgagcgcggccagcgatagcgcgggcaacaactaccgggttggcgtcactggcagctttggcgaggatagcaggggcatctatggcgcgtcgtacagcatcacgccaggcagcaatgatctgagtgccaaccttgcgtatcaggcaccgaccgcgcagctcggtatgacctgggaccagcgcagtggcggccggcagttgggcctgtcggcgagtggcggtctggtcgttcattcgggtggactgaccctggcccaacgcttgggcgataccgtcgggctggtgcatgtaccagaggccgtgggtgcaggcgttgggcacctgcgcggcgtcaggaccaacaagcaaggctacgccgtagtgccgtatctgagtgcttaccgcctcaatgagattccggtagatcctcgcggactaccgctggacatcgagctgaagagtggctcggtcagtaccgtgccaaccgctggggcggttgttcgcgcggtcattcctaccgccagcggtcgcagcgcactgattgaagccatgcagggcagtggtgagccgctgccgttcggtctggacgtatacgacgaaagcggtcaggtggtcggtgtcgtcggccaaggtagccgcctgtgggtgcgcggcattgcggagtctggtgtcctgaatgtgcgtttgggggagggcagcggcgactgcgccatccactatgaccttacacaggtcgatgcgacgcaacttcaatcgggtacctgtcgatccgctgatgtggccggtagccccgaggttcccaaccttcaggccgcgcgacgcgctggccagtaa

SEQ ID NO: 510797 - DNA, 744 bp, Stenotrophomonas maltophilia
atgtgcaatttcaaacgacatctgttggcgggtgcgctctgttctctcggcgtgatcggctcaatgcgggctgaggcggcggtgaccatgatgggcacacgggtggtctttcccgctgacgcgaatgaggtaacggttcgactgcagaatggcgcggaaaagccttcgcttgtgcaggcctggatcgatgacggagacgtcaatgcatcaccttcggccgcgagagttcccttcattgtccgcccgccggtgattcgcattgatggcgggaagtcgcaggtgattcgcattgccagggccggcgacggcctgcctgaagaccgggaaagcctgttcggattcaacgtgctggatatgcccgcgcagaccccgaagacaactggcgatgcgaacgcaatgttgcatctggttgtgcgcacccgggtcaagttgttctatcgacccaaggggctgacgcgcgccgcagccgccaaggcctcgatgcagctgcagtggcaggtggtgagggaagccgattccagcgcactgcgcgtagagaatcctacgccgtaccacgtcattctcaaaaaggttgtttctgcgggtatcgcagctgatgaagtggtggtcgcgccgctctccagtcacacctaccgccttgcggctcagcagcaccagacgctgaaggattcgatcgcgttcgagtacgcggtgagtgataccggcgtggcgatcagtgcccaggcgccgctgctccgtccctga

SEQ ID NO: 510798 - DNA, 534 bp, Stenotrophomonas maltophilia
atgaacaagcttgcaattgctctgtccgccgcgctgtcgctgggcgctgctgcttcggccaatgctgcgactgccgacgttactttcacgggcaagattctcgacgccacctgcgcggtgcaggtgggtaccggcggtactggcaccgccgtgacgctgcgcgacgttgcagtggcagacgttactggtgttgttacggctcgctcgactccgttcaccctggtagcaggcggcggcgggacgggcggcacctgccccgctggtgatctgaagatggccttcagcggcagcttgatcaatgccgagggcaaactggacaacagtggtgctgaagctggtgacgcaaccaacgtgcagttggtgctggcgcacaacgataccgtggtggatctgaacgacacgaagggaatccaggcgaaagttgattcgggccaggccgtgtacaagatggaagcccgctatgaacagaagggctccgatgccgtcacgaagggtgatttcaaaaccgccgtaaaggttgacgtcttctattga

SEQ ID NO: 510799 - DNA, 924 bp, Stenotrophomonas maltophilia
atgaagatcacccatcgcaataccctgctggctgccctggtggtgtgcctggccccggccgctgcttcggccgccgaaggctacctgaccccgtcgaagaacaacggcagcggcgtcatgccgtctggttacagcacgctgtacttcgagctgtccgatggcgattgggcgcggaagctgaagcttccggcccgcccgcaagcaggtgaccgggtgattctcagctcgctgtccaccaagtacgtcaccctggatgctgccaggaccgtcttcgccaaccaggtctatgtcgccattgaaaacctgggcaacgtcgagttgcgctggagcggcacccagaaccgttgggacgtggtgggcggcgaatctgcacgggttgtgccgggccagaaccgcagcacgctcaccgtgccggcctctgagcacctgctgacccaggtcagcctttatgacaccaagcgggcgtctaccgtttcgcttccgtcgtgggcgccgcagggtgccgtgctggtggtggccaacagctccagcgcagacgtgcgcgtgcagggtggcgatgcggccaactgtgcagcaagcacgtactgcggctttgtcttcggtgccaacggaagctggaaggcccggggtgcgcacgcgcgcgtgaccgcagccgcacagcttccggcacctgcggcgcgttggaatgatgtcttcctgggcaacccggccgaagacgtggacatgcagccgacgatgcgcctgccggcgcagggcatggaaggcgatatctaccagatcaccaatctgcatggcgcgcgtttcaccagcgtgctgagtgacaacaccgacctgccgaccaggctctacccgcagaagggttatcgcgtggtgttccgctacgacgcagcccgcggcatctgggcccaccaggccatcaagtaa

SEQ ID NO: 510800 - DNA, 288 bp, Stenotrophomonas maltophilia
atggaatcgcagaatgagggcgctacgttggatgcatcgtttgccgacctgtgtggagccgccgtgccgccgctacttgatgcccgcattgcatcgctgatgtggagttttacccagctgacgccgcatgggcagaagcgcttcatggaactgctcaatgagtacctgtatgcctcgcccatgcagcgcaggcagatgcgtacagcgtgggacgcgatgctggacgagccatgcgcttgcgggcatgccgacgaagagccgtggttgcatgtccggcgcaaggcatga

SEQ ID NO: 510801 - DNA, 666 bp, Stenotrophomonas maltophilia
atgaatatccgcattgtcatcgccgatgaccatcccgtcattctcgcgggggtgcgtgaatcgctggccctggagcccggcatcgatatcgtcgccactgccgacgattctacggcattggtcgaggccctgagcaagcacgcagtggatgtggtcgtgaccgacttctcgatgccggggggcgagtatggcgacggggtggcaatgctgggcttcctgcgccgtcgcttccccaagctgcccctggtggtgttgaccagcatctccggcgtgcaggtgttggccggtatcggcaaggccggtgtggactgcattgtcggcaagctggaccctgtggccgatctggcactggccatccgcgcggcgtttcggcgcgatggctttctgtccgccagcatcgtgcagcaactggagcagctgcaggaggttgcgctgaccaagcgcgaaatcgaagtgctgcggatgatcgcccagggcatggcccagaaggagattgccgggcagctcaagcgcagccggcagaccgtcagtacgcagaagcattcggccatgcgcaagctgggcctgaaacgcaccagcgaaattttcgactacgcgttggatcagggcatggtgtctgcttcgcaggtggcgcgtggcctgcctgaaggcagtgaagatggatga

SEQ ID NO: 510802 - DNA, 648 bp, Stenotrophomonas maltophilia
atgaacgcgttggccattcgtgttgcccttgccgacgatcatccggtgatccgcctgggcgttcgtagtgcgctggatgaagcgccggcgatccagtgcatcggcgcggtggctgactccactgagctggtcgcgttgctggaacgcgagccctgcgacgtactggtgaccgactacgcgatgcccggcggtgcgtttggcgatggcctggaactgctgggctatcttgcgcagcacttccctgccctgcgtgtggtggtgatgaccgggctggaccagtccggcctgatccacaagctggatgccagcggtgtagccggcattgtcagcaagtcggatgatctttcgcaggtgctggcggcggtgatggcggtctatgcgcatcgccgttaccactcgccggcggtgatggagctgctgcggcgcaaggagcagcgccgggtcaccgcgctgtcgccgaaggaagtggaggtggtgcggctgttcctggaaggcctgagcatcaccgagatcgccgcacgcctggaccgcaagaagcagaccgtcagcacgcagaaggtcaacgcgatgcgcaagctgggcatcgagcgcgatgccgagctgttctcgtttgccgccgacctgggactgaagagcggcaatccgtag

SEQ ID NO: 510803 - DNA, 3375 bp, Stenotrophomonas maltophilia
atggcaggcactgaagcagcgcagggagcgggcagcacagcggcggccgcgcggctggacgacctgcgccggctgcgtcgtcgcctgttgttcgggggcggtgcactgatcacggtgctggtactgctggccgccatcgtcagctccattgccgacgtggaggagttccacgctcgcgagcgccagtccttccttgaagcacgggcagcgctggactacttcctgtaccagcgcgaccgcgcctatgccacgtcggtcaacggcaacgatgtgctgtggcgcgaccagcgcctggcgctgacggcggtggggacgccgctggctgagcgcttccacgcccagggtgaggaagtggtggtgcgcgccgaaggacgtaccgccgtgccatggctggtgcttggcgctcgtgacaatccgctgccgcccgaggaactgaaggcctacctcggcatgatcgatatctactcggcctacaccgccgattcgatcacctcgcaggacgcaccagggccagtggcgatgttcgcctacgaaccacaggggcgcctgctggccgtgtccaacgtgcgcgacgaggcccagctgctgcagaccctgggcgtggccacccgccagcaggcctttgcccgcctgctgcgcgatgagcccgatgtacgcaaagtgctgccgcgtcccggcccgatccgcgccgcatcgcgtgagggcaggctgatctcgcgctatgcgaccaatcccctcaatggccagccctcgctggtgggcgtggtcaccatggccgaaggcaccacgccgtacttccggcgcgtggtgttcgagtcggtcgacaacatcaagacccggctggaggcgcgtgaagagggtcgctatctggtgctgtcggccaagcacgaggtggtgctcagcactggtggcctgagcagcaaggagcaggacctgctgctgcagacgctgcccgcacgtaacggcactaagccttcgcggcagtacgcgcaggggcgcttcattctcagttgcagcctgcctggcgtggactggacgctcagtcatgtctacgactggtccgatatctggaaggcgcagggcccgtacctgctggcgcgcagcctcagcgcgctgttgatcatcggcctgctgtggtggctgctgctgcgcatcgaccgccgcgtgttcacgccggcgctggccgatgcctcgcgggtctatgagagcgaggcgctgagccgcgccatcatcggcaccgcaccgatcggcctggcactgctggcacgcgacagtggcaggccgctgttgcagaacgacaccgcacgccagctggtggacggggatctggatgaaggcggcagtacgatcgcgccgctgtacgcgcggctggccgagctggggcgcagcagccacggcgacgaagcgctggagctgcagtggtcgccggacggggggggcagtgaaacccagctgcagatcagcatggccctggctacctatcacgaccaggcggtctgggtctgtgcactgcgcgatgtcaccgcgcaggtggagctggaagacacgctgcgccgtgcccgcgaggatgccgaagccgcgcgccaggccgccgaagctgccacccgcgccaaatccgcgttcgtggcgacgatgagccacgagatccgcacgccgctcaacggggttctgggccacctggaactgctggcccgttcgccgctgcagcccagccagcgcgagcggctggaccgcatccgcttctcggccgatgcgctgatgcggatcatcagcgatgtgctggacttctcgaagatcgaagccgggcagctggatgtggagccggccccgttcgcattgcggccgctgatcgaaagcgtggcactgctgtacgcgcccgacgcgctgcgcaagggcgtgcgcctgttcttcgccgtggaagcagtaccgggccaggactgcatcggtgatgcgcaccgcatccgccagattctcaacaatctggtcagcaacgcggtcaagttcaccgaatccggccgcatcatcctgcgtgccgaggtgcaggacgtggccggcagggggacccagttgcgcgtgcaggtgatcgattccggcatcggcatgagcctgcagcaggccgagcagctgttccagccgttccagcaggccgatgccagcgtctcgcgccgctatggcggcagtggcctgggcctggcgctgtgccagcagctggcgcaggccatgggcgggcaggtgtcggtagagagcaccgagggcgtgggtagcagcttcagcctgtcattgccggtgcgcctgcagccggccgcgaacccacctgcgcagccgctgcaggggcagcgcatcacgattctgtcctccacgccggaatggcgcagcgaggtcgggcgcgtgctgacggagtggggcgcggagccccagctgctggacgccccgcaggctgacgccacgggtgatgtgctgctgatcgtgggtgaccaccggccgtggagcctggacgaggagcatcaactggcggcctcgcatcggcgcaccgtgtacgcccacgctcagggaccgcttacgccagacgtgcagggtgatagaaccgaggttacctgttatgccagcgatgccctgttggcggctatcggcacggatcagcacacaccgtccgccattgtgcccgtccagccggcgccggtatcacggtcgcgcgggcgcgtgctgctggtggaagacaacgccgtcaaccgcgaactgatccagcagcagctggaggaactgggctttgacgtggatgctgccgaagacggcgccgctgcgctggcactctggcgggacgacacctacctggcagtgctgaccgacatcaacatgccggtgatggatggctacgcgctggcgcgagagctgcgccaacgcggccagtcgctgccgatcctggcgatcaccgccaccgcactggccagcgagcgcgagcgctgcctggccgcaggcatcgacgacctgctgctgaagcccctgaatctcgaacgccttgaggctggattgaacaaggccggccacgcggctcctgtgccggtcgcaacacctgccacagcacgcaggccctctgcggccatccgccgtctgttcgtggaaaccggcgacaaggatctacaggcgatgatcgaggcccgggccgggaacgacatgcagcgtttgctggaccgcgtgcacgcgttcaagggcgtgctgcagatgctgggtgagcgcgatctgggcgaacgctgcggcgaggtggaacatgcgctgcgcgaaggcctggccgtgccgccatcacagctggatgccttgcaggcggcgttgcaggcgtgcgtggatgactaccggcgcgaactggggcaggaatcgtga

SEQ ID NO: 510804 - DNA, 2670 bp, Stenotrophomonas maltophilia
atgtcgcccgcctcatcctccctcgcagattcgctgcaccgcctgcgctccggcgcggcggcgacgccgatccatgcgggtgaactgcaggcgctgaggcagtacccgcgccggctgatgctggcctgcggcgcaatgctgagcctgctgtcactgagcgtgctgtttaccctcgtcgtggtccaggtgaatggatacgaggcgcggcgcatcgctgacttccgccgcgcccacaccgcgttgcagatccagctggcgcggcaggacgccagctacgcacggctggcgaacatggccgagtacgcctgggaccggaacatccagctgggcgataccagcgccgacgatctgcgccgggcctacctgcagggcgggcaacggctggtggtggtcgccgacaggaacagccggccgcagatggcgctgggtctggacaccgcgcaatggcgagcgcaggaactggaacgctacctgcagctcaccacggcggtatcgctcatccagcgcctgaccagcactgccgacgagagtgaaccggccagtgcgtcctacttcttcgaccccagcggccagtacctgtcactggacaagggcctgaccgaacgcagcctgatcacggcgctggcggcgagctcgcgcagcgaagtgttcgagcacctgcgcgcgccggcccagctgctggcgccggcttccggacatgaccaggtgcccctgctcgaaagcgtggagcgcagcgacaccccgcgtcgcaccttcggccgtcatcccatcaccggcgaaccatcgttggtgtcagtgttccaggccaccgtgggtgcgaccccgattgcgaccttcgtggcctatgagccgatggcgcgactgcaggcgctgctgcgccgtaatagccagggccacatcacgttgctggaccgcgacgggatgcgggtgctgagttcggatgatgccggcagcggtggcgacctttgcgccggtaccgactgggtgctgctgggcgatgccacgcgtgcccgtttccacaatggccgtttcaccctggcactgccggtgacaggcacgccctggacgctggtggagacctactgctggggcgacattctgcgcggcattgcatcgatgctgctgagtggtattgcctgcctgctggccgcgctggccctgctgtggttcctgctactgtggctgcaccggcgcatgtatacgcccgcgttccggcaggtgaaagccatctatgcccgtgatcgccgccttcgcctgctgctggagcacgtgccggtgggcgtggcccttctggaagctggcaccggccatgtgcaggactggaacggcccgctgcagcgcatggatcgcgccagcggcgcgcggctgatgccgcagctgcgcgaggcgatgatgcgggccgacgtgcgccatggcgcggtgacgatcgagggcagcctggccctggccaacgatccgcagcagcgcctttgccatcgcacgcgcattcattccggtggagacgcctggccaggcggtgtgctgctgatggtggaagacatcagccacgacatgcgggagctggaagcagagcagaagcggactgcggaggcagaagcctgcagccgggccaaatcgaatttcgtggcggcgatgagccacgagatccgcaccccgctgcatggcatcatcggccatctggagctgctggcacgcagcccgttgcaggctgaacccgccgaacgcgtgttgcgtctgcgccagtccgccgattccctgatggacatcatcaccgacgtactggatctgtcgcgcatcgaatccgggcaatggacgctcacccccgaacgctttgcgccgtccgcgctgctggagcgggtggcggtgctgtacgcaccggtggcgcaggccaagggcctgcaactggactgcgtggtggacgccgatgtacctgcggccgccgtcgcaccgatggccgccatcgagcgggtgctgcgcaacctcaccagcaacgcgctgaagttcaccgcctccggccgggtgcagttgcgcgtgtcgcatgtgcgtgagcaagaaggcagcttcctgcgcattgaagtaaccgactccggtatcggcctgagcccggaggaaggtgagcgccttttccaacccttcgtccaggccgggcccagcatcgtgtcgcgcttcggcggctccggccttggcctcgccctgtgccagcagctgtgcgaacgcatgggtggccgcatctgggtggaaagcaccgccggtgtcggcagccgtttcgtgttcgaggtgccgttgctgacctcgatcgccattccggtgccgctgccactggccgggcagcggatcaatctgctggctgcgcctggcccctggcagggggagctggagcggcggctgcgcaggtggggggcgcaggtgcatctggtgcgcggtcaagtggcggaaatgtcggctgcggcggtctgggtcctgttcgaggcgccggccgaggagctgcgttgggtgtcgcgcagcggcctgccctgggtaagggtctgccgtgagggtcccttgcgcccgcagccggaaggcggcggccacgtggtgtcctgctatgccagtgaagctttgtgtcaggcactccagcgggcgctggcccgcaccgggtcacatatgccagcgattgacgcaatcggataa

SEQ ID NO: 510805 - DNA, 870 bp, Stenotrophomonas maltophilia
atgagcgcatccagaggccgcgaacgccggtgggcactgcatctgctggcccgccatgcctgccaccgcgcaagcctgcggataggtgccgccctgctgccgatgctgcctgcacctgcgcaggtctcacttgccgagggcgcatttgcggtgctcggaccgctgctgcaggcggagcggcatggccgggccttcgacaccctgcagcgactgggccacgcgtcatcatcggcttcgaccctcgcagcccgcttcctggcagggcgctggctacgcagcgcgcaggcgcgtcacctgcaatccctgcccttcccagccctgcagcaacggctgcgcgcaatggcgtggcgcgatccgggcgcactctgggcctcctcggccggccggcggcgtgtgatctgcctgctacccagtggcgatttcaacctggccatggccgcgctgctggatcgcccgggtgcccccgcacattacttcatcaattccctccaccatgaagactcgcccatgcaccgcacgttgctggacctgcagcgctggggtcatcgcctggatatcgggcggccgccgcgctgcggccaggcctggaggaaactgcgacgtggggccacggtagtaaccgagctggatccctgcccgtggcgcgagacgggaagtgccattgagcctgcgccactgcgcctggccagattggcccaggttccggtgctgttgcttggccaccgttgcgacggcagtaccgctggcacgctgcacgtactgggcgagtacagcgccgcgtccatcgccagcggcgccaccgcgctgtatgccgccgcgcacgccttcctggccgccgcgccacacgactggcacgatctggaccggtag

SEQ ID NO: 510806 - DNA, 948 bp, Stenotrophomonas maltophilia
atgcgtaccctctaccccgccatcgagccctaccgcgaattcaccctgccggtgagcgatctgcacaccctgcatatcgaagagtgcggcacgcccgagggcataccggtggtgtacctccatggcggccccggcgccggtatctcgcccacccatcgccgcttcttcgacccggcgcgctaccgcatcgtgctgatcgaccagcgcggcagcggccgctccacgccgttcggcgagctgcgcgacaacaccacgcaggacctggtggccgacatcgagaaggtgcgcgagcacctgggcatcgaacgctggctggtctatggcggctcctggggctcaaccctgtcgctggcctatgcgcaggcgcatcccgaacacgccaccggcctgatcgtgcgtggcgtgttcctcggccgcgagatggaaaaccgctggtttgcggaagccaatggcggtgcgcgctggatcttcccggagcgctgggaccgctatgaggcctacatcccggaagccgagcgtggcgacatgattgcggcctactggacgcgcctggacagtgccgacgaggccacccgcatcgccgccgcgcaggcctggctgggctgggaggacaacgccgccaccctgcagcacgacgtggatgccgtatccaccgatgacccgctggacacgctggccaaggcccgcatcgaggcgtactacttccgcaacggcatctttctggaaccggaccagctgctgcgcgacatcgaccgcatccgccacctgcccggcgtgatcgtgcagggccgctacgacatcatctgcccgccgcgcagcgcctgggacctcgccaaggcctggccggaagcgcgcctggagatggtgacctccggccacagcgccaatgagccggccacggtggatgcgctggtgcgtgccacggacgcgtttgccgaccgcttctga

SEQ ID NO: 510807 - DNA, 708 bp, Stenotrophomonas maltophilia
gtgcgtgatccccttgacccgcaggagtgctacagcgcgcatcctcgcggcgaacgcacataccggtatcagaacgtaggtatcggcatccatgttgacctgcccaacgccgtgaccctgcttgatggtcgctacaccgcgcaggaaagctggacgacgggcggtgctgaggcggacatcgacctaggcgacaacatcaccggtaccgaaatgatccggatgaacttcgtgtttgacgttgcgcatgattttcaggtgcgtttcgccagtgaatcacctagtgccaagctggttcctgaaggtggttggtcgcgatggagtgatcatgggattgcgcccgggcgcctctatcaggtgttgccctttcatctgacgacgtcgatggatctgagcatgaagctgcgctgcgagcatgaggctggcgaccgctgtgggatccgcaacgcacgcgacgatacggtggtgccggtggacgtggatgtcaccatccccggcctgcgcaatgcgcatgacggaagcccggcgcaggatacgcctctggtcccggatgacgcgcgggcgccacgcttcaccccggatggctatctgatgcagcggcgttcgacgctgcgatttaccgcgggccgcgaggcggtgacggagatgttgaagtcgcccggctcgcattggcagggcaacatgacggtggtgtttgatgccaatccgtga

SEQ ID NO: 510808 - DNA, 1056 bp, Stenotrophomonas maltophilia
atgcttaccgatatttttgcggaacgatattccatcgtcccaatctggagggattttggtgaggtggaacgccgactgctagtccaagcatttcggatagttagcgagcaactttttccatactggaccccggaaggcaaggaaagagacgacgccaaggccacttggaagtcaatgcacgacaggctcagcatggagttgggccaacagcaactcgcaccgatggggtattgggcgcagacgaagatggcaggcaacgatcaccaatattgggtttcgtcggcgttggtgcacgtctgtagcaactttgtctgcgcggcatatgatccgaacgtgcccgctgacagattcatcaaggagcgcctgagcttcgtcgagatcgcgttccgtgatagggagaatgccgtagccaaagcaaacgctgagcttcccgccaagatcgcccaggcagaagctgcacaaaacttgccttccgctttacgcataccaggcaatagggcagatggagtgagagctgctaacaaggcattcaatgatgcttttcgagcgaatgtgtgcgagcttaatgagcgcttccgccgcgccggaacaagacttaactaccacaacggcttcatccagatagctgaggatgaggcgattgagcgtgagatcgagacgccattttgggcgctggtcaatgatccgaaatgggcgaatgtggacactgacatgaaagaggcgatcgatcgtcgcgatagcggtggccgagaccctgccttctacgctgccaaggcccttgagagcacgatcaaaatcatctcagccgaaaagggatggacgcatggcggcgagcggggtgctcacagttacatagacaacctagccagcgctaagaatggcagcttcatctcgaagtgggagcagtcggcattgaagctgatcttctcggacgtcaggaacgagcttggccatgggccaggtaacgagccgatgcccgaactgagttcgcaccagacgagctggacgatcgagtcgtgcatgtcctggatcaagtgcctcattaaccgactatga

SEQ ID NO: 510809 - DNA, 1104 bp, Stenotrophomonas maltophilia
atgaaaaacagtaaaaagctggcgctgccgaccgacaagctagaccgcattcatctcggggactgcatcgagctcctgcgctcgctccccgatgcgtgcgtggaccttgtcgtctcttcaccgccctacaacatcggcaaggaatacgaggcgaagcgggagctcgagcactatctcgacgaccagcgcgccgtgctgcgcgagtgccatcgcgttctcaagcccactgggtccatcttctggcaggtggggtccttctcacacaagggcacgctcgtgccgttagacgtgaagttcttccccatcctcgaagacctcggcatgctcccgcggaaccgtatcgtgtgggtgaggcagcacgggctacatgcgagtaagaaattctcaggccgccatgagaccatcctatggttcacgaagggtgaggagttctttttcgaattggactccgtgcgggtaccgcagaaatggcagaacaagaagtcccaccggggtgacaacaaaggtgagctgtcatgcaaccccgatggcaaaaacccaggagacgtgtgggttttccagaacgtgaagcacaaccacgaggagcagacggtccacccggcgcaattccccgagggactgattgctcgaatcctgctagccacagtgcctgagggcggggttgtccttgatccgtacatgggcactggcaccacagccgtggtcgcacgcgaccatggcaggcgctacctcggcgccgagctggatgctggctaccatgctgttgccatgcgccgactgagcggactgccggatgagcgggggtatttcccaaacctcaaaacgctgcgggcttatgtcgcccgcacgggtgagcccattgagaagtttcgctttgacgtccaggtcggcaaggtggcctccgacggcagcaaggcaaagatataccctgaggagtatcacgctgagcagttgacggagcgcttgcagtacgaggcggacgccttcgaggccaagattgccggccggcccattcccgaggcgaaggacctcaacgggaagtcggcgaagcctctgcgtgatgttctgccacctgagcggctcccgctgttcgacgagcagtag

SEQ ID NO: 510810 - DNA, 678 bp, Stenotrophomonas maltophilia
atgcagatcaagtgcactgattacaacaatgcggctcaggtaattgcagactcttatggaagccagtggaccgaacttgagggagtcctgagggcgatgccgctgcacctcaaggcttctgaccaggcaaaaattcaagggcgcgcgatcttcgacccagtcggcaccaaccaacacattgccgacgagcttgtccctctgggttggcagcaaaagatcgtcatcccacaggacttcaagttcctcggtactgacgtggacttcggcaagaacggcacggtagtcgaggttcaattctcgaactacccgttcctgctgaacaataccttgcgctcggagttgttcttcagggcgcagacggtcttccacggtgcgccgaccgggctggtcatcattgtcaccaaggccggcatgttcccctcgtcgaatagcaccctctattacgaacaggcgcagaagcaactcaaggcgctcgcccagcacggtgtcttcactgtcccgattcgtctagttgggttgttcgaagacgtggggcgggtgcaggcaacttggacaggttactcagcagcccgctactcccgcacggtagattcgcgagagctccgcccgttcgttatcacgaacgggcgagcagatcgctgcaggatcgaccctgagggaccactagatgacctgtga

SEQ ID NO: 510811 - DNA, 306 bp, Stenotrophomonas maltophilia
atgaagaagatgattgctgccctggccctgctgggcctgtcctcgccggtgtttgctcaggaagctcctgtcgccgccgaaaccagcgctgaagttgctggcgctgaagctgctggcgctgccgccaccggcaccctgaccaccgtcgctaccgtgggcttgggcgttgccgctgctggcgtgctgtacagcgttgctgcggacagcagcaaggatgatgcgggcaacaacaacggcggcaccaccaacccgccgggcggcaccactggctcaaccggcacgaccggcacgaccggcacccgctga

SEQ ID NO: 510812 - DNA, 690 bp, Stenotrophomonas maltophilia
atgagcaggaacgctcgctcccgcctcgtgctccggagtttccacctaggcctgctggctgctgccatcgcggtctcggcaaccggctgcggcgttgtcagccgcagcagcctcaaggccgtgcaactggccgtgcagggcacgccagatgtgcagcccagtgccgaggacgttgcccgcaaccgctacccgcagatcaaggtcaatggaccggcaggcggcgcattgctggtgcttggcgcagtggatgacggccgtcaggcctggtacagcagcgaacgcagcatcgtgttcctgcgcaacgggctgatcgaagcaaccaacggcggcacgcccgagctgcagcagatgcggatcgtcgggccgaacccgttcctcgacctgcgcaaggtgcacgatggtgaggtcgtgcaacgacgctatgacctcatgcccggctatcgcttcggcatggaagtgaccggcaccctgcacccactgggcaccgagcgcgtcgatatcctgggccggacgcgcgagctgctgcacatccgcgagcagctgcggggtgacggctggaaacaggacaaccacttctgggtggacccggccaacggcttcatctggaaaagccgccaggccatcgcgccggacacccatctggacatcatccagctcaaaccccatacgccggacctgcagccccgatga

SEQ ID NO: 510813 - DNA, 774 bp, Stenotrophomonas maltophilia
atgacgccgcaacttatcgttatggcccttggtgccgcactcgccggcactctccaagcggcctctccgatcgtggttgaggcctatggccaggtacgcgccccaggcccacacgccctagcagacaacgcgcgcctcagcgccgccgcccttgccgccgcccccaacgagcacgcctactttgcgggcgccgccctgctgcgcgcgggcaacacggcacaacagacgcgcctgaaggctggagtgctattcgacctcgaaacactgaccgcccttgaggacgcgccagacatcgccgacgccgccgcccggatggcgcgcgagttcggtgcacttccggtcaccgggcgcgaaccgcaactgcttcaaccgcgctccctggaggccgatcgcccgcaggatcgaccggcacgacccggcgatcggctgatctacccgtcgcgaccacagacggtcactgtcacgggggcggttaccctgccatgcgcgttgccgcatgcggcgatgcaggatgcgcgcatctaccgcaaccagtgtggactgttgcccgccgccagccctgacgatctctatgtgatccagcccgacggccgggtcacgaagattggtattgcgctgtggaatcgcagtgcacggacccccttggcgccgggggcggtgatctacgtccccattgctggatccgccgtgcggtccaccacccccgatatcaacgaagaagccgcgcgcttcctcgccacccaggtgctggatgcgcccggagttccagagtga

SEQ ID NO: 510814 - DNA, 213 bp, Stenotrophomonas maltophilia
atgaccgacggctacgactgttatcagaacgcgctggcggagcggatcaacgggatactcaacggcgaattcctgcttcgtcgcccacgagatcttggacaggcccgggatatggtggctgaggtagtggagatctatagctcggagcgactccacctgtccctgaaaatgcagacgcccgatgtgatgcgtcgggcgtccttggccgcctga

SEQ ID NO: 510815 - DNA, 930 bp, Stenotrophomonas maltophilia
atggaatcaacaatcaggcgcagccaacgagattactggctggccttcaagctgtcggtggtcgaccagggcgatcaggtcgagcgcggggagctgaactacaaaagggcccaggagcgttatgggatccaaggccgcagcacgatcctttcctggcttcatcggcacggtcggcaagactggtcagctggtgcatcgttccctctcatgagcactgccctcaaagccggagcggccaagccgcttacgccggaacaacagatcaaagccctgcaggtccagttgcgagaggcgaacgagaaggcgcagctcctcgaggcgatcgtggacgtcctcaaagaggattacggggggcgcatcgtaaaaaagccttccggcaagtcctacgcaagggcgcctcaaaggcgtagtgtgggaagggcttgccgtcatttcggcatcagtcggcaggcgttctatcaagctgggcaccgtcatcagcggcgagttgctgctgattccacggcactggcgctggtgagcgactgccgcgcccgccagtcacggttggatacgcgcaagctgcaccgtctgatcgaaccgaagccgcaggcggcaggggatgctttggggtgcgaccgtctgtttgatgtgcctcaagaggcacggctgctggtgccgccgcgtcgcgcgtaccacaaggccaccaacagtcatcatggcttccggcggcacccgaacctgctcaagccgggcaacggattcgtgaggccaaccggcagcgaacaggtatgggtagcggatatcacctatctgcccactgatggaaatttcgtttgcctgagcctggttgcagacgcttggtcatgcaagatcgtgggctggagcgtgaatgagacgctgcagacggaagacactgtgcaggcactgaaaatggccctgaaatcgtga

SEQ ID NO: 510816 - DNA, 1248 bp, Stenotrophomonas maltophilia
atggggtcgttgcaaaaaactttctatgtctatggcttgttgcttctgggcagcttcgcggctttcgccttcaccgattacggtggattgtttggctgcttcgcatccattgtcggcattgctctgtcgcggacaattgtctatctgttcctttcattcatcaatttttcgctttcgatcgcgttcgacaatttcctaagggtggatcccgtcttcttcttctatgacggcactggcgtaagtgtcggctacctttgtctgatctcgacgcttctttattgtgctgtcggcatatttgacatgacaaggaaggggtcgggaagagggttgctggtcgacttcaagtttcctgaagtgtccgcgggtatcttctggccattcgcgttggcgactttagttgccgcaggatttgtctatcagaacgaaagtttcgtgctctcaagcaagtacgatgcgtacgagttgcagaagtatccattccttgagtattttggattggtcattgccttcatgatgcaagcgtcagtcggtagtcgcttccgtcgcgttgttggattgatcgtagctgcgatctatattctggtttgccttgcgacgtcttaccggatggtggcgatcatctgtatgttggccgccttcatgacgtacttcaacggtcgaaggatcggcaagcccctgcttgttgcctgctggttgggtgcgtatgttgggcttacttacatcagctactggcggatcggaatatttgatgtgaccgtggaaaatatatttgggtacgtcaatggtcggctggataatacgtttacgggagttattgagacttcgctaatctataccgcgattgcgaaggggcagggggttctggagaattttgggtatctggttggggcgttgctgccggttccgaactcacttatcccggatggaatgctctacatcgtggatgcgatggagaaggctagatttcccggaggtggttcattggccggatttgttatctacttcaattacttttacatcatcccgtactttgcattcatctacatcgcctttaaacggtcgcatctcgggggcattgcttccggaatgtatctgatcgtttttataacggtgacacgttggtggttgtacggaccctacgtgattttcaagttcctgggcgtgttgctgcttatcatggtggtgaacaaggttgcactcgcagcaggtgccagcggtagacgtgcggccggcgtcctaccgcgctga

SEQ ID NO: 510817 - DNA, 2550 bp, Stenotrophomonas maltophilia
atgaacttcagccgcctgctatctgtgatcaaaacacttgtcctgcgcgggctgggctctggtgtttcggtgctcttcacggtactggtgtcccgcaatctggagactccagatgcggcattgttcttcattctgttcaatgcaagtgtcattgccgcagtgtgcttccgctggggcattgatgaagtcgtcatccgaagggtagcagcggcgccggcggagagcagagctgctgtcgctatcgggttggtgattcaggcgcaccacagggtgttgatctgggtggcggtcgccttgtcgctgggacttgtccttttgttgcccgcggccggtcgctacttcggcggagtgggctatctggacttcaccgtgatggttgccgcttctggtctgatcgcatgcgcatccgctgctgctcgagttctacagggcgagggccgtactgatgcggcaaccttctatctgaacatatgcacgccggctttggcgctgatgggtctgttgtgcctgactctgctcggtaacgcaatcagtgcacggcagctgctctggtgctacctgctggcggctgttgtcatgtatctcgccgtcgttcccctgcgtttcggccggaaagttctgcttggcctgctcccgggaaggtcgggagcagatgctgacgcctctgatcgtgctgccgcaaaccgcttgggtgcagttgtgctggcccagcaggcgctgggttggagtgcggttgcgatcattccgatcttctacggtgattcagcttatgccggcttcgtggtctcgcagaagctcgcaacgctgatcagcctgctgatgctggcgatcaatttcacattctcttcccgattcgcagccctgcatgcgcacggcaacctgcaggagctttggaaactcgtgcgcctttcctcctgggcgattctgatcgccagcgccgcgattctcgcgggggcttggttgttcatggggcccatcctggattacgcccgggtctcaactgactttggtgacatcgtcatcatcatgatgattggacagatggcgttctccatggctgcgctgtatgccgttgtgctgagcatgtgccatcaggagaagttcctgcttcggattcaatcccagatggcagttctttccattgtttcgctgacactcgcttgcagcctcctcagtcttgatttggcggtatgggttcttgtggcgggctatggcgctctggcagtgctgctgtacgcaaaagttgcgcggacgattggtcgcaacagtgaagggtctggtgtcccactggggggggatggggggaacaccttggtgtttgagcgggtgcagaaactcaaggcctcgcctcgttgtacccttgacggaatcaactatggaagggttgctgctccctacctgtatgacttctcacgcaaggcgatcatcaagcggtttctgttctcgaccttgttctcaaccaggcttctcacgcaaaagggcgatgaaaggcgtgttctgatctactcctgtcgttcgaagagtcgcagtgactatgactatatcgtcgatcgcaaccgcgtagcgatggggtcgggggccacctatgtggaggtagtcgagcggttggatctgattcaatgggcccggtcgttcgcagtccttcccagctctcttcggatggccggcgactggaaggggggtattctgcagcagctcatagtggctctgctcattgcgaagttccgctcttcgtcacgtccaatcctcgatgcaaccattcgcggtgcccggcaggttgtaacgttctgcgatgctcagccgacggagaatcttgccagtcagattggtcgcatgcacggcgcggtgacgtggacaaatcaacatggtcagtatcgctacctcgaggctcggaatctaagtgaagatgctgaggtgtatgcaaactttgtaagtgactaccttctgtgttggggggaggcgacgatctccgagttcgcccttgcaggggtgaggcgtgagcagatgatcgtcatcgggtggctgcgcaagtggcccgcacttggactgccgcaaagctcctccgcgtcagagggaacgttcggcgtgatgttgaatggcgagaacggccgtgactccaatgctgcgatgctggctgttgcagaggggatctccaagcaaacgggcatgcggtatctggtcaggctgcatccttggagcgatgcggctgcctaccgcggtctttgcggttccggctgcgccgggttggagaggctccctctggatgcctatcagagccgggtgagcttcagtatcgcccacatgtctggagcgatcgtcgagctgctttgcttcgatcaggcagtctatctgttggatgatggcaagctggcagacgcatttaggattcccggactggcattgaaatctcttgcggatatcctcagcgcagtggcggcggatgaggcagatccgcaggctgcccgtcagcggcgcagaaggctcgctcggtggtacaacgatgattcggatcaagacgagcggctgagaaaagccctattggtggagtag

SEQ ID NO: 510818 - DNA, 1032 bp, Stenotrophomonas maltophilia
gtgagcgaatccctgaatgggaagcgtgtgctcttcatcgcaccgatgttcttcggctacgagaagctcatcaaggccgagctggagcggcagggagcgcaggttgatttccaccctgatcgcccgggtgtggatttcctcaccaaggccttgatccgtattgatcggcgcctgcttgcccggagaatcgcaaagcattaccagggcatcgtcggggctgcggctggcacggagtacgatcatgtcttggtcatccgtggtgaagccatctcgccgcagatcattgcgcagctccgtgacacacagccggccgcgaagctgacgctgtacctctgggactcgatgcattacaacccgaacgcacgtctgatcaagccgtactttgattcggttctgtcgttcgatcgggttgatgtgtccgagaactccgagatcgggttcctgccgcttttcttcgccaacgagtatggccgtgcggcagagtggcgcggcgagtacgagtacgacgcctgcttcataggcacgatccatactgaccgctaccggattctggagaaactgctgaattctctggaacgggatggtcgccgggtgtttgtgtactgctattacccatccaggattctgcatcgcctgcgctcgttggtggatcccggcttccgcagcttctcgaagaagtacgtgaatttcgttgggctgccattgtcgaaggttgttgactacatcagcgtgtcgcgctgcgtgatcgacatcaatcggcctgatcagaagggcctgacgatgcggacgatcgaggcattgggtgcacagcggaagctgatcactaccaatgaggatgtcagttcctacgatctctacaccaagtcgggggtgcagatcgtggatcgagaggccccggcagtgacggaggagtttctgctttccaaggtggcgcctttcaatgaggatgtgcgtgcaggctattcggtaacgaactgggtgcagggagtacttctccgcggtaccgcacgaccggccgctgataacgtttga

SEQ ID NO: 510819 - DNA, 2211 bp, Stenotrophomonas maltophilia
atgaccactgattcacgttccatcactcaggatgatgcagaccagattgatctgcggcagttgttgggcaccttggtcgaccacaagtggtggattctgatcatcaccgctgtgttcttggctggctccaccgcttacgcgatcctctccaccccgatctatcgcgcagacgcgatcgtgcaggttgagccgaagacgccgtcattgcccgggttatctgacatcagtcagtcgcttgggatcaatgctggatccaccgaagccgccaccgagatcgcactcatcaaatctcgtgccgttgttggtagtgctgtcaatgctctgcatctggacattgagatcattccgcgccgttttcctgtggtgggttcgttcttcgcgcgccgggctgaaagtaatgcgccaggcgaactcgcttcgccaaagttgggtatgtccagatttgggtggggtggagagcggttgcggatcttccagcttgaggttccacagcgcctgttgacgacggagctggagctggtggccggcgagaatggtcaattcagcctctatgacgaagatggcaactcgctcctcaacggcgttgtgggtcagcaggcgaaagccaagggcgtcaccatccaagtcgagacgctgcaggccaacgccgggatgcgcttcacggtggtgcgacatcgcagcctgggcgtggtaaatgatctgcagaaggaggtctgggtttccgaatcaggacgtgactccggcattctgacccttgcctacgaaaacgccgatcccgctcttgcacaggcgttcctgcagcaggtagccttggcttatgtgcgccagaatgttgagcgcaactcggcggaagcatcggcgcagttgaccttcgtcaaggagcagctgccaagtatccgcaatcaggttgatgccgcccagaagtccttgagctcgtaccagacgcgcgccaactcagtggacttgacgctgcagaccaagggcttgcttgaccaggaagtcgcggtggaaaccagtatccagcagttgcgcctgcagcaggcggagatggatcgcaagttcacccgtgatcatccggcataccaagccctgatgcgtcagattggcgacctggagtcccgcaagaacagcttccagggccaggtcaagcagctgccagaggcacagcaggaactgctgcggctcacgcgggatctgcaggtaagcaacgagatgtacaccgccatgctgaatcaagcgcagcagctggatgttgcgcgtgccggcacggttggcaacgtgcgcatcgtggacgcggcagaggtggatgccactgagccggtgaagccgcgcaagagcatggtggtgctggtggggactcttctgggtgccttcctctcgattgcaatcgttttgctgcgccagctgctcaaccgcggtgtcgaagatccgtcgcagatcgaagagattggcttgccggtctatgcctccattcctgtcagcccggggcagcagtccgactcggtgcgcggcaagttccgcgccgatggcaagctgcatctgctcgccatgaaggatccggcagaccttgcgatcgaggcggtgcgcagcctgcgtacgagcctgcacttcgcacggttggaggcgaagaacaacatcgtgctgatctccggctcaagccccaacgccggcaagacctttgtctcctcgaacctggcggcggtcatcgcgcaagccggtcagcgtgtgctgatcatcgatgcggacatgcgaaagggcacgctgcacaaggccctgggtgcaacccagacgccgggcctgtctgacgtgctggttggcaaggcgacgctggaggaggccatccgcacagttgacggcttggggaatctgagcttcatctcgcgcggtgacgttccgccgaacccttccgaacttctgatgcaccgtaacttcacggaactgcttgagcaggtcgagaagcagttcgatctggtcatcatcgatacgccgccgatcctggcggtgaccgatgcggcgatcattgctcatcatgctggcacctgtctgttggttgcgcgcttcggcctgaatcagcccaaggagctggcacttgcacgcaagcgcttcgagcagaacaacgtccagctgaagggcgcgatcttcaatgcggtcgagcgccgtgcgaccggctactacagctacggctactacgaatacaagtcgacccggtga

SEQ ID NO: 510820 - DNA, 870 bp, Stenotrophomonas maltophilia
atgaagaaattgcctcttccagcctacgacgatgctgccgcctttgtcgagctttcaaaaaactcaagactcagtagctttccggatctattgccggttgttaatgctatcaaggccggatacttgagttatgtccgtgctggtggaaatcctgctttggtgcgaattccagagataagtgagcgtgttggggggaggattaaggcgcactattctagtccctgtgcttgtctttctcatatcgatgaaatgcgggagttgaccgcgcacaacgtatgtccaatgtgtggatcattccacagtgggacgttggatcattatcttccaaaaggcgattatccggcgttttccatcttttcagcaaatctcgttcctgcgtgtatgtgcaacagcaagcgaggcaatattcttctaggggaggatgaaggggagcgcgttctacacccctatttcgacgattttttggctgagaggctaattgttgcggattttcgttgcctcggagacgtgcctcgcgttgatatccgattggcggtggatgatcagcatccaaactatcgggcgatacgttttcacgtggatagattgattcggcgcactccaattctaaagtatttgagggatcgatgggccttaatgctccgtcggccaagtttggttgttagagggttgaagctgaatgtgggttcgtgcgttgagctcaggagcacaatttctgatgagctggaaatgcttgatgatatgcatgaaagcaagaataactggatgtctgtttttgttgcgggcttattggaggaggaggtggttgcgtggctttttgatgccctaaacaatcctaatcgctgccatgatggaccattgctggtttag

SEQ ID NO: 510821 - DNA, 1665 bp, Stenotrophomonas maltophilia
gtgaaggtcgttgatgcttcaggcgcggaggtaaacggtggccttaaagtttggctgggaaatcaaaaatctctgggctcgcaatcacctgagaattcaattttcatcgccgcagtgaatgatggttggaacgattttggaattcagaccttagttaaattcaaggttagggttcaggagggtgttccaattgaagctcgtggttattttgggttcgttgatccaaagtcgaccgcaggtcaaggcaatgactggatatcaaagaagctagcggaaaataataaatccaaggttctgctaggcggtgatgcgccattcttcacaatgcttcccgatatggagtcctatcgcaagatggtgtctgaactgggagctgcggatgctgtctccgtgcttctagcaatccatgacctggtggcgctcacagaatttgaccaaaggcgtgaacttttggaggcggctcaaaaaaccgaagtatttggtcgctcattcatgagaaattctggggcgtactttgcgataaaaaacgcaggtccaattctacgtggcttggattctgagcgtacgggtgtcctgtcacagtctctatcaataaatttccagcttgcggccttcccaaatgagcaccgtctatcgtttgactttgatcacgatggagatcttccgaagcgaatggcagtcattataggaaagaacggcgtaggaaagagtcaggcgctaggaaggatagcgaaggccgcactcagggggtccgagagcctaactgatggggcggcgggtggtcgtccattaattaaccggctgctggctttcgctccgacgaatgaggcttcatcagtgttccctcgcgcaaccggcgagaatccaagaatctggtatcggcgatattcgttaaaccgatcacgcgccagatctgatggggatagagtttcagatttaattgttcaggctgctcgttcggagcagtcaattggcacaagaacccgctgggagatatttagttctgcactgagtgctataggtgaatctgggcagttgagtttagtgtcatctcatgattcttcgcagtatgtatctttctctagtctcaacagtggtcctgagcagaagcggcttgatcgctttgcttccattgatctaagtaaggatccagttcgcgttattgatggaaaaggatacgcactgagtagtggtgagctatcatttgttaaattctgtgcgcaggttagtacgtctgtggagaacggaacactgcttctgctggatgagccggaaacgcatcttcatccaaattttgtaaatagattcgtctacttgttggatacgcttcttgagcttacggggtcttcggcgataatagctactcattcggcatttcttgttcgagaggtttttcgcgagcaagtgacaatccttggtgtggatgaggatggtttcgtgaattcatccaggcctacactaaaaacgtttggcgccgatgtcggtgcgatttcatgttttgtatttggcgaagatatgccatcaaggcttgcgaggcaagttaaacgaaaattgattggaggcaagaagggctgggaggaaatctatgagaaatacaagggggagctttccttggaggtgcttgcagatgtgcgcgctcagctagaggagcgggatgcaaaatga

SEQ ID NO: 510822 - DNA, 309 bp, Stenotrophomonas maltophilia
atggtgataacgtcgaatgttccagtggagcgcaccgattcgtccgttgccatgatggtgatgcgatcgctcatcatgcagcctccgagcgatgtcaatctggatcggttcctgagttcatttgaaagcgagggctcgtatctcttgattccgcttgtgctggcacccgggcagccgccggagccgatcaccgacctcactctggcgaagcggagactgtccatcaaagttccctcccaagtcggagagcacgacgttgaagcgcgcttcctgtcacctcacgggatgaagaaagagccgattcgatag

SEQ ID NO: 510823 - DNA, 822 bp, Stenotrophomonas maltophilia
gtgagttcgcctcaagtcaccaatccgcagcaagtctgcgaaaacctcctcttggagggaaagcggtacaacatcgagcaccacatcctgcccagcgagaacgctgtcgcagatcgactgctggcgcgtggcgtcgaattgaaggacgcctacgatgaattgcatggaaaactcgacgcccgcccgccagcgctccaggtcttccttggcctcgtgctgagcaccgccgctttctggaatccacagaagatgcaggaggcgcgcaccgcgcgcaatgatctcgccaacgtcaatgagcaaatcgcgcggaaagcggccgagctggcggaactgctggaccagcgctccgatctgcacgacacctcgggcttcagcagtgaggcccactatcacgttggcgacgtgatcgaagcagcatcccagaacaactacctgtttcagtcatacatccaagagaagctggatgctcttcggggtcagttcgatctgaagtattggccttcgttgggcgacttcatgcgcgcactggcatcggatgcagagaaggcagacatggcacccactgaccccttgacggctgctgctactgcagcgacacgctcctccaaggccgactatttcaaagccttattcgcgtcgatggaggaaaacagcgcggagaactatggccaattgccgagagggttcaagctcaccgaccggacattggcctcattggtgaattgcgccttggatctcagccctgacgagctggtggacgaagcctacgtaaagcgcctccgtcagcgtgagcgcaacggaaccgaaagcagctcgatctaa

SEQ ID NO: 510824 - DNA, 462 bp, Stenotrophomonas maltophilia
atgaccgattcgacgatgcgccgcgacgcggcctcaagactcatcaaggcgtcgccctcggcgatctacgacgccttcgtgacgcgagaggccgtggcgcagtggctggccccgcggggtgcgacgatggagatccaggtcttcgagccacgcgctggcgggcggttccagatgacgctgacctttgctgccgcgcctggcaagtcaacggccaacacggatgtggcggttgggcgcttcgtcgagctggtgccgcagcagcgcatcgtccaggcgttcgagttcgactcgcccgatccggcgttcgccgggacaatgacgatgcgctgggttctgtcggcggccgggggcggtacgagtgtcacggtcactgcggagaacgtgccgcctggcatttcccaggccgatcaggagatcggcatgaattcgtcgctcgccaatctcgcagcctatgtcgaatga

SEQ ID NO: 510825 - DNA, 351 bp, Stenotrophomonas maltophilia
atgaaccacgcactcgtcaccgacgcgcagcgcatcttgctgttggccaacggccgcgaatccttggagaacccggacttcgatccggcgcccgtggtcaaactgttcacgccggatgccggcgcgacctggctgctgaccgaaattgatcccgatgaccacgaccacgctttcgggctttgcgacctaggtctgggcatgccggaactcggctgggtcagcttgagcgagctggcgactgtgcgcggcgggctgggcctgccgatcgagcgcgacctgtctttccggggcgagaagcggttgagcgtgtacgcgcgcgatgcgcggctggccgggcggatcattgtctga

SEQ ID NO: 510826 - DNA, 852 bp, Stenotrophomonas maltophilia
atgaaagttgatgcaatcaaggccgaactaagaagtctattcacagaagcacaaaaattagagggtgacttggttcgccatcaagttgattgggctacttggagtgccaccggacgcgatggggaagggccgccggattggctgattgacagggatgacgaactggtaaaaccattcgagcatcttgcgacttcattgtatttgacgaccgtttgcttgttggatgcagctcaattacatgcatacctgcggcagttttaccggatttttggctctcagtttgatgccgcaaaagccacatctggctatgaggtggatcattattggtctggtgagcctttcaatacatatttggctacgttgcggcagttcttgtctcccctggatgtgctgagtgatgctgatcgatacttgaaattgtccggtgtgcagtacctagaggtgatacttggaaacaccgcctccatcatccacaagacagggaagaagcccgcctcggaggccgaggtttacaaagctgtcaggcacatcttggaatgcgtttttccttcggcaaagacaccaaaatccaacttcttcaagacggctcaggaatacagaccggatattcttattccagagttgtcggccgtgatcgaatacaagcacgcgaatgatgaggcgaagctcaaggcagttattgctcagatttccgacgatgtgaaaggctacacaggggatgaagactataacctgttctatgccgtgttttacgtgaccaatgacttttggggagaagctaaattcaaggaagtttggaaagagaaggattttccgaataattggaggccatattacatcgtgggaaaatga

SEQ ID NO: 510827 - DNA, 396 bp, Stenotrophomonas maltophilia
atgcagcaattcatggaggccaaagtggaacggctatcgcgaacgcccagcgcgaagggcatcgactccgagcagccccttccgctgcctggaacggaagcctacgaggcactgccacagctcctgaagcgcagcccccttccttttcggcgcactatccgccgcgaagaactgcggcaaatcgtccccctggcagaaacgacgatctacgagttggagcgccgcggcgaattcccacgtcgcttcaacctgacgccgcgctgcgtcgtgtgggacttggccgaggtggaggcatggatcgagcagcgcaagcaaaccccacgcaacggtgtctcgaaaccggacgtccacttacgaaaaacccgccctgtccgggcaggctcaagtgaggagtga

SEQ ID NO: 510828 - DNA, 5520 bp, Stenotrophomonas maltophilia
atggcggggcaaggcctgtgcgatattctgttgccagtggcggacgtcacgggcttgctgagggcgttccgccggcggctcgcccaatcggtggagactgctcggcgaactcgcagcgatgcatgtgtttcattggtgctcgacgcaatcgaccacgccggacttgccgcgcgggaaaccgcgacctcgtcgttcgcacaccttctcatgcgcagcatcagcgtcgatccaatcgacggcgttcgcatcgtcgcatcgtgccggactgaacggctcgcactggcaaccggcgatgcctcgcaccgtccgttcacggttccactgttcactgacgcggaagtacgttccctcgtcgagcagcgcgtggcggatgcttcggccgacgagatcgccgctctgctgacacggtcaggccgcaacccacgctgtctcgacaacctgattacgaccggacgaccgtttgatcccgtgtctttccctgacgctccgggagagccgcaagatctgctcgacgcgctgcttcgcaagcgtctcaccgaagcgcgcgaaactgcacgcgcccgcggtgcaagcgatgcggacatcgacctcctgctcacaggcatcgccatactggcgcccccagttcccattgaagagcttgctgcggcacatggtttgatcgcggagcaggttgaaagcttcgcggccgacctcgcccccttgctagagcgaacgcctcacggcctgatgttccgcgatgagccgaccgagaccctgatccgatcgagctatggcgcgagccaggccggtcgagatcgtgttatcgccgctctccaagagcgtcagctcacctcaaactatgcagcccgggcgctgccagcgttgctcacctcgctacgcgatgccgatcagctcatccagctggcctacgatttgcgtgttccccgaggggcttcacaggtaagcgcacgcgacatccgtctatcgcgaattactgccgcgatagcactggtgggagaactgaagcggcgcgacgatcttctgcgcctgctgctggaagcgtcgatcgttgccgcgggccatgagcgatccgaccgcttcctctacgagcacccagatctcaccgcagtggcgggtgaccccgaagctttgcgacggctttccgcgaccaatgttggctggccaggggggaaacacgccgcgcttgcacttgcgaacgccttcgccggggaccgagacgaggcccgtcgccacgcccggcgatcaatcgattggcacaattgggccgcgcataccaaacgcagcgctcgctttcgcgaatcgagcacctcaaggcaatgggacgatattggcttcgcctatgtcgagatgctggcgggcaatgacgtgcgcgttgcggagttcttcgcccgtcgagaagacgatgtggcctttaccaagtttcgggacttgttcgatcttttggatcgacaccagcattcggcgcatccgccaaagaagcgcatcgcaacgcggctcttgcgttgtcgactgccatctcgcgcactctacgccgctgcgcttccattttttggtcatgacccatcccacgccagaaggcttgtcgcggcccttgcggccgcagcttctgcgaagggaaagagcgaaggcttggcgatggccagcgtgctggcatcagcgctggcgatagaactcggcatggagagagaggcggcaagcatcctcgctggaactgcatttacatcgccaagcgtctatgactattccagtcagtatccgagcgaccgtgcgatccacgtggccgtactggccgccggtgttcgagccgccttgagtcggaagcgtgccgccttgattgacatagcaccggcggaattcatcggattggtgcctgcaagtgcccgatcgcggggcgcagcgaccttcagtcgagtgcttaaccagaagctggcggcgccgaagttcgatgggactcggcgccgacggaagaggcatggtggactcgatgaggagaagcgatcgaagtattcgcgcgcgcttgccagccggatcttgccgatgctgagctatgcacaggatgtcgccgacatcattcgcctgcccaagggaaagacgcgggacgaagtggtgatcacagcctttgaccggcttgtccgtgatgttgagcagtcatccaactatccgtaccgcgacgggaaggcgtatctcgcgcgaaacggtttccgagtgattttcgatcttgctgatgcgttaggtgcgttcaatgcctcgcttgcgaagcgcatggccgagtgggcggcgagtgcgccaggcctattcacgccggagctgaccaatgcggttgctcgactgtcgcgcaccccccagtgccacgatgctgcgctccttcttgccggccatatcgagcgcaagatccaactcgataccgatgtcggatccagaatctcatcctacggtgatctcgctcgcgcagcctggcgagtaagcactgaagaggcttcagcgtattttcgccgtgcgctcgatcttgccgaggccattggatcggatgacttcgatcgtaccaatcacttgctggagctggccggccactattcgggtcccgaactttcgccggcggcagcgcacaccctggcgcgtatcctcgaactgaatcagaacgaggatggtaagtttccttggactgaatacgcgaaaacgatggtgccgatcgctggtcgggcgatgttggctacgttggcacggctggatgatcgtgacgccgctcggctcggactgtcgctcggcccagcgttaactgtcctcgttcgtgattcgaagctttcagttgaagccgccgtcgctctgtttggcttggctgctccagtcgaaacgtggacgtggcacatctggggcttcgcgtcagaggtcattggtcgcctacctcaagagcgacgggaatggttcttcgacctccttctggtcgagattgatcgtgaggatcaactgtctccggcgcgagagacgatcgaagggctacgtgacctggctgagcgcagtcttccttccacttctcatgctcgaacacgaattgagggcctgctcactcgccttggaccccaatccgaatcgcgaacggtcatgtctccgtcaaccgcgatggagccgccggtcgtcttcccggtggacctcacggactcggacgacattgaccgccagattctcaacgaggaaattgatcattcggggcggcgctggccggttcggacactgattgatctggctaggcgagcaaactcgcccgccgaacgcctcggattcgtccgcgcggtcgttgaagcaaccgctgccacgcttgccgacaaaatccacgcgctggacgactacttggaggaatggggcaggtcatcggcggcgatgcgcgatgctctgcctgacttgggactgcgcctggccaccaagcacgccgccgaacttgccagttcaagcactgacgcgtggggcggctggcgcggactggagaaacatttccatgccgaccgcgcaactcttgtcgagcacgtagttgcagcgctccggagcaccgcagacagccttggtggcaatgcctggctcgcacttgccgcgagactggcgtctgacgtcagtgccagcgccattgcggaaggcctcgaacggtttctggcaaatacaggtgaaaagctgccgtccgaagttggggacgggccgtgggacactcgttttgtggttccctccgacgaggcgacattcgtggcggggctcgtgtgggcaaggcttggccatcccatcgcggcaatgcgctggcgtgcagctcatgcggtgcggcgcttggtggtagccggacgctgcgatgtcgttgaacgactgattgagctttttgggtctgctcagagcttgcctttcggcgatgcgaagctgcctttctatgtaatgcatgcgcagctctggctgttgatagcgctcgctcgcgtagcgaaagacgctgctcccgcacttgcctcccatcgcgcgttcttcgagcggatcgccttttccgccgagtttccgcacgtcgtcatgcgcgcgttcgcgatagacatacttcgcgagcttgcacagacccttgcacccgaagagcgcgaagcgcttatcgccacgctcggccccgcaaaccagtcgcctttcccattggttcctcgaactgactaccgtgagttccggtatgcccccaggccagatgcctcgccgcgaccagaggacggcttccacctcgactacgacttcaacaaatatcaggtcgagcgcttgtgtcacgtcttcgcttgtccaggctgggaggtggaagaccgcatcaacgcatgggtgcggcgttgggacacaactgtccgaggaatgcacgattgcccacgtagcagaagcgaagacgcctcttggtcgtcgggatacgttccgaaccgagatcggtacggcggatatctcggatggcatgcgctcatgcttgttgctggtgagttgctggcgacacgggcggtagtcggcgaggactgggatggtgatgcttgggccgcgttcctgagggaatacacgctgtcaagaagcgacggtctctggcttgctgatctcaccgatccgttttcgctcgaccttaccaaggaggcggaaatgcctatgccggagagcggtgagagaggcacagttcgcgaagacagcaatttgctggcgccattgctcggcttgttggacggcaaggtggtgacggattggcttccggtcgcaggacgttggtcgatcgggcgcgacacaacagtcacgcttcaaagcgtactagcgaatgccagcgacgcgcgagcggtggtcatggccgtagtatcagcggaagcattctttagatggctgcctgatgatgaagatgagattgcccgtcacttcggcggcgatggtcacacggttcagtcatgggtcgaaaagacaccgaacaccgagcgccaactcgatcgacatgatccctatggtgccactaccgcactcgacaggcctttcccatcagattggacgcgagatctgttggggactgtcgcggatgatgaggcgatccgccactggtcaatcgacgggagagcagcctatcgcgccgaagcatggggtgctgagggggggcggggtgagtacgcctggagcgagactggataccgcttgttcgtcagtcgtggcgccctgctttccctgctccaggtatctgagcgtagtctcgtcgtctctctcacgctccagaaataccataaagggaagtcgagtggacgcgtcggggacaccagcggctttacccatcgcgcactggtggttgtcatcgatgaacgcggccagatttggtcgccgcgaggcctctctcgacaagccaagggcgctcttgcgacgctcgaccctgaccggcggcgcgatttctatccgcggttccgcgcgattgcaggcctgcccgatgaatggctatctcggcgcaacgatccaccgattagcgaggagcagtatcgaataatcattgagcgcctttcgtccgaataa

SEQ ID NO: 510829 - DNA, 432 bp, Stenotrophomonas maltophilia
gtggacaagcgtcctttccgggaggtgccgaccgtcggcaggatcccgccagcgaccggcaccgaagccatcgaagagcacaacgggaccatcggctcgcaatcgatcggcgaggccttgcatcaagacagtcttacccatcccgcccgcagcatggaccacgagaggaagaccagcttcgcgggccagggttgcaatgtcgccaaggacgtcacgctgaatgactatctcaacctcggggaacgcatcgggcgtgggatacaggcggtcctcgtgctctacctccagctcggccaatacagctacccgatcaactcgtttgtccgcctcactaccgggaccggccttgatcctgatgagattccgcaacttgagcaggcgtttctccgcatccgggtcccctggttcgctccatgcggcgagcgtcgttga

SEQ ID NO: 510830 - DNA, 195 bp, Stenotrophomonas maltophilia
atgcgcccgggcaacatcggtagcgccgtggtaccggacaagatcggcaatctcgaccgcacccgttcccaagctctgttcgtctcgttcatcgaagccctcgagcgtgatcgcagtaaggtcggtcgacggcggcaggagttcaagagcggtgcgcgcggcccaagcttcatgaaaggcatggcccgcctttga

SEQ ID NO: 510831 - DNA, 162 bp, Stenotrophomonas maltophilia
atgcccggaaagccgcatgaaatcagctttccagagaagacttttaccatcaaagaccggtttggtctcaatagtgaacgggagggtcttaatctggccttcggtttttaccgccacttttcccgccaacctgttccgctggccggcgatagccaccgatag

SEQ ID NO: 510832 - DNA, 2496 bp, Stenotrophomonas maltophilia
atggcgcgaagtctcggccaactgaccattgatgtagtcgccaacgtaggcggcttcgttgccggcatggacaaaacagagcgggcatccgacaagtggcgtcgcagcgtggagaaggccgcgtaccaggtgggcttcgccatcggcacggccgcgaccgcggctgtgaccgctctggctggcatcacggtggccactatccgccaagcggaccagctcaccaggctggcgcaggtggccggctccaacaccaccgagtttcagcgcttcgccgccggcgcccgctcgctgggcatcgagcaggacaagctgggcgatatcttcaaggacgtgaacgacaaggtgggcgacttcctgctcaccggtggcggcgagctggccgacttcttcaagaacatcgcgcctcaggtcggggtgaccgccgaccagttccgcatgctctcgggaccgcaggccctgcagctgtacgtcaccagcctggagaaggccgggctcacgcagaaccagatgaccacctcaatggaggccatcgccaacgacgccacaatgctgctgccgctgctgcgcgacggcggccggatgatgaacgaatggggcaaccgcgcccaggacttcggcgcaatcctggacgaggacgccatcaccgcgctccgaggcatgcgcaccgacacggctacggcaacgctcgcccttgagggcatgaaaaacacgctggtgtcggaactggcccctgcactgtccgacttcaccggccagctcaagagcgaggaatcccgaaaggcgctgcaggacacggccaagggcatcggcgcgatcgctgcgcaggccgcctatgcttcgtcggagatcctcggccttgctggaacctacacctcgtggctgcgcggccagggtttcctgccggtcaacgagcgcagcgacgtggacgacctgcaggcgcgccagaaggcgctgcagaactcgctcagtcgctggaccggcgtatttggcgatgacgccaaggccaaggtgcagaaggaggtggagcagatcgcgaagtggatccaggaggcgcaggcccgaggcccgaaggtgacgctactggagaatggtgcgctgatgccggaatcggcgctcaagcccaagccggtcaagccctacacgccccccacggagaccagcagcaaggtggatgacctggcccgggcgtacgcggcggcctcgctggagtttgagcgcagcatcgccctgttcgaccagagcgctgatggatcggcaaaggccaccgagctgcagcggctcaacttcgacttgctcaaaggttcgctcaaaggcctcgcccctgagctggccgagaacctgcgcagccaagcggccgtactggatagcctgaatgcccagcgcgtcgccgcgcaggaagccgcaaaggcgtcggaatacctctatgggctgcaggaggagctggccacggcgcgcgctgcgctcaatgtggacgtgctgggcgccggcatgggccagcaagaacgcgagcgcgcccgcgcgctgttggggatcgaggaggactaccagcgcaagcgggcggacctgcagcggcagtatcaggccggggagatcacccaggcgctgtacgacaccgagacggaaggcctcagcgcagccctgagggaacggctggagctgcagcgcgactattaccggcaggtagacgccatgcgcggcgacagcatggcaggcatgcgcgatgcgtgggccgactatgccaccggcgccaccgactacaacaagcaggcctacgaggcgaccaaggggtttctggacaccaccaccagcgaggtgggcaacagcatcgcagagctggtaaagggcaatgaaagcctgttcgactcggtgaagaacctggctgtctcgatgggcgaaaccgtaatcaacacgctggcgcagatggcggcgcaatggctggtgtatcagggcgtgcaactgttggtcgggaagaccgcagcttcggcgggatcggcgggcctggtcgggaatgccattgcgacacaggcccaggcttcgctggctgcattcgcatccactgccgcgatcccgatcattggcccagcactcgcccccgctgccgccactgcagcgatggccgcaaccgctccgatggtggcgatggttacagcgggatcactggccggcatggcgcatgacggtatcgatgccgtccccgaaaccggcacctggctactgcagaagggtgagcgcgtcaccacggcggcgaccagcgcgaagctggatgcaaccctcgaccgcgtctcccgcgattcagaaggtggcggttcccgccagttgaatcagaccatcacgatcaacggtgacccgagcgagcgcgacattgagcgctacaaggctgctatgcgagacggagccaaccttgcgtatgcccgagtgcagaacgacattgccacgggaaccggcatcggcaagacgctgcgaacgagcaacaacgtgggccggcgactgagatag

SEQ ID NO: 510833 - DNA, 402 bp, Stenotrophomonas maltophilia
gtggcgagggcaagaacccccacaaagaaggcgatggtgtcgggcgccgcgctcaaggacccggcccgctacaagaacaggtccgcgccagccaatcccaacccagttggcgctccctacaagggcatgacgcgaccccagctcgccgtctggcgcgaatgcgtggccaacatgccgtggctcaatgccgcccaccgcatcctgctgcgccaggtctgcattctcgcggccaagatggagtccggcgaggagctgagcgtgtctgcgacgcacgcgctcagcgccatgctttccaagctcggtgcaacgccggctgacgaatcgaaggtgaaccacggttctgacgacgatgacggcggcgaagaattcttcggcggcccatcgggcagccgcctcaactga

SEQ ID NO: 510834 - DNA, 1143 bp, Stenotrophomonas maltophilia
atgaccgacgtaattgaaaaggccctgaaagatcacagcgaagccctcaagggtttccagaagtctgtcgacgccaagctcgacgcccagcgcgaggagctggacaagctgaccgacaaggttttcaccatggaagagaagggcgtcaagctggcgccgggcgcgcgccgcaagcaggaatcggtggccgacgcgatcagcaaggcgctgaaggatgaacaattccagcagttcagtgccggcaagctgcaaaccagtggcaagctggagctggaaatcggcctcaaggcactgacctcgttgcagggctcgccggagacgccgccggctggcttcgacgtgcagccggacgtgatgccgatccagactccggtgcagcaacgcctgcgtgtcctggacgtgctgccgcagcgcgacaccaccagcaacaaggtgggctatcccctgctcgacttctccgagggtggcgctgattaccaggaaggcgaaggcacccgcaaggctgaggccaagctcaaggccgaatgggacgaggccagcatcgccaccatcgcggtgcacaccgaagtttccaagcaggtgatggacgacgtggccggcctgtccgaaaccatccagctgctgctgcgctacaagctgaccagcaagagcgacattgagctcatgtcgggcgatggcgcacagttccacatcaagggcctgctcacccaggccaacagcttcgcgggcggcaccggcaagcctgtggaccgcattggccgcgccggcgccctgctcagctcccagggctaccagcccaacatcgtgttcgtgaacccgctggactacttcgacttctcgtccgagcgcgccactgatggccagtacgtcgccggcggctggagccgtccgaccaacagcccgatctacaacctgaccccgatccagaccatggccgtgccggtcggccaggcgcttgtgctggacaccaacgtcaccaaggtgctgatgcgcgagcgtccgtcgatcaccttcggctgggtcaacgatcagatggtgcgcaacctcatcaccatccttgccgagctgcgcctcggcctgctggtgctggaccgcaagggcatgctcaaggtcgacctcaccgccgctccggctggcggttga

SEQ ID NO: 510835 - DNA, 636 bp, Stenotrophomonas maltophilia
gtgatcgttagcccctccttcgtaatcgaaaagtccctcgggcaaggtcgcttcgctggcctggcatggtccttcctggacacgcctgaccgcgagggtgacctcatcctgccatctgcactggcgcgcgctgtcgatgcagccaagagccgtccagagatccgcatcgaacacgatcccgaccaggtggccggcgtgatcgacgtgatgaccgtgactgaccgtggcctggaggtagagggccagatcaacacggcgcagaccatcgggcgcaaagcatacgaccgcctcagtgaccgctcgctgggcgcgctgagcatgggcttcgtcggcagcgccgaaacctcgggccgcaaccgcgtgttcaccgagatcactgccatccctgaaatctccctgtgccgcgagccgatgaacgccggtagccgcatccatgcggtcaagagctgggcgcaggtggattcggagcgcgcgctggaacacctcctgcgggacgtgggcatgcccaaccgtctcgcccgcaagtcggccgccatcgtgtggccagccatttccaccgacgacgacgatgcgcgcgccgagacgctcgcacgccagctcgacgccatcacccgctcactgaggaacaacgcatga

SEQ ID NO: 510836 - DNA, 798 bp, Stenotrophomonas maltophilia
atgcaccaccagcaagctcggcgagctgctggcgcagctggaggccgccggattcatcgtgcagacccgccatggaaaccggaagctctgcaacctgtacgcactcacctggtatgggatcgacagctgcgcgggcaaggggctggaaattcttccaggcccaccacgcaacgactggaggaaaacgcattctgtggccccctcagggtgccaaatagaaacggaatctgtagtcccctcagggggccacggtggcaccttcaaggggccaaaagcagcatgagaaacgtcttttgcacccctgagggggccataaaccacgatttcggctgttttttggccccctcagggtgcccctttatagatatctaccaagcgggagcgcagcggacgcttggcgctcttgctccaccgctcctgctgctaacgctccgagcgttacctgcactgcatgtcgtccaccccatgcgcccgctgcacccgatgcagcacgttcaccagtgcaccaggttcaccaccaccgtacgcgaaagcaccagtaccgcatgtgcgctgtgcggaaagcccatcacgaattcaccgacaggcaggccacgcacctactgcagcgatgcctgtcgacagaaggcgtatcgcaatcgcctgttgttacgaaacccattgagccgcgcgctggaaggcgtatcgttgcagttgtcggcgatccgcgatcccgacaccgcacactccgcgatcagcgatccggcagcggccaatgagttcacttggcaagcctgtaccggagattcccgcgcgtga

SEQ ID NO: 510837 - DNA, 258 bp, Stenotrophomonas maltophilia
atgaaactccggcgcaacaagcagaccaaggcctcggccaaccctctcgacgacttggcgcgtgcccgcgcaaggctcgcgtctttcagccccgaggcactggttgcggcggcggtggacccggagcatcgcaagcagttgcaggccacccgtgccgtgatggccgctgcgcttgccgagcaccaggcagcggtggccgccttcgccgacatggtggatcggctggaccgcgcgctgcaatccgcggtggaggcctga

SEQ ID NO: 510838 - DNA, 357 bp, Stenotrophomonas maltophilia
atgacgcccatcgtacaccaaccactgccggccgcaatcgggcatttccccgctgcactgccggatttctctgacaccgcgcgctgggcccaggtgctggtgcaggacaacctcaatgccccgcgcttccagattggtgacgtgttgcacgtcgacctggcccggaaccgcttcatgggcgacagccactacgtgattgagattgccggccagcagatggtccgcatcgtgcaggcgcgcccgggcggcctgtgggtctaccccgtctcgcatcccggcagcgcctacccggtctcccgtgagctgctgaccgtcctcggggaagtgatgttcgtgaccactacgaggaagctctga

SEQ ID NO: 510839 - DNA, 252 bp, Stenotrophomonas maltophilia
atgctgacgcgtgccgtggtgcggatggaggcgcaactgcaactgggcagtgatgagccgtatccaggtcaggcgagtgggaagactctcaagcagtccctcgccgatacgaaagatgcgctggatgtattcaaccgcaagatggaggtagctgctctgctgctctctgagctggctgtcggggaggcgtgtggcgccgagatcgacgtggacgagttccgagagcgtgctattcgcgctggcgtgctctag

SEQ ID NO: 510840 - DNA, 855 bp, Stenotrophomonas maltophilia
atgttcgagacaggacgttacgttgagaagttcaagagtctcagcaaggaattgaagctgtacgcggtggggctactgcctctggcaatcgggtcgtttgggcccttgctggggatgcatgcaggctggtgcctcgctcttttggcagtaggctgcctctgcatggcgatcggcttactctgccgactgataccgctgtgcagagccgcgtgggagaagcctgcggttcgaaaacttgttctgctctttcatctgggcgtactggtagtaacggccgcggtggcgcgtaacatcatgacgtcggcaactggcatgccggggcaggacttcaccctggcgaccagtgcgctcgcactaccactctatccactcgtttggctgtggttcgttgtattggtcatgggcgttaccgtcgttgccctgcagttggcactcgggctggtggcaatcgcgcagcatctcctgtccttactcttgccgtcggttggccgcagagtcagggcgcgcattggtggaagtctctacgtttttgcgatgcgcatgatcggtctcgccgtgctgtttgttaccctgacgattcccctccatttttcctcttcatggaagccaagcctcgagcggctggggagatgggctgcgtactatggggattatcagagtgcgcaccggtatcctggaattcccgtggatgctcgggttctgatgcacgccaatggtgtctattcgacggcgcatcgccagccgcgaggtgagatagccatcgatgttcactactggcgagggcctgaaagcgcagcgagcgatccgaacccgcagagcagaatcccggccggagccgacggtggcggaccgtag

SEQ ID NO: 510841 - DNA, 1296 bp, Stenotrophomonas maltophilia
gtggtagataagaccctcaaggtcgtggaccttttcgcgggatgcgggggcctatcccttggccttgagcaagccggcttcacgcctgtcttcgtcaacgagctcaatgatcatgctcgggcaacgtacatccagaatcgcgtggggcggcacgagtggctgggtgagcagggatacagcgcctcggatgtgaagggcatggtccttgacaagcaattcctgccctcgcttgagtctcgactcaaggacactttcggcattgacaacggcgatctcgatctcttggtcggcggcccgccttgccaggggttctctggcattgggcaccggcgctcctattccgttgacaaagaacaattgccctcgaaccacctctttcaggacatggcagcgatcattcatcgactgcggccccgcgcattcttgtttgaaaacgttcgcggcctgctgaacagcaagtggaccgagggtgggacgaagggcgagatcttcaaggatattttgggcacatatcaagatatccctgggtattccgttgcctattctcttgtctacgccaaggactacggtgttccccagaatcgcccacgcgtactcatggttggtatccgagatgacgttggcgtcggtatccagcgagaaggaaaccctgaggatgcaatccttcggggctacttgcctgcgaaaagatctgacatccagacgccggacttaatcgatcttttgggcgatctggttgatcctgattacgagaacggtggatcgaccactcactatccgtcagccgcacgcacgcagatacaaaaattgcttcgtatcccgcaggctggtggttcaccgctgaagaagggcgacatcgtcactgagcatgaatacagcaagcacagtgcacatgtcctcgccaagttccgtgccatgcacgcgaatggcggcaaggtgccaagcgagttccagacgaagaagtttgcacagcgcttgctacccgcacgatggggtgccgagggccccacgattactgcaacatccctcgcagatgactacgtccacttctcgcagccacgcgttttgactgttcgcgaatgggctcgcctccaaatgttcccagactggtacaggtttgcgggaaagcgaaccacgggcggcatccgccgagcaggaaaccccagagagggaattttcgatcgagaagttcccaagtacactcagattggaaacgctgtaccggtcggacttgcacagtcagttggcgagcatctcgcgaagattttgcagcccaccaagaagcaaaaggactag

SEQ ID NO: 510842 - DNA, 501 bp, Stenotrophomonas maltophilia
gtgaagaccggattggctctgcttgaggcccacggctataacgatgaggatggccggctccaaatctattgcaccctcagtgcgaagccaaactcccaaggtttctatcttgaactcgagggtggtgttctctatgcgagccgcaccattcacgggcgcacggaacgactgctctgttggaaagtcgaggatctgcagcgcagcctggctgataaacatcgagagaccttttgggtaaaggccgtaagcaatggtgccggcgaacgtgaggagttccactacatcgaggtggtccacaccaaggggccgcttgaggcgaatatcccggagcttctggccataggcaaggttgagctagatcttgtaatgcaccgagttcccgcgaagcgggcagggacctatcgagttagggaccacgggtacttgttcaagattcgcccgcaagatctagacatgctcttcccgccagcaaagcattacatgctggatggcagcagctaa

SEQ ID NO: 510843 - DNA, 1686 bp, Stenotrophomonas maltophilia
atgagcaagcgcacgagtaatcgcaagccggcggctgccaggcttaaatcgtggtacttgccattgcatcaggacgcatatttcgaggcgcttgccacaggggtgactccagtcacccagggagcggtgaccagcatcgatgcgctggatcgacggcttctgcgaagggaagcccatggactcgactatggttccgtgggcttgcttgaattggcaagagctccatcggaacacggctacgtcttgttgggaaattgcagcgccttctggcttcgtagtgacgacgatcgttccgagctagtggataagttggagcttttccaagacacggtgccggaagcccttccgctccgtgtagatgcgggtctgttcgagggaagggacacaagctgcggcgtcgctggtggagagctcgacctttccatgggtgagggtgtccagacagcagaagagccggcctctggcaccgagatggcgcccatcgtcattctctcgggcgccattgctatggcgcggcatcgtctcacggagctcggcatatctgcggacttgctcccagtgatcttccgtcttgcggacacccttccgccagaagagcgctgggcagccgccgtcgccgtgggtgcagtggaagggctgattgacttgtttgcattggatgcgccggtctcgggagaggagttgctggtcattgccgaagctgcggaactcctttcaagcatggatgccgcgatgggcatcgagctcaatgacttcactgcccgcctgcatcaaagatgtagtagtgactcgggagctaaagcaattgccagcaagttccgtgaaacgatttcacggctctcggacaaccagctggagctcaatacggcgcgaattgatgactcaggccacatcggactgcgggcactgatggtgttcttgctcgcgcctgaacctgacgacttgctccgatggttttctgcgcgtcaggatgttgggagcagtgtatctatacttgcagctatattttcaggtctctacggcgggctgagcggagtaccaaggcacgtcaaggggccaagtggtccatctttcctgtccatcggtttgctctctcattcgatgcttaatgcaagcatggactacgcagtcgagcacgtctggtcccagcgcggcgaagagctagtcgaaatgaaggtgagtggcttgcggtttgcgcaatcagtaaaaaagcccagcccagtcgtatcccttttgcttgaatcagttcgaggcgtgggtggcgttgcagaggtaaatgcggagactggcacggtcaccgttgggatgccagccgaagctgctgaccgaagcgcagtcgcttcagtacgatgctcaagatggttcaagggctcgcaggtcgttgaatttagcttgcgccttaggcgtccaggtaaggcgggccactcccgggaattgttggaacgcctgctggatgccgagcttgcccctgtacttgcgaacttaggaagtggcactagcgaggtgattctgttgacggaggtgccactggaatgcgacgacttcgctgcggcactgagaggagcgcttttggtgctccacgagagggccgagtcgctcggactagtgcatcaggcgcagggggcggccagaaagcgtagttccacgagatcaaggaagagtgactcgcctgatatagctatttag

SEQ ID NO: 510844 - DNA, 1203 bp, Stenotrophomonas maltophilia
atgaggtttcctaagttcacagagctagacaaggaacagcgtgctatttacgtcggcgctccatccaacgaatcaatactcgtgatgggccctccgggaactggaaagactgttttggcattcttccgggccgcggaactgcagaagaggtacgagaagcaaaaggaacagtcccgaaagccatttgtcatcatgtttaaccgcactctcaaaacctatgcctccaaaagagaggatggcgtggcgacgggggttggctgctccacgatgaaccagtgggcgtgggcgtggtacaaaaaggcaaggggggtttcaccgccgtcgctggcgggtgctcggtctgtctacgatcttgattgggatgggatgctaggaccgctgcttgaaaaagcaatgagcagctctgaaagagtcaattgggggcatctaatcatagatgaaggtcaggacttccccgctggcatgtaccggaccctttcaatcctagcgggattcatctgcgctcaaggcgggtcccccgcggttacggttttcgcggatgacaaccagcgacttagcgaaaggtcgaactcgacgctgcaggagatcgaagaggcgctgtccctcaagaaagatagggtgtatcgcctgagcaagaactatcggtgtagcaggcagatcgccgagttcgcccggcactattacgtcggcctccgcagcggaactcccgatctccctacacggctaggtccctcgaaacccaaggtcgtagtcgcggggagcctggaggttgtcagacggaggatcgtcgacttcgtaagtgctcgtcgccagcttgacgtcggggtgctctgtgccagggagtcggagcgtaagaagatcttcaacagtgtcagccaccgaattaaggatactggcgtcctcgtccaaacgtactcgagtacatgtagcgacgtccaccccccggaaaagctagtcttcgacaagggaggctctgtgacggtgctaaattttcagagcgcgaagggtctggagttcgatgctgtattcatcatcgacccattttcgtctggacccggtgcggtgggtgtgcagtcgaagatgcagttatacgtcatggcctcgcgagcgaggaaccatttagaattactgttgatgaatccgccagacgatcttgctggctttcttcctccagaggagctatatgagcaagcgcacgagtaa

SEQ ID NO: 510845 - DNA, 1827 bp, Stenotrophomonas maltophilia
atgagctcgaaaaggtccattaggcgtggtcagttggtgagccctttcggtgtgggtgcgattttggatgtcggttcggagtcctttgcagtaacagacataagtcgctggaatattagcggcctctcgcggattcaggacagccggttagagaacaaactgcgcaaccccataaggacaccgtcagggaaggaaagtgaagcctccgtaaccattagccgattccctcgctggcaattctgtcctaaatgccgtcgcatgcggcgtatcagctcggccgaggatcaggcccggaagtataagctaccaaagtgcgagcactgcagcccgagcgttgagatgacgccgatgggtttcgtcaccgtatgcgcggaaggccatctcggtgatgtcgattggtacatttgggcgcatcgtcaaagaagcaccatcaatggtgtttgctcgagacagacctcggatctgtattttgaaacgtcaggtcgtggtggtggcgactggtcgtccattcgggtccgctgcgggtgcggcgcctacagcgatttttcggggttggtacaggtagaggctccagctggaatgcgttgcggaggcggtcagccctggaagaaagaacggtcactatgtgcatcgtccgtctgggtctaccgacgtgcagcaagcaatcttcactttccgagccaagtctctgcgcttgaccttgctctagctcatgaatctgaggtccagtcaaccaaccttgtccagacctggatgggtgatgggctgtacggagtgatcgagatggcgcacgcgcacctgaaggacttagatcgaaccttggccgcggttagtaatcaaatagaaaggtttgcagagcgacatgggtgcactgtggatgcagcccggtcggcattggcattggcgctatcgggagaggatgaggccacgaatcacgctgagagtgaggagatggactcgcccgacttccgatcgcagatcctgcgcgaggagtgggctgtccttgcgaacgggcgggatgtcgctggcaatacgctccagatccgccgaaacaagatccctccttcatggtctgcggagctgaaaaggaccgttcaggcggtttcgatggtcaggcggcttagggaggtgcgcgcgttgattggattcaggcgactttcaccgagcactgacaacccgcttgtgcctgttgatcttggaacgtccagctcccgctggtatccgggagtcgaggcttggggagaaggaatcttcattcaactctccgagccagaggtcgctgcttgggagcagcgagtacgagcgacgatggcggttaagttggcgcggatggcaccgaaggtggcggcgatgggatgggatgagtccatatgcgcgaccaggtttctgctcttgcactcgctagcccatgctatcgtgcgcaggcttagcttcgacgcgggctactccgcatcttcgatccgagaacgaatttattcggcagccgggtcccagccaatgtgcggaatattaatttacacggcagacggggactccgagggatcgctaggaggccttgtcaggatgggagatccaggtcgattcggagcgctgttgcagtcagcgttacaggacatggcttggtgttcggcagacccggtatgcagggaaactgaagtcagtggcttggatggtctgaatgccgcatcgtgccatgcctgcgtattggtctcggaaacgagctgttcctacaacaacagcgcactcgaccggagaacattggttcgcattggtgaaatcgagccatttttcaatgttgatgagctggtgcgatcaggggagagctag

SEQ ID NO: 510846 - DNA, 3126 bp, Stenotrophomonas maltophilia
atggaagatttagtcaaagggcgggcccagtttgcgcagtacatcaggagcgtcctcataggtcccatgcaaggagatgacgaagagattgaaggcaccccgcttctgcgctacatgatggggatgctatttccccggcagggtgagatagagctcgctgaggacgggacagaggagggtgctagggcggccaatggcgagtccgaagagtcgagggattccggccggcgctctctggcgtcatccgtcggactgagtttcctagtgcctaccgacgttaacttgttagctaccgtttcggccggcatctatgagcgtacagatggaggagcttcgtcgcggcgtgacaaagctgcgtggcgtcgcaggcaacttccgaaggagagcgctggaattgccctctctgacggaataagcaaagcgagtgttcttggggggcgtgcctcgctttatgtgaattccagaccttggggtgagggacggaggctaatcacagtaactttggtgaatgccaaaccgccctccaagacgctcgaccccgccgccgtgctctttcagtcgagcctaacggttgctgcccttgatggtgaaatcctcccatatccacaaccggagtccgcattggcggtcggtaaggaagaggttgagttgcgccacctgtacagggattcaccgtctttcgctcgaggtcacggcgcggcggctatgtgggatacggagtcgaaaccatgtaagaaggtttgggccgacttccttcccgcgtgcgaagtccgctcggcaacgttcgaaattcgggctcccacccaattagatcctcgctatagcgatgtagagttcctggcctttcatccggagccgggcgagatccaacgcgtcctctatgggctggtctcggccttcgaagcatgggtggaagaagaggacggcgccgctcgtagcgcgggagctaaagcgggcgcgagtcttgctagacgctgtcgcgaatggtgcaggcgcatgcgcgacggtgttgaggcattgtctgacgacgcaaccttcaaggcctttcagcttgctaacagagcaatgctgtggcagcggcagatgtcggcagctggtagagatggaccttacgctccttcgatggcgcgcggggtgcctgagctcggtcgcggcttaggattcaagtggcggccattccagattgcgttcttccttggcaccatccgctcgcttgtggacgagtcgtgtacggagcgggacgtcgtggacgtcatctggttccccacgggcggtgggaagaccgaagcatatctgctcgtcgcggcctttgagctgctgcgtcgtcgtattaccagcagagggactgatgcaggtacggcagtgatgagccgctacaccctccgcatgctaactacgcaacagttccaacgaaccggaacactaatttgcagtttggagctgattaggcggtccaacccaggcacacttgggcagtgtcctttcagtgttgggttgtgggtggggcagagccttactccgaacaagttcagtgttgccgaggagatgctcgagcaatgggatcttggcaatccggatgccaaaaatccattcctggttgatcgatgccctgcgtgtgccacgttacttttggaccacgtcaatcaagtcgctggagtctcttgcagttcttccagcttcaagttccactgcttgagcccagcatgccaattccattctgggttgccattgcaggttgtcgatgaagccctgtacaaagaccctccctcgatcttgctcggtacgttggataagttcgccgggctcgcttgggaccatggcccgcggaccttctttggagggccgcgtggcgggcgacctccttctctaattattcaggatgagctccacctgatttctgggcctctggggtcaattagtgctccctatgagatcgctatcgacggaattattagagctaaaggcggcggcgttgggcccaaggttgttgcctcgactgctacgatcaggaacagtcgggaacaagttcgtgggctttatggtaagtcatcaactgttttcccgtccccaatcaatcggtgggacgatgcatttttcttccggttgcagaatccatcggagaagcctgggcgactctacataggtgcaatgggccaaggtacgactactcccgttgtctccatggtttggagcgctgccgcgctcctgcaggcaagcgctgagactcagcttcccggggcgctggctgattcctaccgaacggtgttggcctacctcaatagccgtcgagagctaggccgaacgattacggccgcctctcaggaaattccggatcgcatgaaagcgattgcctccgccgacgacaaggtgagggacataggcgaggtcatggaactcagttcgcaaatgacgaaggacatgggtgaagccatccgagctctagagcgtaaggggacggagaaaaatccagccattggctttgtgccttgtaccagcattatatcggttggcgtcgacgtagatcgtctgagcgtaatgctagttaatggacaaccaaagctaacctcggagtacatccaggcatcgagccgcgttggacggtccgacgcagcgccgggtcttgtgctgaccctctactcgtccgcgaagccacgagacagatcccactacgaggatttccttggataccaccaagccttctatcgttacgtggagccgacgagtgtgacgccgtacgctcctccggcacgggagcgcactctccatgctgcgctcataacgcttgtccgccatgcgacccagttcggtgcaaacgaatcggcgaggcgagtggacttcaccaaggagcccctaacgagcctagtcgataatttcaaggatgcggtctgcacggccgactcgtccgaggcggacgaaactaggcaatgcatagatgagttcgtacgactatggatggacgtcgccgcgagcggatcgcagctttcatacgtatcgggaggacggcagcatccgaccgggctgataagggactttggggccgaggaggtgctgggctatcgtcaggctatgcgctctgttcgcaacgtggatcccgacgtagttctttcccccgtggaggaggcctga

SEQ ID NO: 510847 - DNA, 1644 bp, Stenotrophomonas maltophilia
gtgctggtaataccgaatatgccgcatcaggactcgaccggatcggaacggctagtcctcaagttacttcgtggggttgattgggggcacggtgctcgtgcgctgaacagcctgaatctcccggagcacctctaccaacgatggggcgagatcgacttcttggtgattggtccccgcggcttaatagctattgaggttaagggcggggacgtgtcctgcatcaacggacgctggacctacacggatcgactcggtagggttgtaaagcgttccaagtcgccagtggtgcaggctaaggatgcgtacttctcactaatccagaactatgtcgaaggggccatgggaaaaggcttcgacacatccgtgcccgcagggttctgcgtagtgatggcgggtgcggcaaaaggagagctgactggattgttgggaacacccgagttgccagaagagctgactggcacacgtgaggacgtcgcgaatcctgcggcgttcgaggccttcctaacgcgcgtagcgaagcattggcagaacaagagtggggcgaagcgtgagatcgcctcccgagacgtcgatcttctggttaagaccctcaggccagaatttgacaaggtcaggcccctcgctctttctagcgaacaggcgattaatcaactgatcgagttgacggaggagcaatacgaggctttggatcactgggaaggagctagtcgcatcctttgcttggcgcctgccggatgtggcaagacattgatagccgcggagctcttcaagcgatccagagctgaaggggtggataccataatgctctgtggtaccgaaaacttggctagagctataggcatagcacttggagatcccagcagggtgctgtcgctgccaggccttgaatcgatgtcggccgagcagaggccatccgcggactttctggtgatagacgagggtcaacaagctcttgatccggagcggatggggatggtcgacaagctcgtaagcggcgggctacagcatggccggtgggcttggttcggagatcccaattaccagctaagtatcgatcctgatttagccttggtttcgatcagtaaactccggaaattctcttccgtgcagccgaggcttcgtaataactgtcgaaatactccggaaattgtcaagttcgccgagctggcatcgggagtcaagattggacatgcccttgcaaaggggcacggactcaacccaaggacgcaggaagtcacggtcgaagatggggcactccctgttgctatcgggatacaggtgcgcgactggatatcacaaggaattcccgcgtcagagatttgcatcatcgtggcgggccgcgttgcagcagaggtgtcgcgtgggagcggggtggtgggcggattcgatgtcgcgccttggggggaaataccagctccgccaaacattgtccgatactgcggcctagacgatttcagagggctagagtctcccttcatagtcttttgtgtcccctccttcgaggggggggatctggagctctcgaagatgttctatctagcgatcacgagagcgaacttcgcactgacagtgattgctccccagcaggtgatggagcgattgaaagccaatgtcgaggcgtcactggttgcatcattaggatga

SEQ ID NO: 510848 - DNA, 636 bp, Stenotrophomonas maltophilia
atggatatctgggcaaggatgattccggtgttgctggttggcgtgttgccttgcgccacggcgctggcggccaagcccgctgctgacatggcgtgcgcgccattggcggccctgcccgggctgcgcgatgccggggtgaccgcgctgtcgatgcagcccagcgacggtcgttgcatggtcgaggtgacggcggccaacgacaaggcgttgcttcggcagcagcagatgctggaggtgctcacgcaacacgcctgcgcggcgccggcggaggtgagcgtggacgacatgcggctatccctgcagttgcgcctgccgaagcactgcgcggcgcgcggcagccgcgatctgttcgcgggtgagggtgttgcgtggaagctggcacgcggcgtgtcgccgcactatccgccggcggccatgcaacagggactttccgggcgcagcctgctgaaggcattgattgatgcgcaggggacggttgccgctgtgatcgtggagacatccagcggccatgcgctgctggatgaagcggcggtggacgagctgcgtggctggccattcgtccgtgccgaagcagagagcagggtgccggagttgaccatcgtgcgggtgccgatgcggtacgcgctggtggagtga

SEQ ID NO: 510849 - DNA, 1077 bp, Stenotrophomonas maltophilia
atggcgaagccacgtgtatttatcagttcaacttgctacgacctcgcatccgagagggatagcctgcttgatttttgtcagagtttcggattcgacgttgtcctcagcgaacgaggtgatgtcttcttccatccggatttgcatacacatgacgcgtgcgtttcagaaataggctcttgccatatcctagtattgattgtgggaggaagatttggcgggaaatatgtttcatcaccagacaaatcaattactaacgcagaatactccgccgcaaaagaacaaaacctgcctgtatttacattcataaagcaagatgtactccaagatcacaacctttggcagaagaacaaatctaaagaatttgcaaaggaaattatatacccatcgattgacaaccaagaacatgcttttgaaatatttaaattcatagacgcaataaggctatcgaagagcaacaacgcatacttcccattcaatctgccccgagaaatacacattcaactaaggaaacagtgggcctccctattcctcgagggcctccaatcccgagcaatagacaaaaaactgggactaacaaatgagagcctaggtaaactctcagccgctgcagagcgcattgaagagctgaccaaatccatgttcatctcaattgatgaaatggaagcgaaatcctccatttcaaagactgcaactcagtccgacgcgaaaagaatgttctcattaatatcttctcgcgtagacgattcgcaatttctctcatcactaaaaaccgaaatcttagtaagatcgaatcctgagaaatggtgggatttcttgattactggtttgtacttcaaaaaatcaagcgcaacaaaacccgacggaaagaaaataaagacattaaaatatattgcatcgcacgacatgatccctgtggaaaaagggctcagcaagtctgatgacgccgacattgactccatagaaagcagctatgcagtatttcgctctctttctgaagccgaacgccgtgcaatatgcatcgagcacacccatttctccccatcgattgacacggaaattgacggagacgatggatga

SEQ ID NO: 510850 - DNA, 795 bp, Stenotrophomonas maltophilia
atgatgaattcccccctgcccccgacgccgggcccgatgccctcgctgaccgccaatggcgcgatggtcaacccgacgccgcaggcggccaatccgcagagcctgcaggacctgatggccgacggcttctaccttctgctgctgctcaagcgcggccagctgccacacgatgccgagagcttcgtgcagacggtgcagaagttcctcgatggcgtggaacgcaatgccatgcgcatgggcgtggcctcggaagatgtctacgctgccaagtacgcgttctgcgctgcggtggacgaggcgatcctgtcccagccgtcgccgctgcacgaaacctgggaacgcaacccgctgcagctgcgcctgttcggcgagcatctggctggcgaacacttcttcgatcgcctggaagaactccggcgccagggcgccgcgcgcctgccgtcgctggaggtctatcactattgcctgttgatgggcttcgaaggcaagtaccgcctggaaggcaccgagaagctgggctacctgaccgcgcgcctgggcgatgagatcgtctacctgaagggcaagcgccacggtttcgcaccgcacgcactgccaccggacaacgtccgccacagcctgcgccgcgtggtgccgttgtggctgccggccgtggtggtgggctgcttcggcatcgtcgccttcttcggcatgcgcacctacctcggccacgaaaccggccagcagctggccgcctacaacgacgtggtgcagatgcccgagcgcaccgcccacatcacgatcaccctgccatga

SEQ ID NO: 510851 - DNA, 981 bp, Stenotrophomonas maltophilia
atgtatccgctactcttgcgtcgcaccgaagatggtggccctgattttatcctcgacgtaaatgaggatgttttgattgttgttccggatgtcaattcaatttcggctggtaaaggtatcgcggttattttgctgttcgcgattatcttgatagttggcgttgttcttggttttttgccgatgctcctggaggatgcgtcgaagttggttttcccgttgattatggttttcctggttgccgttttgggtactgcggcggcagtatttgttttcagggcggtgcgtaatggcgatcgcttggatccgatcctgttcaataggctggaccagaccgttacccattacggcgcatctgggggcgtggtctacaattggaaatcgctaaagccgtttattcgtatcattcaggtcgtgcatgccgcgggtggctcggttacgtaccagttgatactggcggatattgaggatggtaccggtatcgtccgctcggagtttattgcgggcaaaggtgatctgataggcgcgggtgctcataggtttggattctttcaggttttcatggaaggctctatttccgatcttcctaggttccagctagtttcgtcgcgtatgggttggcttaaacggatggtggtgagtatctggacattggatgcgactcgcaagtgtttgttgggtcggcagccatggacgcccgttatcacgttggtaagtttgctttggaccgttctgttgatgccatttcagctgtcagagctgatcgccgcttggatatcaaaggggccattcggagttaaggagacgggcccttggccgtcgcgatttgatgccttgaaggacgactcagtcctgaagtcgaaggcggatcgctatggtgacgtgaccccaatttcaaagtggataattgctattgcacttgccttgggggcctttgtctggatacttctcttcgtcctcttgtacgtcgctatacggcgttga

SEQ ID NO: 510852 - DNA, 1092 bp, Stenotrophomonas maltophilia
atgaatagaagcgctcgcgatgccctgtttggtatgaacaggctcccagataaaagtggggcttgggggaggttgcttagattagggaaagagcctcgagaacttgagcctgcgtcggtcaatgcaatccagtcaattaatgattcgttcctatcgtttgctcatgatgtccaagtgtcgagcaggggctttgcttttgtgctcggactggcaataggttgtgccgggctcagtatggttcttgctgacgtggtgatgggtaacctcctgtcaagtcctaatttctggcctgacgccgcagccgcatatggagtacttgtcctgatttcaggcgggttcattgcgtgggcagttgcatccgtggtgcgaactatggcgccacccgtagtgttgagcaggaagcatcgacgcttctattcatggcttggacccaaagctgggtgggtggcgttgaactatgacgaagttcggcccgtctgcatggtttccagaagttatagcctggcaggtggggccaccggctatgtactcgcagtggtggagcttggtagctcggatagacagatcaagatgtatgtgccattggctcagccgcaccgtgacattcgtgctccagagatgatctgggagttcattcgtgtgtacatggatggagacccccgcagcttaccggaggtggatcctttgccgtcacctggcgacgcaagggcagacttggcgctaatggaccgtcagttgttcgggggtttcatagacaatcatcatcgagtcaagtcgggagcgtttcccctcgcttatattggaattgttgggtcgttcatgtactggtttgagaaggccggactctggatatcgcgtaatgcccccaagcctcaatggccagaagaagttcgagctgagattgcagctggagccccgaatgagtccttccgggtcaggcggcttacggaagcggaacggctggcatactcggggcggctgaaaaacttgaatcggcgatggacgcttcttggttttatctcaacgatcatcgtattcatgatgttcgccgtgctcggggtgccgccttggttcgctagtgcggatttctag

SEQ ID NO: 510853 - DNA, 1038 bp, Stenotrophomonas maltophilia
atggactacacaggccttgattttggaaagctgaggtttccaaagaatagacccgtcacgactgaggagcgggtaaaccagttaagcaagtctgagcgcgcttcgggctcgccaaatgggtatttatctgttatatcgatcggtgaagattgcttggagcttgttgatcgatggtatcccgtcaagggattcaatgcgtggctcggaatgatgttgggtttgatgattattccagggtttttctattttatttttgtattttttagttctggttattcaatcggggacgtggagtcgtggataatatggctttttgttctggttgctttgcctgtttttgcgttcattgtttgcggggtttcatggcttataagaagtgaatgctttcgttggacgcactatccgatgaggctgaatcggcgcactagaaaggttcatttattcaggcaggacggcacggtgttaactgcagactgggatagcctgcttgtgtgcattgcgtcagcgcactcgccaccaatgggaaaaactagtgatctcagagcacacgttctttctgatgacggaatgacggttctggagagttttacgctggggtatgtgttccttggtggcgaggaggatttgcttcatctgtgggagcttgtacgtagatacatggcgcatgaggcgggtggtgaattgatgggggaggatcccgtatttgtgccggtacttgggcgcaaggaaggctttgagtttggcgttgctagaacgttcgcgccaatgattcactggcccttgatgcagctggttgtcgcgctacccttcgcattcattgcgctgtcacgttggcttgcgatgagtactagtcgcatacctgaatggcctgaggaggtcttgcgagaaagtgattcctcgatgagttctgtggggcagctcgactggaggaataacgcgcctcttggatttaaagacaaggggtggccgctgatttgtactgccttgggcgtactccttggttgctctattgtcgggtatatcggcgctgcgctttga

SEQ ID NO: 510854 - DNA, 981 bp, Stenotrophomonas maltophilia
atgcggtcgataggtgttggtctagttttcgctgttttctctgtaatctatgcttttgaatccaaagcggaaacagttacatatattcatactgatgctctggggtcagtagttgccgagtcagatgagactggccgggtgacaaagcgctatagctatgagccgtacggagcgcagattggaactggtattgaagatggagtgggttacgccgggcacgtgagtgattcggcgactgggctgagctacatgcagcagcgctattacgatccaggcttggggcgtttcttgtcagtggatccagtcacaatgtacgggaatggagatgggagacatttcaatgcctatgcatatggattcaactcaccctacacattcaaagatcctgatggccgttgtccaatctgcccagccctgtttggaggcgccggtggcatggcggtggactatgggattcagaagtacatgaatcccggaaagccaattaacaagacagagctggcaattgccggcgttgctggagttgtaactggtggtaccggcggcctggtggttggagccctggcgagagggacgatttcgatcggtcaggtcgtagcaattcaagcgacggtgggtgccgcgactggtgttgcgggtacggctgcacagggcgcaatcgaaggaacaccagtgacaagcgctcaactgggcttatcggctgtcggcgggagtgttggcagtttggcgggcagcggaattggaaaactcgctggagacttttcgcaggcgtctactcaaggggcagtgagtaatatgatgaaggcgccagtgagttcacctgctggcatcggtgcacatattgcagaggcgactgcgagcgccggcgcaattggagcaaagcaaggggcggtacagggtgcattgtctaatgcgggccaacgcggtgctgatgccgcagttggaactggacagaaaatcgctgaggacaggttgaagtga

SEQ ID NO: 510855 - DNA, 1752 bp, Stenotrophomonas maltophilia
atgaacgactcgcgacgcacgctgtcaatgccaaatcactcagctggcaagaaccctatcatcgatataaatcacgacggtgtgatcgtaatcgtaggtgcaaatggctcagggaaaagccggctcggagcatggatagagaacaaatcttctctaaccgggcagcagttttcccccacaaccacaagaacagcctatcgaatcggagcacaccgcaatctccatcttccaaacgtagcccagagaaccgatattgaaaccgcgagacggaatctccaagatggcagcgagatgggagggagcacctacagcaggatccaaggagatccagtcgtgggacagacacaggatttcggcacactccttacggcactttttgctgaacgcgtaaaaaacgcgactgactatcgcgagaaaggaattgaaacaggcggaaatcaagggaaaccacttcccgatgcacttgaaaatctagcatcactttggaattcaatattcaaggaacgcagactcgtagttgcagaccattccataaatgctcgatctataggtcaggccgacgactactcggcatcctcgctaagcgatggagagcgtgttggcttctacctcatgggacaggtccttctcgcccctagagattctacaattgttattgatgaaccagagctccatcttcatccgagcatccaagcactgctgtgggacaatcttgagcgatcgagaagtgactgcacgttcatctacattacgcatgatcttaccttcgcagcatcgcgcagaagggcaaaagtcattgttctgactgactactgcgccccttcaaaagggcccgatgaccagagccaaatcccccaccaacgtccattagggcgatggatatggcaacttgcaccttcggtaaccggggttccctctgatgttgtcctaaagataatgggaagtcgacgggaaaccctatttgtggagggaaaaaccgggagcattgactcaatcatatatccgatccttttccctgggtatcacgtcatacatggcgggtcctgccatgaggttgagaaagcggtcagatcgtttcgattgcagaagaacatccatcacttgaacgtccaagggattattgatagagacgacagatccacagcgcagatcgccaaactcaagataaagggcgttcataccctaccagtagcggcagtggagaacatctttgcactacccatctgcactagagccttccttgagaatcgtggtatcgacgctgagcagattgatgggctcatcggcaaggcggagtcctcagtacgcgagcacctgcgatccgttatggactgggcaatcgccgagcaagttcaatacacattgcgcagagaattccagaaaatcaaaaggacaaggggggaggacaacttggaagggataattgaagcagttaataagacaacctcccgcatcgatcctgaagctatttttgttaattgcaaagcagaattcgagtcatcactcgacaacaccgagtcgttccttgatttacttagaaaattccgaaacaagggaatacttgacaagattgcgagcacctttggaacgaccgaggatgaatacaggaatgaactactggatctaatttcccgcatgcctgagctgagaaagcacctccgatcaatgtttgacctcccagatgtgcgtaaccagcccgataacattggcagctcagtgatcgcagcaggttcgatcgcggaaccaaagtga

SEQ ID NO: 510856 - DNA, 351 bp, Stenotrophomonas maltophilia
gtgtcagcaacgactaccccgagaaaagccagtcccgccaaggactggcatcccgccgatgtcgtagcggcgctgcatcgcaaggaaatctccctgcggcagctcgcactactgaacggctacaccaacgctaacagccttaatacagcactccgccggccgtacccgcaggcggaggcgctgatcgccgaggcccttggaaagaagccccaggccatctggcccacccgatacgacgccgacggtaaaccgaaccgtggctcaggaggccgcaaaccgctgctgccccccgatgcaaagcctagcagcctgcggacaggccgcaatccacaaattggcgccccgcaatga

SEQ ID NO: 510857 - DNA, 453 bp, Stenotrophomonas maltophilia
atgaagaagcatgttccgttccccaagtcgctgcagcagctgctgcagcgaatcctggaggcaatcgaccaggcaggtggctgcatgacgcgcgtccagctggccaccaccctgcacgatgcgcgcccgctggacatcgacgacaccctggaggagctgatcgaccgcaaccaggtcgaacgccaaggcaatgatccgcagatgctctggctggtccgtggctccacgggcaccgagtttgctgccgtgccggagcccacgctggccggttgcgagcggtcactgcacaacgcccgagcgctcgccgtggatcgacgcctggaagccattgcccaggatgttctggacacggcactggatgcccgcgctgccgggctgccagcgcccttggtgcgactgctgatgcagtgcgatggcgccctcagcgaagcccgtaaccacctcaccccgtga

SEQ ID NO: 510858 - DNA, 453 bp, Stenotrophomonas maltophilia
atgtcggcgcataagaaatcaccactgagcacagaacagtgggcgcaagtcgagaaggcacttgcgacgccctacggcggtgacgtggagctgatcgctgatgaacaccggctggtgatccaggtacggcagatcaagacgctgcgatacgcggttgtcgtgttcgttgatgggaagataaagcaggagtacatgcaggaaagcagccccatcggcgccaagttctaccgcccctctaaaatctgcatctatagcagggctcagcaagcgcggatggtcaagagcctgggcaagcgtcgcactgccgctatggtcaagcagggaacgggaacgttctacgatcccggctggccttcggcagctgccctgcgccgtcacctcaaccgcacctgcacaagcatcgagctgatccgcgctggatggtcagcacgggtgccggagggtcacctatga

SEQ ID NO: 510859 - DNA, 363 bp, Stenotrophomonas maltophilia
gtgattaagtggatgggtgcggcggcattgggccttgtcttggcttccggcacggcgtgtggcagcaaggacaaggcgctggtagctgaagctcaggacgcggtgaagaagctactgaaagatccaggatctgcggagtttcgcaaagtctctgttgttcagctgcgcacgccggccggcccagctcccatcgtctgcggtgaattcaatgcaaagaatggattcggcgggtttgctggattcgagcccttcgcctggcacccggacggaacgctgctgacgaaggctgcgttccccggtacagatgaggttacgcttgacggcgcaattcaagagctttgtacgggcaacctggtcaagtag

SEQ ID NO: 510860 - DNA, 204 bp, Stenotrophomonas maltophilia
atggcgagtgcctggcactgcctgcaggcgaccgactgggacgatggcgccgcactcctcgcattcggtatcgcgcatcggcttgggcgttggttgagggttgaactgcgggcggctgagcctgaaacgatcccaggcgcgttcggttactacgtcggcctggtcagcgtcgtctgccactcgggtgcctcttgccttggatga

SEQ ID NO: 510861 - DNA, 2793 bp, Stenotrophomonas maltophilia
atgaaccggaaagtattgctcgttgaaatcggtggccagggcctgcctgcagtcacgcctgtgacccggcagccctccaactgggtggcgtcggccaagcccgctgttgtggttcctccagccgaaggcgtggagaccaagccggcagcagatagcgtgaccattacctggaacgcttcgccgctggctggcgctgtctatgtcctctggcgcgcagccgatgcgggcggtaagccgggtgaatggaagtacgtcaccaaaacctcagacacgcgctacacctacaccgaggccagtggcgttgtgagctggtggaaggtcactgtccaggttaacggcgtgtcgtctgcagactccacgcccaaggctcaggcccctgtggtcccgccgaccacggcggacctggtccagctgcagggcaaggtggaccagggcctgcgcgacctggcactggcagacgctgccgaggcacagcagcgaatggcggacttccaggctgcacaggcgcagatcctggtagagagtcagaagagtgcggccgccgtgggcgaagtggccaggcgtgccgaggatctggccaccaaccttgccaatgaggagcgtgcccgaatccagagcgtgctcaacgaaaagaccgagcgcaccgcagacatcagtgccgtcaacacgaaagtccagaacggcctggattcgatggcgcgctctttggccgaggtcgccgcaggtagcggcacccagttcgactctgccggaatctggcacttcaacgccgggctggaaggctggacgggcgtgtatggaaccccgactatcgccgacggcatgctgcggccgatcaacacggccaacaactccggcatccagtccccggcgccgctcaacatcgacggcgccgcctatcgcttcatcaagctgcgcatgcgcaaggtgggcaatcccgcctggatggggttgattcgctggatcaccgccgccgaccaggagtggaacgaagcgaagtcgctttccatccctgtgccggcattcgacgccaacggcatcgccgtcctggacgttgatcgtctgccttggaacggcccctcaccactgcgtgccattcgtctggcactgacgggtgcgcagacctccagcgcctacatcgaatacgactggattgccgtgggtcgcccatcgcctggcgcatccgtcgccatggtccagcaggagagcgacgcgcgtaccgccgccctggcggccgaggctggccagcgcaacacgctagccgtgcagatgcgcggcgactacaccggcaatgatccggcgaagctgacaggcggcctggcctataacgaaatgagggcgcgtgtcggcgcggacgaggccctcagccagcgccagtctgccgtggaggtccgcctacctgcaggaacaggtgcactcgcatctgaggccaaggtcaattccgtcgagcaagccagcctcactcgcgacgaagccatcggccaacgtattgaccaggtcaatgcaacgttgcccgcgatgatttcccagggcgccaacatgatcctcaacggcggctggaacgccggcaaggacgtgggttggacgtatcagggcggctcgcagctggccggtgtctcgtggccggctgcagagggtcgaagcggcagcgcagcgctgcgcatcgatggcacgggctccgcccgtacaactgtcgcgcttgcgaacgcaggcatgaccatggccaccgcgcctgcaaagaagtaccgcattagttgctggtacaagaccagcgctacgttcaacggcaccgcaggcgactccaagctcaggcttgctgaccaggcatccgcctggcttgcagaccgaccgttccttgcgaacaaggccgattggacgtacctggagttcgtctataccgtcccggcggccaacgttctaggcctgcgcctatcagttgcatgcaataacactgcaggcacgctatgggtggacgatgttgccgttgaagaagtgaccgagatcctggcagttgccgatgggctcagttcgctgagcgggaccgtcacccagcagtcgggcctcatcaacgcgcagtcgggcctcatcagtgccctgcgcaccgacgtggacggcaaggcaaccaatggcgcccttcaggcgctacagtcccaggtcacgctccaaggcagcaccatcacgagccttggcaccgcgatgaccagcgttaccgcatcgctggccaacatcggcggcgataacctgctgaccgacagcagtttcgaaaccagcaccaaccagacctcgctgctgccgaactggcagacctcctccaccggtgccaccacggtcagctacggcgatagcctgctgccgggctcgggccggttcgtgagcgtgtccggaacgttggtaagctccagccagtatgtcggtgtggagccggccaccgcgcttcggcccaaggtcgtgcccgggcagaagtacgtcaactcggtgtgggccaagggcacgcctggcgcaacgctccgcatgttcgtgcagttcctcactgcgggcagcgcctcgggcctgaacgttgtgtctcaggacttcatcctgaccgacacgttccagcggtacgtgatgaaccccgtggtcgcggcggcaggctctgcgctggtgcgtggcatctatcgcatcatcggcggcgctacgtcggcaacgctccagctcgacctggacaatgcagttgcagcagggcgaggtcgccacaaactggacgccaagcgcaacggagattgccgcgcaaacgagcgcaaatgcgaaggctaa

SEQ ID NO: 510862 - DNA, 2649 bp, Stenotrophomonas maltophilia
atgggcggcgccggacgcggcctcaatgtccaggtggtcaacgcggacagcactttggggccccggcagacgtttgacacctacggcaacggcgcatcggcctgcgccagcttcaacgattggtacgacaatgccttggccgagaatcagtatttcatcctgttcaccagcgatcacactgggccgctgagcaatggcgtcagcccagacatcgcgggggccagggaccgcctcgttgatgcaggggcctcgcgtcgcaacgtggatgccctggacggcatccgcatgtttgtcctgatcggacgcaagcgcgctggtgaagcggccggcctgcagcgtctgtcgccccgaccctcgaccgcccgcgccgaccaatgggttgagctcatcgtggaattcgtcaacgggcgcccacagggcagcctggacttatctgcgctggagcgggccacccaggcaaacgcggctgcaacgtcgagcctggaagcgctcaccctggccaacgagaacagcgtcacctcgttgggtcagtcactcaccagcgtcaatgcgaggatcgacgcaatcggtggtgacaacctgctgtggaacagcagtatggaagacgcccccgtggctaccgcagcaccaaccggctggaacctggagcgcatccgaagcgacgtgggaggcactttctccttcatagagtccccgctgagcggtggcgggaaagcggtgcgcatcgactggaacgccatcaatgcgaaggattgggtaggcctgaatcgagcaggtccgggctccaactatgtaaaggtggaccctaacaccgactacaccttgtcctcctgggtgcgcggtacgcctgacgcgcgggctcagctctacgtgcagtggatgaatgccactggtggcacggtattgggcactgtgaccctgccggaggtgaccatgaccggcaagtggcagcgcctgctcctccctgctcgctctcgcggcgatgccgtgctcgcccgcgtttacgcgggtcgcctgttcgcgcagcaacctggtccgcacgccattgaaatcgacaacgtgcagtttcagcgcggcctggtggctaccgagtacgccccaagcagcatggaatctgctgcagcggccatggcaaacgctgcggcgacggcgggccttacttcgacggttacccagcaggggcagcagatcacgtcactgggtcagtcggtgaccggtgtccaggccgaggtgaagggaaaagccagcgcatctgcagttcagacgcttgaggcaaaggttaacaaccatggcagcggtgggaatctgctcatcaattcgacgttcccgaagtatcagcgcaacggctggggttggggctcgaatcctggtgcagcatgggtagagcttggcgatccgactcccggcaacgacagtttccatccccctggcatctatggagtcggctcgacctccggtggcactacctcaacgcaaattgtctggtggggaactgagtacggcatccctgtcgaagccggccaaacctacatggcttccgcctggttcaacactcaccgctgctcttgctacatcgagatcagttactgggacaagacagggaactggcttgcgcaatggggctcgccggaaacagggcatacggggaacagtggcccgccactgctttccgagatgccacgcccaagcatcaagaccgttgcacctccgagagctgcgctcgctcggttcaggatcatcgtcaagcccaacggggaggcgtggccgtacttctggatgttccgcccaatgttctcgcgggttgagccagatgcgacacaagcaccgccgtggaatgccggcggctcggagagcagtgccaagtggggctttgcactcgacgtggatggcactgtatccggcatggagatggaggcgaccggggcaaagagtgagctgaaaattctctccaagatcctgcgtctcataagtccaggtacaccggacggcatggagatccaggacggctacctgcgggtctggcgtggcaacgcacaacgcatcatcggcaatggattcgggcccgatgggttgatcgactactttggtccgaacgtcggcgctgctggtgccaccaagcagaatgcgacagtgtggatggatgtaaatgggagcgcctactggggcggtgccatcgcggcaggcatccgccgcaatgcggcgcagtccaccacaacgcagaccctcggcgtttcaattgtcgttggtcccttcagcaccagcggtcggaacaagaacgtagttgtcagctatcagcggaccgtgacacgcaggcacgggaacatgaattccactggctttgtcgcgggcggcggacggaatgcctgtgcggtcaacgtctaccgcaagctcggcaacaacgctgagcagttctggaccagctttgaagccagtggcggcgtgatgattatgaacgagcgcgacggccccgacattgctacttcccgctgggcaggctctgtaaccctcaatgacagcgaaggcacgcaagaccgcacctaccgcgcagagatcgtcggtttcagcgaacaggatgtgagccatcagtcgggaagtttcaccggacaagacatctcggccagcctctccctggtttcaatcgaagagtga

SEQ ID NO: 510863 - DNA, 600 bp, Stenotrophomonas maltophilia
atgaagaggtttctgacgagggtgattctgatcgggctagcgttgcttgctttggcaggtgtcgtgctcaagttcatggatttcaggatcggaccactaccgtccggtcctccgaagccacgcatcatcgaatctgcttctggtcacgatatcactgacgcgccaccggagatgtcattgagaatcggcgtagccaactactcggatgacgggttggggacggtcttcattaatgacgcttgggcgggtgggatggagccacgagccagtgggaacgctgcaacctgctgcgtaacattgcctcgtctctggcatccggggttgaaggtgacggtggtctaccgcaccagtagcatgtttctcaaggatcctcagagctacgttgaaagtgatatctctgtcgcgccctacaggccgtttctagatggattcatttattttttctactttccgggcgacaaagtgagggtggtagctacaccttatacgcccggttatcccgggttcgcatacgacattcagtttgcagggcgtgagcgtgacgaagcaaagattgaacggtttcttatggagaccgctgctgaggaggtaatgcaatga

SEQ ID NO: 510864 - DNA, 5106 bp, Stenotrophomonas maltophilia
atgaatcacatctatcgtcgtatctggagtcatgcaaagcaatgctgggtggttggcagtgaactgagtgcgtcgcgcggcaagcggtcgtcaaccaaaattcaagcgcttgctttgctggttgtcacgtcgacggcgttcgctgcatcagcaaatgagagcatggagcctgcgcctgagagtgagaggtcgatcgaggcagaagtggagcgctttctggatcattctccgatggtgtcttcgctctttgcagcgcagccgcgcgcagtgcggacccaggtggcgctggtcaatgacgcctactacaaggattcgacactgaatggcgacatgcagatgatcctggggtcgcgttccagcatcaatggctgggggtctgtggtctacgggacggcatcctccctgtcgggaagagggagcgttctggtagggaatgaagcgtttgcaaacggggatagaaatgtagcggttggctacaaggcagaggcaaagagtggctactcgacggtgctaggtgcgagttcggttgcgtcgggtgttggtaccaccgctgttgggcacgatgcccatgcctactctcagaactcaattgcagtgggtagtggtgctcgcacagttgagagcacagccggagtttcccgaattgcaattggcggaaatgcatttgcggggacggcgggctattccggggcgattgccttgggcggaaactcgcgtgcagagtacagcggagttgcgcttgggcaccatgccaaggcactcgcagatggctcggttgccattggtgcgagctccgaggcgacagagacagattcagtatcggtcggtagctcaacaacgaagcgacgtgtaaccaatgtggctgacgcgcgtttgagtaacaccagcaatgacgctgttaccggcaagcaattgaatgcgaccaatggaaacgtcactgctgcacgctctgtggctgactccgccaaggtgaatgccgatagcgcgttgtcgaaggccaatacgctttccggtcttctgagccagacatctgccagcagcaatgttcggatgggcgcaagcaacagcggtaccgttcttgatgtccggaacagcgcgaatgtcaatcgcaagatcaccggcgtggcagacgccacgctaagcaccacaagcgctgatgctgtgtcgggcaagcagcttcatgccaccaataccaagctgggtgtcgtcgagaagactgcagatgctgcgaaagtggacgtgtcagcggtacgtgcccttgcccaggccgccacgaatcgcatcgatgcgacgaccttggctctgggtagaggtgcaaccgcagagaaaggtagctacggcatcagcaccgcactcggcaacaacgccaaagcgtacaacggccgcagcatagcgctgggcgacgacgcgcgcgctggcgtggatgcggacggcaacaaagtggccaaccagaacgcgggtgtctcggtcggcgccggaacccgtagcgccaacggcgccgttgcaactggcttccgtgcaaacgcaagcggcaacttctccattgccgtaggcggcgacgccaaggctgcggctgagcacgctacggcggttggctatctgagcaaggcaggcgccagccaggcgaccgcactggggcgcggcagcgaggcgacggcgcaattcgccagcgcactgggcaacctggccaaggctacgaacaccagctctgtggcgctgggtgaccgcgctcaggcttcgcatgagaatgccgttgccttgggtgcaggtgcagtgacggcctcggccaattcggtatcggttggcagcgccagcagaaagcggaagatccagtacattgccgatggtgcggtgggtgccggcagcaccgacgccatcaccggcaaccagcttcatgccactaaccagaccgtgaccaaggcccagacagcagctgacggagcgacgaccaccgccaatgccgcaaaggtggaatcgggcaaggcactggccgagacggtggtgctgggtggtctggtcagccagaccgctgccaatggcagtgttcgtctgggtgagaagaacagtggcacgcagctggatgtgcgcaacagcgccaatgcgaaccgcaggattctgggcgtcgccgacggggccatcagcgcgaccagcaacgaggccgtgaccggcaagcagctccatgaaaccaacgcgaacgtgaattcggcacagacgacagccagcgcagcgaaggtaagcgcggacaaggcgctggccgacaccggagtgctgaatggccttgtcggtcaagtcgctgtcaacggcaacgttcgtgttggcgagaagaacagcggcaccatgctggatgttcgcaacagcgcgaacgcgaaccggaagctgactggtgtggctgatggagtggtcagcgccagcagctatgaggccgtcaacggcaggcagctcaacgccaccaatgacaaggtggcgacggtggagggcattgccaggactgcgggtacggaagctgcggccgcaaagggggatgcgtccaaggcgctggccgagacagcggtgctgggcgggctggtagcacaagcttctccggctggcagtgtgcgtctgggtgagaggaacagcggcggcctactggatgtgcataacagcctcggtttgagtcgacggattacgggtgtcgcgaacggcgttttgagtctagggagcaacgatgccgtgaatggtgggcagttgtatacgaccaacaccgcagtgcaggcagccacggtcgctgttgaagaagccggtcgtaggatcggggagattgaggggaaatcgaaattcatggcggttggcgcgccgatagatgatgtgaaggcgcaggctggtcgcttggggattgcacttggagattccgcggaggcgtcacttgttggcgagggtggtgttgctatcggaagttatgcgaaggcgcgggcaacaaactcggtagcgatcgggcgcgcgtccggagttgctgaggatgcggagaacggttttgcattaggctcacgctcgcgagttgaggaagcgaatgggctggcggttggcgcaggcagctacgtgcagaagggagctacgaactccgttgcgcttggcaatggttcaatcgctgaggaagcttccacggtttctgtcggtggtgggctgctaaagcgccgacttgtcaatgttgaaagaggcaccgccgaccacaatgccatcaccgtctcccagcttaaggactccatcgccaccctcggcggcggcgcaggcatggacggcaacggcaacatcgtcgccccgagctacgcggtgcaaggcggaatgcagaacaccgtggaggatgcgctgacggcactcgatggcgccgtcatcaccgccggccgtcgcgcggacaaggtggaaggtcagctcagctcaatcttccaggattcaccttccgcccgtgccgacggcatgagccagatcgcgctgaatggcgttaacggcatggtgctgaccaatcttgccgacggccgagtggcgccaggaagccgtgatgccgtaacgggcaaccagctgtacgccgcagagcagaagatttcgcagaatcggaatgatctggaggcgatgcgaaaggagcgggagatggggcagcaggcaatgcgagggttggatgcaatcggcccaatcgacttcggtggtgcgcgtttgactggcgtggccgaggcgaggctttcggctgacagttcggatgttgtacgcggcagtcagctctatgggaccaatagccgcatttcggaacttgagggcgacgcgcagtttgtgagtataggctcagcgcccatcagtgagcgcgcagcagccggtgtggcaggcgttgcggtcggaaattcagcaaggactggactagaaggaggaaccgcggtgggcacgtttgcggaggcgatgggaaggaactccaccgcaatcggtagagcggcgagtgtctctgtggattccgagaatggattcgcaatgggagtcggtgcacaggtcggtggaggcgcgggcggtgcgaatgaaggtgtcgcgattggtgctggcgcaagagttggaagcggggctcacggctcgctggcacttggaaatagttccctagcagatgaagaaggagttgtgtcatttgggggcgtcggtatgaagcgccgcctcgtgaacatcgccaacggcaccgccaaccacaacgccgccacggtcggccagctgcgtggtgcactctccgccctcggcggcgaggtggataccaacggcaacatcgttggcccgcgcttcaatgtccagggccagacacagtcctcgttgaatggtgcactggaggcgctggatggtgcggtcgtcaccagcacctcgcgcgtggacaaggtcgaaacccagctccgctccgtcttccaggacactccctcggcccgcgccgacggtgtcagccagctcaccctcgccggtgccaacggcatggttatctccaacgtggccaacggcctgatcgcggccggcagccgtgatgcggtcaacggtggccagctgcattcgatgcagcagcagctcaatggccgcatggatggtctggaacagcgcatcgacgaggccccggcaccgcgtgccctggcgtcgtcctcggtgccgaagccgcaggccgaggaaactcctgtggtaccggaaggcaaggactcccagcaggtcgcctcggtaggcgaaggtgacaagcccacgccgcagccgaaggccaagcaggacgaatcgccgaagccgcaggtcgacaccgccgagctggagaagatgctggcccgtgccaacgagtacaccgatggggcgatcagcaattttgaacgccgcctggacaagatggacaggcgcttcaaccgcatggcggcgatgagcagtgcgcagagcgcgatggcgatgaacaccgccggcctggccacctacaaccgccttggtgcgggcgtgggctacagcgagggtgagtcggcgatggcggtgggctaccagcgcgtgctcaacgagaaaggctctgccaccttcagcctcaatggggcgttcaccaacagcggtgagcgcagcatgggcgtgggtgtgggcatcggctggtaa

SEQ ID NO: 510865 - DNA, 501 bp, Stenotrophomonas maltophilia
atgcacgccattctcaagaaggccgcgctcgctgcagcgctggccacggcttcgctgtccgcgcacgccgtggaaaccaagatctccgtctacgccgacgtcgacccgaccctggccctgctgcgtgatgacggcagcgcactgccggacgccgtcaccctgacccacgatccgctgcgtggcctgattccggacacccagcacgtgcgtatccactccaacgacgacaccgctgatatcgaagccaagatcggtggtgcattcgtgttggccaacggtgacggcaagatcaccgtgccgatgacggtcagcctcaacaatcgcgcactcggcctcactgccgtcgaattcaaggcagccgatctgttcaccggtgccggttcgaccccaggcgcctcgatctcgatgccgctggtcatcgcccagaccgcaccggcgccgcttacgacccaggggcgctactcgggcgtcgtgaacatcgtgctgagccagaagccctga

SEQ ID NO: 510866 - DNA, 585 bp, Stenotrophomonas maltophilia
atgcgcaaggatgaccgcgttgctggatgggtcaccgaacaacgcgacaaccgctatgtcgtcagtatccttggaggtgacagtagcgtgctgtatcgggtagtcaccgacgacaagggaacgcttgccggtcctgtacagaccctgtcgccacccgagccactatcgccttatgaggccggcgcggcagctgcgcgtgcactggcattgagcagcaagtttcaagcgtgctcgaagaactacaacacggtcgtgctaccgaacgtggacggcacggcaaatgcctggagtgtctacctgcttcccggcacattcgatcctgcagcggtgcctctggggggaagccatcgcgtggaaatcgcggatgaaaagatcacttccagccggccttacaccctctcctgcatcacgctgcagcgtccaccgcggaagggtgccatgatggtgacccacctactcgatccaacgccgaccgaggtccacgtttactggagtctctgggcacgcgcgccactgttcgtgagtacggccaaggacgtgatctggaagattgagaacggacatatcagcaaagtcgtggactga

SEQ ID NO: 510867 - DNA, 153 bp, Stenotrophomonas maltophilia
atgatcaagtgggccatcatcttcgccatcatcggcgtcattgcgggcgtgctcggcttcggcggcatcgccaagttcctgttctgggccggcatcatcatcgcggtggtgctgttcctgctcggcatgaccgtagcgaagaaggtcagctag

SEQ ID NO: 510868 - DNA, 390 bp, Stenotrophomonas maltophilia
gtggtgcacgagaacgtcatggcggtgatctacggcctgggcaccctgtgcctgctcgcctttctgcacctgcagttatcagcctggcttatccccagctgggtccgcgccttctatgtgcccggcggtcgctggcgcaccgccggcgtggtcctccaggtgctggcctgggtggcagcggtagcgatcactatcgccggcgtggcgatgctgctgtcgtggatgcccgggaactgggggtggaccgacgaggttggagccttcaccccccacgcggatgacctgtcaacttgggccggcgtgtttatgggatccggctggatctggtcgctgctccaggcaggccggaggaaggccggcgcgggcagcgtgcagcaggtccagggatag

SEQ ID NO: 510869 - DNA, 543 bp, Stenotrophomonas maltophilia
atggcattcctgcccggcattgagttgaatcgcagcagcaagatagcgatcggcttcggacctcgtggcgaggatgagattttcgacggcatgctgggaacgacctcgcgttacatcgaggatttcgacttcgcacgattcgatgccttggaggcgcactgcaaggaggaggcgctgttggaagcactcactgacgtactgctcagcttgcccggcgctgatgcagtcagagagcatattgaagcggcgcgcgtgcagaccctggaaagcggattcacccaccgggcgctggtcaagaagctgagccagcgctccaccacgcatgcggtacgcgtgcatcgcgtgctgggccgtgcatgcggtgaaacctggtactgcgagattatcgaccgcagcaacggaagccgcgtcgaggtaccgatgggcgacacgcccggctatctggaccgacgcgagttcttcgccagttcacgactggacgatggggcattcacggtgttttcccggttgaagagggaatcgttccggcatccattgggctag

SEQ ID NO: 510870 - DNA, 612 bp, Stenotrophomonas maltophilia
atgatcctgagctggaagaccccgatccactacaacgagaagctgattggcgcctatgacgcccgcatcggctcctatgaggcgtcctgctccaacttcgactacctcgccctgctggacgggcagccctatccgcgagggatggacaggccacccgtgtttttccagtgcagcgcacagaagctgctgaagtatgactgcctgtggctgctgggcggcattcccttgatatcggagcgtctggcggactttctcaacgcccaggcgccgactgacatcgagctcatcgaaccccggcatctggtggccgaccagcaggatgtcgatcaacggttctatatcgtcaacgcttccaggagcgtcgaagccatcgaccacgcccgctctgaagccgagcgggacgatgacggcaacatcatctacttcaaccagacctggtttctcgatgcgcccccggatatgggccggatcgcccgggaggcacagtccggggatctattgatgtcggcaggcctggccgatctgatgatcgactcaggcttcagaggcgacacgggattggggttcttccgcgccgaacggcgtttcatgccctaccgtggccatgcgtga

SEQ ID NO: 510871 - DNA, 624 bp, Stenotrophomonas maltophilia
atggaacgctctttgaaggaactgcgcaacacatttgagaatgcgctcaaagctcatctgaaactcgagctggcaggccattccgggctggtggtcagcaaaaacaaggtcgcaatcaagcatcggtcgggagctgttgcaaccctgcatttcgagtatctggccaacaccaggagctatgaaaccatcgtcctcgccgagcatccgatcctgcagatggaactcgaacgcatggatccgccttacccatccaacctggcaaacgcgaaactgatctattgcatgtcaaccgtcagcgagcgcgaggcctgccctctactgcctgtcacggagcaaggcgttgaacgtgtctgtcgcggattactccagaggctcctggagaccgacttgccgatcatctccaacctcttcgacctcagccccggactggtgaacgatgtgcttgccaggcccgagcgctactcctatccggttccaatcatccattccgccttgcgcagcaatggcatcagacccgatgtcgacactgttgcaaggatcctgagcgagaagaccctcggctacaccaaccatcgggaacagaaggattcgttcaacaggaggttgatggcggagctggagtga

SEQ ID NO: 510872 - DNA, 348 bp, Stenotrophomonas maltophilia
atgtcgcccttcatcaacactgcctggccgcgctttttcaccgtggcgctgcccatcgccctttttgcggttctgttgaacagcatggtcgatgcgccacaccacggctggctgatccagacggcgctcctgctggcgccgttctccatcctggtgttccttgggcttggctggcagcgtatgcgcaaggcacacgccgagtatccgatcctgaaaagcgagccgcaacggatgctggcagcgttgatcggcaacgtgaaggtggcggcgctgtggtttggcctgacgttcgccggcatgttcgccctgatgctggcatgggtagtgctgtacagcgccgccggctga

SEQ ID NO: 510873 - DNA, 1740 bp, Stenotrophomonas maltophilia
atgtgcattgtgtgcaatccaggggccgcagcattcctgcaggcacgtcgcgagtttctcggcgggatggtcgggttgggggcggcggtgctggccggggcggccgtaccgctggcggcgttctccgctacgcctgcgccgaatatggcagggccggcggatcggattttccatggtggtccgatccatacgctcgggcccaagggcaaggtgcaggctgtcgcggttcgccagggacggatcctggccacgggcagccgcgaggaggtcatgctgcatcggggtcgccagaccgaggtgatcgacctgcgcggcaaggcgctgttgccaggcttcatcgacccgcatatgcactcggcgatggcgatgctgtccgactgggtggacgtgacgccgttcagtaccggcacgctggccgaggcgctgtcgaagatcggtgccgccgcgagtgcgagcaagcccggcgaatgggtggttgcgcagggcatcgacccctcgctgatgcccggcaaggccatcacgatgcaggcgctggacgatgtggcggcccgtaatccggtattcgtgctggagtccaatgggcatatcgcctacagcaacacgaaaggattcgctgcagccggtgtcaccgatgcaacgcccgatcccgaccaggggcgctacgatcgagcgcacggaaagctcacggggcgcatgcaggaatctcctgcgatgaaaccgttcatggcggtaatgccgatgcccagcccggaacgctatgccgagctgatccagcagttgttcgcggacgcgagcaaggccggctgcaccagcctgcatgacgcaggcattggcaccggcggcacgacggacctggacgtgctcaatggggtgatggcgaagaatccacccatccgttactcgggattcctcacctccgatctgatggacgactggatcaagcgcggcctcaggcccggcgatggcaatgatcgattccgcctgaccggtatcaaattctggtccgatggctccaaccaggcgcagacaggctatcagcgcgagaactatctgggttcggacaagcgaggggcattgaactacaccgaagccgagttgatagccggagtgcagcgcgcccacgacctcggttggcaggtgggaatccatgcgaatggtgatgcggcaatcgataccacgctgaacgtctatcaggcggtgctggcaaagaccccgcgcgccgatcatcgccatcgcatcgagcactgcagcgtgctgcatcctgagcagatcgtgcgcctgggcgatctccaggtttcgccttcgttcctgatcggacacgtgtactactgggggaaagccttccgcgacaacatcctcggcccgcagcgcgccgatctctacgatccctgccggtcggcgctggcgggcgggctgcgcatttcgctgcactccgatttcaacgtcaccaccatcgaaccgctgcgctacatcgacaacgcggtgaaccgccgcatgcgtgatggcggcgaagtgttgaacccggaagagtgcatcagtgttgaacaggcgctgcgcgcggtgaccatcgatgcggcatggcaatgccgggtggacgacatcgtcggcagcctggagcatggcaagtatgcggacatggtcatcctcgaccgcgatccgctcacgatcgatccggcaagggtcatcgacctgaaggtgatggagacctggctgcagggggagcgccgctacgccgcgtga

SEQ ID NO: 510874 - DNA, 204 bp, Stenotrophomonas maltophilia
atgcgtgatctaaatagaactgaagttgcagagatttcgggtggttcgggcagcattcaattccagattggtcagagcaacggcactcacgtgcgtggaaacttccgcgacatcggagagatggcgtatcgctatggaagaatcgcgccctttagcggagtcggcgccgcaggcatgatctggaagcacatcatgatgaggtaa

SEQ ID NO: 510875 - DNA, 297 bp, Stenotrophomonas maltophilia
atgaactttgctgattacaacaaagtggttgagatcccagtgcgcgacgcacggcaactgaagttggctcaggtgcttcaggtccaagcgcaggggccggcaacggaatccgagatttcccccgatctctactatttgggcgagggtggcacctttgagggaaagtgcatggcggcggcgaagctcccggagtccgatgttgttgccatgatgcgaggcgaccatggccaggcaggcgagtccgcattcagctgcctcggattgaatcacgacttcaatgggctaggccctcaataa

SEQ ID NO: 510876 - DNA, 1593 bp, Stenotrophomonas maltophilia
atgcagtggaccgtggatcaagccctcgtcgcatatgacagagatttgctgactgtgctgggcgctggattcgccttggcgcttctgctgcaggtatgtattgtgcagattcgaggcagggcggtcatctatctgtcaaaccggctcaacctgcaatggaccggcaacgtcttccgccacctcctgcatttgcccttgaactatttcgagaagcgccatctaggtgatgtcacgtcacggatgggaagcatccaggccatccagagaacactgacaaccagcttcgtagaagcactcattgacggcctcatggcggttgtgaccctgggaatgatgctgctgtacagctggaagctggcgctggtcacgctgtttgcggttgccctgtatgcaattgcacgcgcctgcgcattcgcgcccctcaggcgaggcacggagaagcagctgattgccggggcacgacaggagagccatcttcttgagtcgattcggggagttcagtcggtgaaagtcgctggccgcgaatcagttcgccaggcgggctacttcaacctcatgaacgagaccgtcaatcaagacatttggctctcgaagttcgggctgagcttcggtggtgcgaatcagctgctgtttggcctggagcgcattgcggtcatctggctgggggcactactggccatggacaatgtgttctccgttggcatgctgattgcttaccttgcctacaaggaccagttctcgcagcgcgtcggagcgttgatcgataagtggatagagttccgcatgcttcgccttcacggcgagcgactctccgacattgttctctccgagccagaggacaacacctacaacgggaacgccctgttgccagacgggcttcgcattgaggtcgaagatcttggcttccgctactcccctggggagccatgggtgctgaagaactgcagctttgtggtggacgccggtgagtcggtcgcaatcattggcccttcgggctgcgggaagactacgcttgtcaagatactccttgggctcctacagccgaccgagggtcagatccgcattggcggcgtacccctatcaaggatcagcataggcgactaccgccgcatgatcggagcggtgatgcaggatgaccagcttttcgcagggagtgtcagtgacaacattgcatttgaggacaatcatcacgacgaggaacgagtgcgtgaagccgcggagttggccgccgtgcatgacgacatcgcggccatgcccatgggctacaacagcctgatcggcgatatgggaacgaccctctctggaggccagaaacaacgggtgatcctcgctcgcgccctgtatcgcaaacctcaattactcttcctcgacgaggcaaccagccaccttgatgtggagcgcgaaagactggtgaatgaggccgtaaaacagcttgaacttactcgggtgatcatcgcccatcggccggaaaccatcgccagcgccgaccgcgtgctgatcatgcatgcgggaggagtagcgcacgtgctgccccagaaaacatccagctccctggcgccggagcgaggtggtgcagcggagctcactgcatga

SEQ ID NO: 510877 - DNA, 201 bp, Stenotrophomonas maltophilia
atgaagatgggattcaaactgtctgttgttgtcaccgccattgcactgacgcttggaatcggcagcgcgaccgctcaaccggatcgctgccgcccttgtcacgacgcttatagtgattgcctggccgccggcaagggcgagaaggtgtgttaccccgcgttcgtcgcctgcatggcgaagggcaactgcgggctcccgtaa

SEQ ID NO: 510878 - DNA, 900 bp, Stenotrophomonas maltophilia
gtgagccggtcagctggcaccacctttggcgatgcagcagatgcctatatcgcctcccaccgcgctggctggaagaacgaggcccaggccgagcaatgggagcaatccttgcggacctacgggccggcgcgagatacgccagtcgggaacgtcgatactcacctggtcatggcatgcctgcgccctatctggaccgaaaagacggtgacagccacgcgcgtgcgcggacgcatcgagcgcgtgcttgactgggcgaaggtccacgggcaccgcgacggagacaacccggcgcgttggcgcggccacctggagaacctgctccccaaacctaccaaggtgaccaagccaaagcaccatgacgcgatgccttacgcggatgtgcctgtcttcatggccacccttgccggtcgagaggcgcgcagtcgacgggcgctgcagttcgtcatcctgactgcagccaggacggccgaggtaactggcgcggattggccagaattcgacctggaacatcgactgtggaccatcccagccagcaggatgaagggcggccgggaacacatcgtgccactgaccgacgcagcgttggcgatcctggaaccactgtcccgcaaggagccgccgttcgcgttgtccgagaacgcgatgctctacctggtgcaaaagcccgcaccaaaaggcttggggctgccattcaccgtccacggcttccgatccagcttccgcgactgggcagccgagacgacggaatatgcaaacgaggtggtggagatggcgatggcgcatgccatcaagaacaaagcggaggcggcctatcgccgtggccagctcttggacaagcgtcggcctctcatggaggactgggccgcgtatctggggctcggctcaaaccccgcgccgtag

SEQ ID NO: 510879 - DNA, 504 bp, Stenotrophomonas maltophilia
atgatctcctccacctaccaaggcttccgcaccgcgccgatcccgtctggctgggtccagaccggggagcgttgggatctgtggtggaacgggcgctcagtcgccaatatcactccggcgcccggccgcggtgtccggcttcacctggatgcgcgaaagatcttcgagaccaagaaggtttttgccgccagcgtgtctcagggcaagcgctacgccgaacgctggtgcgccgccaggctgtactccgacctgcctttgcgcgaggccgttgcccgcttgaccgacagcaccccgattcagccggcaccgccaccgccaagccttccgccaacccgcgagcagcagcaacaggcgcggcgcctggctgaggcaacggccaccgccacagccagggtcaaggaagcgttggagccggccaagccgccggcgaccaagccccgcccgaaggacgcccgcaaggcgtggatgagggcagggctgcagcagctacggcgcggggtttga

SEQ ID NO: 510880 - DNA, 1206 bp, Stenotrophomonas maltophilia
atgaacaagtacaagaccctggccgcgctggttgccaccgcgctgctcgccaccgccggtgccgcttcggcccagcagtccctcgtcaacggtggtggcgcctcgctgccgtccgacctgtacaagggctcgaccgacagcatcctgccgtcgaacttcagctacgccgtgaccggttcgggcaagggcaagcaggccttcctggaaaacaagatcgcgatcttcatcccgaccggcaccggcaacgtgcatttcgccggcagtgactcggtgctgagccagaccgagatcgacacctacaacgccgcctacaacagcgcgagctcgaccaccaagttcggcccgctgctgcagatgccgtcggtcgccacgtcggtcaccattccgttcaacaaggttgacccgcagggttccgctgtcgacctgaccgtggcccaggcctgcggcatcttctcgggcaagatcaccaattggtcgagcatcggcaccggccgcagcggcccgatcaaggtcttctaccgcagcgaaagcagcggcaccagtgagctgctgacccgcttcctgaccagcgcctgccagccggccgacgtttcgggcaccacccttaagctgactggcggtgttccggcgttctcggtgcagtcgaccttcgccaacctgttcaccaccgttccgtcgaacttcgaagccgccccgaccgctccgaacaccaacgctggcaccctgctgttcaacgccgtgaacaccaatgatggcgccatcggctacgtcggcccggacgtgatcccgaacctgaaggatgcgaccaaggttgccaagctgaagggttactcgccggatgaagtgagcgttgctgccaccctgaacaccattgctccgccgtccaccgctgccgacatcgccaacccggccaagtgggtcccggtgttcaccaatccgtcgaccggctacccgatcgccggctacaccaacctggtgttcggccagtgctaccgcaccgctctgccgcgcactgccgtgcgcaacttccttgaagcgcattacaacctcggcgccaccggcaccaacgatgccgccgtgcgcgcgcatggcttcatcccgctgacccagatctggcgtgaagcgatcgccagcaacctgatcgcggcttcggctccgaacggcctgagcaacgccaacacctgcaccaccggcgtcggccgctga

SEQ ID NO: 510881 - DNA, 1197 bp, Stenotrophomonas maltophilia
atgcagactcaacgaaagcttgcacttcttgccggtatcgtattgctggcagcagcgggcttggcttcggcgcagaagacggtggtcaatggtgccgctgcacccctgccggcagatgtatacaggaatggcagcgaaggaatactgccgtcctacatgagctatgtcatcgtggactccgcagtcggaaagcgggcattcctcgagaacgactttggcctccttgtccctggtgaaggcggcaatgtcgacttcgccgtcagcgagcaggccctgagccagactgagcttaaccagtacaacgctcgcttctactccagcacctctgcagtggtgcatggcccattgatgcagctgccttccatgctggcgccgatcgcccttccgttcaatcatgctgccgccgatgggtccattcttgatctgacgacgtcggtgctgtgtggcatcttctcgggcaagattaccgactggagctccactggtactggccgttggggcccgattacagtggtctaccgactggaaaacagtggtgcgacggagcttctcacgcgccacctgacctctgcctgcaggcccgcagatgttgctggaacgtcactcaagttgatcaatggataccctggattctcagtgcagtccaagcttgccggggcattcgtcgatggcagggtgcccacgaacttcatagcttcttccggcgctggagaccggcatgcctacaacacagtcttcgcgcagagcggtcgtatcggctataccgggcctgcgcaaataccggacctgaacgatgcgacaaaggtggcgaaggtgaatgggttctcaccgggagagatcagcgttcccgcgacgatgaaccgaatcgctcctccaggctcgtctgccgacctctgggatccgaccaaatgggcgccacagttcacctatccggatgcagggtatccgatcgttggattcacttatctgctgattccgcaatgctatcgcaaggctctggtcaagaacggtgtccgcgcattcctggagaaacattacaacctggggaatgcaggcactcacgatgcagccgttcgcgcgctcggatttgttccattgacgcctacatggcgggaggccgttgccttcaatcttgtttcttccacgtcccaagcaggattgggcaacgcgaacacctgcgcaggcatcggtcgctga

SEQ ID NO: 510882 - DNA, 12381 bp, Stenotrophomonas maltophilia
atgtcgcacacgctcaagaccgccccgaccacgctgttgcgcaaccatccaatggcctgggccatcgcgctggcgcttggcgcggcgccctgggtgcctgcccaggcccagcaggccttcagccccggctggttcgccgatcgcggcgcggcccagggcgcagcggcgcagagtgggcgcatgcccaacggcgtgccgatccagttccagttgccggcgcagcagcaggacgccgcacgccagaagctgcagcagtccatcgacaacctcggcacggcggcgcaggccattgcattgcagcaacggttgcaggaacaggctcggcaggtgcgacgcgatgctggcttcgtggtggccgatggcctgggcaaggatggcctgaaggttgatgagaatccgctgacccgcggctggttgaatgcgcgcgaggcgatccagtcccagggcagcgatgggcgggtccaggtcagcatcgagcagactgccgacaaggcgatcctgaactgggagaccttcaacatcggtggcaacaccacgctgagcttccaacagaacccggattgggcggtgctgaaccgggtcaacgatcccaacgcccggcccagccagattcttggccagctgaaggccaacggcacggtgttcgttgccaaccgcaacggcgtggtgttcggcaacaacagccaggtcaatgtacgcaacctggctgcggctgcggcacggatcagtgatggccagttccgtgacaatggcctgttcagtgccgacagcaataccgccgcactgaccgatgccttcggcaaggtgatggtcgagcagggcgcgcgtatcgtcacgcatgaacccggaacggccactcgcggcggcggttacgtgctgctggcaggcagcagtgtggagaatgcgggacagatcgagacccgcaagggccagacgcagctggcggcgggcgacagtttcgtgatccgtcgcggcgtcggcaccgcgcagaacaccgcttcgaccacggccggcaacgagatcgcgccgcgcttcgttcagggcagcagcgcgggcgacgtgcgcaacagtggcctgatccaggcgcgcgagggcgacatcaccctggccgggcgtacggtcgagcaggccggcgttgccgtcgccaccaccacactgggtcagcgcggcaccatccatctgctcaacgcgatcagtgatcgccagggtcaggtgatcctgggatcgggcgcgaccacagcagtgctgatcgaggacgatggcaagagcgccgtgctggacgcccagcgcgatgcattgatcaaggcgtcggcggagcaggatgccctgcgcgcggcaagcagcacaggcacgttcgacaacctgtcgcggctgcaggaccgccgcgaccagtcgcgggtggagattgtctccggtggcgacatcaacttcaaagatggctcgttgactctcgctactggcggccaggtggtcggcgacgcagcgcgccgcagctacgtgggaaatgcggcgcaggttgatgtctccggcgcagtcggtgtgcgcgtagcgatggaaagcaacaacgtgcaggtgaaggtgcagggtaacgagctgcgcgattcgcctgacaaccgcgacagcggcacgctgatcagtagcgaggtctggatcgatcgccgcgaactgcagcgcgtggccgccgggaccggtggccacgccgccgagcgctggtatgccggtggtggcctgctggaagtgggcggctatctggacaaccagcgacattcgattggtgaatgggctgcacagggtggcaccgtgcagctggccggagccgaggtggtgacccacgctggctccagggtcaacctggccggcggcagcctggacgttcagtccggcgtgatcaagcagagctggctgcgcggcaccgacgggcagttgtaccgactggatgatgcgcccgctgagatgcagtacgccggcctgtacaagggattcgaggtcgatcaccagcgctggggcgtcagtgaggccttccgcaatccactggtggcgccgggtgaacgggtcgacaacggttacaccgttgggcgtgatgccggccggctggtgatctccgcgccgactgcggtactgcagggtgacatcaacacccaggtgttccagggggcacagcagggcaagtcaccggatcagggcaaggatggctacgcgcaggcacagacggcggtggcgcgcaacgcacagctgtggctgggacgctatgacagcgcaggacgcaatgcggtcttcgatacccaggtgcggatcggggagggcgcgctgcctgcggccgactggaccttgcaggcgcccgtatcggcacagcagcgcaacaccctgtggctggatgcgggtcgccttagtgaacagcaatgggggcgcctggacctcgccactgcaggcagcatcgccctcgatggcaagctgcgcctgcaggatggcggacagttggtgctgacaggtagcgacatccgtctcggcggtgacatcgccatcgccggtggtcagttgcaggccggcaatctgttggccgtggtgggcagccccgtggttccgctgctgcaggccgggcgcggacgggtggaggtcgccgatggcgcgcgcatcgatcttgccgggcgctggagcaatctgctcctggaccccagcgcggcgcagggccaggcatggagcaatggcggcagcctgcagctggagaacagccatgatgtgatggtcgggcgtggcagcgaattgattgttgacgcgggcggtcgcgtcgacagcgcgggcaaggcacgcatcggcaagggcggcagcgtcagtctgcaggccaacaatgttgacaccggcaagggagatactgggcgtctggccctggccggcgacgcacgcatcagcgcgctgggccagggcagtggcagcctgtcgctgggcgatggcggacgcatccgaatcggcggcgaaatcgttgcggacgacgtgctggcactgcgcggcgagctgttcggcagcggcttcagccagtatgacatcaacgcccagcagggcctggaagtggctgatgatgcacggctcgaggtggtcatgccgagcctgcgcctggccagtgacgcactgaaggcgggtacccgcgaggacgcgctgcaggcatggctgcagccgctgtacagtgccgacccggtgagcgggcgcgtcagccagcgtgcgggtgccggcctggtcctgcgctcgcagttcggtaatcgcggtggtgacctgcgcatcggcacgggcgccaatgtgcaggtcgatccggcacagtccattgaactgcggggtgcgggcaacatcacagtggaagggcgcctgcatgcggccggcgggcggatccggctggatgacgtgcgcctgcccattgatccgttcgacagccagcccaacagccgcacctaccgaattgccgatggtgccgagctggatgtcagtggcgacgccttcagcgtggaggattcggcgcggcggctgcgcgggctggtgcgcaagggcggcagcatcgagatcgggggggcgctggattgggaaggtgccggtcaggtcagtgatcgcccggtggatgccttcatcgtggtcgagcggggcgcgcagctgcgcgccgatggcagtaccaaggcattgcacatcgatggccaaggcttgcagcaggtggacagcgatggtggcgagatcgtgttgcgctccgccaatgcactctatctgcagggcggcatgcacgccgcggccggcggtatcggcgcgcatggcggtacccttggcattgcgttcgtaggtggcaactacgcgaagggggccagcaaggatgtccaggtaccccggttcctcaacctcagccagaagcgcgctgcggcgtccacgccgatcacgccggagtacggcgaggcacggttgtcggtggagcagatccacgacgggggattcgacaatctgtcattgatcgctgcggtccgcagcgaaggagacatcgatctgcgaatggcgcagagcctgcgtctgtccggctcgatcggcctgttgccgggggcggcgccgggcagcacgatcgcattgcacgcgccttatctgaagctggccaatccgcccttgtcggcgatcagtggcaacgagcccgaggtcagtggcgaagcgccgctggcgaccggacggcagcatcggttgcaggccgacgcgcgattgatcgatatccgcgaccgtgtggcgttggacgggtttgacgatgtttccctgcgcagcagtggcgacgtccgcttcctcaagggggccaccagcgccggtgcactggatgccgacctgctggctgcgcaacgcctggaaatcaccgccgcacagctgtatcccgtcgccggcgcgtccgcccggatcggggtcggtttcgatcctggcaggtactccagagatatgatctggaagaacccaaccggcgtgcttcgcatcaaccgcctcgctgcggcggcgccagccgccccgctgtcggcgatgggcaacctgatgctggccgctgcgactgtcgagcagggcggtgtggttcgcgcgccgatgggcagcattaccctgggcggcaccgacagcaacctgcaggtcgcctcgaaggtctcgttcctgccaggcagcctgacctcgaccagtggtgcggggctcagcctgccctacggcggcacggtggatggcatccagtggcgccttgacggcgcagcggttgtcccacgcaacgtgggtggtggcgggttgccggtcggcatcggcgtcgtcagcggtcagaccgacgtggcgcgcggtgcagtgctggatatgaatggcgggggagagctgaccggcgcggcgttcgtcagtggccgtggcggctcggtggacatcctgcgccacgtcctggccgaagccaatccgcgctacggtttcagccaggccggcagcgaggtctacgcgatcctgccgggccacaccggcaacattgcgccgcagggcctgtctgacggtaccgccgatccgcgcgtgggtcagcagattgtcgtgcccaccggcgtgccgggcctggccgccggcacttacacgctcttgcccgccagtttcgcgctgcaacccggcgcgttccgggtcgaggtgggggcgagctctacgacgggttcggctacgccgctgcccactgggacgggctcctggcgcgtggcaggtcaccgcagcgacggtctggtcgagacggtctcgccgctgctgaccgacctgctgctgaccccggccgcgaccgtgcgccgtcattctggatacaacgaaaccagctataacgcattctccgccgccagcgcgcaacgcctcggcctgccgcgcggctggcagacggtcgacgcgggcatgctgcgcttcgaactgggcgacggcgccggccgccagggcgcgcccgcgctgcgcgtcgagggcgaggcgcgcttccaggcggccagcggcagtaccgggacggggggcagcgtggaggtgacgcgtgtcaattcggtcggcacgcttgagatcatcgccgcaggcggcaagactgatacccgccttgatgggtcgaccattgaggccgacgcactcaatgccttgcagccctcgcgcctggtcgtcaatgcgcgggtacgttcgacggcaccgtccttcatcaatgtcagtggtgtcggcggggacgtggtggtccgcagcggcgccgtcctgcgcgcaccggaggtgctggtcggggcggtgtccggtggcagcggcatcgtggtcgaagcgggggcggccatcgacacactcggccttggcaccgccgggctaccttccagtctcggctatgtctaccaggtgggcggagcgctgcttgcggtgtccaatgatcggcccgagatgctggcgcacccggcaggtaccgacggcgcggccgtcaacatcgatatcggtgggtgcagcccgcaagcgacctgcactggtcaggctcggctggtgtccgagggcagcatcaatgtgtccaccaatggccagctgcagctgcgcgagggtgccacgtatggcacgcgcgaattggcgctgggcgtgggcaacatcaatctgggctccgccgaagccattgcgcgggcagcagcagtggctgcgctgccgccgggcatgacgttgaaccagcaggtactgggcgacctgctgcgcggcaataccgccacgggcgcgccggcactggacacgctgcggctgaatgccagcgaggcaatcaatgtgttcggcagtgtggatctggatacccgcgacgcggcaaccggcaagcctgccctgcgcaaccttgtgctgggcacgcccgcgatccacggttacggcgacagcagtgacagggcacgcatctttgccgccgacctgacctgggccggccagctgggcagcgcgtcggcactcggcagcacccagacgccgccggccgcaccgggcattgccgctcggctcggcagtgggcagctggacatcatcaccgataccctgcgtctggcaccttcgccgcgttcgcagcccttgccggaagtggtggccgggcgccaggtgctggggtttgccggcgtcaacctgcaggcggcgcgcgaactggtgttcgcaggcaatggcgcgctgcaggtccatcagcaccagggtgactatgttgccggcaacggctggacgttcaccggcgggaatctggacatccaggcgccgttgatcaccggtgcggccggcgcgaagctgtcggtgaaggctggaggcacgcttgccgcgcgcggtgcaggcgtgggcggagcggccgatgcgctgggcgccgagctggacctgcgtgccagtgacattgtgctcgatacgcgtttcgctctggcctcgggcagattgaccgccagcgcagatcattccgtgcgcctgggcagcaacgcggatctggatctgtccggacgcaaggtcagcttgttcgatgtcgataactacagctggggtggcgatgtcgagctgactgctgccgatggcagcgtgctggcggatgctgcatcgcggatcgatgtttcggcgcgcaacaaccgggccgggcgactgaccgtcaccgcactcggtgccagcgacggtcgcgtggacctggccgggcagatcctcggccaggccagcggtcgccacgacgtcagtggcagcgtggtgccgtatgacggcggcgaactgctggtacgcgcgcagcagctgcaggatttcagtggcctgaaccaacggctgacccgcgatggcgtgactggcgcgcgcagcttccagatcaagcagggcgacctggtgatcggtgatgaagtgaaggcgcgcaaggttgacatcagcttggatggcggcgcgcttcgggtaaacggccgcatcgacgccagtggtgagcaggtgggcatcatccgccttgcggcgcgcgacggcctgcaggtggatggcaccctggatgcgcacggcactgcgctgcgcgtggacagctacggcagcatcatcgacagtccgaaccgcgccattgttgaactggagagtcgcagcggaacgctggcattggggcgcacggccaggatcgatctgcgcagcggcaccgatgtggtggttggcaacggtgcgggtcagaacgatggccgtgcgcgcggcacgctggccctgaacatgccgcgaagcggcgccgccgatgcgtccatccgcagcgaagcaggcctgcaggtgctgggagcacgcgacatcttcgccacgggtgtgcgccgctatgaagacgcgccgctggcgacgaccccggatgtgaacggccatcgttcgcagatggtgacgcaggcctggctggacagcgtggtcgacccggacagcacggcctggatgaatgccgcgcttggcaacgccgacctgtccgcacgcctggcggccctgggtagcgtacgactgcggccgggcgtggaaatcgtcggcgtgccctcggcggccaaccccgacggcgacctgaccgtcagtggcgatctggacctgtccggccatcgctatggcccgcaggccaatcgcgccgatcccgcacgtcgtggcttcggtgaggccggagcactgcgcctgcgtgccgcgggtgatctgcatgtctatggcagcatcaacgatggctttgcgccacctccggtgagtccggacgatgccggctggcagctgttcgagggcagcgatgccaccgtgggcgtcacgccgtttggtgctgacatcgtggtgcccggcgatggcgtggtgctggatgtcggctcacgtttcccggcgtcgtcggtgctgaactacgccatcaaagtgcagggcacgcagcttccggcaggcacgacactgccggtggaaatgacactgacccaggctctgcagctgcctgctggcacggtgttgtccgcggcaatcaccctgaacgatggccaggtccacgcagccggaaccgtgcttgcgcaggccctgacagtaccaatgggcgcgcgcctggccgctggcttccagctgcgaagcgctgcagacgtcgcagcgcacacttggccagccggcgtgccgttgccgacggaactgcggctggcggcgagtacgccgttgccgcgtggcgcgctgattccgtcgatgaccctggtcaagcttccgggtggcacgccggtgaagctacgcccttcggacagcgatgggcggcaggggcgcaactgggcgctggcacagatgcttcccgagggcactacgtcatgggatctctcgttggtggcaggtgcagacaccgaggcctccgaccctcgcctgcgcagattcggtgccaatggcgacctggtactgtccgacacgcattacggtgtgatccgtgatgcgctgaagcagaacaagttcgtgcgcgaacggctggtgacggcggagggcgcgctgcgcgagaacgtggacaccagttggatcggcaagaccgccaaggcgcttgccgagcacctgggcaagagcgaggatgcgctgtgcgctgcgggcggaagttgcgtgaacgcgccctatctgttcaccaagctgggagccgaggagttggcgggcgatcctgacctggaaggcacttcggtcaaggacttcggtgaccttccctgggtgggcatgagtgaggaggcgatctgcaatccgcccgaggctggctattgcgtgatgccgggcgagatgcgcgagatcaccacgatggggccaccgcggcacggcacgccaatgtggagcgtcctgcgtaccggcaccggcgacctgcagctgtcggctgccagggacgtgcagatgcgttcggtgttcggcgtgtatacggccggtacacccacctcgcttggcaatggtcacgatgaccgcttccagtcaggtcgcagcccgctgggcaccagtgacatgctgctgggcctgcaacagtcaactggcgactatgatgccgcactggcagcctaccaggcgtggtatccggaccgtggcggaaacctgagggtgattgccggccgtgatgtcaccggagcaacctggggcagtcgttccgctgcgggcggatccggcaacggtgtcgctggcaccttcagcagcgcgaccggaggctggctgtggcggcagggcaccggaacaaccatgggtgttgagccggtagccaccagttggtggatcaacttcggtacctatgccgcgttcaatcccactgacctccgggataatccaaggatggtcggtttcaccggcctcggcacattgggcggcggcaatcttgaggttgaggcaggccggcacggtggtgtgactgccgccaagggtgaggcgctcggtgttctcggtggtacccgctactcaacggcgatcaatgcggcagtgggcgccaccggtcgcgttgatgatggccgcctcgtgcagaccggaggcggtgatctgcacctgcggtttgccggcgcgctgaatccgctgctggcagccacgtcgatgagccagaccgaaaacaaccagaaccctcagctcaacggcacactggtcaatctgcgcggtcacctcggtattgacgccgcgcggattggtggcagtgtcgtacaggccaatgactacaggtccatcagcgctgacctgcgcgcgagcgatccgttccgcgccagcaccagcgctgcgatgggtggcccgctgctggtgctgggcgatgcggttgcagacctgcaggcgcgtggggatgttgtcctttccagtgccacggatgcgggccgggtccgccagtacaacgcgtttgaggccagggccgatgatggttctcgcatgctcggcgttgccggattctcactgtggaccccttccaccgccatcaatctgttctctgcaggcggcgacatcgtgcctgtcgggcaggcgacaacgcaggaggaggcggatggtggaatggaaagcatcgtgggtggcgccggctaccggatctatccgtcgcgcctgacggctgtcgctgccagcggtgatatcaagctttcgcgttccgtttcgagagaggtgctactgacggcgccaggggtcaacagcacgctgcagctgctggcaggtaactccatcctggctgcagccgatgcaccgatgatcagcagctcgggcgcggatgcccgcttgccgtcgcccttcgaccctgccttcaccggattcggtggcagtagccgcaatcagctgctacgcagcaatctgtcgcaggacggcgcgattgcaccgctcaatgtcaggatcaacggcggttcaccgctgttcgcgtttggcccgaatcggccgatgctgggtacgccgcgtgccggcggcgggcagccgaaccgcttctatgccggtagtggcgacatcatcggcctgcgtaccggcggcgaatggacgttgggcaccagcacgggcctgatccgcacggttggcacctggtacgacgtgtcggcgccggttcagttgcgcgcgggcacggacattctcggcagctcggtaatggcgatgaacaatggcagcaccgacatgaccgtggtccaggccggccgtgacatcgtgcacaccaacctgaccgtgtttggcccagggaatgccgatgtcagtgcaggccgccagctccgtcaggaagacagcggcaacattgtctcgcgcggcgggctgatccagggcgacacgcgcccgggtgcgagcatcgcagtggccgccggcaaccagtacatcgcgttcgacgccgtgcgcgcccgctacctggatccggccaacatcgccgatccttcgcagtcgctggcatcgcagcccggcaaggtggtgaagatctacgacaaggagctgaagcagtggctgcagcagcgcttcgacttggccgttgatggcgccgaggccttggctgcgttcgaccggttgccgaaggaacagcagcacatcttcctgcgccaggtctactacgctgaactgcgcgagggtggccgcgaatacaacaatccggatgggccgcgattgggctcctacctgcgtggtcgcgaagccattgcaacgctgctgccggacaaggacgaaaacggcaagacgatcgatcgcaccggcgacatcgtgatgtatggcggctcgggcatacgcaccgaggccggtggcaacatagagctgatggcgcccggtgggcagatcgtggtgggcgtggttggcgaggcgccgcctgcgagcgcgggcctggtgacccaggggcagggcgatatccgcttgttcagccaggacagcgtgctgctcggcctgtcgcgtgtcatgaccgcgttcggcggtgacatcctcgcctggacggagcagggcgacatcaatgccggtcgcggttctcgcaccacactactgtatacgccgccgcgccggatctatgacaactggggcaatgtgttgctgtcgccccaggcgccggccagcggtgccggcttcgccacgctggccccgattcccgaagtgccgccgggcgacgtcgacctgatcgcgccgctgggcaccatcgatgcgggcgaagcgggcatccgtgtctcgggcaacatcaacctcgccgccctgcaggtgctcaacgcggccaacatccaggtgcagggtgagagcaagggcctgccggtgctggccacggtgaacgtcaatgcgctggcttcggccagtgcggcagcgaacagcgccagccaggcggcacaggacgtgatgcgcaagagccaggacgatgcacgacgcaaccagccatcggtgatcagcgtgcagatcctcggtttcggcagtggcaccagcagcattgcgccgccggcacgcggcactactgccaacagcggctacgacgccaacagcgcgttccagttcccgcaggcaagccgcgacgagggcacgcagcgccggtag

SEQ ID NO: 510883 - DNA, 657 bp, Stenotrophomonas maltophilia
atgcccgccacctattcaatgacgtggttcgggctcgggctgcttatcaccacgccctccccacttgctctgaacgatggcgtctacgagggggagacgacgtacagcacgggaggcgagggcagcgatatcgacttcggtgatgatgtgacgaccgagcccatcacattgaaacttcgattcaccgtctcccaccagttccagctgctcttcccaacggagaatcctcgggtgcagctggtgccaccgcaaggctggtcgcagtgggtcgaccacggccgcccccctgggctcctgcgtcaggagctccccttccacctgaccacgtcaatggacttcagcatgaagctgcagtgcgagtatgacctgcgcgaaggatgcggcatccgcaatgccgcagccgatgtggtggtaccagtggacgttgacgtgaccattccgggcatgagcaatgtgcgcgatggcaggcccacgcagaacacagcactgctgccggatgatgcgcgggcgcctcgcttcaccccggatggctatctgatgcagcggcgttcgacgctgcgcttcaccgcgggccgcgaggcggtgacggagatgctgaagtcgcccggttcgcattggcagggcaacatgacggtggtgtttgatgccgacccgtga

SEQ ID NO: 510884 - DNA, 663 bp, Stenotrophomonas maltophilia
gtgagttacaccatcgcccctgaacaggtcatcgattacccgcccgagcgcttgcgcgagttccatggcagcgtggtcgagtacatcgacaaccgggtgttcatgctggatccggggcaactggtcggcgaacctgccgcgcaggcctaccgggagatcgcagccgggatgttcaccgcgctgggctggcagggagatggccgcatcgagctgttgtggctgcccgccttcgttttcccgctgtccgagcacatggcggatgtcggtgttggcgtctggcatgtcaagcaggacgaagacggcatctcctacctgttgtcgccggtgccgatgccgttcgaggcactgcacaacacgccacactggaaggaggtccgccaggcggcacaccgcaggcgcggtgcactgggccgagcggtggatgaagtcctgcactatgtatgggatccaataggcatccaggccaatccggactgccgtggcgagtacgccgcctacgcagatcgcatcgagtcccagctgctgcgcggtgcaggcgaacaggaactgtgtgcggcccttgccggcatggcgcgcaatgagatgggcgtcaatccggatgagcgcaggacccagcgcgccgccgccgccctggtggcctggcgggcatccctgcgtgactga

SEQ ID NO: 510885 - DNA, 870 bp, Stenotrophomonas maltophilia
atgaaaacgaccgcattcgcacttgcggcagtagtagcaagctcccaggcagcctttgagaagcttcctgggagcgcaatgggaccagtaaactgcccggaaccgcccgccactatccgaacagtagggggtcgcatttacgagtgtcgacctgaagaaggagaggagccctatgtcgatgtgaccccacccgatgacaggtcccactggctgctgccctttggctctgcagatcctcccccgcgcggaaccggcagctaccatgctcctgaggattggccgttccgatccatcatttcgcacggcaatccggtaacacccaataaggagtatttctacatcttcgacagacaaggtgtggtgatcgactccaatgcgccccaagcaatcggcgatcagatgctggaagttcgcatctctggaattcgcatgtggcccagcgcgaatgtctactatcgcatgcagagaccgcggaacagtgtatttgttgatccacgcaggtcaatagaacggaccgcggcggctgcgacctttgcactggttgtagaaggaaaaactctgtgccctgtactggacgaaagcttcgtcggcgattggccgctacccagggcgaccccctctcctgcacacacctacatcaatggacattgtggggaggcctaccggattccatcgcgattctccgatgacgacgtccacaatcctcggtactacacctaccccggattcgaggcaggcggcctcaaccttctatggagcttccagcgccacgacgagccggagcgccctgtcctcaaccgaaaaggtgaatgtgtagccctctgcacgcaccggcctgatcctaccgctccagtggcgcagacccgatga

SEQ ID NO: 510886 - DNA, 1335 bp, Stenotrophomonas maltophilia
atgaaccgaccgatccgtgccttgcaggtccccttccacacggaaattgatggcgacggcgtagctatgaccgtgtgccggttggatcgcgtgtactacgccaagatcaagttgcagatgaaaagcaatggtgcaaccagcgcggcaacgatactaccctatctgatcgtccatgccgcgccggagacgccggaaacatggagagtcacgccgactccacacaatagctcccgccgtactgatcgggagggcaatgctcacatcaaggtgagcggccccggccattaccgcatgtacatcaaagagcctaccgaagaattcgctgatgacagcattttccaagttccacagcacgcactagctgatggtggcgacagcggccgcgaggtccagccgctggttgagtttgaagttttcgagagcacagactgcacgctttccatacgaacgctgcatccgaatggcctatcacgtacgcgaggtggcggtggcgacagcattcctgccgatagagtggcactcaggtttaccgataaccatacaaatagagaattgaagaacgccctcagtcttggcaactacgtcatctcgttccaactctgggccgatgcttcacgcacctatgggacccagcatccaacagttcagaacagcgcctttcgggaagcactgagcaccatctatagcgaaggattgactgccggcacaggtgccggtgatggcgcccatgaccgtatcttggcctttggagaacgagatatacagttcaatcatcagtccactaccggggggcgaagccgtctgtctttccgcgaaaacaatggccaaccgaacaatcgaatgacggcagacgagaccttgcgccgcacccacccggcgacgatggagttcctgctgaagatgatgaatgatctggatatcacttatgcacgtgtcacaggtgcatggcgccctcatgtcggttccactcgccaccgctatgcttcggccatagacctcacccatgtgcgaaccacagttgttggcgccgacggccagcagcactctgtcaccatacagtttcacaatgtgttgtcagtggattccaacccgaatcgcaccgcgccagtcgaaacttctgcacgaacacgcatgcgcgagttttcatttctggtacatagatacatcgcaaatgcacgagcactacagatactgggctggctcggcgggccttggccaatgacttatagcgattttggcattgcggctacagaacgggccagtgatattgccatccgcaccgatgccactcacgtgcaccacattcatatcagcatgggcactgatcagccatga

SEQ ID NO: 510887 - DNA, 360 bp, Stenotrophomonas maltophilia
ttgaccgcccatgagcaccccgtgccggacggaatcaccgacctgagattttccacatcactggggacgcctgtcgaaggcctgcactatcgtctgggtgacggacacggcagaacacacgcggcgatcaccggcgctgatggagcgggtgcccgactgcagacacgccagaacggttcagccaacaatgcagcggaaccgtggttgctggatggcaacgtgatgctctcgctggaagtgcagcgtgacgatggctcgtgggccctgattggcagctttcagcatgaggcaaacacccacaagcaggtgaacatcattgcccccgccattgccgcaccgctgcagatggagctgatctga

SEQ ID NO: 510888 - DNA, 399 bp, Stenotrophomonas maltophilia
gtggtgctgcaggccggcagcagtgcgatcacgctggacggcgggaacatcaccttcagctgccccggcgagttcaaggtcaaggcgggggagcatccgttcatgcctggggagtccaaacccgctggcatcgttccgctaccgaagcagctcgcgacgcgcttgaagtatcgcgggaagcttcgggtggtggatgcgcagcagcgggcgcggcccagtacgtactacaagattgtcaccgctgcgggcgaggtgttggctcagggcgttaccgatgacagtgggcgcagcatcaccgtcgctacagaagagctgacaggcgtgaccgcctatataggccggggccgctggcgcatcgaggaatcggtggtcgacgaagacgacgcctgcggttgctga

SEQ ID NO: 510889 - DNA, 243 bp, Stenotrophomonas maltophilia
atgacttccatacgcgccgtcgccccgaccctgcaggccgatgcactggaaaagggcttcatgtccggcgatgtgcaggtgccggtgctgcgcggcttgtcgctggacatctatcccggtgaactgacgctggtgtcgggcccctccggctgtggcaagagcacgctgctgtcgctgctgtccggcctgtcatcgcccgatggcggtcgcgtgcacgcgctggccaggacgtgggccacatga

SEQ ID NO: 510890 - DNA, 279 bp, Stenotrophomonas maltophilia
atgatcgaacgcatgggcctgatgtacggcgggctgcagcgccttggaccatttccgctgctgattgccctctacctgcagttccgtggatggaaatggggtgattgggccagcgcctttgatgtcggcatgcttggtgccttcctcatctacgcgctggtgctgctctaccttgcgggctggttgttgatcgggctgcgcacccgcctggacacttacgtggccctgctggaaggctccattcacgaacccgagccgccgcagcccgcgccgctgtag

SEQ ID NO: 510891 - DNA, 477 bp, Stenotrophomonas maltophilia
atgcgtcacattaataaggggcaggtcatcgttcgcgagtttgtcgaggccgatcgagaggcccttcgcaagctgtttgtcgcatcccgcgatgccgctttctcgtgggctgccattggcgcccacaagcttgaagactttgatgtgagcactgcaggcgagcggattctggtggcagagcattcgtgcacccccattggctttgcgtccgtatggcaggacgacagcttcctgcataacctatttgttcatccgcactatcagcgatgtggcgtgggaaggatgctgctggccggctgcgacaggtacttttccgccgcaccaacgctgaaatgcctgaaagccaatgatcctgccaagcggttctatcagtctcagggatggcgcgtgtgtagtgaggccgatggtccggaggggtcgtatgtccttatggtgagggccaggcccaacgattcattgagggcgaagccaggatga

SEQ ID NO: 510892 - DNA, 1356 bp, Stenotrophomonas maltophilia
gtggctggaacagccgctgaccctgcagctgcgccaggccgacggttcgctgcgccagtggcacgggctgtgtaccgaggctgcgcagctgggcagcgatggtggcctggcccgctatcgcctgatcctcgaaccgtggaccgcgctgctgcgcctgcgccgcaatgcggtgatcttccaggatctggatacccgcgccatctgcgaacagatcttcgccgactacccgcaggccctgttccgcttcgacgtgcaggccgagctgccggcacgcgcgatcaccacccagtaccgcgagaccgactgggccttcgtcacccggctgctggccgaagccggcctggcctggcgcatcgagcaggcgcaggacgacgatgccgcacacaccctggtggtgttcgagccgggcgccgagctgcccgacgcaggccgcgtgcgcttccatcgcgccgacatggccgaggccagcgacggcatcaccgccttcgccgagcgccagcagctggtgcccaacgccagcaccgtggccagctggcacagcgagcaggttgctgccgtggccgcgcactccagcgccgatgccggcaccctgcccgccttggaagtctacgtgcagccgcgcgccggtcgattcgcccaggccggctgggccgacgccgaagcacaggcacggctggacgcgctgcgcgtcggccaggtgctctacagcggcagcggcagcgagcgccagctcagcgccggcagcaccttcaccctggcccagcacccgcagcacgaaggccaggccttccagttgctggccgtgcagcatgtggccctgaacaacctggaccagggcatcgccgagctgctgggcagcaccgcgttggagcgtggcgcctaccgcaacagtttcctggccaccggcagcagcgtgccgttgcgcgccctgccgcaggaccggccgaccctgcatggcccgcagactgcacgcgtggtgggcattgccaacaccgccgtgactccgaaccgcgagcaccaggtacgcatccagttcggctggcagcgcggcagcaggcccaatcccggcggcctgaccgacaccggcagcgcccagcccggacacgctcccggcgaccacaccagtggcagctgggtgccggtcgccgagtgggtggccggccccaactggggcacggccttcctgccccgcgtgggcagcgaagtactggtggaattcctgcacggcgacatcgaccagccgcgcatcaccggccagctctacaacggcgaagtcgctccgcccttcggcggcggcatcgacgagaacgcacgccaccccggcgtactcagcggcctgcacacccaggcccatga

SEQ ID NO: 510893 - DNA, 630 bp, Stenotrophomonas maltophilia
atgtccgccagcaagaaccgggtgtatgactccaacgtggtcggcacggcgccggcgggcgcggccaccgtcaacatcgccggcaacgggatccgattccgggaaaacaagatcctgttcgtcgacgacttcgaatgggatcacacggtggcagccgtcgggctggaccatgaggccgagtatcgactcacgctgatggtcagtgactcggccggtcggtcggccatctggcgcggattcatcggtgatcacccgatctacttcacgtcgaagccatatgcgttccaggtcgtcgaggcggccgatgcgcagttcggggtgcgcggcggcgccatgtcggttccgccatcgatcacagaagcgctggaaggcggcttcagccttcttggcggcgaactgcgagagccgttggtcaacttctcgatgccaccagacgcgctattcgccgcgttcgccgtcggagggggcgagctgcgagacatccttatcaagtacacggcacagcccgaagccctcgacgctgggctgctgcttcagtcagggacgctgcggcagatcctgatcaccaccacgatgccggctgacggtatcgatgccgcattcaccatcaactcgggaacactcgcatga

SEQ ID NO: 510894 - DNA, 939 bp, Stenotrophomonas maltophilia
atgaacaacgggatcaatgccaacgcagtactggagctgggcgtggccggtcgattcaagatcgaagccgccaggttggacgaaagcggacaggagattgatggatctcgccgccttgcagccgactggttcgacaacctggtggtggacgccggattgaatcgcatggggggattcgacggttgcctcgacttcgcgatggttggttcaggcaacgctgctccgctgccatccaataccactctgcaaagcagagttggtagcacgtccacgaagaccagcaatgtgaacgggagtaatgcttctccgcgctacggctggaggcgcatcacgtttcgtttcgcggctggtgctgctgcgggcaatctctcggaggtcggcgtaggttgggatagcaccaacattaccagccgtgcgctgatcctcgatggcagcggcaacccaacgaccatcaccgtgcttcccgatgaaattctggatgtcacctatgagtttcgcgtgtacttctcggaggccgatagctccttcaatgtcacgatcagcggtgtcacctacgcgtgcgttctgcgcccggctatcgtgaatgattcgacctacggaattcagtatggaaacgtaatctcggtgaactcattcaatggggcaattgcaccacgagctttcgaaacggatgttctcggcgctatcacagggcagccagctggatcgggcagcactttgtccctcagcaacgctccatatgttgcaggaaatttctacagtgactgcacgatcaccgccgatctgaacattgcaaacttcaccacggggatcggcagcctgcgcatcgacaatacgctggccaagtatcaggtttccttcagccccaagatcccgaaggatgcgacgaagaagctgacgctaagcgtccgcaccacttggagccgtcatgttccctga

SEQ ID NO: 510895 - DNA, 576 bp, Stenotrophomonas maltophilia
atgttccctgacatgattctgtcgagcgttccgctgcaggccgacttcatcgaaagggtgaacgcccgccgtgccccactgatcgactacgaggtggcagggaatgcccttggcgatgccagcagcggcctgcaggttcgcctgtggaccatcgaggtcaagggcgatgacgcggtgctgagcgccgagggggttgcgccggttgtcctgttcagccggcccggcatgaccgagatcgccctggccttcgatcagaacatgcgagcgcacgtggcgttcgttcagaccggtatggcctggctgtggtggtacgactcccaggtgaatcaaatggtgttcaccagcttcccgggaatgagcaacccaagactggccacggacgagaagcggagctccgagctgtcggtgtcggacgtggtcctgtcgtacatgaacggcggcaacctttgctgccggatccagcgggagcggttcacggtcgagcgggtgctgaccgcggcgccaggcctgcagctggtgtcggtggccaggaacaccggcaaccggctgcagtgggagtgcttcccgatcgcctga

SEQ ID NO: 510896 - DNA, 1332 bp, Stenotrophomonas maltophilia
atgaaccaggcccttgcccccgccagtgccgggcagcagcaacgtgcgctgtggctgagcacgttcgccttcaccgtgtgctttgcggtgtggatgatcttttcgatcatcggcatccagatcagtcaacagctcggcttgaatgacacccagttcggcctgttgatcgccacgccggtgctgaccggttcggtcagccgggtcttcctcggcatatggtccgaccagttcggtggccgcaaggtgatggtgctggtgatgctgtgtggcgcagtggccacctggatgctgacctatgcccagacctacacccagttcctgattgccgcgctgtgcgtgggtatcgccggcggcaacttctcggtgggcgtggcctacgtctcgaagtggttcccggccagcaagcagggcaccgcactgggcatcttcggtgctggcaacatcggctcggcggtgaccaagctgctggcgccgctggtgatggtggcggccggctggaccatggtcgccaaggtctgggccgtcgcgctggccgtcacggcggtgctgttcttcctcttcagcaaggaagatccgtcgctggagcagcgccgtcgcgaaggcgtgaagccggtgccgttcgccgagcagatggcgccactgaagaacctgcaggtgtggcggttctcgctgtactacttcttcgtgttcggtggcttcgtggcgctggcgctgtggctgccgcactacctggtgggcgcctatggcatggacgtgggccacgccggcatgctggcggcgtgctattcgatcccggccagcctgttccgcgtggtcggtggctggatgtcggaccggatgggggcgcgccgggtgatgtactggaccttcggcgtgtcggccatctgcaccttcctgctggcctacccggataccgagtatgtggtgaagggcatccatggcccgatccacttccatctggccatcggcgtggtgatgttcaccgtgctggtgttcgtgctgggcttcttcatgtcgctgggcaaggccgcggtctacaagcacatcccggtgtactaccccaagcacgtgggtgccgtgggcggcgtggttggcatgatcggtggcctgggtggcttcatcctgccgatcgtgttcggtgcattgaacgatgcggtgggcatctggagcagctgcttcatgctgctgttcgtgctggtggccgctgcactggcctggatgcacttcgcgatccgccgtatggaacgccgccacttcccgcagatcgaccgcgaaaccgacctgcccgaagccatcgatgcggccgccgccgagcgggtgcgcggtgggtga

SEQ ID NO: 510897 - DNA, 504 bp, Stenotrophomonas maltophilia
atggcattgctgcacgccaagacggctgctggccgtcaggaaatcgaagaccgtggccggcgcctgccggcggcactgcgttcgatcctgctgatggtcgacggccatcgcgatgacaccgaactgcgtggcctgttcgaaggcctgcgcgcgccggccgatgcactggagcagctggaagcgcagggcctgatcgaagtgatcggtggcaatgccgaggtggcaccggtacgtggcatcagcaccggccgcgaacaggatccggcgttgtaccagcagctgtacgacgcgatgagcgaggcggtgcggcgccacctgtgcctgaagggctacttcatgcagttgaagattgaacgctgcaccgatgcacttgcactggaacgcctgtgcccggaactgctggcggcggtgggcaaggcgcgcagcccggcgctggcgcagcgctggtggcaggaaacccaggccgccgtggtcaatggtggcggcgaggtcgtgcaggcatga

SEQ ID NO: 510898 - DNA, 1374 bp, Stenotrophomonas maltophilia; identical to SEQ ID NO: 500162

SEQ ID NO: 510899 - DNA, 309 bp, Stenotrophomonas maltophilia
atgagcactgtcgaactgggtgaggatctcggcatcgagagcagcaccgagctcaagaaccgcctcgccccgctggtggcgcaggcaggcgagctgaccctggatgccagccaggtcgcccgcatccacaccgccgccgtgcaggtgctgtgtgcgttcgtgcaggcccgccgcgaggcaggcctcggcaccggcttccacggtggcactgcaaccttccgtgacgccgcgcgcctgctgggcgtcacccaggccctgggcctggacgtaacccatgacaacctgaaatctgtggagaacgctgcatga

SEQ ID NO: 510900 - DNA, 366 bp, Stenotrophomonas maltophilia
atgagcgcacgtatcttggtggtggacgattcggcgtcaatgcgccagatggtgtccttcgccctcacctcggccggttttgccgtcgaagaagctgaagacggcgcggtcgcgctcggtcgcgccaagggccagcgcttcaatgcggtggtcaccgacgtcaacatgccgaacatggacggcatcgcgctgatccgcgaactgcgccagctgccggactacaagttcacgccgctgctgatgctgaccaccgaatcggccgccgacaagaagtccgaaggcaaggccgccggcgccaccggctggctggtcaagccgttcaatccggaacagctggtcgccaccgtgcagaaagtgctgggctga

SEQ ID NO: 510901 - DNA, 606 bp, Stenotrophomonas maltophilia
gtggcgggggcttggtcgcgaagagcgggtcatgcggttggcagggtgggtaggccgtgcaggggacgctgcaagtacgtccatgtaagctcggtcgccgcatccatgcggctcacgcccctgcacggcctacccaccctgccttcgacagtttccggtggccgcccgccacggaagaaagaaagaagagcaacagcgggtcgcgcgcttcgcttgctcgcagccgagcatggctcggctctacaggaagcagaagcaaaaaagaaaaaggacgcggcgaaggccgcgtcctttttcttttctttcagttcgtcagtaacccatgctcttgcccaccgtcaccgggaaactgtcgaaggtgggacgggggcggctggcaggaccgttggcgccatggatggcgccatcgagcccccagggacgggtttacggcgtgtcctgccagccgcccccgtcccgccaaatcatcagcaacccagagccgctttggatgttgatgttgatgttgacgttgcccgccgcaggcggaccaccgcgcgtcagcgcggcgcctccacatccagcccgatcgggcagctcacgccggtgccgccgatgccgcagtag

SEQ ID NO: 510902 - DNA, 378 bp, Stenotrophomonas maltophilia
atgatcgggctggcgctgcgggtgccggctgcgggcagcggtacgtggttgcagatggtgccgatctgcgtggcgctggccgtcatcgggatcggcgtgggtctggcttggcctcacctgctgacacgtgttctgacctctgcaccgccggaggaacaggagcgcgccggtgcgtcgatcaccaccatccagctgttcgccaccgcggccggggcagcgcttgccgggatggtcgccaatgcagcgggactgatcgagccgggcggggccgagggaaccgcgcgtgcggcccggtggctgtttgccaccttcgcgttggcgccgatgctgggcatgctgctggtgaagcgatgccgctttccggcagacgtgaactga

SEQ ID NO: 510903 - DNA, 243 bp, Stenotrophomonas maltophilia; identical to SEQ ID NO: 510889

SEQ ID NO: 510904 - DNA, 945 bp, Stenotrophomonas maltophilia
atggcaggaaagaagagggctagactttgggaagaatcggttgtggttggacttcgcgatatgcagtggcgcttgcagcttcatgacatactctcccgagaggatctactcaactcgattcgtgctcggtttcaggggcagggcggcgttatcgatgatgtggcgcttcgcggtgttattccgccgggtttcgtcacactagacggcaacgccgagtcctcgactgctgacgtagcccttagctcgatgaagggattttgcttcttagtagaggttaaaccgactagacaaggaataagagatgagtggaaattaaaagagaagcgaaagcgcaaaagcagagctagtgttcactcgaaggcagccttccgcaccttaaaacgcttagttgaggactttgaagccaatccttctgacaaggagagggccaagatgttgcgacgctcattgagaattcatcaagttgcatactgggaaggcgaagatcgaggaaagctgcgagacggaatgattaaagttgagccctatatcaacgcctgcatctctatgcgccgtgtagatgagctaaccagtgatcggtgcatctcaagccttaaacatctctactatcagttcaagggcgatacgcgtggcacccagcgtctgcccgcgaaggaaatgctatccacatccacgcgaattcagtttgacatccaatccaacggatatattgagtcaattgaaagtgcgtatggtgcagaatatgaagaattccaacaatatgtggattggctctgcaagagctgcagcgaagatggcgaagttgatcaacctatcaactgccttgttatgactgacgatgggtttttgcaagcagtgtcaagtctgcgagagctcgctacgttgcttaacatcgatttgtcttgcaagccggaacccgaatattcggacccgacttactcctga

SEQ ID NO: 510905 - DNA, 741 bp, Stenotrophomonas maltophilia
atgtctacacacagctatttcgtttccaaggcctctgttcgcaaccttaagcagctcgccgccagaaagattgatggggtgtcctcgtctcatctttcagaggcagtcgctgctgccctcgacttcaaaacgcatgctgcgctggtcgcagcgttgcgaggaaatgcaactattgaggctagcaagccgagcaatgagcgcttgaactcgcggctgcggcagtttggctatcacgtcagaccagatctgaagctcctcccggatctcaaacagtcttacggatttggcaagcgctatccgataaaagccaagcgcagcgcgcggtggaatgcttggcgaaaccttatggtcgccgctattaacgccggcttggagcagcgcctgttcggtctgtcgccagatgaggattggtggccaggagccgacacatcaggtcgtggccattaccgtttcgccttcgatggagacctgcccgctgttgcaacagtcgcttcgatcggcgctggtgagctttctatcagtgtgcttctcgaccctgacagccccgacattgaagccgaattcggcttcgggatcagagacggcaaagcggaagcccacggctggttcgagcgccggctgggcgtatggcttatggacgggggagaagattttacgtgtaagcgaatgattcagcagaggctcgctgccgcaagagctgagagtgcaggctactcggacattggtagcttcattatgtag

SEQ ID NO: 510906 - DNA, 246 bp, Stenotrophomonas maltophilia
atgtctacgaaggaatctctgctactggaaaagaccttcaatgatgccgatggcaccatgaggcgcgtgtactacacgctcacccagcccgagcacttgaagcccatcgatcgatcattgtcggcggcgcacgccactgctagccgcacggcgaagctgttggccctgttgatcgaaaagcttgaagaagaaggcaggctcacagcggatgagctggacgagatgttgctgaaagccgcgctctag

SEQ ID NO: 510907 - DNA, 282 bp, Stenotrophomonas maltophilia
atggcaatgcgtgacgaagcggtagcgggagagatcatggcgctgaaggtgatgctaggagtggcgttttcgatcgccgcccgtgataaggaagatgctcgctccgctttgggcgaagttttgcgcggttgctcggagcaaattcaagagggcatcgctggtacaaaggcccaactgcgggctgatgagtttaatacgtcgaaattggcggatgccgccttgcagacagttgatttcgttgctggcgtcgccgacagcatgctggaagcaatggggcgttaa

SEQ ID NO: 510908 - DNA, 2832 bp, Stenotrophomonas maltophilia
atggctgaaccatctgcaaatctacgtgtccgcatcagtgctgacctggccgacatcaggcagggcctgggtacgctcacccgccaactgcgtgaggtgcgcggcgaggctgcccggccgctgccggccaagaacaacatcactgatctgggcatctcggccggccagaccgcccaggcgatgcgccagctgccggcgcagttcaccgacatcttcaccagcctgcagggcggcatgcccttcttcactgtgctggtgcagcagggtggccagatcaaggacagcttcggcggtgtcgagcctgcgttgaagggcgtgtcgtcggcactgctaggcatggttacgccgtacaccatggcggcagccgcggtcggcctggtggtctatgcttggtatgacgccgaacagcaggcccaggcttacacaaaggcgcttgtcctctcgcgcaacgaggcggctgcaaccactctgacgctggttgacatggccaggcagaccagtgacgcgttgcaggtttctgccggtgctggcgccgaggcggcacaggcggtcggatcgaacggcaagatcgccgcccagaacttgcaggccgtagccaacgctgctgtggccatgaaagaggtcagcggccaagcgctggaagacaccatcgccctctacgcgcagctggctgaagacccggtcaaaggggcgcagaagctcaacgagcaggtcaacttcatgaccgttgcgctctacgagcaggtaaaggcattgcaggaacagggccggaaccaagatgctgcgactatcatcacgcgcgctgcatctggcgagaccgaaatggcattggccagggtgagggcgagtcagaacccggtgattcagggcttcaaagagctctgggtagaggcaacgaaagcatggtcggcaatgcaggcgagcgtgggtctcggaccggcggcggcccagatgcagcacttgttggcggaaaaccagcgtgagctggaaaagctcaatgacctggccaacggcacccagcgcggccttccgctggcccgaaatccgattgcactggccgcgatgcaagagtccatcaagaaccgatcggagaagatcaaggctctggctactgacctgataaaggaaagaaaggatgccgaggtcaaggccgcgcaggacgctagcgcggactatgtccagaaaacggacgcgatcatcgactcccaggcgtcgaaagagcagaagaagaagagggaaatttctcagatcaacgggcaggccgaggtcgtccggcgtaaagctgaagcggccgggctcgtggaagaagtacgtgccattgaagagcgccgtaccgcagccgtcgccgctatcgagaagaagtacgcagagaagccgaaatccgccagcggcgctgcaacgcgaacggccgggctgcagggatacaaggatgatctgctggaggagcaggctcaaatctcggcgggaacgcaattgctccgagcccagttcgccgctcgtgaaattaccgtggccgagtactacagccgcatgcgggagcaggtgcagaaaggaaccgatgcccaagcaaagtcgatggaacagcagatcaccttcctgcagaagcaagcggtgagtggcaaggacgccattggcgtcagccgccagatcggtgaactggaagcacgcctagcgaagctccgcatcgatggcgcaagtgcgctggaggttctcaagaaggaggaagagtcgaccgccaaggcgagggagaacgcggtgaaggcctatgccagcgcacttgatgccagcaacgctgctctggcccgtcagcttgctacccaggctgatcgagtcggtttgggcgaccgcgagtatgagatccagcagcgaatcaacgaagccctcgcagacgaggccgacaagctgcgggaactgagcctgcagcggaatgccgatcagattgaccaggtcacgttcgaagaagagaaggcattgctgcatgccaagaccttggaccggctccagatcatcaagaacgggtatgacgaactgcggcaggccgagagtgactggctggctggcgcgagcgcggcgtgggcgaattatcggcagcaggccagcaacgccgcccagcagatgggcgacgtagttggtacggtcattggcggcttcgaggacgcctgggtgaagttcaccaccaccggcaagctcagcttctcagacctcaccaggtctgtgctggcggatctggcgcgcatcgctgcgcggcaggcaattatgggcatcgtcaatgcggtgtccggtgcttggggcggtggaggtggcgcctacaccggtaacggcaccggctctggttcgatcggcgagtttggcaacaatctgagcaacttcggcaccagcagtgtcaacgaccagttattccagaagatgcggctcggcggcagttactccaccggcggctacaccggggatggcggagtgaacgagcctgccggcgtcgtccacaagggagaggtggtctggtctcagcgggatgttgcgcgcgctggtggcgtggacatcgtcgaggcaatgcgacggggcttggccgggtatgccgatggcggcattggtggtcaggttccggcccgcgtcgggccaagcatgcatgtcggtggccagggcaaccttattgtggagatcaacaacaacaccaacggcagagtgcaggcgcgcgagcaacgacagaaggctccagatggttctgagatccggagactcatcatcgacgtagtggcagatgacattgccaacggtggcgcggtaagcatggccggtcgcgcgcggcacgggtggacggatgtggtgggttga

SEQ ID NO: 510909 - DNA, 423 bp, Stenotrophomonas maltophilia
atgaacccgctcgacactatttcccccccaagcagaaccttggaattccgaggggaaaagttgcacctcacaccgttgcgcctgcaacagatcgggcccttcatcacggccagccgtaccctgatcgctcgggtcgcgatgatggccggcgcgattgagggttcggagcacgctgctgtcggcaccatcctgctggacctgcttgagcaggacgggaccgagatcgccgccgcattggcggtggccacgggccgagatgccgaatggatcgcaggcgcaaccctggacgagatcgccgacctgctcgaggtggtgatcgggctcaaccgggatttttttgcccatcgcctgcggctgctgctgctgcaggccaagcttcttgcggacgagagtacgggctcgccgacatcgtccagtatctga

SEQ ID NO: 510910 - DNA, 453 bp, Stenotrophomonas maltophilia
atgaccgactatttgcccaaggtgacgcgcatccgcgtccagattcaaaagctggccgacgacatccgcgacatccgcaatggcatgccgccgaaagaagaatcccttgcagccgtcgacgctcacatccaacgcgaggccgcgaaagtcaccattcggccaagcgccttcattggcggcggcggcgaagtcgtctcggcctaccccgaaagtccccatgcctacgcctgcatgttcttcccggacgtgatccgcaatcgcctctgcgccgaagtcgaagccctctatcagggcgaggtgacgatcacggatgaccggaagcaggagcgcctggaggcgcagctgttggaactggagcggcaagaggaggcagtaatccgcgaggcagctacggatggcaaatgcattccgcgccgcagcgatgccaatccggccgtgctgctggccgactag

SEQ ID NO: 510911 - DNA, 414 bp, Stenotrophomonas maltophilia
atgagtgataaatctccgcccgtcccttcttccctactgaagctggagcacttgcgaattcgcaacgacctctacttcgcggcgaggcgcgcgctgagcgaacgccgcaaagagctcaacgaccagcggaagttcatccgccaagagatggagaccgcctcaaagagcttcagcggcagagagctcgatgtgggcgttggcaggccaaccaaccttggcggcaaaaccctggacgaacaccggcgcgagacgttggccaagctgcaacgctggatggctgcgatcgatgcagtggacgccgtagtagccgccgcatacgacgaactcagtgcttcatctggcgacgtaggggcttaccaggccgcctcacaacatcttcaacagaccgtggccgattggggcctgagccagtaa

SEQ ID NO: 510912 - DNA, 195 bp, Stenotrophomonas maltophilia
atgcccaagatcgagctcgatctaccccaggtggtctgcgacgcgatgaatgacgctgcctacgccgcgggcattcctcccgccgagctcttggccgatgcgttgcgcacccttcccgcgttccagcgcgccttggcagccaggcccgagcggctccccgcctttgccctcaaccccggagcaccccatgagtga

SEQ ID NO: 510913 - DNA, 159 bp, Stenotrophomonas maltophilia
atgtcacgttgcccatccgctgccggcgtcgagagcctgcgtgctgccaacgccgtgggccagctgctatgggaggtgagtcggcagcccctggcatcaatcgaagacgcggcccagcaaagggctgcaaccgatgaggctcagaagggtggcatttga

SEQ ID NO: 510914 - DNA, 387 bp, Stenotrophomonas maltophilia
atgggcatcaaagcccgcgaccggcgcgcgctgccatcgagacagcagggcattgatcgttggtggccgtggcggcaggcgtcgcgcaatgacaagccatcggaggaacacgtgagcgaccgcgacgagagcacgcccattgctgtcagcacgccggcctgcattgcagaagtccgccagcgcctggagcaggagggccactacgtcacgttcgatgggcgcgttacggaggcggtggcggccgcacttgtcccgtgtccggtgagccgtctaaggcggtggcgacaggagggcaagggcccacgcttctaccagccagcgaagacaccgtggtactaccttggcgacgtgcttgcctggattcaggccggcgaaggatttcgctag

SEQ ID NO: 510915 - DNA, 204 bp, Stenotrophomonas maltophilia
atgaatcgtgacctgtttgattccaatcccgctgaggtccagccccagcctgccggcgacctggcgcagcgctaccgggatgccgtggccgttgacgtgatccatcgctcccaagtgggcgcctgcattccattcactccgctcccgaagcactacctcgggaagaaggtgcgcatcgtgatcgtaggggaggctgatgagtga

SEQ ID NO: 510916 - DNA, 285 bp, Stenotrophomonas maltophilia
atggcgcgacccattgaacctatcgcctgcgattgctgcgggaaaccgctgttgcccgtgttcggcacgttccatcgcgtggagcgggagttcggctgggcctccctgccctacgtcctgtgcggtgactgcgccttacagcacaggggcaatccgaccgaggtccgcgtacttgagtggatccagcgccgtgccgatcgtgccggcgaggattggggccgcagtgtcggccagttgctgcagagtgccgcccgcgtggtggccgcacgggagcgcatgcgatga

SEQ ID NO: 510917 - DNA, 216 bp, Stenotrophomonas maltophilia
atgaaccggccttcattccagcaccagcagcccgcgttggcgggcaacattgaattcgctttcgccttcgtgtcgtggatgcaaagccggcgcacgccggctacgccgaacgatctaatgaatcgtttcggtatgtcccaggccacggcctatcgctacttgcgccgctaccgcgatgcgttctcccaggaggtgcgagatggcgcgacccattga

SEQ ID NO: 510918 - DNA, 408 bp, Stenotrophomonas maltophilia
atgaggaagactgtacagcaaccagcgcccgaatcaatcgggcaaacccctgacgcgcattcagaaaaatctgacgcgccccgcaactggatggtgtggtcagaccaggactggcttgagtcgggcgccccgccttcgattcacaaccgtctgagcgggattgaccgcgcgctgcaggggattcgagcgatccacgacctgttggccttgaactttgaacgcaccacgtttatccgcaatcacggcgcagacgaaaccgcctgttgcgccctctttggcctgacggatacccacgaagaagggctatacgtcgccatgcgcgtgctgcttgataccacggaacgccccttgcgcgagctccgcaacaaccacgaatactgctggggcggtatgggtggcggcgaatga

SEQ ID NO: 510919 - DNA, 219 bp, Stenotrophomonas maltophilia
atgaccgcctctgccccgaagctcgcttacggccccgaagccgcggcggaacaactcggtgtgagccgtgcccgcttctatcagctggtgaaggaaggaaaggttcgtacttacaaagacggtaagcgcaggctctgcagccaccaagcgctagtcgagtgccaacaggaaatggagcgcgcttctacagggagcaagccgcatgcagcagcagcctga

SEQ ID NO: 510920 - DNA, 384 bp, Stenotrophomonas maltophilia
atgaacgcggagatcgttcacaggttggagcggtcgtttgtgccagaccggccgacgctcactggcacgctcggactgcgtgctgagctggccaagcaaagggaaatccaccaagcaacgaatgagatgctggcgcgatccgttgagcttcttaacgtaatcaagaaggagggccgggacgcgccttatcctggcaaagccgaaggtaagtcgattgatgaggccatcaagcagtccgagagaacgcagaaggtttttcaggacgcgattgatagcgctgagctcctgcttatggagctggcggtcgccttagcaaacgggattgaggtcgacgttgaagcgttccgggagcgcgcgctcagtaccggtgccatttatccatag

SEQ ID NO: 510921 - DNA, 330 bp, Stenotrophomonas maltophilia
atgtactacggccccgagttcaccagccgggccttcatcgcatggacgcaactccacggcatcaagcacctgttgatcgagccgggcaggcccatgcagaacggctacatcgagagcttcaacggcaagttcagggacgagtgcctcaacgaacactggttcacctcgctcgcccaagcccgccaggtcatcgccgactggcgacgcgactacaaccaggtgcgaccacacagcagctgcggtcgaatcccgcctgcccagttcgctgccaaccaccgagcacaacaagccgacaacgcagtaaccttcaaccccgggctttatcagtaa

SEQ ID NO: 510922 - DNA, 1860 bp, Stenotrophomonas maltophilia
atgctcagcaagttcaggctcgaccgtcggaacaagtacgagtcccgactattcgcacagaagttggccgaaatgatcgttggcgtcgtcaattcggttccgcacgcctctgagataggaagtgaacagggaggaatcccgcactgggacgatattgttgaggtgaggtgtgatggcaccattgcacacacacaggtcaagcgacaaagcgagtcgttttcaacttacccccctgtgcgtccatctactgatgcaaaaacgtcagctcttgacgatgcactcgagagcctcgccacatcgattgatcgacacgatcttgatgcgcccggcaagcgcttttttgagcttattgtcttcggcccgggagtacttgtaaaaagaggaatccgtgtcgagaagttctcggagattgtcgacatctgctctacggaatcgttcagctgccagaagatggagcaacgagatgactctacggccagagatgtgttccagtggctaactacctggtgtggcttccgagactgggcacatatccagtccgcactatctagactccgtgtcacgttcggtggaactgaggaacagattgacgggaagattctagcttctcttgcgtcagtgttcactgatccacacacagccagagagagtcttctcagctatgcgttcgacgaagcatcggacgtcggcgcgattagtcgaagagctttgatgcagcgtctgaagcacttgctccgaccggacatcgcgagctggacgcagtacctaaaggtggatgggttctctcgatgggagctttcgggcatccacgatctggagagccaggatgcagagagggctgctggaatcgttacgcgtctgtggagcaacggaggagagcgacgtgttctgcagttccaggcgccccttaccagtatcgatgtggggaagatttctcttccgcacgccattctaaggctagcacttcatctgagcgggggcgcgcagtgcctgttagaagatgtaggcgcgtggaaagccaaggcaagtgatcttgccggtcagacgatgggacactctgcgtcagacctacgggacctcccttgggccgagtctcaaccgcggccagggccagcgatgcggagtctggatggggttggcccatcctattccgaagccagctcattgatgcaagcgatggacatgcaggtccttgggcagctagccaaatgcgtaaatgattcgctcgagagagttatggacgaagcgctgcaggctgagcttgccgccctttggaacgaatggcacacagggctcgcagacgatcccgcagagttgaggtcgcttttcgcgtccatgctgcacccagcaactgagggccttgctcatggcagcctgttgcgagtcggaccgcgggcactggacctcttggacaatgccattatgactctgcttgttgtcgccgtctcgattggcgggaaaggatcaacttggagtcacttcaccgattgcggcgcagtactgagcatagccctcaagcagtggtcaggtcccgtcggtagccagagtggtaggcgtcacctcgaatcggatgatctacatgacatcattggacccaagccgaatgccgttgtagtcctttcaggcattgactcgccagctgactcaatacttcagcctacactatctggcgctccatacgatgagacaagcttcatggcacagcgccggccgaaggtcttggtgacagggcaccggatcgatcgattcctgcgaaaggggaaactagaggacgtccgcatgcactttagaagtcaatgggatgctcagatttctgcgcgcaaccaagccatagaaaacgcgacggatggcaaacaatga

SEQ ID NO: 510923 - DNA, 2982 bp, Stenotrophomonas maltophilia
atggcaatccttgaagcgctcacgctcgctggggttcggcgctttggtcgcgagacgactatcgaatttagcccgcatgccaccatactgttggctccgaacggaacaggaaagacgacggtatttgaatcgattgagctggcgctgaccggcatgatctctcgccttcagcgcgaagacgaaatgaaggcgctcgttagagaaggtgcaacagatgcgttagtcagggttgcatttgacacagccaccactgaggtagcgatcgataagctcggcgcaatcaatcgctcaggggatgtaagcggactgttccccgacgtggcacctgctgatgtgccatatctccttcgcctcacacacttgctcgatcaacgggagagaagttggttcatccaggctgatcctaagcaagcgggccttagcctctccaagcttcccgtgggaagggagggggctattgccagcgcggccttagtgcccgttcgcaaaaacgtaactgagcgaatcaaggcaaacatcagtcgcactgctgccctaatgacacagacgcaggagtgggaggctctcatttccgagcgcgataaagccgcgtcggccgcaagcacatcactcaagcctctagagagcatctatcaggagctctctgatcttgctgcgctcggaggcatggaagagacgctcgctccggactggaggagttcgggcggaaaggtacaggccttaggcgcatttcatgcatccctcagttcaagactcacggcaaagcaaaacaatctcactgaaaggatcaagctgcttgcggagcttgtcgggtcacttcagccgtatcaagcggacaggcaacgactggcagaagactctcgcaggatggcagagctgcgctcaactatcgagaatagtctcagcgaactagcgactcgcaatttggagcgagatgctgcgcagcttgcgatagcgcgctcccagtcgcgtagcgttgccatgaaagatgagatctctgctataagagccttggatcgagcgcgagaagtactgagtgctgctcgggccaagaacacgatcgacattgcgtccctgcaatccgctgaagatcagcttgcgctgattcgcgtcgaagtgtctaagttgatcgcagaggaggaagagctagcacgttcgtctcaccaggtttcgttgatgatcaaccttgaggcgagcctaatcaaggcatctgcagcagcacgagcttggcgcgacgaggtggcggaggcgaataggctagatgttgagatcgcagccaccaaggaccaagttgcgagattagcagacgcgtacgcggatgcggtgaaagtgcttgcaagtctcggacgtactcaaagagaggcttccgacaagtactcagcggcatcggcgtcggtgggtgaagtccgtcgagccgtttcgcttatcgtcacacacttacctagcgatagcgcagactgccccgcttgcggtgtgcatcacggagcagaagatctccagcggcgtctgcagatgtctctgtcgactgataatttagcgctacagtctgttgaggccgagcttaagagcatcagtggagaggtcgcaaagcaacagtcagtggtagacgagtctctacgcgcgttgcaagcagctcgtaccaaactagagagtacgcaggaacgtctgtctgagattcaaagtaatgccgatgcatacgcgaggactgagcatctctcaggttggtcaacgccagatctggcgctagaggccatcctccagcgtttagatcgagctagtgcagatctttcaagtcagaggactgctacggagcaactgaacgttcgcactagttccccggaagcgatggagctaaggtccatcctctcgtcgactcaaatcagagtggatggcctgcgatcagaagcccgtgcctcgcgcgagaatattgaaagagcgaccatcgagatggccagcctccagcagtcggcttctgatcgaggccttgccgagctggaagaggagcgcgtcgccttggacgatcgaatcgccgctgaagcgtcaagactggaatctctagaggcagcggcctccactataacgcagcttgtcagtaggctatccgcggagttgtcagcaatagagcttcaggcgggcgagattcaatcccggatcgctctacttgagtcgaagtggcgaagcctctctctgccaggctcgccatcgagtgaagtcataacagcgagtttagaaagtgtggaggcggaactgaaattcacgcaaagaagcgttgattggatcactgcgttgtcgggtgatcttgaagcgagactcgttgctgagcagaagaacgcgatccaagagctaatcgagcaaagaaagggcgggatgtcagagggcgatttttctagatccctacagacgcagaaaagcagcctagacgttcaagcgcaggaactcgcaaaactatcgtccgcgcttgaggcactttccagaaagcttgcagcagagattgacaacgtctacgactacatagctgctgtggtaccaagctggcaggttcttctcaagagaatcgtgcgtgagccaagatttgcaaacaccaccttgggcttgcaaaaccactaccgccggccagtcgcctccgttagcgtgcaaatgaatggagaggatatagccgcgccgttaattgctagcgaagcgcagatgacagacttgcagctgacgtttcttttgtcgatggcgctaaatcataagtggtccacttggcgaggacttctcctagatgatcccacgcagcaccatgatttagtccacgcttcgtctgtgttcgatgtccttcgtgattacatagttgaccatggcttccaggtggtactggcgacacatgatgcttcacaggctcgatacttcaagagaaagctgctcaacgacggagttgacgcacgaatttggtcgcttgtcccagaggatggcggagtggcggcgcgcgagagccggtga

SEQ ID NO: 510924 - DNA, 717 bp, Stenotrophomonas maltophilia
atgagtgtgaacgaggtgcgagcactgctcgcgcgtatggatagggccgacctgcattccgtgcttgacgtattgcgcaaggagcacaagcttgtaattcacccgattgaagaagcttggagcaccactgcggaggcggtgctggaggcgatctacgccgctccggatctcacgcagcgtggggtgcgcggtgtgcttgcagaggcgattttccgaactacggttgttcccagcattggcggatggaaggccatcgattttgaaggagatcttccttacgacttgctgatggatccacgggacggacgggaaccgctcaaggtccaagtgaagaaccaacgccgcgaaagaggcattccgaaggtcatcgcaaagcttgcagccagcgacggttccccggtctatgcggttgagacacagagaacacgcactggtaagcgagccggcgacgatggacagcagacagccactcggccgtaccggttcggagaattcgatcttcttgcggtatgtctccacccctccagtggtagctgggaggatttcatttactgtccagccaacttgctaatcgcccgaccttcggaaccagatttgcttgctgtgatgcaaccgatctacaccgatggcagcaacggatggacgcgagacttcgggaaagctgctgctgccacctattcgctagcaagaggtgaaggcgatccaagttcctattag

SEQ ID NO: 510925 - DNA, 1053 bp, Stenotrophomonas maltophilia
atggccgtcgccggcactgcccccctgagcattgacactgatccgtccagagacgggaaagtgccaaaaatcgatggcttcaaagctgtctacacgacagaagtgggtgctgcatatctggcggattccctggaagtgctccgcgcgttgcccgacagcagtgtagatgcagtcatcacctcgcctccgtacgcgctgcatttcaagaaagagtatggcaacgccgacaagagcgactatgtggcttggatgttgccgtttgcacgcgaagttcgtcgggtgctcaaggatgaggggagctttgttctaaacatcggaggctcctacaacaagggcgccccgactcgttcgctttaccactttaagctgttgattgctctggtagaggagcttggttaccacctagctcaggagtgcttttggtacaaccctgcgaagatgcctacgcccgcggagtgggtaaacgttcgccggatgcgggtcaaagactccgtcgagtatgtctggtggctatcgaagaccgagtggcccaaggcgaacaatcgcaacgttctgaagccttacagccccgatatgctgcgtctcgccaaacgaggagtccgctccactacccgcccttccggtcatgcgatcaaagcatcgtttgctagcgcagatgccggaggcgccatcccggctaatgtgatcgaagacgacagccctaccgatctgctgaagtttggcaacaattccgccaatgatcgttacaccgagcgatgcagagccgaaggattgaagatccatccagcgcgcttccccagccagctgccagaatttttcatcaagcttttgactgaaccaggcgacttgatcgtggatccatttgccggttccaatacgacgggagcagttgccgagagcctaggaaggcggtggatcgcgattgaccaggttcccgagtaccttcgagccagttcattccggttcgatccggtaccagaggtctcgaaacgcctcgaggtcgagcaggcggtacctaaggccaaacgcagcaagaagacagccagggcttaa

SEQ ID NO: 510926 - DNA, 543 bp, Stenotrophomonas maltophilia
atggtgctcacagtcgttgacactctccagcgcctggccgatgcgatcgtcgatctattgcaggacgagcgtttgaggtatgccgcccctggagaacgcgcagtcgtggcggagctgtatgtgcgtctccgggagcgatttacggagtatcgagtcagcaatgaatacgatcgctgcggtcgcgctgtcaaggaactgatctacgccgacgcggctggcaacatgcatgatgccaaaatcgtgccggaccttatcgtccatcgtgtcggcgcacaggaccataacttgttggtcgttgaggccaagcgccaaatcaatcgtgacttcgccaaggacatctggaagctgcgtgggctgaccgaccaaggcggcccctacgcttactcagtgggagtgcatttggtgctcgacattcctgcgagtcgcgtgtgccgtgctgatgtgtacatagatggagcgattgacgccgaagcgactcaatggtttagacgccacttcgttggtctcgtgtacgaccagcacgaggacgaaccagcaccatga

SEQ ID NO: 510927 - DNA, 1065 bp, Stenotrophomonas maltophilia
atgatttacattggagactgcctggacgtgatgcgcggcatggccgccggctctgtgcaaacctgcgtcacgagtccgccctactatgggctgcgcgactacggcatgccggcgaacgcctgggacaccgtttactactcgatcttgggcgcacaggtgacggttgagcccatgcattgcgcgctgggccttgagcccaccccagaagccttcgtaggccacatggtcgctgtgttccgcgaggttcaccgcctcttgcgcgatgacggcacgctctggctcaacctgggcgacagctatgccagcaagccgaacggcagtgttggcgccacaggactgcaggggggcctatcgcctcatgtctcggtccggcaggcacacgcgcgccggtcatcgcagatcccggcagggctcaagcacaaggatctgatgggcatcccctggcgcgtcgctttcgccctgcaggcggacggctggttccttcgtcaggacgtgatctggtcgaagcccaacccgatgcccgaatccgtcaccgaccgctgcaccaaggggcatgagtacctgttcttgctgagcaagtcgccgcgctactacttcgacgccggcgccattcgcgagcaggcagtccatgaccctatggccgcccggaatcgctgggaccggtcagactacgaagtgcctggccagaagccgcagaagcgccgcagccgggcagcagttccacccaggcacgctgcctgcggcagcacgcaggatggcctggatgcggcgggccgggatggggcgcgcaacaagcgcagcgtctggacagtggccacccgcccgttccgcgatgcccacttcgcgacctatcccgaacagctgatcgagccgtgcatcctggcaggcgcgcctgccggcggcctggtgctggacccctttatgggggccggcacaaccgcagtggtcgccgagcgcctgggtcggcagtgggttgggtgcgagttgaaccccgaatacgccgcaatcgccgaggcacgaatccgggtcgcacagcctggcctttcgtttggagacgtcgcatga

SEQ ID NO: 510928 - DNA, 195 bp, Stenotrophomonas maltophilia
atgaccggcgctgccctggccaagcacgtcgcccgcgtgctgctgaccgaatgccgggcgcgccgacacggtctcggcttctggtttgccttcaacgctgcacagcgcgcgcgcatgcgcgcgaccgctcccgcaccactgccggcgccgccgcgcgcactggcactgccggcccaattggacctgttcgcatga

SEQ ID NO: 510929 - DNA, 1962 bp, Stenotrophomonas maltophilia
atggctgacggctcgcgcgctttcaacttccccatgccgcaacgctcccggctgcgccccggcgagatcgttgtggatctcttcgccggcggtggcggggcatcggaagggctcaagcaggccctcggcatcgatcccgccctggcctacaaccacgacgagctggccatcggcatgcacgccgccaaccaccccctgacccagcaccaccgcgaggatatctggcacgccgacccgcgcgtagacgtggccggccggcccatcggctggttccatgcctcgccggactgcacgcacttcagccaggccaagggcggccagccgcgcagccgcaagacccgcgcattgtcgtgggtggtgttgaagtgggttggccagctgctgcgtgctgatcggctgcacgggaccaacacagcgccgcgcatcatctccatggagaacgtatggcagatcctgacctggggcccgctggtggcgaagcgctgcaagaccaccggccgcgtcatcaagatggacggcacggttgcagcgcgcggcgagcgcgttcccgtggagaaccagcagctggtgccggacaagcgccacaacggccgcacctggcggcagttcgtggccgcactgcgtgcgctgggctatgtggtcgagtggcgcaagctcgtggccagcgactatggcgccggcaccagccgcgaacgcctattcctgcttggccgccgcgacgggcaagccatcgtctggcccgagccgacccatggctcggccccagggcagaagccgcgcgtgaccgccgccgactgcctggacttctccatcccctgcccttccatcttcggccgcaaacgagaccttgcagatgcgaccatgcggcggatcgcgaagggcgtaatgcgccatgtgctgcagtccgctgagccgttcctcgtgccggtgccggccacctgtcgcgacaacagcagcgccgcagctgccttcatcgccgagcacgcgaacagcagccatgccctcggctccatgcgcgccgacgaaccgctacgcacggtatgcgctggggtgaagggtggccacttctcggtggtgtcacccatccttgccggggtgggcggccgggccgggcagtctgagccgcgttccggcggcgagccgctctacacgatgaccactaaagcggacacggcgctggtggcaccgacgctggtccagactggctacggcgagcgcgagggtcaggccccgcgtgcgctggacctgcagcagccgctgggcacgattgtcgcgggcggggtgaagcacgccgtggccgcgccgcacctggtgaagttccggggcgacagcatcggcacggccgctaccgagccagtgccgaccatcacatcaggagcaggtgccgcgcgcccagccggggctgcgcacgcccttggcgtctccgcggctttcatggtgcaggccgcgcacggtgagggtcggccgaatggtcccaagcgctggggcatcggcagcaaagatgctcggtcaccgatcggcacggtcaccgccagcggcaacggcgggcacgccttggcagaggctgagctggcccagctgtcgcctgttcaggaggccggcgcgctgcgcgttgcagcgttcctggtgaagtactacggcaccggtgcgaacgcgcctgcgcttcgcaaccccgtggataccatcacgacccgtgatcgcctggcgctggtcacggtggtgatcaaaggcacgccctacgtcatcgtggatatcggcctgcggatgctcaagccacatgagctgttccgtgcgcagggcttcccgtcgacctacatcatcgaccggacggccgacggcaccacgttgaagaccacggctcaggtccgcatgtgcggcaacagcgtcagtccgccacccatgttcgcgatcgctgacgccaaccttgacccggtgccggccgacctggcggtggcggcatga

SEQ ID NO: 510930 - DNA, 225 bp, Stenotrophomonas maltophilia
atggctgaccagctgctcaccgctgcaccaacgcgcgccgtctccagcgcgcgcttcatcacctctcccggcaccagcgtgctggcggcccgattccagtgcctgctggactgcggtcatgtcgtcatccgaccaggtgagcacgtccgcggcacgaggttctccctgcgtgccccattcaccgccctatgcaaccaatgcccgaaggaaccctcccatggctga

SEQ ID NO: 510931 - DNA, 297 bp, Stenotrophomonas maltophilia
atggctgaagcaatgatgctggtgtcccacggtgcaaaggcgcggcagaacttcgacgctgacccgccgcgctgcgtgacatgcgtgtacttccgccgtgagccgcacaccctacacgagctgcgacaggtgaagaaccgccgcggcaaggtcaagacgatcaaagtcccgatgcgcaaggacgcgctgctgaaccccatcgtcgaccgctgtagcttcgggaacttcctgaccaagccgcatgccatctgcgacgagtggcacagccgaaccggagaggtgatcgaccatggctga

SEQ ID NO: 510932 - DNA, 195 bp, Stenotrophomonas maltophilia
atgagggcgccagcgatcaagctcccagcacctgacctgacgccggaccagcgcgcggccttggagcgcgcgaagcgtccccgccggcatccctaccgcgtgtattgcacgcaccaggcgagcgcgcagcgtcagcgcgaggcggaagagcagcgccagcgcgtcgcgccgaacctgcacaggttggtgcgctga

SEQ ID NO: 510933 - DNA, 675 bp, Stenotrophomonas maltophilia
atggactggcggaaagcctttgtttttttggccggcggagtcataggagcggcccatgcagcggcgcagccgttggttgtcgtcaaagagggagcggaagagacgaacccagtcgagcgctcccttgctgcaactgcgggggctccgtttgaattcatgggcatcacgcttggagcgccattgggtcccgagtgcccgcgcgagcagatcccgcatgctggggcggtctacaacctaggtgctgcgaagtcagcgtgctgggtggcaaccggcatgcagccaggggcccggaccaacacgatcaacaatgatctgttgacggtggtgccgctcagcaacaagaggcccactggaacaggatcggtcacggcggtcgtcgtcaacggggtggtcgaaggcctgacaatctcgaccgatggtttcgtgcacgctcaagaactgttcgagcagctgaaaatgaagctaggcgcgccgacaaagcacgacacagtgcaggtggtttccggggttggcgccaacttcgttggtccgagagcagtttgggaactgcccggcacgtatgtccagttcaacggcattgtcggagccgtcaactcagggatcatcctggtgtataccgagaagggcaaagctcgagaagcggcgcgccagcagcagcgcgctaagtccttctga

SEQ ID NO: 510934 - DNA, 234 bp, Stenotrophomonas maltophilia
atggaaaacgatcaggttttgaagacttcactggagcccaagcccggcaaacagaacacggtcaacaatcccaacggccgggacgtggacgtcacgatccgcttcaactcaggttcgtcggtgaccttccttttgccagccaacggttcgttctctttcgtgagcgagggcgacgttgcggacatcaacatggtggttcggcccccgctgaccgggcccacggccatcgactga

SEQ ID NO: 510935 - DNA, 225 bp, Stenotrophomonas maltophilia
gtgaccgcgctcgagttgaacctacagccagtcagaggtctgggaatctcgaagcctcacatcaccttcggtcggtacttcgatggctcgcagatggtgaaggtcgacttctggccgttctggcctgctgatgctggctggtcccatgccgcgggggaagacctgaaagaggcatgggaagcacacatgcagtgctaccaagaagatgatgaggaggtggcctga

SEQ ID NO: 510936 - DNA, 402 bp, Stenotrophomonas maltophilia
atggacgccgtcgagaagcgggcgcgggagctgttggccagctgtttgcgtggcaagggctggactggtgagttcgctgcggaggtgctgcaggatcgcccggctgacgtaaggatctccggagctgacgcgatcgaagcgcttgtcgccgccctcacgccgcccgatggctacgtgcttgagcgcagcgtgctggtggctgcgacgaggctcaggaaattggccagtgccgcaacgcccatggctcgctcggcatacatcaaagctgccgagttgatagagatggcagtggtcgcggcccgaccggacacgcctgccagtgcgacggtgaccgttgcttcaaagggggaagcagaggaactgagcaggcgacgcgttgcacgcatcgaaggggctgaatga

SEQ ID NO: 510937 - DNA, 804 bp, Stenotrophomonas maltophilia
atgatctcaaatttggagcggtacaagaatgacctgaacgcgttgatcgcaacgggtgatgcccttctcaatggaattaagcgatatgcgtttcgcagcgaattcgacaaggaagtaaaaaagcaactcggggagggggctgaagagttcctgaaagctgttccggacttcaaatcggagtatcaggcttggtattcggaggcgcttagccttattagacagttgcttcctgatcgtttggccgacttcgtgcgccactatgagaagccaaaatcccgaaagtcaatcggctttgaaagctatcggattgaagatgggcttcaagggcttgaagtaacacgggggcacgaaaaaatcgttggtattgatgcggcagttccgcactttcaacaacagttggccattctcaagtcggttaagccaagattcgaaagctctctcttcgatttgagtcaacttgttcaagctgatttgtttgattctgagttggatgccgctggggcacttctaaagcagcgtttcactcgggccgcaggggcaatggctggcgttgtccttgaacgccatttggctcaggtatgctcaaatcacgccatcaaagtggcaaagaagaacccgggtatatctgacctgaacgagcttctgaagagtgcggaagtaatagatgtaccgcagtggaggtttatccagcatctgggcgatgttagaaatctctgcgatcacagtaaggcggtggagccaacggcggaacaggttgctgatcttgttgccggtgtgaagaaagttacgaagacaattttctaa

SEQ ID NO: 510938 - DNA, 750 bp, Stenotrophomonas maltophilia
atgttcccctggccgggcgggaagacacgcctggcgaagcacctgctgccgctgatcaacgatcggccccatacctgctacgtcgaagcctttgctggcagcgccgccatgctgttcgagcgtgcaccggccaagattgaagtcctgaacgacacgcacggcgagctggtgaggctctaccgcgtagtagccaatcacctggacgaattcgttcgccacttccggtggtcgctgaccagccgggaaatgtaccggtgggcacaactgcagcacgtcgagacgcttaccgacatccagcgtgccgcgcggttctattacctgcagaagctgagcttcggcggaaaggtagatggtcagtcgctgggtgtaggccccacggcagtgaagcgcatcaacctgctccggttggaacaggatctcagcgatgcgcaccttcggttgcaaggtgttgtgatcgagcagttgccgtggcagcgctgcatcgagaagtacgaccgacccgagacgttgttccttctcgatcctccctattgggagacgacgggctatggaagcgagttcggcatggatcagtacgagctgttggcagaagcaatggccaagctcaggggccgggcaatcctgaccatcaacgaccatcccgctatgcgggcactgttcgactgcttcactcgcgtcagtgtcccaatccgctacaccgttggcggcggcatgggcgttgcgcggagcgagctcatctatacaacctag

SEQ ID NO: 510939 - DNA, 2772 bp, Stenotrophomonas maltophilia
atggctgatccttcagcaaatctgcgcgtccgcatcagcgcggacctggccgacattcggcagggcttgggcgtgctcactcgccagctgcgcgaggtacgcacggaagcggccaggccgctgccgacgaagaacaacatcacggatctgggggtctctgcagggcagacagcgcaggcgatgcgccagctaccggcgcagttcaccgacatcttcaccagcctgcagggcggcatgcccttcttcacagtgctggtgcagcagggtggccagatcaaggacagcttcgggggtgtggagccggcattgaagggggtctcgtcggcgctgctggggatggtgaatccgtataccgtggccgcggcggctgtcggattggtggtctacgcctggtatgacgccgagcagcaggcccaggcctacacgaaggcacttgtcctgtcgcgcaatgaggcggccgcgacgaccctgacgctcgtcaccatggctcagaagaccagcgacgcgctgcaggtcgccgccggcgttggtgccgaggcggctcaggccgtcggctcgaacgggaagattgccgcgcagaaccttcaggacgtagccaatgcggccgtggcgatgaaggaaatcagcgggcaggcgctcgatgaaaccatcgccctgtacgcgaagctggcggaagacccggtcaaagggatgcagaagctcaacgagcaggtcaacttcatgaccgtggcgctctacgagcaggtgaaggcgttgcaggagcagggccggaatcaggacgctgtgactgtgatcacccgtgcagcagcggatgaaaccgtcatggcgctcgctcgggtccgcgccagccagaacccggtgatccggggattcaaggacctgtgggtcgaggccacgaaggcgtggtcggcgatgcaggcgagcgtgggcctcgggccggcggcagcgcaaatgcagcaacttttggctgaaaaccagcgggaactggagaagctgaacaatctggctagtggcacccagcggggcctgccgttggcccggaatcccattgccctggctgcgatggagaagtcgatcaaggaccggtcggagaaaatcaaggcgttggccgtcgacctgatcaaagaacgaaaggatgcagaagtaaaggctgcgcaggacgccagcgcggactacgtgcagcagcaggacgcgatcatcgaggcccaggccacgaaggagcagaagaagaagagggaaattgcccagatcaacggtcaggccgaggtcgtccggcgtaaagctgaagcggccgggctcgtggacgaggttcgtgccatcgaggaacgccgcgccgcagccgtcgccgctatcgagaagaagtatgcagagaagcccaaggcatccagcggatcggcttcgagggcggcagggctgcagggctacaaagacgatctgctggcagagcaggcgcagatcaatgccgctacccagatgctgcgtgctcagtactcggcgcgagaaatcacggcgggcgagtattacggtcgaatgcgggagctcgttcagaaggggactgacgcgcaggcgaaatcgttggagcggcagattgccttcctccagcgacaggcggtgtcgggaaaagaagccatcggcgtgaaccgacaggtcggggatctggaagcacggctcgctaaggtccgcaccgagggggccggcgctctgcaggttctggcgactgaggaagcggccgcagttaaaacgcgcctgaatgctatcgcggcgtatggaaacgccttggacgcgagcaatcaagcactacagcgacagctctcaacgcaggcccagcgcgttgggatgggtgatcgtgagtacgagattcagcagcgcatcaatgacgcctacgccgaccaagcggacaagcttcgagaactgcagttgcagttgaacgcggggcaaatcgatcaggaaacattcgagtctgagagagcgcagctgctgtcgaagacgctcgatcgcctgcagatgattcgagacgggtacgacgagctccagcaggcagagggaagctggctggcaggcgccaccgctgcctgggcgaactaccagcaggaggccggcaatgccgcgcggcagatgggcgacgtggtcggaagcgccatcggtggcttcgaagacgcgtgggtcaagttcaccacgaccgggaagctcagcttctccgacctcaccaagtcggtactggccgatctggcgcggatcgccgcgcggcaggcggcgatgggaatcgtgaacatgttcgccagtgcctggggtggcggtgtcaccgctgcgggtaaccaagcggtcacctccgggaccagcagcatcaataaccagctgttccagaacatgaggggtggctactccaccggcgggtacacgggtgacggtggtgttcatcagccggccggggtggtccacaagggcgaggtggtctggtcgcagagggatgtggcgcgcgcgggtggcgtcgaggtggtcgaggcgatgcgcaaggggctgaagggctatgactcgggcggagctgtggctactccggtcggttccggaatggccgccggcgcgatcaatgttcgcgtgatgaacgcgccagcgggcaccaccgccagcgcgtctcgcaacagtcagggcggcttcgacattgaggttctgctgggccaggtcgacagctacatcggtggccaggtcgccagtggtcagggatcaacgtatgcagcgatggggagccgattcggcttaaaggactcggtgtga

SEQ ID NO: 510940 - DNA, 1257 bp, Stenotrophomonas maltophilia
atgccgcagaaactcatcgatcaaaccaccatccagccggacggccgcccaggcgacgacgcattcaccgcgtttgcgacctgcaacgacaacttcgaggattccgaacaacgtctttccgcgctggaaggcgggtcatcgaacatcggccaggacgtggccgacctgaaagttggcttgcagcaggagacgctcctgcgcacggacgccgataccgcgctttcgcaggctatcgcagcggaagtgaccgcacgccagaacgccgacactgcgctcggggcacgcttcatcggaaagaaccggcttatcaacggttcgatgcgctggtggcagcgcgggaccaacttcactgcgccgggctactccgtagaccgttggtacttcaacgctggcggcgtggcaacgccgagcttgtcacggaacactgtaacgccaagtgcgttcgacaccgaatgtatctatcttgccaaaatcgcatacggctctgtgactgatgctgcaaaccattacgtggtacttgagcaacgaatggagaacgtgaccacgcttgccgggcgcacggtaacggtgagcttcaaggtgttcaacagtggggcggcaggcagacagattgccattgaatttggtcagagtttcggcgctggcggaagcgcgcaggtctcaggcatcggcgcagctaagtacagccttgcggctggaatcaataccgtcactcataccgtgcaaattccttctatcaacggtaagactgtcggtgccaataattcactgattctgactctttgggcaacaggtggtagcaacttcaatgcgcgtaactcttcgctcggtgcgcaatctggcgatctgcatttcacacaggtgcagcttgaggaaggctcttcggcaagcgcgtttgactaccgacctgatggggtggaattggccctgtgccgccgcttctacaggaaaagttatatgcaaagcgatgcgcctggcacctacaccaacgctggacggttcactgcgggaaacggggctaataccaatcagatcaatcgcttctgcgtgcagcttggtgagccgatgcgcgccccgccttcgcttgtcatatacggcgcaccttcaggtactccgggagtcgtatcgcaggccgacggctccaacatcacagctgccgttgaagctatcggtgatgcgtctttcaatgtcggctggaacaacaccaacgggcaatggggcgggtggttccaatggactgcggacgcggagatttaa

SEQ ID NO: 510941 - DNA, 204 bp, Stenotrophomonas maltophilia
atgggtctctcgcctcagaagttcaaccggctcttggtagagcatggcttgcaggaaaagcgagacggccagtggtgtcctacggaggctggcgaagcgttcgccgtcttgctgcaggtccacaagaagcaaaaggctggcacggatgtgcagcagctgaagtggaaggagaatgtcctggggctgctgtgcggcacgcactga

SEQ ID NO: 510942 - DNA, 1017 bp, Stenotrophomonas maltophilia
atgctttcgggcgaggatccggagcgcgactacatcgttatcgcaagcccgatcacccgggagctacactcacagctcagtgacttgcttgctagccggccgctcaagcagaaggccactgtcgttttgagcacctttggtggcgacccggacggtgggtatcgaattgcgcgctgtctccgtcatcattacaaggacggactccgagtagccgttccgagctggtgcaagagtgccggcaccttgatcgccatcgctgccaatgagcttggcatcggtgataggggcgagttggggcccctcgacgtgcaggttttcaaaggaaccgagctgcaggagcgcagttctgggctggacatcacagaagcgctgggtgtcgtaggacagcatgttcgctggggctaccatcaaatgctaggcgaagcgaggcggatggggctgtcgaccaagctggctgcagaaatggccgcccacattggcgctgcaatggctgctccgctcctgaaccaagtggatcctctgcgccttggtgagctgcaacgtgccactcgcatcgcctttgagtacggcggccggctggatggctattcgcagaaccttaaggatgacgccctaaaatcactgatcaatgactacccttcccatagtttcgtcattgaccggaaagaagcttcgaacctcttcaagagggtgtcaccgcttacgcctgcggaaaacgctttcgttcagtttgcgtgggcaatgctgcaataccccagcgaacaccagcaacccagattcatcaattttccggttctccccaattcacacgaaggtacgtcccatgaatccgacattccagctgcagacgcagacccaggcgcagccccaagctccaaccagagcagtggagagccagtggacgccgggaatccaggggcaggtggtccgcgcgttcgagttcgctcaggacgcaatggagcgccgtcgggaagtggtgtgccagccgatgactcatcagagcctggtgctgagtag

SEQ ID NO: 510943 - DNA, 834 bp, Stenotrophomonas maltophilia
atggtcagggtggccgaactcgcgcgccgggccggcatcggccgcgcgcggtcgctcgtgccagcccgcggccagcagctgctcgatcaccacgtcggcgcgcaggtggtggcgctggaaataggcttcgttgtcgccggtacgcatcagttcgatgaagcgcacgctgaagggtcgatcgcgcaggtagtccatccactgcggcagctcgtcgtcgttcaggccacgcagcagcaccgcgttgagcttgatcgccgggaggcccaacgcctgcgccagcgccaggccctgctggatctccggcaggcggtcgtgcccggtgatggtcttgaagcgttcgcgttgcaggctgtccatgctcacgttcagcgcagtcagcccggcccggtgccaccccggcaggcgccgcggcagcagcgtgccattggtggtgatcgccaccttgcggatacccggcaccgccgccacggtggcgatgatctcgtccagatccttgcgcaggctgggctcgccgccggtcaggcggatcttgctcatgcccagcgcggcaaaggcccgcaccaggcggccgatctcctccacctgcaggaaacgcgggcggccgtccgcctggtagccgtcgggcaggcagtagctgcaccggaagttgcaggcttcggtgagcgacaagcgcaggtacggaaagctgcgtccgaagctgtcggtgagttggctcatggctgttccgcctcctggtaccaccctgcagccctgcccctgaacgggttgtcgaccccagcccgcagagtgcgctggggcgttgaaagcgtcaacccgggacagcccgcagcctga

SEQ ID NO: 510944 - DNA, 645 bp, Stenotrophomonas maltophilia
atgccgcggacactcccgcaaccggacccaccccgccttcgacagatctctgcgagctgtcgggcatggctttctgtagagccgagccatgctcggctcaaatcgttccgatttccagatactcgatttcgatggagattcgtctacgcatggcgtggatctaccagatcgcgagaatctgtcagagatggggcggtgtcggagtgcggggtgtcagccgcatgggcccgaggcatgcctcgggcgggttgggcaggacgcccaaccccggtcttgccgtgtgcgcaggaaagcgcacacgagcaagcggctgccaagcctacacggacgtacttgcggcgtccccgcactccgacaccgccccaccaccccacggaatccacgctgttgatgttgatgttgctgtggctcccagcaggtgcagggctgcaagccctgccgaacgcccccccttacttcaaacgcagcagcaggctgccgcccgcacacaccaccgccagccaggccacgccgtgccacccccactgcgccagcgccaggctgcccagcgcaccaccggcggccatgccgatgaacatgccggtgaacaacagcgcattgagccggctgcgtgccggcggcaccaggccgtacaccagggtctga

SEQ ID NO: 510945 - DNA, 1653 bp, Stenotrophomonas maltophilia
gtgggcttcaacgccaaggccgatgccggcctcggtgttgcaatcggcgcatacagcaatgcggcaaccagttggagcactgccatcggctacgcggcactcgcctccggcgaatcggcccaggcgttcggctggaacgcacgtgcctccggtgacaacgcgacagcactgggctacgccgccagcgcgggcgggaactacaccaacgccatcggcatgtacgccgaggcggggggatttgcctccaacgcggtcggcactttcgccgaagccaacggtgcatttgccactgcgctgggttacggcgccgaggcgaacagctggggcgccaatgtcctgggtgccagtgccaccgccagtgccgactacgcggtggcgatcggcaatgacgcgacggcgtcagcggccggttcggtggcgctgggccagggctcggtggcaaaccgcgccaacagtgtgtcggtgggcagggcgggccgcgaacggcagatcacccacgtcgctgacggtagtgacgccaccgatgctgtgaacaagcgccagctcgaagccgctatcgccgatgtggggggcgagctgggagacctgaccgccaacgccgtgcgctatgacagcaccgacaaggacagcctgagcctggaaggcagcgacgggacccgcctgcacaatctgaaggcaggtagggcaggcaccgatgcagtgaacgtgcagcagctcaacagcgttgcgcaggcattgggtggcggcgccggcatggatggcaacggcatgctgattgggcccgcctattcggtgcagggcgtccgcttcggcaacgtgagcggtgcgatcggcgcattggattcggcgctgagtggcctggattcccgggtcggtgcgctggaaggaggcagcggccccggcggtgagggtggtacgcgcccccccgtcggcaccggcggtggcctggcagtgggcgagggctcgctggccaaggacgccaacgacactgcgatcggcaacggttcgcaggtaggcgccgacaacagtactgccgtgggcagcaacagccaggtggctgcgaaggcacagaacgctgttgctgttggcgccgacagcagggtcaccggtgccggcggcaccgcgttgggccagggtgccgtcgcatcggcctcgggatcagtggccatcggccaggggtcgatggccgacgaacccaacgcggtgtcgatgggcagcgccggcaacgagcgtcgtgtcaccaacgtggcagctggcacccgcgataccgacgcggccaatgtgggccagatgaaggcaggcaacgcagacacgcttgcctcggccaggagctacaccgattcgaagttcaacggcctggatgatcgcttcaccgaggtcacccgcgaaatcgaccagcggcttggacagcaggaccgacgcatcgaccggcagggcgccatgggttcggcgatgctcaacatggccatcaacgccggcggcagccgcagcccgcgtgggcgcattgccgtcggtgccggctggcagaacggcgaacaggccctgtccatcggctacggcaagcagatcagcgagcgcgccagcttcagccttggcggtgcgttcagtggtagcgaacgttcggcgggtgttggcttcggcatcgatctgtaa

SEQ ID NO: 510946 - DNA, 444 bp, Stenotrophomonas maltophilia
atgctccacgcatttgcctactccagccacatgtcggctgcgctttccgatgaaatgctccggcagatcgtctcccgctctgccacgttcaaccgtcgcgtggacgtcaccggagcgctgctcgtcgacgggcagcggtttttccagtacatcgaaggtccgcccgacgggctggaagcggtcaagcgccgcatccaggacagccgatcgcatgctgccgtcgtgccggtactggacatggcgatcagcacgcgtgctgttccctattgggccatgacccgcatcgagaccgggcaggtcgtggtgtccggcctggtcaatgcgcgatgggacgaattcggccattccgttccgggcatggatcagctcgtcggcctgctgggtccgcactttccgcgcatcggcgcgctcagtgcccgccatgcgcccgtcggatccagctga

SEQ ID NO: 510947 - DNA, 645 bp, Stenotrophomonas maltophilia
atgccgctgcggcactgggggcccaggcccaggcgactggcaactcatcactggcgctgggcgtgcagtcggtggcagcggggccggcagcagtggcgctgggttggaattcggtcagcagcggtgacttctccacggccctgggcccggcagcgtatgcgtccggtgcgggcgcgctggcggctggcatggctgccagcgcggaaggtttccggggcattgctctgggttacgccgccgaggcgggtggcgacagcagcgtcgccattggcggccagtccacctgtgagcgcttctgcatccccttcactacgcaggcgcagggactcaacagcgttgcgctgggtgccggcgccatcgcctctggcaatcacgcgacggcgctgggcgcgttgtcgttcgccagtggcgacaacagtattgcgtccggcgcgaacgcccttgccgaggctgcggacagtgtgtcgctgggcgtcaattcgcgtgccgcggtgtccggtgcggtcgcgctcggtgcaggctcggtcgcagatcgtgccaatgcggtctcggtgggcaacagtggcacgcagcggcagatcatcaatgtggctgctggcaccgagggcaccgatgcggtcaacgttgatcagctcaatgaagtga

SEQ ID NO: 510948 - DNA, 774 bp, Stenotrophomonas maltophilia
atggtcagggtggctgaactcgcgcgccgggccggcatcggcggcgcgcggccgctcgtgccagccagcggccagcagctgctcgatcacccgatcggcgcgcagatggtggcgctggaaataggcttcgttgtcgccggtgcgcatcagctcgatgaagcgcacgctgaagggtcggtcacgcaggtagtccatccactgcggcagctcgtcgtcgttcaggccacgcagcagcaccgcgttgagcttgatcgccggcaggcccagcgcctgcgccagggccaggccctgctggatctccggcaggcggtcgtgcccggtgatggtcttgaagcgttcgcgttgcaggctgtccatgctcacgttcagcgcagtcaggccggcccggtgccagcccggcaggcgccgcggcagcagcgtgccgttggtggtgatggccaccttgcggatgcccggcaccgccgccacggtggcgatgatctcgtccagatccttgcgcaggctgggctcgccgccggtcaggcggatcttgctcatccccaacgccgcaaaggcccgcaccaggcggccgatctcctccacctgcaggaaacgcgggtggccatcggcctggtagccgtcgggcaggcagtagctgcaccggaagttgcaggcttcggtgagcgacaagcgcaggtacggaaagctgcgtccgaagctgtcggtgagttcccgcgcaggctgccccgacccggccggggccggcgcttctggtacccggatgagctggcctga

SEQ ID NO: 510949 - DNA, 261 bp, Stenotrophomonas maltophilia; identical to SEQ ID NO: 500966

SEQ ID NO: 510950 - DNA, 852 bp, Stenotrophomonas maltophilia
atggcctcgatgctgatgccgctgtgccacccgctgccactggagctggtgcaggtgttctgcgcgccggtgccggaacggcaggcgatccgcgtgtggtgcgagtgcgccagcgaggcgcgcaccggtgtggagatggaggcgctggccggcgtcaacgccgcgctgctgaccctgtacgacctgagcaagccagtggagccggcactgcgcatcgaaggcatccgcctgctgttcaaggaaggcggcaagcgtggtgtgtggctgcacccggacggcatggacgaggccgagcgcgcgcgtttcaagccgcgtgcaccgaaggggctgcagggcgcggcctgcgcggtgatcacgctgagcgatcgtgccagtgaaggcacctatgaagatcaatccggtccgactctggccgttggattgcagaagttgggcggcaaggttattgcgacggaagtgctacccgatggtgttttaccgctaaccgggcgcctacgcgcactctctgcggatggaatacgcctatgcttctgtaccggtggtaccgggctgggtccgcgtgacctgaccccagaggcgctgcgttcgttgaacgcgcggccggtgcacggcctggcgcagatggtgcgggcgctgagtgcgcagcacacgccgatggcctggctgagccgcgccgaggtggtgcagctgggcaacatgctggtgttcgcgctgcccggcagcccgaaggcggcggcgcagtgcctggacatcctggcaccggtgctgggtcatgcgctggcgatggtagagggagggcgacatttccctggtctccaacctgccgatcaacgcgagcgggagggcgcatga

SEQ ID NO: 510951 - DNA, 198 bp, Stenotrophomonas maltophilia
gtgaccgccaagggcgacctgcggctgtgcctgttcggcgagttcggcgtgccgctgcgcccgctgctgcagcgcgacgaggaccatgacgcgctgctggcacgcatcaccacccagcttggcctgaaagcggccgggcacggactgcaccagggccagaccgggctgaccccgcacctggcctcgatcggaggatga

SEQ ID NO: 510952 - DNA, 327 bp, Stenotrophomonas maltophilia; identical to SEQ ID NO: 498420

SEQ ID NO: 510953 - DNA, 243 bp, Stenotrophomonas maltophilia
atgaagccgaatttccaaggcttcgtagagccgcgcatgtggccgcaggacgacggagcgcgacgcgaacccgtgcttgatgctgaccacaagccgccgcgcgtggtgcgctatgtcggctggcggaagtgcatgcgctgtggtcagctcttttggtcggaggacgtgcagcgcttgcgcctatgcaccccgcaaccgaaccggcaaggatgcaggagcagacaagacgacgacggcatctga

SEQ ID NO: 510954 - DNA, 348 bp, Stenotrophomonas maltophilia
atgccaccactggaagcacgcctgagcgcgaactgggaaggccagcgctggagtgccggggcactgctgcgtgcggtgacccaccagcaccgcgtggccgagggccagggcaacgtggtcgcacaggacctcgggccgagtgcaggtttcgccacgttcgcgctcaacgccgcgtaccgtttcagttcgcagctgcagctcagcgcgggcgtcgacaacctgttcgaccgcgcctacagcgagcacctgaacctggccggcagtgccgacttcggcttcccggccgacccggtgcgcatcaacgagcccgggcgcagcctgtggatgaaggtgaactaccggtactga

SEQ ID NO: 510955 - DNA, 246 bp, Stenotrophomonas maltophilia
atgccatcgcccaaccacatccccgacgacgcgttccccgaatcggccatcagcccggccgatctagagagcccagagacgccggaagcggacccgcaatacttgctcgtgcagagcgggtttggtctccacgtccgtcttggcaaagacggcgaccagggattgcgcagcgaggacgaaatcgccgagctggtgcggcgagcgttgtatcaccgcaagagtctgacccttcatatcgagttctga

SEQ ID NO: 510956 - DNA, 183 bp, Stenotrophomonas maltophilia; identical to SEQ ID NO: 500317

SEQ ID NO: 510957 - DNA, 396 bp, Stenotrophomonas maltophilia
gtgggaggcctgcgccaaccggtgcatgccgacgatatcgcccgcgccgtggtgacctgcatcgccaccggtgcagcgtcggcacgggtgctggaaatcggcggtggcgagcgcctgccctatcacgcgatgttccgccgcgtgcacgccagcctggcacagccgacattggcgctgccgttgccgggcgcggcactgcggggcctggccgcgttgctgccgcgggcgcgtggtccggtgtcacgcctgcagcaggatctgattgcggacaatggccagctgcaggcgctgctggacatacatccgcggccgttccagcccgacgcggacacgtggcgaccgatgagctcgacccaggccgtgcagcggatcgctgcgtatcccggcaacggctag

SEQ ID NO: 510958 - DNA, 474 bp, Stenotrophomonas maltophilia
atgacccacgctgcccctccatccacccttcaggctccggcctacggcctgctgctcggccacaccgagtgccatttctgccacgccccgacccccaccgccgcgatctgggtgccctcgttcgaggagcacgacgacgagggtctggtggatcagggggagggtgccgtgttgcgctacatcgagcgtttggacgaggacactgtcgctttcgtggcgggccacgcgccctggcttcgtttcgccactactcgaacgtcagggcaaacctacctggcccatcactgcaccacctgtggggcccttcaaggggaccacttcgtgttctcgccggatggcccgtattggccccaagacgatgtccaacttgcgtctcttcgcttcatccgaggtttgggcccgctcaccgctcaagcatcggcaggacagagcgcgtggatggaccgggtccctgtgacctgcacccaggcgtga

SEQ ID NO: 510959 - DNA, 888 bp, Stenotrophomonas maltophilia
atgaactcgcgcagcccccttaccgtcgccctgatccaggagcgcaaccacggtgatgccgccgccaacctggcggtgatcgaagcacgcgtggccgaggcggctgcgcagggtgccaagctggtgctgctgcaggaactgcataacggtccgtacttctgccagcacgaatcggtggacgaattcgacctggccgagccgattccgggccccagcaccgagcgcctgggcgcactggcgaagaagcatggcgtggtgctggtcggctcgctgttcgaacgccgcgctgccggcctgtaccacaacaccgccgtggtgttcgaaaaggacggtacgctgctgggcaagtaccgcaagatgcatattccggacgatccgggcttctacgagaagttctacttcaccccgggcgacatcggcttcaagccgatcgatacctcggtgggtcgccttggcgtgctggtgtgctgggaccagtggtacccggaagcggcgcgcctgatggcgctggccggtgccgaactgctgctctacccgaccgcgatcggctgggacccggacgacgtgcaggacgagaagacccgccagcgcgacgcctgggtgctgagccaccgcggccacgccgtggccaacggcctgccggtgctgagctgcaaccgcgtcggccacgaggcctcgccgctgggcgcctccggcatccagttctggggcaacagccacgtgctgggcccgcagggcgaattcctggccgaagccggcaccgatgccacggttctgctgtgcgatgtcgacctgcagcgcagcgagcatgtgcgccgcatctggccgttcctgcgcgaccgccgcatcgatgcctacggcgacctgctcaagcgctacatcgactga

SEQ ID NO: 510960 - DNA, 717 bp, Stenotrophomonas maltophilia
atgaccaagacgtcgcacctgcttcccctcagcctggccctgtccgcggcattgctgctcggcgcctgttccagggacgcgcctgcgcctgcacagtcgccttcgggcaaggccggtgcaaccgccgtcggcaaggtcgcggtggcgcgcggcatcatcgacgtcgagggtggcctgatcgcgctggcaccgccggtggatggctcgatcaccgccgcaccggtgaaggaaggcgccacggtgaagaaggggcagctgctgctgtcgctggatggtgccttgctgcagcaggaggtggcgatggccagcgccgatctcgccttggccaatgaccgcctgaagggcagtcaggcgcagctgcgcgaactggagcgcaacgctactcgcctgtccacgggggccagcgaaggcgtgtcgtccaatcagcaggccgatgcggccaagcagcagctggcgggtgtgcgcgccgatgtcgacgtggccagtgcgcaggtcgacctggcccagcacaagctggaacacgccaggctgaaactgcagcagatgtcgctgagcgcgccggaagccggcaccgtggtcggccaggtgcctggccttggcgcattcgtgcaggccggcaagccggcaagccggcaatctccctgctgcccgcgcgcccgctgcaggtacgtgccgaactcagcgccgcctacgccgatgccgtgcaggtgggcatga

SEQ ID NO: 510961 - DNA, 366 bp, Stenotrophomonas maltophilia
atggcgatgtacatttctattggcgacgggaacgggccgccaggtgctggctggtccacttcgggtggggtgttcgattgcattgtagagtcgacaaggatgctctttcggcccgacgaacagtgctgcctaagcgatatctatgccccgctggatgagcagggacagaatttcattgttctcgactacgtcgatgagagctgctttaatttgttctattcgcggtgcaggcgggctatggaagagtttccttcctcggagcgagcgaagatcgttcccgagagtcatatcccaggaatcatatggaattggtccgaagttctaagaatcatgcgggaagatcctcgttatcgggagtccgcgtaa

SEQ ID NO: 510962 - DNA, 1623 bp, Stenotrophomonas maltophilia
gtgtcccagcagcggttgcgccagctcggtccagtcgttcaccggcgcggccaggaaggcctcggcctgcgcggcggttgccggcagcaccggcttcagtgcggtgaccagtacgcggaacaggttcaggccctggctgcacacggcctgcagctgcgcgtcggcgccttcctgcttggcgatgacccacggcttgacgtcgtcgatgtagcggttggcttcgtcggccagggccatggtcaggcggatcgccgcggccgggtcgttgcgctcgtaggcttcacggatcggcgccaggccgtcgacgaagcgttggtactgcgccgcatcgggcagctgcgcggccagctggccgtcgaaacgcttgctgatgaagccggcgcagcggctggccaggttgacgaacttgccgaccaggtcggcgttgacgcgggcgatgaagtcacccaggttcaggtcgagatcgtcgacgccaccgccggacttggcggcgtagtagtagcgcagtgcttccggttccaggccggcatcgaggaaggtacgcgccatcacgaaggtgccgcgcgacttgctcatcttggcgccgtccacggtcaggtagccgttgacgtgcaggcgggtcggcgcgcggtgaccagtgccgtgcagcaccgccggccagaacaggccgtggaagttgacgatgtccttgccgatgaagtggtgcagctcggtgctggtaccggcgcgcaggtgcgcttcgaagtcctcgccgatcctgccgcacagggtctggaagctggacaggtagccgatcggcgcgtccagccagacatagaagtacttgcccggctggccgggaatctggaagccgaagtacggcgcatcgcgcgagatgtcccacgcgcgcaggccaccttcggcattgagccactcacccagcttggccttcacgcccggcagggcgacgtcgccggccagccattcgcgcaggaacgcgtcgaagtggcccacctcgaagaagaagtgctccgaatcgcgcatttccggcgtggcaccggagatgaccgaacgcggttccttcaggtcggtcggcgcataggtagcgccgcacacttcgcagttgtcgccgtattggtcggggctgccgcagttcgggcagatgcccttgacgtagcggtcgggcaggaacatgcccttggccgggtcgtagaactgcgccaccgaacggcggctgatgtggccggccgcttccagcttcaggtagaactgctcggtcagcgccttgttggctgccgaattggtcgagtcgtagtggtcgaaggccacgccgaaggcggcgaagtcacgttcgtggctggcctggatgttggcgatgaaggtttccggggtgaccccggccttttccgcggccagcatgatcggcgtgccatgggtatcgtcggcgcagacaaaccaggccttgccgccactcattcgccgcgcacgcacccagatgtcggcctggatgtagccgaccaggtggcccaggtgcagcgggccgttggcgtagggcagggcggtggtgacgagcgcggtacgggtcatggtcgcggggtgaagccgaggggaaccgcagagtatcgcatgcccgcaacgaggtga

SEQ ID NO: 510963 - DNA, 915 bp, Stenotrophomonas maltophilia
atgtttgggatcgggatcgatgtgagcaaagccacgctggatgtggccgtccatggagagcagtttcgccaattcagcaacgacaagcgcggctttgtgcgcttgattcggtggctgaagacgtggccgatcaagcaggtcgttcttgaggcaagcgggggttacgagcgtgctgctctggatgtattgcacgccgctggcctgccgatggtacgaatcaatccggcgcgtgcacggcgatttgcccaaggcacgggccgtgccgccaagaccgatcggctcgatgcgacagtgctggcacaaatggcccatttgttgccgctgacccgctacgtaccccctgctccttggcagcagcgtctggctgaatttgcgcaatgccgcaggcaactggtgcagatgcgggtcagtgagatgcagcgcttgcggcgattggtcgatccggatctgattgcgatgaagcaacgccatatagctcagctatctgacgacctgaagcagttggataaagctattgccgagcagcttgaggggcagcctggctggaagaatatcggcgcgctcaaaggcgtcggccccatcctgatcagcacactggcctgcgagttgcccgaactgggcagcttgggaagcaaagccatagcatcgctggtggggttggccccgatgaaccgcgaaagtggcacctggcagggccaacggcggatcagtggtgggcgcgcggtggtacgcgaagccctttacatggcggccctgacggccatccggtacgagccaaggctgcgcgcgttttacgctggcctgaaggccaagggcaaagcgagcaaggtggcgctcgtggcggtcatgcgcaaaatgctggtgatcctcaacgcccgtaagcgagacgccgaggtggccctcggctgcccctga

SEQ ID NO: 510964 - DNA, 1356 bp, Stenotrophomonas maltophilia
ttggatctggattaccgcccgcaggcggtgcatgacccggccgccggtggcctgtcgctgggctatggctacgatcccgtcggttcgattaccgagctgaagaacggcacaggctcgacggtgctggccaagtacgcctatgacgcgctgggtcgcttgacccagacccaggacggtacgaccggcacgccgatcgaaacctatgcctatgacgccaccggcaatcgcaccgcgctgaccacgtcggcaggcaccgccagctacacctatcccgcaaccagccaccggctgaccgcagtggatggcgaggcgcgcacccatgacgcggtgggcaataccaccagcatcggcagcaagacgttcacctacaacgacgccaaccgcatgaacgcggtgaagcagggcaatgcggtgctggaaagctacggttacaaccatcgcggcgagcgcgtgttgcgctccgcggccgccggcgcggctcagatcaccttgtacgacgaggcggggcagtggctgggcaactactcggccacggggcaggcgcagcagcaggccatctggctggacaactacccggtggcactgatcaacacgccggctaccggcgtgccggagctggcctacgtgcagccggatcatctgggcacgccgcgcgtggtgatcgatccggtacggaatgtctcgatctgggagtggagcaacaagagcgaggtgttcggcaaccagattccgagtgcagacccggacggggatggtgtggcgttcgaactggcactgcgcttcccaggccagcaggcgacggatgcgagtgggctgttctacaaccatcatcgcgagtacgacccggcggtggggcggtattcgcagagtgatccgattgggttacgaggcggaatcagcacctacgaatacgttggcggaaattcacttagcttaatagacccgttgggattaaggaacgtgcacaagacagccgtcgcaattgggaatgcgatcaacgctgggcgcttgcttgcttcgggtacgctgaggatcgctggaggacttggcatggagggggcagtagtgactgccgcaccgggctccgcaagtattgggctgggcgtctggaacatcactagtggccagaaggcgtgggctcgcgccgagcagcagtgggcggaggcagcctgtgaagacagtagcaactattcgaggggcgacgtcctgaagacatactcgggtttgttgccttggggaactgagtcagatgaccccggtgagcctttttggattgatattatggagaagcacgttaaggaggctgtccataagccaagggaattcttgcaggaagtaggaaccataggactatga

SEQ ID NO: 510965 - DNA, 783 bp, Stenotrophomonas maltophilia
atgaagcacacacacagcaacccgttgatttcctcccaccatccgttgctggtccctgatggttaccagatcaacactaagcccaccgagcgactggccaatttcattcgtaaaaacatctttgaagggcaccatgggtgctctgcctatgggggcggcggcgcggggaagagcaccgccattgcctacctcaccgacaatgctccgcgttggttgattgacagcgacagatccccgatgggcgttgccatgaggatggtcatggccagcggtattcggcgcacggaccgcgcattctggtcgaccatgaatgatcggatggggatcggtagctcgagcgcaacctcagcagcggcaggaatggccaagctccggaacctaatcggcagccgctgcggccaagccggcgtgagcaggatggtcctgttcatagacaatgcacagcggatcaccgaggcagagtacgagtacttggaagacctggacagcatggtcagggaggaccggttgagcctgttcctggtgctgatgcgccagagtgacgccgaaggcgtggacgtgggtgatgactggcgtgaccgtgcatcccacagtatccggcgctggttcatggccactaccccctttggcccattgatgggactggatgaggttaagcatgccttgagcggttacgacagcagctggtggccaacgcccgacgtgccctacagtcgctacttcgcgcgctcggccttcgatggcggttggcgcttggcgatggaggcgccgctgatctggtag

SEQ ID NO: 510966 - DNA, 534 bp, Stenotrophomonas maltophilia
atgtgcaccttcatcaccgtgttcctgcccacgtcattgccgcacgacgcggccgccgcggccttcacccgtagcggccggcgcctgttcgcgcaggcatcaccgagcctgcaggcggcggtgggcccggattggcagccgtggctgagtgccgcgtactgcgattgcggcaccgcgctggcctcgacgagtgtgcagccggaatggaagggcgatgccgaacgttggcggaagaagggctggagtgaggccaggatcgctcgcgcgctgtccgagcagttggcgcggcatgaacaggatcagcaggtgtgccgcgatagagctcttgccgacgccggccaatggctgcagcgcattgatgccctgctgggtgtgggtgcggcgcgtatcggacttctggtgcgtgtttacgacggctcggtgggggcccggcagccgaagccgccggaacatcattggtcgcgggatcagctcgccgcggcggatctgttggcgttcgcgcccggcacgttgcactggatcgaacgcgggtga

SEQ ID NO: 510967 - DNA, 1248 bp, Stenotrophomonas maltophilia
atgtcccgtttcgtgaaaaacctgggttccacttcgcttgcctcgcttgcccttctgctgcctgctgcccagctgagcgccagtccgctggacgagactttcaccgcgttcagccgctgcgacgccagcttcttctccagcctgcacacgcacgcagatgcatgggccgcgcacgcatcgttgggtgggacaggcacgatcaactggatcgagaccaaggatcgttccgagaccaccaacgaggtccagctccgtggcggaccccgcatcggcggcctgccggtcgccacctacttcgacaacacgtcggacctgggcgtcctgggtcgttatatgagctgggggttcaccttcgatgcgccactggacacggttgtcaagcagctgtcgcccttgatcgaacatgccgagcgcctgcagggcgatcgcggaatgcatgcccgtagcgaggtccgcgcaggcgatcagtggctgcccacttccaatcgtggcggcattgcctccggacgcatgcttctggaacgggtgctgatggtggaatccagcggcggcaggaccatggtgggatgttcgctgcaaggggcggtagatgccgatgtcatggcccagctccgccccgacgtacccgctgccgatcgcccgcagccgcaggcggccggccggcgactggaagatgtgccggttatcaaggctgttgttgatggcgtggacaacccgttgctggccccccggttcacatcgctgacctaccgctaccggatcaagggaagggccccctccactactccgaccaccattacgatggtggccgacaacggcctgttgaagatcaccgaggactacacctcgttcaccatgcatcggctgtcaaaggcaaatctcttccagctggcatccatgcgcgacgctgcgatgaccctgcagacccggtcgctgaagcaggatcttcccgcagcgtggacacccggcagccggttccgcgcagagacgacgatggtcttctatccggaacgcagcacttccaagccactcgccaccacgctgtcctgcgtgatcggagaacgcttcccggcacgcgatgtatcagcctcgctttctggcgatgcgatccggctggagtgcaaggtcgacggcgatcgcagtgttcgtgccttcatcgaggacctcggcatcgcgatctccctggaatcgcatggcaagtacggctcatcggtctacgacatcatcgatttccaggtggtacgctga

SEQ ID NO: 510968 - DNA, 783 bp, Stenotrophomonas maltophilia
atgagcttcgatcttcaactcggtggcctgcgggccgtggtgaccggcggcacggccggtgtgggggcggccgtggtcaggaccctcgccgaggccggggccagggtaatgacgtcggcgcgcagcctgccggcacgcccggtggaaggagtcgcctacgtagccgccgatctgtcgacggccgagggcaccggcattttcgcccacgccgtgctgcaggcatggggcggcgcagacatcctggtcaatgtgctggggggatcaaagacacctgccggtggcttcgcagcgatcagtgatgcgcactggcttgccgagctgaacctgaatctgatgccggcggtccgcctggatcgtgccttgctgccatccatgctcgcgcagagcgctggcgtgatcatccacgtcagttcgatccagcgcatgctgcctctgccggagtccaccaccgcctacgccgccgccaaagcggcactcacgacctacagcaagtcgctttcacgagaggtcacccccaagggcgtgcgggtgctgagcgtagcgccgggctggatcgagacagaagcatccagggaatttgcagaacggatcgctgcggaagcgggaaccgactatgaaggaggcaagaaggtggtcatggactggctcggcgggatcccggtgggacggcccgcggcaccgcaggaggtggccgatctgattgtgttcctggcgtctccccggtcggcgtcgattgccggaacggagtatcggatcgacggcggcacggtttcgaccctgtag

SEQ ID NO: 510969 - DNA, 2196 bp, Stenotrophomonas maltophilia
atgaaatggcaagaagtagaagttgaatgccggaaaatcgctgagtcggtgtgggggcagccagccaaccccgagagaattgccggcgtcaactgcgatgcagttgtaaaattcaagaacaatttctggatcctgattgaggtatcgaaacaggatgacctggcaaaattgagagatgacatctcaaagttggcagttatgcgccaatcacttatgtccaacggcacattctcagagtgctacttcattacaagtggaagccacccatctttagtcgaaacaggaaaatcatgcaacgttgaagtccacagcctacatagcttcgcatccaagttcattggctcggaaagatatcttcaagagcgtgctcgatctccgttcggaagcgcagtacacccggatacaggtgacattgacggcaatgcgtattcaagcattgactacgtcagcaccgcagggaagaactactctgtcagtgaagtcgcaatggcgattagccagggcaggaaggttatcctgatgggagaatttggcactgggaagtccaggtgcctgatggaggtgttcagaaacctctcgcaagacaatccaacattcccccccgtggcgataaaccttcgggacaattggggctacaagaagttccatcacatcgtcgggaaccaccttgaatcccttggactaggagatttcaaccagactctcgtacgcagccttaggcggggaaaccactcaatccttcttgatggcttcgatgaaatagggtcgcagtcctggtctggtgatgccaaacgactgacagagataagaaagagaagcttggcgggagttagggacctgatcctaggcgccccgacttcaggaattttgattacaggaagagagcattacttctcttcgcttgacgaaatggcggaatgcctgggaattgaccttggcaacgctctggtgctcaagtgtccagaggagttttcagagcatcaactccaaaactacattaaaagcaacacctccttgggatccgtacccgaatggatgccaagaaaacctttaatctgccaattactagcaaggctaccaccaaacgaagttgctcgccttgagcaagctgcgaatggcgaacttgaattcttccaggcagtatttgatgcaatctgcactcgcgagacgaagataaatccagccattgtcaaggacacactgaagaatattctcctagaactcgcgcaacacacccgaagactacctgaaagcgacgaaataatatctacagatgaaataaaccaggcattcttcagtgtcaccggatatgcgccaatcgatgagtcgtcgatcctgctccagagactcccctatctaggtagaactggaacaggtggttctgacagaatgtttatcgacagctacgccaaggacggactgcgtggaatcgccttgtcaaaatcgatccaaacatcggacaagagtatcgctcatcaaaaatggcaacaacctctacatgagcttggcttgcgaatgctttcgatgatttcaggggaaagccaatctttcgagaagcatgcccgcttctgcgccaaccacggaaacagccaggtctcatgcgattacatcgcgtcaaagctattatcagctggagatacatgtgacttccaaggattcgaagtaaatgatggaaaaatttccatcctctctttcgcagataccgaagtcaaaaatttaaccgttattggagtcgaaatcggcgacttggtgatagaaagcttcacctcttccagcacaaagattcaagattgcaccattgacgtcctaaagggagtcagttctatcgacaagcttcctgacatattcccagggtgcgtgatcgcgaaagtcgacgcaacgattaacagtgcccgcataagtgaacttaagcatagcaaccctcaaaagactctacttgccctgatcaagaagctatttttccaaccaggtgctgggcgtcgagaggaggcgcttctcagaggcacggaacgttattgggacagagtcgcagcagagcaaacactccgctacatggaaagcaacggaataatttttagggccaagggcgaccacggaactctctaccttcctaaaagaaagcatgcgcgaagaatggccaatgtaatggagatgcagagcagcagtggtgacgcactctggaatcttgtctcctga

SEQ ID NO: 510970 - DNA, 438 bp, Stenotrophomonas maltophilia
atggccatgagtctcgatgccgaactggaagaacgcttccttgcaatcgccaagcgcgggagaaccgcttggctggccggcgatactgcggaggcagagcatcgcttccttgagagctgggacatgattccggagccgaaatctgcttatgactacggccagattacatcgtatggaatagctgtcttctatcgcgatacggcccagtttgagaaggccagaaagtgggcgatggtcgccagagacatctatggagaaggcgaagctgcgagcgtgtccatggacgaactcgcagccaccatccagttcgagtccggagacctggatggggcctacacactatttgaaccgcactaccggaagtacggccgtcgtgtctttgagggccataggaaggagttcattgatttcatcaagagccggaagaaggccggatga

SEQ ID NO: 510971 - DNA, 351 bp, Stenotrophomonas maltophilia
atgggtatagagacacttcttgatctggatggtgagcgcttcgaggtaggcaacggttattgggtgaagttcgatgcgaaacaggtggacgttaccaagatgatcccgcacggtgttaagtattcgttgactcttcatcgcccagataacactcgcatcatgggctttgacaatgcgcacttagtgaagccgcccggaaatcaattcaagtatgcgggacagttttttgcctatgaccacaagcatccatatcaaaagccaccagtcccttatcacttcaactcaccagagaagctagttgaagatttttgggatgccgtagatcacgcacttttgcaggagggcgtatga

SEQ ID NO: 510972 - DNA, 957 bp, Stenotrophomonas maltophilia
atgccggagcatccgatataccgtaacgcgctcaacgcaatacaggttggcgtggaggatttcaacgaaggttcccctccccgcctatcttcagccgtccgaaacctgactgccggcatcctgctcttgtgcaaagagaagcttcgccgcctgtcgcccgaagacgagatcttgatttggaagcaaatcagcccggcgctggatgatgaggggaaggtcgtctttgaggggtccgggaggacgacagttgatgtctctgagatcatatcccgctttaagtcgctaggcattgaggtggacgccagcctcttgcagcggatcacgggagtcaggaaccgcgttgagcaccatcacgtcgacgacgtgggtcagatccgtggtgcatttgccgacggtcttctttttctgtctcagttcatgcctaagcacttgggcgtcgaccctctggatgctatcgaagaggacgcttggtctctacttgttgaagagaaggagatcgaagaccgcctccgagcagagtgtaaggcgtcttatgctcaaatagatggaccgaccttgctaacggatgctatcgaaagcgagggatgtcctgagtgtagctcccatttggtcatgcaaactcaagtccaaaacaccaacccatttgaggcgcggtgggcgtgcagagcttgcggtcataccagctcaaatcaggagtggcttggtcgcatactccctagcttttttgcgggtgcgagcttcttggctgcaaaagatggcgggcctgaccccttggacacctgtcccgagtgcaacgaagaggcgtatgttcatgaggaagaaatgtgtctcgcttgcggctttgagctcgggcatagcgagtgcgccgtgtgttcagaaccacttggactagaagagtatggggaaacaatctgctcatatcaccgctacgtggcggataaagagcgagaccgttaa

SEQ ID NO: 510973 - DNA, 153 bp, Stenotrophomonas maltophilia
atgcttgcacacgagtatgctaaaaaatgggattttgacgaactggatgctcgtgctctaccgaccatggatttcactgaagctatcctccgtggatacgcgacagtggtgacgccgacgccagaggagcttaagcaattcgagtccctttga

SEQ ID NO: 510974 - DNA, 429 bp, Stenotrophomonas maltophilia
atgcccaatgacgcggttaatgtcgggcaaatggacgaccgtttcgttgcggagcgcgattggagtaacagtcgacttgagtctgagcgcgagttgaccaacagccgctttgagtctgagcgcgagttgaccaacagccgctttgcggcggaacgtgagtggactgatagccgcttccgtagcattgacaggcgcattgatcgtatgggcgccatcagcgccgcctatgctggcatggcaatcaatactgctggattgaacggtgataaccgcttgggggccggcattggctcgcagggcgggcgcaaggcattggctgtgggctaccagcgaattcttggtgagaagaagaatgcttctctatcactgggtggtgcattcagcggtagtgacagaagcatttcggccggcgctggcgtcagttggtaa

SEQ ID NO: 510975 - DNA, 2850 bp, Stenotrophomonas maltophilia
atgtctctcgcccttcgcccgcgcgctgcactgctggctgtcgccctcagcaccgccctgggcacgcttgtgccctcccacgcgctggcggccaagcccgccgcaccgaccaaggtcgatatcccgttcgagcagttcaccctgcccaacggcctccgcgtgatcgtgcatactgatcgcaaggcaccgatcgttgcggtcaatgtctggtaccacgtgggcagcaaggacgaaccagcgggccgcaccggcttcgcgcacctgttcgaacatctgatgttccagggcagcgagaaccacggtggcgaattcttcgaaccgttcgagcaggtgggtgccaccgaccagaacggcactaccagtaccgaccgcaccaactacttcgaaaacgtgcccaccaccgcgttggacatggcgctgtggatggaatcggaccgcatgggtcatctggtgggggcgatcgaccaggccgcgctagacgagcagcgcggcgtggtgcagaacgagaagcgccagggcgagaaccagccctacggccaggcctgggaccagctcaacaaggcgatgtatccggttggccacccgtaccaccacggcgtgatcggctcgatgaacgatctcaacgcggcctcgctggacgacgtgaagacctggttccgcacctggtacggcccgaacaacgcagtgctggtgctggccggtgacatcgacctggccaccgccaaggagaaggtcgcccgctacttcggcagcatccccgctggcccgaccatggcgcagccggcagtgaacgtggccaagcgcagtgccgatacccgcgagacgatgaccgacaaggtgccgcaggcacgtatctaccgcgcctggaacgtgccgcaggtcggcaccaccgacatcgaccagttgcagctgttcgccgaagtgctgggcggcgccaaatcctcgcgcctgagccagcgcctgcagcaccaggacaagctggtggacagcattgcttcgggactgtcagtttcgcagttgggctccaacttcgtgatcatggccacggtcaagcagggccaggacccggccaaggtcgagaagatcatcgacgaggaactggaccggctgatcaagcagggcccgaccgcggccgagctggaacgcgccaagaccggtgcccgcgccggtttcatccgcggcatcgaacgcatcggcggcttcggcggcaaggccgacgcactggccgagtgcgcggtgttcaccggcgacccgggctgcttccgcacctcgctggccaacatcgagaaggccagtgctgctgatctgagccgtctgggcgcgcagtggctggacaagggcagccacactctggtgattgcaccgggtgagcgcgtggcgctgaaggaagacccgagccaggcgccgaagccgttcaacgtgccggcggtggaccccaaatacagcacgctgcccgagcaggtcgaccgcaaggccggcgtaccgcagacccgcgagttcccgcagctgaagttcccggcgctgcagcgcgccacgctgaagaacggcacccaggtgatcctggccgagcgccacgagattccggtggtgcagttcagctaccagttcccgggtggcttcagcgccgaccagggccgcaagccgggcaccgccaacttcaccatgagcctgatgaccgaaggcgccggcaagctcggctcgctggccttcgccgatgctgctgacgcactgggcgccagcctggatgcctcggccggcctggactcgatgagcgtggacctgtcggcgctgaaggaaaacctggcaccgtcgctggcgctgtaccgcgacctgctgcgcgaaccgcgcttcgagcagggcgagatcgaccgggtcaaggcgacctggatcgccggcatccaacatgaaaaggtgagccctgatgccgtggcgatgcgcgtgctgccgccgctgctgtacggcaagggccacccgtatgccattccgttcaccggcagcggcgacgaggcggcgatcaacggcctgacccgcgaggacctggtcgacttccaccacgactggctgcggccgcagaacggcaccctgatcgtggtcggtgacaccaccctggccgagatcgtgccgttgctggacaagcagctgggcgactggaaggctgcgggcgacgccccgcaggtgaaggccgccaccgacgtggcattgccgaagggcccgcgcgtgttcctgatcgaccagccgggtgcggtgcaggccaacctgttcgcagggcaggtggtggcgccgtccagagccgccagctcgacccgcttcgacatcgccaacggcgtgattggtggtgacttcacctcgcgactgaacatgaacctgcgtgaggacaaatcctggtcctacggtgccaattccatggccagcgacaccatcgggcaacgcccatggatggcaatggcagcagtacagatcgacaagaccgctcaagccttgttggaaatggctaaggaaatcgccgcgttcgccgatggcagcaagccggccaccgccgccgaggtcaaccgaatccgcaacaccgagactttgagtctgccgggtgcttacgaaacggctgccgccgtggcttcgaccatcggttcgatcgtggagttcaagcgcccggacaactacgtgctgcgccgcaaggccgagatcgaggcgatgaccccggcgcaggtgcagcaggccgccaccgagatcaagccgcaggccctgacatgggtggtggtgggtgacctcaagcagactgaagcgaccgtgcgtgcgctgaacctgggcgaggtgaccgtgatcgatgccgaaggcaaccctgtcaagaaataa

SEQ ID NO: 510976 - DNA, 1401 bp, Stenotrophomonas maltophilia
atgaccgctctaccctccgcagccctcaccgattacattgccgcaccctttggcacccttcatctggagggcatccacattggtcgtttccggattgaacgagctacgattcaaggtcgcgaagctgcaatcaatcttcaggagtgcatcctgacagcgctggacgaaatcggccgcaagagcgcgctgaagaacggaacccggtatccccagcagctgcccatgggcacaccggcgcgtcccctggccaaagagatcgatgatcacctcgcggacatgcgccgccggcagctggatcccaagacagtgctggccacggagcgcaccctcaagctcctcctgctgacctgcggcaacatttcggcctgccgcgtggattacaagcatatccaagcattgtggcagctgctgcgctgggctccgaagaacctgttgtcggatcccttgctgaaacgcctcagcttcgatgacgcgatcgctttggggaaggagcaggacgtgcagcccttggctccggccaccgaagagcgccaccgccgcttcctggttgctttcttcaaccacctggtcaacgggcaagccatcgcgtcctcgcccatgaaggccttccgcaaaccaaaagaagatcacgccattgatcccgacaaggccatccgcctgttcgaggacggagacctgcaggccatcttcgacccggcagccttcatcccttgggcgagaaagccgcagcactggtgggcaccgatgattggcctctacacgggcgctcgcgtcaacgaagtgtgccagctgaagctgaccgacatcctccaggagcgtggcatctggtgcatcgccttccaaaagaccatcgatgaagacctcgccgcggatccgaagcgccaacggcgtagccggcaaagcatgaagggagccgggtgcatgcgcatcgtccccatcgccaagcccctattggatgccggtttcctcgagttcgtcgaagacatgaaggccactggtcacccgcggctgttccccctcctatctgccggcgtgaaccggaagaccggggagaccaacgcgcgctacagccagcaattcgtggtggattttggccgttacttgaagaccctggggtttgccaaggggatcgggttccatgccttccgccacaccctagcgaccgaattggatgtcaacgacgtcccagagaaggagattgcactggtcaccggccacagcaccgatccacgggatcgggtccaagtactgcgcaagcactacctccacaagaaaccgcaggtgacccgcagcaagcagatcagcgccttggagttgtatcagcccagcgtggaactgccgcgctacgagcgcgggcagtttgcggaacagttgcaggacccgaccaagttccatccgtga

SEQ ID NO: 510977 - DNA, 216 bp, Stenotrophomonas maltophilia
atgaaaaacacttctcagaaccagagcgatagcctcagcccggatgccgataagaagcagcccggccagcaaggccaaacggacgggaaggatctcggcggtgatttggccggaaagcaggggcagcaacagcagcagccgaacagcacggagcctggccagacaagccctgaccaggaccaaaaggctagcagcgatcgcgacaatcgtcgttga

SEQ ID NO: 510978 - DNA, 450 bp, Stenotrophomonas maltophilia
atgcccatcagggcggtggtgtatgtaagcggtgtctgcgaaaaaatcgccggcgaaaggctaggccagtccaacggagcgctggataagatcgttgacgatgcggcgcggttcaatcgcaacgccggcgtcacaggagttctcctgttcgacggtgcgcgcttcctgcagtacatggagggtccagaggatggcctctcagtggcctattcccgtgtgcttggtgcccgcagtcacaacggaatcgtggagcttcagaggggcagggtgggtcagcgccgtttgccattctggccgatgaaatggctagctgttgaatcgggcgaaattcgggcgttggcacaggctgactggaccaggttcaatcagcgcggcagtagggaactcgccaatgccacagcaatggatcgcttggtctcccttgtggagcctcacgccatcgctgcttga

SEQ ID NO: 510979 - DNA, 1134 bp, Stenotrophomonas maltophilia
atgactccaaaccccacgggcgatctaggcgacgagtcgcaacaatttggacttctggtcaattccgtcactgattacgcgatctacatgctcgaccctcagggggtcatccgcacctggaaccctggtggagaacgtatcaaaggctaccgaagggacgaggtggttggcaccaactactcgaggttctacacgcccgaagacgtcgcggccggtgtccctgcacgtaacctagcgatagccgcgaatgaaggtcgctacgcaggcgaaggctggcgtcttagacgggacggctcacgatttcacgcaagcgtcgtcatcgatccagtttgggtggatggcacgttggtcgggttcgccaagatcacacgcgacgtaaccgagcgatacctcgcgcaggagcaactgcgacgggcgcagcaagaactgcttcaagcgcagaagatggaggcaatcggcaagctcactcttggcctcgcgcacgacttcaacaatctgctgggcgtggtcaccaattgtctggatctgatcgcggaccaacctcacggcgagctgtctgagaaatacatccgtactgctctgaggtcagtcgaacgaggggctcttttgactcggcagctcctcacctttgggcgaggccatgaactctctcccgaacgactcaatgtcgggaaggccattcgtgacatccatgacatgctccaacgctcggccggcgatgcaatcgcggtagagctcgacgcttcaaccgacttaccacccgtcgagctcgacagggggcagttggaggcggccatcctcaacctggtgtgcaacagccgtgacgcgatgccgaacggcggctgcatcaaaattacagcgcgtttacagaccgacgtgcagtctgatggcgcccgcgagcaaccttgcaattacctgcgcatagaagtgcgggacaacggtcaagggattgcgccagaggaccaggcacggatattcgagccgttcttcaccacaaaaaccgtcggacgcggtagcgggctgggcctgagccaagtctttggattcaccagccaatcaggcgggttcatccgcgtagagagcgctctgggctcaggaacatccattgccctttactaccccgtcttcgagtag

SEQ ID NO: 510980 - DNA, 309 bp, Stenotrophomonas maltophilia
atgaccacagagacagcagaaatccttgaccgtctacatgcgtgcgaggccggccttgaagtgcaccgtggctacctcaaggctatggagtacgccctacgcgttactttcatcactcaccaggatcccgacgcgctgctctcaacttggacaaagctgcttcctgctatcgctcgcagccacgaaagcgacggcggcgtcctgttcgccgccgcgttccagcagtcccttaccgtcctcacagagcaaatggacggcgggagcgcggcatcagcaggcagcgacttcgtcgacgacacgtcgctgtga

SEQ ID NO: 510981 - DNA, 1284 bp, Stenotrophomonas maltophilia
atgtccacgcgcgaggaactctacaccgctgtctggaccgagcccctgcgcaagcttgcggagcgttttcaggtctccgacagttacctggcacgggtatgcgactcgctcaatatcccacgcccgaaagcggggtactggataaagaaggacgccggtaaggcgtccccgccaccgcccctaccgccagccttggccggcgagccgaccgagtggcatcccggcggcggcgtcatcgtccgtcggtccgtgccacgcgtgaagcaagcgcgcgaacacgaggctccaaacgcacgcccgaaaacccacgacctcatccaaggcgcgatgggcgatttcctgaagacgcgcaggctcgacgactggtgggactatctcaggccctataggcgcaacctcgtcgacatcacggtcagccagaccagcctgaaggatgcactggcctttgcgaatgcccttttcattgcaatcgaggccaaggggcaccgggttggcctgatcgaccacggctatggcgtttggcgcaggcgcgccttcggcaccggagagaagcctgtccaacaggaggagcacaacccgaacgatcgctcctgggcacccgggcgcctgaccgtggttcagattagcggacacttggtcggccttgcgctcgtcgaagtggctactcctaccttgctccgctatgtcggcaacagcacctacgtgcgcgaggccgactacgttgccccgaagggccgctcccgctatacagccgatacatggacgaccacccgggattgcccgaccggtcgactgcgcctggtggcctatgggccgcaccgctgcgtcgatctggcggagcattggcaggaaaacgggaagtcccgactgctcgcgcgcctgccggatatcgttgcaggcatcgaagccttcggcgccaggatgcccgcattggtcgcagagggagacgcgcagctggagcgcgagcgcagacagtacgaagcagaggaaaggcaacgcgcgatccgggagaaccagcggcgcatcgaggaatccaccaagcaaagccgagaacagttggacgccctcatccatcgctgggcagaaatcagggcacgtgcggaattcttagaacgcttggaacaggacatcacccgcctacccgaatccgaacgtgcgtcattggaggagcgcttggcgctggcacgcgaactgataggcgcgacggatcccatgccgcacttccgagcttggcggtcgccggcggagcgatactccccgaggcacttcgaagacgacgagtga

SEQ ID NO: 510982 - DNA, 372 bp, Stenotrophomonas maltophilia
atgaccatcgatgtcagcggcctgtcggccaaagaactcaaagccttgatcactcaggcagaaaagcagcaaaccaaagtgctgactcgacccaaagctgctgccatgcgagccaagatcaacaaatacgtcaaagatcatggttacacgatagatgagttgtatgccctcccctctgcagcgacggcagacaagccacagaaagcaaaaggccggaaaagcacccaaagccgtaagctgggcaaggtggttccaaaatatcgcaatccggccaaccctagcgaaacctggtccggccgtggccgccaaccgagatggcttgctgcgctggtccagaagggcatggcgcccagcgatttcctgatcaagtaa

SEQ ID NO: 510983 - DNA, 954 bp, Stenotrophomonas maltophilia
atggcgaaggttcttgaaagctcgttcgaacttgcgaccaagttgattggggccttgtcgatgtcagctaaagaatacgaagagaccctcacgggaaccttgctgggttccctcctaagcaccaacactgtgctcggcttggtctcggctcatctggacgtagaaccggcgaactgctggtggggttcctatagcaagtctcgcagtaaggatgatccgtacacagaggcggccagtggcgcagatttcggtttacttaccctcttagacacgggccgcgcacgcctagcgttgttccaagctaaacgtggcgacctgaaggagggcatctggtcggtcgatgtgaatcgagtaccgccacggcccaaagatttagagtcgaagccacgcaagccgcagatggtagttctggtcgaaaccgcccgtcgactcaccgaactcgcggaccccgcaggacatcaggcgagcaagctggcacctttggagccggactctgtacacacccaagaagagctcaccgaggcgcggctcgaccccttcgactgggttcactatctcgtgtataccgacgatggcgcggagtgcctccctctgcggcaactcagcagcgcgtatgtgaaggaacttgttggaaggagaagcgagaccaacgttccaatcgaagggcggacgtcaactttcctggaggtcatttcacacggatgcgttaccggcgcgccaaattggcttgagttcgatgatgccgacacggcgatccgcgaactgccactgctactctctctcgtcccgattgtggttggggattctgatggaacgcacgggcctgccttgaagaagatcaacgggctcgccccattgacgctcaacctgtcccaaggccacattgccaactttatggaaactcttagtgcaaacgcgggcgatgaggggtatgtgcccgcccgacctagctga

SEQ ID NO: 510984 - DNA, 267 bp, Stenotrophomonas maltophilia
atgacttcgacgaaccactaccgtgatcaaatccaacgcgccacaagccgcttggcgcagctgcaggccagggaactgcttgccctacagcggcaagaagccaaagaaaaagaaacaaagcggcgcaacgaagcccggcgaaagcgtcaagtggcagagttggtcttcttcgccggcgctcagaaccttcctgacgatgagatcgtgatcgccttgcgaagtcacaaggatcgactcgaaggacggccgctttccggaggccactaa

SEQ ID NO: 510985 - DNA, 1464 bp, Stenotrophomonas maltophilia
atggacgagaggaccggcaagcgccacgactaccggcgtcgtggcggcgtcgtggaaacccgatgcgttgtccccgaggacgcacccgactggtcggtcattccggcgcagctctgggtggccgccgaacaggctgagcggcgcaaggatgcgacggtggcccgcgagtttgagatcgcgttgccacacgagctcaccgacgaccagcgggcagcccttgcttgggagctgaccagcgccttggtggatcggtaccgtttcgcagcgcaagccagcatccactcgcccgacggaaaggacggcttgaactggcacctccacatcttggtgacgacccggaggattgacgctcaagggttggcagacaagaccagggagctggacggtggggcctcgggcaaggtggaagtggagtgggcacgcgagatggtcgcccgtgtgaccaatgcccacctggcagcggcccagctggacgttcgcgtagaccaccgtcggttgccatcccaggcggcggaagccctatcccaaggggatcttgcaaaggccttttccctgagccgccagcccactcaacacctgggcaaggacgccgcggcgatggtgcggcggggagctcagtcggatcgcgcggacgcgaacgaacggatccgagaggagaacgacgcagcgttcgaagccatgctggatgcgctcgaacttcagcgcagggctacgccagaggatcccagcgaccgagacgcgggcgaaaaggggaggcgcgaggaggagcgcagcgcacgcatggagaatgcgcccggcattgggcaaattcggggccttcgtggctggccaggctcgcacctgttgggtctgcgcatcccaccttcaagggaactggcgtcgaccgacagtctgtttgagcaagcgcggcgcctctggctagacgaagcggtgatcgccatctccgctcgcttgcaagccactcgaacgctttttgagaaagggttggaatggttgagcaagcgcctcgacgaagatcggctgcgggggatgctgaagcaacttgtaaagcacttgaccacgctgcgacggtgggcgagcgagtggaggaggcgcgagggagcggagaggaaggcaatgggtcttctgcaccgagcggaaagggctttggaggagtttgtggaaacccgcccacgtccgtccgaagagcacttggcccactgggctcgccaacggggcagaaggctagcagcgattgatcagcgcttggcgggcttgaagaaagcccgcgacggactcacaccgcaagccgagcaggactgcttgggacaattggaaacgtccctgtccgaccttgaagccttcagccgaaccttgattgagccggctaaccatgtagggccggcgttcgatcccgcttcggacccgcgggaggataggcagcagccaaatggtccttctccgaggcgccccacgttgcactga

SEQ ID NO: 510986 - DNA, 324 bp, Stenotrophomonas maltophilia
atgcccgaccctcagatccacatcgcgtcccaactcctcagtggctatgtccatcaagagcctgacaaaactccagccgaagaagactcggatattgatcgtgccttgcggatcgccgcaaaaatgatcgtccgccgaaatggcaatttcgtcactctcaagcacgaacccccaacacccacccggcagtacaggacgaaggacaaggtggtggaccgcgacgcactgccgcccctcaacaccctgttgtcagaccgccgagcgcaagaagcaaggtcggtcgcctctgcgaaggcaaagaccgacaaaccgacgcttcactga

SEQ ID NO: 510987 - DNA, 330 bp, Stenotrophomonas maltophilia
atggcagctcgatacgttctcagtcggtcaggccttcagtttcgctttgtcctcaaagcgggcaacaacgaaactatcctgaccagcgaactctacaccaccaaacaaagcgctcagaatggcattgcgtcggtccggcaaaactcgccgttcgacgcccgatacgagcgaaagaacgcttccaacgggcttcccatgttcaacctgaaagcagccaatggtgagcggatcgggacgagcgaacagtattcgaccactggcgcacgggaaaccggcatccaatcggtcaagacgaacggtccagccgcgcccgttgacgaccagacctaa

SEQ ID NO: 510988 - DNA, 360 bp, Stenotrophomonas maltophilia
atgaaactgaagatccacagcgtcgaaggcaagggtgagctagctgaggaatgcgtctggatcgacgtgcttgaggcgaccctggacatcaaccactacattctgtgcgacaccaccttcactgctcagaacaccgtgtccaatgaactgcggcacatgttctggctgcccaacttgaaggtaagagaaggcgactggatcaaggtcatgaccaaggccggcgttccgacaagcgtcggcaacaaacggcagaccaccactcacatcctttactggaatttgggtaagacggtctggaacaaagccggcgatgcagccatcttgtttcatgcggatgaatggcggacccaccagacctag

SEQ ID NO: 510989 - DNA, 336 bp, Stenotrophomonas maltophilia
gtgtatcgcaccatccggatcgccgccaccaatcccaccaatcccaccggccagaatctgaccctggaacgtcggcgtctcgaagaagccggggcgcgcatcaccgagcaggaggtcgatacgttccgcaccgtgctagggctggaagggcagtggggcgataactgggcatggaatgtggcgttgaactgggggcgcaattcggccaccgacagctcgaccaacattgccaacctggaccgggtggaaaacactctcaataccagcctgtgcagcaaccccgggcgcggccattccttgcggcaactatctgggctacggcaatctgacgcctga

SEQ ID NO: 510990 - DNA, 261 bp, Stenotrophomonas maltophilia
atgaacaagaacacccagattgctgcccgcccgtcggtcaagtcccgcatgaagtccgccgctaccaagctgtcttccgtggttgtcggttcgctggtgtccgcctctgcgtttgcacaggccgccgacatgccgtccgatgtgagcggcgctgcagagttcatgaaaaccaacggcggtatcgccattgcggtggctgggaccatcacgctgatcgtgctgggcatcaccgccgccaagctgccgcgtaggggcagctga

SEQ ID NO: 510991 - DNA, 240 bp, Stenotrophomonas maltophilia
atggtctctctccgcaaatccatcgcgatgcttgctattggccttgtggccttctccctgtcgctcgccgtgttcactgcttatgtgtggtcgatgcttggcaacgagagcctctacaccgcgtttatcgcagccgtcaaattgctttcctgcttcattgctgtgcttgtcgcagctgcttccttcaacgttgttttgcggcgcttcgtaagcgcgctgtctgacgggcaggggggctaa

SEQ ID NO: 510992 - DNA, 177 bp, Stenotrophomonas maltophilia
atggcgactgactctaaggccctgcaggccgtgcctgcggcacccgccgctgatccctcagccaccgcacggcgtgaggtcgaccagctcgtttttctcatggcgctcccgatcctgattgccgccttcgtggtgtgggttaggcgcgacgtcacccaccgcacgcgcaatcgatag

SEQ ID NO: 510993 - DNA, 387 bp, Stenotrophomonas maltophilia
atgagcgccattgacgaaatgctggacctggcccgggaacgcacaggactcccgtccgacaacgctttggcggaacggctcggcgtaaataggcagctgctgtggcaagcgcggcgcggcagtaagccgctgtcggatgaacgaattgcgcaaatttgcgcgctagccaagttggatggcccgatgtggatcgccatgatccacgcggaaaaggcgcagtcggctacggagcgaaccctgtggaagctgatgctggacaggctgagcgcggcggctgcggtcgtcgcgctggtggcgctgtcgatgccaggtctcgcaaacgcaaaaaccgcccaaactcaggcggttagcggtgccgacaacggcggtatgtatattatgttctag

SEQ ID NO: 510994 - DNA, 282 bp, Stenotrophomonas maltophilia
atgagcgaaccctacctgagccgctggcgattgcggcgtgatggcgcggccatcgagacgccccacgcccagctctggccggtgctgaccgccgacggcgaactggcgatgctgaaggtcagcagcgaaaccgaggagcagaacggccatcgcctgctgcgctggtgggacggcgatggtgccgcccgcctgctggcccacgaggggccggcgatcctgatcgagcgtgccggcggcgattcgctgcggcaacgttcgatcgagggcgacgatgacgcctag

SEQ ID NO: 510995 - DNA, 4269 bp, Stenotrophomonas maltophilia
ttgggagctgaactccccccccttgtcgaaggcactgatcccgaaagccctgtgccgatcgatgcactgtccctgacggttcagctgcaagaggaattgaatgtctacgtccttcagttatggcaaccgtgggctgtcaaagaaagggaagttcgcaagacgattgccaagtatgccgagcttttttccagctatcagatgctgcggggcaacgtggtcgactcccccctggaaatggtgatgggcgtaggtatctccgtatgggacctgcccgacgggaagctgacgtaccccttgatcaccaagctggtggagctctccattgatgagcgtactcacgccatcgaggttcgaccgcgctcgccagacccacggctggagctggacgtgtataccgcgcttgacaatccaggcgtggccgaagttgcccgtgcgggcaaggagcatttcgcccgaacggaatggcacatcagtccattcacaccaagcagtttcgaaccagttttgaaagtggccgcatcgttgctggacagcaagggaacatactggccctcccagacgatgccccatgaccgacaggtacccaaggcaggcgaacacctgagggtgaccgatacttgggtactcttcgcacgccctcgaacgtccagtcttttcattcaggatcttgagcgctttgagaacctgatcgactctggtgtgaatctagaggggctgtcacgggcaacgtgggcactcttgaacgatccctcgcagcacctgcatgaacctccgcccatgaactatcgcggcctgtcgcacatcgacaggaaggccggcacggcggcgaaggcaaaagacctgttcttcccgatgccctacaacgatgagcaagtgcagattgtccacatgctcgatcatcaagacggtgtcgtcgtccaggggccaccggggactggcaaaacccacaccattgcgaacgtgatttcgcactaccttgcccttggcaagcgggttctggtcacgtcgatgaaagacccagcactggctgtgctgcaggaaaagctgcccgaggatatccgtccgcttgccatcagcctgctgagcagcgaagccgacggcatgaaacagttcgaacatgcaatccgccatatcgctggagaaatcacgcgattgagcaaaagcgacatgcgcgagcaggtacgtcagtttgagcaacgcatcgacaccctgcatggacaggttgcgtcaaccgaagcccgaatcgcgcattgggcgcgaattaacctggaaccggtaattgtagatggcgttgccctccagccgttggacatcgccaaggaagttgcaacgaacactgaggacgtcgaactcattcgcgacgtgctgacggtggcagaaatccattcgccccagttcgacaatactgacatctcatcactccgcagcgcccgaatggcgcttggcgaagaccttgcgctactgaatgatcgtctcccttccgtggacggcttcccagaagctggagagctccggcaggcacacctggaccttggtaggcttgctgaaatcaacgagcaaatcgcggctgccaggctgcctgcactgcgggacatgcagcaagcgaccatcgaagaggccattcaatctcacgcccgcataggcgcattgaggcgcgttcgaacaagcctcgacgagtctgggctcgtgtggctgcccgctctggagcaacgaatccgccttgctgggccgcaagacgccgtcagcaagctacttgcagagctgcgaagtgagatcggtgaattactggcgtatcgctcccgcttcctatcccgaccggtaacgctaccggacgggatgggcgacgaccctgatatgaccgacgccttggacaacctctcacaaggtagaaagccgttcggcctggcggggttctttggcaagacccaagagaagaagcaactcgatcaagtgcgtgtactcgcgtcaccaccagcgtcagccgaagactgggcccacgtactcgagtaccggcgcttccagcaaaagtgcaacgaagttgttgtccgatggaatgccctgtccccggagatgtccctcccaattctcgaatcagcgtcggcgctcgtggagcggggacccggtcatcttgccgttctgaacaatcttcagattgtcctccgggaagagaaggcgattctggcaatgctgtcagtgctcctgcccacatggaaagaaggtacgaacacaccctactccgcgcagcagcttgaccaagctctggaaattctggatcacaatctcacgcgcaatcgactcgaggcgacttgggaaatcaaatcctctttccagagagcgatggtcgacgcgaagggaacccttcccgaatccatcgaggcgtttctgaatcgcgcattgggcgacgcgaaaatttccgatagctcactcatggccgagtggagcgaactgatgctcgagctcagacgtcagcattcaatgcggccgcagctgcagatcgttcgagacgtcaccaacttaatcgaaaaatccggagctcccaaatgggcacaatcacttcgttcagaggccgcgtccgcagctctcgacaagctactgcctgacaactggaaggattgttggagacatcgtcgcctactgacacttgtcgaatcaatggacggtcgtgaggagctgacccgtttgtcgcgtcagcgcaacgaactggagtcagacctatcctccttgtaccagcaagcagtgaccacccgaacctggctgcagatgactgagaaggcgaccccggcggtacgttccgcactcgaggcatatcgcgtagctgtttcccgcattggcaaaggaaccggcgtgcgagctccgcgattccgccgggatgccagagatgctgcggaacaggccagtcccgctatcccctgctggatcatgccgcactaccgcgtgagcgaatctctgcccgtttcacttggcgagttcgatctggtcattatcgacgaggcatcgcagtctgatctaacggcattgcctgccttgctgcgtgcaaagaaggtactgatcgtaggggacgaccagcaggtctcgccggaaggtgtcggtttggaggaggagaagatccgaagcctgatgggtcaactccttggaaatcaagttggcctgtatcgcccacagatgtcgccggacaagtcggtctatgacctcttcaaggtagtcttcgcgcagggacagatcatgctccgcgagcattttcgctgtgttggacccatcatcgagtactccaaacgggagttttacaaccatcaactccgcccactgcgcatgccacgcacttctgagcgacttgatccaccattgatcgatgtccacgtactggatggccagcgcggcaatggcaagacgaacgagggcgaagcgcgcttcatcctcgaggaaattcaacgcatcgtctcagatccacagatgcgccaccgtagcatcggcgttgtgtctctgatcggaagtgagcaagctcagctcgtgtgggacaagatttcacgaacactgggggaggaggtgattcagcgtcaccagattgccttcggtgatgcacgcaccttccagggaaaggagcgcgacatcatgttcctttccatgatcgtatcgggcagtgcccaggcatcttctcaagagatgttccgccagcgttacaatgtggcagcatcacgcgcgcgcgaccggatgtatctggtccgcagcatcagagcggaggagctgagcccagcggacaagcttcgggcgggtttgctccagcacttccaatcgccctactcacaggacgaagccgcggtggcagatctgcgcatgctctgcgagtcacccttcgaacgtgagatgttcgatgagctggtctcacgcggctaccgcgtacaaccacaggtcaaagtcggaagctaccgtatcgacatggtggtcgagggcgacaaggatgcccgactggctatcgagtgcgatggggatcgctaccatggccccgatcaatgggaacaggatatgcgccgccaacgcgtcctggagcgagccggatggaacttctggcgctgcttcgcatcgaactttgtcctacatcgggatgcactgctcgcggacttggtcaacgccctcaaaggccgaggaatagaacctctgggtgctcaaggcgcgagcgtaagcaatcactgcttgcatcgcacctatgaggcatttccttcgaccgtcccacattcggagcacgagaaggatgctgctgccgagagttcatag

SEQ ID NO: 510996 - DNA, 408 bp, Stenotrophomonas maltophilia
atgttaaggcatgccggttttactctgattgagctcatgatcgcggtcgcgatcatcgcgatcctatcggcgatcgcgattcctgtgtaccaaacttttgtcgcgagatcgcaattgaccgctgcgttggcggatatcaggcccggcaagactacggttgagtctgtagcccaagacagccgcaacgcgagtctggtgaatgcggagttcgtcggtctttatccgacgtctcgttgcactgctgtatccgctgtcttggatgaagctggggtgggcagtatcagctgcgtagtcgatggggcaccgtcgataaagggtaaaatcctgtacctaaagcgcgcagccgacggcacctggacctgcgacggcagcgccttcgaagcgcgctatcgcccaaccggctgttga

SEQ ID NO: 510997 - DNA, 429 bp, Stenotrophomonas maltophilia
atgaagaaccagaagggcttcacccttatcgaactgatgatcgtcgttgcgatcattgcaatcctggctgccatcgccctgccgcagtaccagaactacgtagccaagtcgcagttcacggcaggcctcgccgaagtttcggccggcaagactgcctacgaaaccaaggtgaatgacggtgtcactgacggcacgcagtacaccactgtatcgaacctgggcctgaaggatagcgatcgttgcgcgctcaccgcgaccgctccggataacaccggcgctggttcgattgtgtgcaccttgaagggtaacccgaaggttgccaccaagaagatcaccttggagcgtgacgccaacggcaactggagctgcaagtccgatctggctgctgccgacaagccgaagtatgctccggctacctgccagggctga

SEQ ID NO: 510998 - DNA, 924 bp, Stenotrophomonas maltophilia
gtggttcgaaatccattggaggcgacgggacttcatgactcgtctctcgattcagtgcaggtgtcgatcctggatagatcctgcctgatacggactgttggcgtatgtggtgaccttgcggaaggagcattggctgacattggttgccataacctagaatcgttcttcctgctgtccgacagtcaggagctgtcggacaacgcttggcccgggaacattcaggatggccattttgatgggttaggctgcactggcgtgcttcggctttatctggccggaggcatgctggaggcggggggcagtctactcaggtcggagctccctgcgctgtctggacattctccacgacccagcgtgtccgcggcctctggaacacgactcgatggagttgctgccgggcggctgagtttcgctgtcttgacggggttgagccattccgtaggcagcaagcagttctcagctcagctgttggtgctgagggatacagatgtcatctgcttgccagacgtgcctgagcgcattcccgtgtctgtctgcttcgagggcgtcaagtcgtgcgcggtgaggtttgatgaaaccgcaatggagtggagcgaacgtcttggaaatgttgcgagctgcatcgtcgacgaaaagcgaggagtctgctggttatacctgcgaaacgggatagtcatgatcgaggcccgcgccgcagtgatgatgtccgattggattgagtcgaagaaaacgcaagaaagttcggctgcgatcatcaagccgagcataggctcggctctacagtggatccacgccatggggcgatgcgcttcggtagtgccggtcgctggccggcagccaggcctcagcccccagccaaccccagataccgcgcatgcaactgttccacctgcgcctgcaggtcttccgggtgaccatcgttga

SEQ ID NO: 510999 - DNA, 630 bp, Stenotrophomonas maltophilia
atgaacatcgaatccatcgtcaacgcgatcctcggcatcgtctggagcccctacctggtggtgctgtgcctgctcaccgggctgtacttcagtgtgcgcactcgcttcatccagctgcgtgcattgccggacatgctgcgcctgatgttccgccatgagcgctccgatgccggcgtgtcgccgttccaggcgttgtccctttcgctgtccagccgcgtgggcgtgggcaacatcgccggcgtcgccatggccatcgccttcggcgggcccggcgcgatcttctggatgtggatcgtcgccttccttggcgcatccagtgccttcatcgaatccacgctcgcgcagatctacaaggaccgcgacggcaaggggcagtaccggggcggcccggcgtactacatcgaaaaaggcctcggccaacgctggtatgcagtgctgttcgcactggtgacggtgctggcgggcgcgatgctggctggcacgcagtccaatgcgatcaccagcgcggtgaacgaagcctgggacgtgccggtgatgaccaccaccgcggttctgctggtggtgctgggcgccatcctcatcggcggtgtacggcgcattgcgcgcgtgccgaatgggtggtgccgctga

SEQ ID NO: 511000 - DNA, 5271 bp, Stenotrophomonas maltophilia
atggataacgttttccagttccgcgaccagctcatcgaacgatacggcagcttttcccgcagtttcgttcgcatcgctgcgcctgatatccaagccgaggtcgaacatcaatatgcgcaaggtcgctattggcctgagccgctggtgcagatcaacccgaattaccaacgccaaggcacggtgcagaacctggcggcacaggggattttgcatgctgcttgcgcagagatcttccaggtcgggaagtctgaaggttcgccagaacccctgcatctttacaagcaccagatggaagccttggccaaaggccaggaacgccaaagctatgtggtcacgaccggaacggggtcggggaagtccctgtcctttttcatcccgatcatcgaccgcattctcaaggccaaacaatccgatggcaaagcacgtaccagggccattgtcatctatccgatgaatgctctggccaacagccagctggaagaactcgacaagtttctgcatggctatgcgccagagcgtcgtcccttcaccctcaagcgctacaccggccaggaaagcaaggcggaacgcagcgccatcgcggatgacccgcccgatatcctgctcactaacttcatgatgctggagtacatcctcacgcgcttcgacgaagtggatcggcgtgtggtggaacactgcgagggacttgagttcctggtgctggatgagttgcatacctatcgtggccgtcaaggggcggacgttgccttgctagtgcggcgcctgcgagagcgcttgaaagccgagcaactggtctgcatcggtacctcggccaccatgtccagcacaggtagccaagccgaccgcaaccgcgtggtggccgatgtggctagcaaactttttggcacccagatcagcgagcatgacgtcatcggcgagaccttggagcgcgtcaccaacccgctcaaggacgtcaacgccatccgtacagaactaccggcggccgttacgcgaaagcaggatatctgggctgacttcgacgcctttcgcaatgacccgttatccatctgggtggaattgaacctgggtatcgaactacctgccgacgagcctcccaggcgggcgagacccatgatgttggaagaggccagccgccgtctcgccgaagacgcgggttgccagccggaagccgctcgcaccgccctgcagcgctttctagtggctgcccatgatgtgcgcacgccccagggcaggccgcctttcgcgttcaagctgcaccagttcatcagcggtcccggcaaggtgctcaccacgctggaggcgcgaggtaagcgccatgtcacgctcgatgctcagcgtttcgcgccggggcgacagcaagagaatgtgctgctttacccgacgcacttctgccgcgattgcggccaggagtacctacctgtctggcacgcacagcaaccgctcagcttcagctcacgtgagatcgacgatatcgcggcagaagacgacgccagctatggctttctgtgtcctctggtgcccgggcagcaatacggcggcctgctcgaagacctgccggaaacctggatcgacctcagccgtaacgaacccaaaatcaagccagcctacaagaatgccgttccctatatggtcacggtcgatgccaaagggcaatcgggctcggggacggagttctggttcattccgggaaagttccgcttctgcctgaactgcggcacgacacacgaagcccacggcaaggatgccaaccgcctctccagcctgtccggcgaaggccgctcttcggccacgaccatgattgccctggcggccttgcagcaattgtttgcactttccgaacctgcgccagggcagcctgacccacgcaagttgcttgggtttaccgacaaccgccaggatgccgctctgcaggcgggacatttcaacgacttcattttcctgctgacgctgcgtgccggcttgatcggcgcactgcaaggcagcggcggccaactcgatgaagaacacttggccgaaagcgtattcaaggccctcggctttcaaggggtcgatgaagcgaccttggtggagtatctgcgcacccccaagctcatgggactggcccgacaagaagcgcaacgcacattgcgcttcatcatcgcttaccggctactgcgtgatctgcggcgtggctggcgcttcaataatccgaatctggatcaactcggcctattgcagattcggtatcgagacctagatgccttttgcgctgacgccagcatctttgctgcaaacagcaccttgaccaaattgacggcagtgcagcggacagttttgttcgaactactgttcgacgccttgcgccgccatctgtgcctggaaagtcgttacctcgacccggtcgagcaggacaaggcacgcaccagtgcccacacctacttgaatgagcgttgggccttcgctcccgacgagaaactcgataccggccgctatctcatcctcggcaagcgcccggaatacaagggcaagccgcgcaccgacttggtgacaggtggtccacgctcccgtctgctacggcaaataaagacggccgccttctggcgcaacagcgcctgcgccagcgaggtcgcgcaatggaaagatgtcgagtggactaagctgatcgaagcgctgctggagtccgccaaggactatggctatgtgcagcgccaacctatcgacgcccagctcgcaggctggcgcttgaacgcggctgctctggactggtgcctgattgccgatcagccgcaaactgatagcaatcgaatcaatcagtatttccgcaccctgtatctcggcattgccgacctgctgcgccagccctcgcatccgctgttcgacttcgaggcccaggaacacacggcccaggtggatgcgccacgccggcaactgctggagcagcgctttcgttacaccgaaaaagacaggcaggattgggcgcagaacccggcccacgaagcgccgttggagcggctgccggtgatgttctgctcccccacgatggagctgggcgtggatatctccgcgctcaacaccgtgtacttgcgtaatgtgccgccgacccccgccaactacgcccagcgcagcggccgtgccggtcgctcgggtcagcaggcgctggtcatcacctattgcgcggcgctcagtccgcatgaccagtggttcttccacaatgctgagcaaatggtgcatggcgtcgtgcgcgcgccaaccctcgatctgagcaaccgtgatctcatcgacagccacctgcaagcggtctggcttgccagtacccaggtgccgctggacgacagcattgcgccgatgctggatctcgaccagcccggtaaaccactgaaacagcccttgcacgaagcactgcgggcgcaggctgtccagcagcgggccttggccagtgccgaccgggtcatcaaccagcttgagggcgagcttgaaggcagcgcctggttcacgcctgactatgtgcgtcaggtcatcgacaacgcggcgcaggcgttctctggggcgctggagcgctggcgcgtgctgttcgatgccacccgccagcaaatggatatggccgatcgcatcgtcaagagccataccgcctcgcacatggagcgccaaaatgcccagcgccgctacggcgacgccgcgcgccagtacgccgtattgctcaagtccggcaacggccagaacaatgatttctacacctatcgctacttggccagccaaggctttttgccaggctacaacttcccgcgcctgccgctgatggcctggattcccgcccgtggcggccaggccgtcaatggcaaggatgacgaaggcagcatggtcagccggccgcgcttcctggccctgtccgaattcggcccccgcagcctcatttatcaccagggtcgcatgtaccgcgtggtgcgtgccaaactcaacgtaggcaatacagaccacatttccggcaacagccagttggccaccattgcctcgttggtgtgcagccaatgcggctacggtcatctcggcgagccgggcggcgaacagccgctggtcaatcgctgcgagaactgcgacgccttgctcaccgagcacgattgggtgcgcgagctctaccgcatcgaaaccgtggagaccgtggccaccgagcgcatttccatcaacgacgaggaacgccagcgtcagggcttcgagctgcaaaccacctaccgcttcctgcccggccccgatggccgtatccagcagcagaaggctacgatccagcaaggcgaggacgtgctaggcgagctcacctacgcgcccgctgcgcaaatctggcgcatcaatcgcggctggcgcaggcgcaaggacaaggagcaactgggcttctacatcaaccctatcacgggcacctggagcaagcaggatgcaccggatgcggaggacgacaagggcagtgacgatgctttgctggagaaggtgcccaaccaacgcatcgttccctttgtggaagatcatcgcaatctgctgatcttcgctcccgtacatgccttgcctctggaggccatggccactttgcaggccgcgctcaagcgcggcatcgaaatgaccttccagatcgaggaatccgaactggtggtcgagccactgccgaagtccgacgagcgccgcgccttgctgttctacgaagctgcggaaggcggtgcaggtgtgctcactcgcctggcaaacaatcgcgacgaccttgctctcgtagccagcaatgccctgcaactgattcactatcgcaaaccgcagagcggcatttggacgctggaagatctgccgtcgctggaacagaccgatgcacttggcaatcatcagtgtgaagccggctgctatcagtgcttgctgtcctacttcaaccagccggatcacgaacacatcaaccgccgcaatgcggatgcgctgaagctgttggttgcgctggccaatgcccaggtgcagcccgtaacgagcagcccgactaccgttacctcaacaacagcaaacgagcccctcgacgcctggctgtccgcactccgccaggccgggggcgcgcaacctgatgcggtcaacgtgtccgtcaacaatggcgtagccactgcggcggcccagtacaaggcatctcgtgctttggtgtttctgtccgctgtggatgatcagaccaccagcgtattgcaggacaaaggctggcaggtgctcgatttttcggacgcttcacgctggccacaacaattcgccgcgcacgccgatgtgttcggttccaaggaataa

SEQ ID NO: 511001 - DNA, 2790 bp, Stenotrophomonas maltophilia
atgacgatcctcgaacacgactttctgcccggcaacctggtgcgcgcccgaggccgcgaatgggtagtgcagagcggctcccgccgcgactggctgcgtctgcgcccattgagcggcgccgatgacgaaagcatcgccttgatccccgagttggaactgcatcccgtcgaacccgccaccttcgactggcccgatcctgcacgcgccggcaaccatgccgccgcgctgttgctacgcgatgccttgcgcctgaccctgcgcgcaggcgcgggcccgttccgatcctttggcaatatcgcggtggagcctcgcggctaccaacttgtaccgttgctgatggcactgcgcctgtccactgtgcgcctgctgatcgctgatgacgtgggcatcggcaagaccgtcgaagccggcctgatcgtacgagagctcatggatcgtggcgaaatcgcccgcctggccattctctgcccgccgcaccttgtcgagcagtggcaaagtgagttggaaacccgcttcaaccttcaggccgtggcgttgacttcgtcttcggcctcccgcatcgaacgtgatcttccgcatggagtgagcctgttcgaccatcattccgtggtggtcgtcagcctggactacatcaagagcgaacgccaccgcgaacagtttctcgctaccgcccccgaatgcatcatcgttgacgaggcccacacctgcgccagcagcggtgcaggcaagcaattgcgcttcgagttgctgcaacgccttgcccgtgacacgcagcgacacctgattctgctgaccgcgacccctcactctggtgacgagaccgccttctacaacttgctgtcgctgctcgatccgcgctttgcggccttgcaaggccgaatgacggcctccgacccactgcgtcaggaactggcccgccacttcgtccagcgccgccgcaaagacatcgttgaatggcaggcggagacccatgacggacgaggttttccccgccgcatgaaaaccgagcttacctatcaactcagcggcgaatggggcgcgttcttcgacgcagtgcaggactactgccgcgaactggctgaaaccgttgagcagcaagaacaacaaggcagcgcgcgcctcatttggtacgccactctggcattgctgcgctgcgtggcatcgtcgcccgcagctgccgtcaaggcgttgaccacacggctggaaggcactgtgccggatgaggcgcttctcagcgacgagcgcctgcacgatggcgaagccgacgacctctccgccagtgacctggagccgcctgcccaggtgcaggacgctgcgccgcgtctgcaggccttgatcgcggacgcgcaacgtctttctggcaaggccggtgatccaaagctggctgcgctcatccggcatattgacctcctagtgaaggatgactatcacccggtggtgttctgccgctacatcgccaccgcgcactacgtggccgaacacctcaaggccgctttccccaaagctaccgtcgatgccgtcaccggcgaactcactcccgaagagcgccgagagcgtgtggatgagctggaggatgctgagcaacgcatcctagttgcgaccgactgcctctccgaaggcatcaacctgcaacatctgttcactgctgtcgtccactacgatctggcctggaaccccactcgccacgaacaacgcgaaggccgcgtcgatcgtttcgggcagcatgccgatgaagtgcgctgcaccatgctctacgggcaagacaacccggtggatggcttcgtgcttaacgtcatcctcaagaaggccgaggccattcagaaggagctcggcgtgctcgttcccatgcccgaggacgaagcccgcatcaatcaggccttggtcaggtcggcattgataaagcgcagcgacggtcgtgccgcatcgccgcaggtcgcattcgactttggtgagtcggagcagatgctcgctcctctacaggcccaatggcgcgacgcgctggaaaaagccaaggccaatcgcaccgtgttcgcccagcgtcgcatcaagccagacgaggtgctacccgaatggcacaaacagcagaaggctttgggcacccatgctgacgtgtcgcgctttctgcagagcgcttgcgtgcggctggggtcaccgctggagatcggccgcaagcagtctgcacgcttcttaccgcagcacctccccgaaatcctgcgccaacgcttgaccgacgacggtatcgacgaaccccagctcatcgaactcaacggactgcatcgcagtcacccgttggttgggctgctggctcagtacctgctggaagacgcacttggaggtgaacgtccgctggccgcccgttgtgctgccactcttaccaacgacgtagaggtcgtcaccaccctttatctactgcgtctgcgccaccagctcagctacgtacgccgtcgcgagcccttccagatgatggcggaggaaaccgttgctctggctgtgcagggccgcaatgctccccaatggctggtcgacgatggcgtgagtcgcctgctcgaatgcgcgccgagcggaaatctgccgccggaggcggcaaagcgcgagattcgcaccgcgctcgacttcctcgccgcgcatccgcagcagctacaagcggtagcccaagagcgggctgatgccctgctggccgaccaccagcgcgtgcgcgaggccacccgtgacgtgggccagtacagcgtcagcccctgcctacctgtggatgtgatgggtgtgtacgtgctgctgcctgactcgctataa

SEQ ID NO: 511002 - DNA, 4989 bp, Stenotrophomonas maltophilia
gtgaaacgcatccgcaaggcccaggccacgctgaacctgcccaccctcaagcttgaaggtgggctgttcctgcccgatcagctggaaaaagccgctcagggccgcgctaacgcacaactagaggccgactacggcacccccaagggcgtcaagctcaaggacgaatacagccgcgccttccagattgcctgcgctcaatggcggcatttcgccgcgcagattgggcgcgccgacatcgatgctgcgcagctcaccaccgccttcatccgcgaacttctgcgcgattcgtttggctacgcgaccttgcaagctacggcaacacagcaagtgggcgaactgcgctatcccatcagcctaatggctggcagcctgcccgtactggtagccccgcacactctggggctggacgaggccgacgcatgctttgccgtgcagggcggcggcaacagtaagaaggccccgttccaggccatgcaggaattgctcaacgccagtgaaccgctgcaatggggcatcgtcagcaacggcaaacaactgcgcctgctgcgcgacgctgcctcgctcacccgtcccagctttctcgaagtggatctggccgacctgcttggtgggcagcgttatgccgaattcgccaatgtctggcgtctgctgcacgccagccgcgcatcctgcctcggccgagacgctgcggtgtgcatctgggaacaatggcgcaacgagggccaggaggaaggcacccgcgtgcgcgatggtctgcgcaatggtgtcgaacaagctctgctgacactcggccaaggctttctgcaacactccgccaaccaagccctgcgcaacgctctgaacgacggttcgctcagcaaggacgacttctttcagcaactgctgcgcctgatctaccgccttatctttgtcttcacggtcgaggaacgcggcgtgctgcacccccaggcagacagcgacgaagcacagactgcccgcctcgactatgccgaaggctactcactggcccgcctgcgcgaactctgcctcaagcgtcgcgcccgcacgcgtcatgacgaccaatggcaaaccatccgcatcgtgtttcgtggcctggcgcgaggtgagccccgcctggcgctgcccgcgctgggtggcctattcgcaccggagcaatgccctgctctggataacgccagcttggacaactcccatctgctcaccgccatgcagcacctgcgctgggccgtcgtcgggcaaggcaagggtggcagtctcaccccggtggactaccgcaacatggggccggaagaactgggcagcgtctatgaaagcctgctggaactggtgcccgccatcgacctaccggcgcgcacgtttggcttcgtcggccgcaccgaggagggcagcaccgcaggcaacgcccgcaagctcaccggcagctactacactcccgacagcctggtgcaggaactgattaggagtgcactcgatcctgtcatcgaagagcgcctggcggcccgtccggccaatcccaccgaggcactgctggccatccgcgtcgttgatccggcttgcggcagcggccacttcttgctggccgccgcccgccgcttggcggaaaagctggctcagttgcgcagcctcgaaggcggacaggaaggtgccatccagccactcgactaccgccacgccctgcgcgaagtggtggcccgctgcatatatggggtggatcgcaaccccatggccatcgaactggcgcgcatggcactgtggttggaaggctacgaggaaggccggccgctgggttttctcgaccaccacctgcaagtgggcgacgcccttctgggcctgaccgacctgaacgttctggaacaaggcatcgcgaaggaagccttcaagcctttgagtggcgacgacaaggatgtgtgtaaagaactggctaaggtcaacgccgccggcctcaagcagatttccaaggatctgcaaggcaggcagatgctgctgggcgaggacaacggcagcggtctcgaagccttacgcgccatagaatccctgcccgccgacaggcctgaacaagtggtggccaaggaaaatgcctggcggggctttctggaagaatccgcccgcagcccgttagcccgcgccgccgatgtgcttgtgggcgcctacctgctgcccaaggcggaggacaccgccgacaccgtgcccactagcatcaccctgcatgcgctgctgaccgacccgcaacgcacccagaccgagcacgccgcccccatcgccgccgcacgcacggcctgcgaacaagcccgcgtgttccattggccgctggccttcccgcaggtgttcgcgcaaggtggcttcgactgcgtgctgggcaatccgccttgggaggtgtcgcagatgggcgaagaagagttcttcgccacgcgtgctcagcacatcgcgaaactggcgggcgatgcacgcaagcaagccattgctgcgctgcctgaaaccgatccgcgtctgtgggatgagtttgtcaaggaaagccagcggatcgcagctgcaaacaatttctaccgggagtcgggacgctttccgctgacggccgttggcaagctcaacacctatcccttgtttgccgaaacaatcctgcagatccatgccgacagcggtcgagcgggttttatcgtgcccaccggcatcgccacagacgacagcaccaaggcatactttggccatatcacgcagaaccggcggctgatcagcctgtacgacatcgagaaccgcgaaaagctgttcctagctgtcgacagccgcatgaagttctgcctgctcaccttgggggccgcggagcaggccgagttcgtctgcttcgccacccaagtcagccaactggccgacccgcgccgtcgcttcaccctcacgcccgacgagttccgcctcatcaaccccaacacgctcacctgcccggttttccgcagcgaacgcgatgcggaactgaccaaaaagctctacggagccgctccggtgctgatgcgcgatgccgtggttgaaggtgagggcaagtacgccagggtggtggagcccgcgcagaacccgtggggcattaccttctcgcaaggcctcttcaacatgaccagcgccagtcatttgttcaaggcagagcccggtccggatcgattgccactgtacgaagcaaagctcatccaccagttcgaccaccgctgggccacctactcgttagacggcaacagccgcgacgtctcgccggtcgagaaggccgacccggcattctctgtcaccccacgctactgggttgagtcccgcgaagtctggctgcgtgttgcccgtttgcccgaaggattgctgaaagcccttaaggacggcaatgcacaggagaccgtgctcagcgtgacccatttgttgttcggttcgcacctcatggaacagcgcagcgtcaatccaagcatgggtgcgtaccccgcctggagagcctttgtagcccgccagccctatgcgcagacaatcgcacccacatcgctgggcctcgtgagcaacagctcggaaagcctgcaacccttgaatgacgattgcctgcccgccgaatgcgaagccaaggcgcagctctacacgcatggctccagcaacactacggcctggtacaccattgatcatgaagccgagagcgctctgctggcgctcgccgccgactacggccatctgcctgcatcggagacgcccttggcggacgagcacgccgtgctcgccctagccgaacactggctgcaggttgcctgcccgcagtggttgatgggttggcgggatatcaccaatgcgactaatgagcggacggtcatcgcgtcggtggtgccgttggctggcgttggcaatcagatgccattgatgctattccccgacgggggaaaccgtgcacgattcgctgcgcttctcgccaacctgtctgcgctggtatttgactttgtggcgcggcacaagacaggtggcacgcacatgaattacttcatctacaaacagcttcccgtattgccgccagaccgctacaccgaggccgacctcgctttcatcgtgccgcgcgtactggaactgacctacaccacccacgaccttgccgcttgggccagagatttgggctacgaaggccagcctttcaccttcgacctcgaccgccgcgccaccctgcgcgccgaactcgacgcctattacgccaaactctacggcctcaccgaggaagaactgcgctatatcctcgaccccgccgacgtaatgggggccgactaccccagcgaaaccttccgcgtgctccgaaacaatgagctgcgggatttcggagcgtacagagagacgtcagtcacgccccttcgattggccagtgtcgatggcgaaacccgtcgcgatcacgtgcagtaccgcacccagcatctggtgttggaagctttcaagcgaggcttcaagatagaagacgcattgcctgttcaggctgaagccacggctcggcaggtcgtcgatcgagcgtccctgcctgatggaatctgggcacgaccacaacagaatgaaggtgcggagacgggggtggccttggccgccttgctcaaggctgcgcaggccccatggccagtgcgccatgtacgtctcgccgccgtcttggcgcttgagcccaggctgatgacgcctttgctggatgcgcaggatgctctggattggcaacgcctggtaggagaagaagctaggccgctgcccggggcggtgttgagcttcataccgcgcgcaaatcaggcttggggcggggctgtgcgcttcctccgaagcagtggctacctgattgaagatcttggagcggggacttgggccaaaggtggcgaactagatgtacctgctgccgaatgggcggaaggacgtgcccagatgattcttgttttcctgcaagcgcgagggcaagacttcgatcgtgtcattcgcgaattgcctgacgagatagggggatggattgaagccgcagcctga

SEQ ID NO: 511003 - DNA, 1893 bp, Stenotrophomonas maltophilia
atgcgcgaaccacgtttatggatcaagcggctggtgatatgggaaaagccaggggagttgcccttgcgggatgtttcattacgtccaggcctgaatatcgtgtggacgccggacgacaatggcatcggccatggcggaggaaagaccttgttctgcaggctgttgcgctattgcttgggcgaggataagtttgctcccgaagatcagcgcgacggaattggctcggcgtttcctaacggatgggttggcatggaagtcgtgttggatggcgcatgttgggctgttcttcgacccttgggcatacggcggcggcatttcgcggtactggatggcaatcttgatgagcttgttctcagcgaaatgccggccacgagtctgtctccgctgctcaacgccatcgaagagaatctgctgactccgggcgtcagagatctgatcgctggcaagaaacaagggcatcaggcctggcagattgccttggcgctgttgagcagggatcaggaatgcagattcgaccatgttcttgaatggcgatcctcactatccgactcggagtcgccggcgaggggattgaatcgaactgagcggctggaggcactgcgagccctgttgaacgccatcgacccctccgaacagacactccgcgtcgacatcgccgcaatgagcgagtcgagccgtagccaagagcaggaaataggccatcgcgcctgggaaatccgcaagttgagaaagcagcttctggaagggcttggcgttacggacgatgaacttgcgcagggcactctgggtgtcgaaatcctgcgtagggcggcgcaggagcggttggcagtggaagcccagtccaatggtgcgggcgcgactccggataccgactccgtgcggcaggcgcacgaaaatgcccaagcggaggtggcaaggatccaggccgatatcggaaggcaagaggctgtgataccagccatcgagcgggcgatatccgcgatcaagggagaatatccaacattagcctactcgctcaaggaagcagaaaattatccttgtcccatctgcgaggtgcccattgaccgcgtgctggcgagccaatgcgggttgtcacacaaggttccagatctggaggcctgcaaggctaggttggagagcggcaaaaaagcgctcaaggatgaacaggagcgtctggagtcagcccaatcgctactgaagcagttacgacctgagctggcgttggcgaaacaggatgcaacgcgcagggaagagcattaccagaacctgctgaagcttcgcgaacagcgcgatggggcgtggtataccgcacgcaaggccgtggacgatgtcgagcgcctggcctcgctgctcgaacagcagcaaactaccgaaacccgcctggctaggcatcaaactgagatagagcaagtgcgggagcggatcgcgacgctgcaaaaccagaatgcgactgttttctcgaagcttgcccagaagttcgacccaatcatccgacgcttagtcggacctgaagccaatggcgaaatccgattgaccggaaacggactgagcctggttgtccagatgggcggggatcgttcgacatctgcgatcgattcgctgaaagtcgtggttttcgatctcgcgaccctgtgcatgagtatcgatggtgacacgaggcttccggctttcctgatccatgacagcccacgtgaagccgaccttgggctcgctttgtaccacggtttatttcatcttgtgcatgaactggaaggacgtggatcggcccccttgtttcagtacatcgtgacgactactaccccgcctccgaaagagtatgcccaagaaccttggctcgctttgcagcttcgcggttcgccagcttccgatcgtctcttaaaaagagatttgtaa

SEQ ID NO: 511004 - DNA, 768 bp, Stenotrophomonas maltophilia
atgaatcctctacaacgcgccctcatcgaaaaaaccggccacgacaacggcttcgagcacgtgctgtcatccgctggcgatgcggtgatactggcttcggctcgccatcgcagccaggcggtagtgacggcatcggccgatggcttcggcttgcgccttcaaccggctacgcccgcgctgctgccggaactgttgcgcagtttccaaccctgggccggagccgatgacgtgttttgtgtgccgactctgcccgatttggcggctcttctgcgccgcacggccagcctgtcgcaggcgttgccgaatcaggcagtgcgtgactaccacgcggccgtggcgcaagttgtcgagacgatgtctgccgaagcccgcggcacggaagtcgaacgcctggtgcgtcagcgcgtggggcaggcgcgttaccgcgatgccttgctgatctactggggcggttcctgcgcagtgactggcgtcgcggtgcctgaagccctgcgtgctagccatgccaaaccctgggccgaatgtgccgacgatgccgagcggttggatgccttcaacggctttctgctggtggccaatctcgatgcgctgttcgatcgctttctgatcagcttcgacgatgccgggcatctgctgaccagcacccgcctgtctcaaagcgatctgcctgggcttggcattcattcgggaatgacgttgcgctggctggccagcgagcaccggcattatttacagtggcaccgcgagcgcttcctgctcggtgcctga

SEQ ID NO: 511005 - DNA, 1716 bp, Stenotrophomonas maltophilia
atggccaaggccgaagcaagcgttgaagaactggtatcaatgatcgagcggggcgaactgcgcttgccagagatgcagcgccagtatgtgtggcgctccacgcgagtgcgcgatctgctggattcgctgtatcgcggctacccttcgggcgcaatcctgctttgggaaaccgacgaggctgttccgctgcaggatttcgcggtcagccaaagcacgaatccttaccagagcacgcggcttctgctggatggtcagcagcgtctgacatcgctctctgccgtcattcgcggcgagccagtatcggtgcgcggtcgccgccggcctatcgacttgctgttcaacttggaacatcccgaccagttggcggtggtgaccgaagtggaagagaacggcgacgacgagaacgatgctgatgacgatagcgaactgattggcgatgaggcggactcgaccgaggatgaactgctcaagcgcttcaacaagatgacgttcgtggtggccacgaggaagctggagcagttgccgcattgggtaaaagtgtcagaagtgttcaagaccgacagcgatgcgcctttcctcaaacgcgctggcattagtggttttgacgatccgcggtacgagaagtacagccagcgcctcgcccggctgcgtggcatccgcaagtacgtttatcggatggacgtgctggaacgcacgctttcctatgatgaggtcacggaaatcttcgtccgggtcaattcactgggagccaagctgcgcagttccgacttggctctggcgcagatcactgccaagtggcggcactcgctacagacgtttcaggatttccagaaggcatgcgccaagacgggctttgaccttgatctcggtttgcacttgaagaatttgatggcgtttgccaccggccaatcacgttttcagatcgtgggtagcctgaatgtggagaagctgcagaaggcatggaaagaagcctgcaatggcatggaattcgcgctcaacttcctgcgcagcaatcttggcatcgatagcccggcactgttgtcgtcgcctttcctgctggtggtgctggcgtatttcgggcatagccgcaactatgcgctgagcaacgatgaggcccgccaactgcgctactgggcgctgatggccaatgccaaaggccgcttctcccgaggctccagcgaaaccattctggatcaggatttggcaaatattcgtcagggcggagcggtgcgcgagctgatcgaccggctgcggctgcagttcggccgtctggacattaccgcagaggagctggaagggcgcaaccagcgtagtgcgctgttcaagacgatgttcctggctttccgcgctgccggtgcgaaagattggttcagccaattgaccattgctctggatcattcgggcgcccagcatcgcttgcagttccatcacattttccccaaagccgtattgaagaccagcttcactgcccgcgaggcggatgacatcgccaatctgggattcatcggcggcaagacgaatcgcgcgatcagcgacaaggccccggcggtttacctgcccccgctggtggaccagcttggcgagctagcgttcgcagcacagtgcatcccggttgaggcatcgctgctggaagtggaaagctacaaggctttcttgcttgagcgacgcaagaggattgcaatggcgctgaatacgtttgttgggcctgcagagtga

SEQ ID NO: 511006 - DNA, 1017 bp, Stenotrophomonas maltophilia
atggaactagccttcgcgaatctcattcgcgactatcagaagcaagtatcgtacgcagtaaagattctgagagaatctggcattgaaatgccatatagcagccacgagtggacccttcggaccgatccccgagagggaaagctcgtcggaggtgtgagctaccaaaggcatggccgcggaatctggctggatctacctgacggacaagttgattttgactttggagatcaaggagagaccactggatttgacagatggcgtcttgaatgcttcttggacagcaggcgcgatgcctacccgacctcgactcgccccgagctcggagtatggctgaaagatgggatcatcaaaggtgaactaattcaagccccctatggcctgtattacgttgcagacattgcaatcagcaagaaccaggatgtaaatcgaatcctgacggatggctgtggcctgccccaccagtctcaggacaggatactaacactgtactctgaatgctttctctcggccgacgtgatgctcggacactacaattcaaccgtccgttacgcagagaagcataagggactgagccgattgaagagaataggactccgcgtctacctgctgtcatggctgggatatctgcactcaacaatggaaggcattcagtcgatcggggtaagactactacttcagagaaggcgccatcactcttttcaggaagcgattccgctgctagacgaactgaacagcctattcaagaagcacgctaattccctaagaattctgcgaaacaatgtcttccatctactcactgatgccaaggctctagaagcgtttttctcgcaggatggtcaaagattgagatgggcaacggagctacatcgtcaacttgcagagttcttctcaaattacagaataacggccgaggtgtactacttggaaaccggaagaatggcagagagtgtagtgaggagcgtggctcgggagcgaaaacgacgtagatcaactaccatgcctacttcagaaaaatag

SEQ ID NO: 511007 - DNA, 153 bp, Stenotrophomonas maltophilia
atgacaacccccgctccgcaggcgccaaagcacgcctgcttcaccaccactgcctcgctgcgcccaggccaccacgtcatcgtgccgtgcggccaggaacggtaccccgtaccaccccctcttcccaatgccgcacaggagaacaccccatga

SEQ ID NO: 511008 - DNA, 1878 bp, Stenotrophomonas maltophilia
atgcgtttgcgatggatgctaggtggcctgctgtgggtgctggcggttccggcacacgccgcgggggtggatgctgccgatgtgctggccaaggcccgcgtagccagtggtggcgagcagtggctgtcggtacagcgtctgcaggcggtgggcgagcagtcggtgggcggcctgcacgggcgctggcagctcaaccaggacctgcgtgccgggcgctatgccgaacaggcgcaactgggagacttcaccgtcgcgcagggctttgatgggcaactgtcctggcggcgcgactatggcggcgaggtcggcctgctggatggcaccgtgccacgtcggaccgcgcgcacgcagtcgtggctggcgacccgtgcctattggtccaacgcctatccgaccacgcactttgccgcgccccgcaccgaggctctggatggccggcgctataccgtcctggccacgaagccgaggggcgccgacccgatcgagctctggttcgatacgggcagcggcctgctcggccgcgtggtcattgcatccgctcgcacacccaccgccaccgcactggaggactaccgggcggtcgaaggcctgttgctgccccatcgcatcatcaccgacaccctcgatgcccggggccgtgctgatccgcgactgcgcagcgatgtacaggtgcagcgctaccaggtggatggcccggtaacagacaccgtgtatgcaccgccaatgatggcccatgacagctatatcgaggatgccagcggcaccacccgcattccgttcgacctgatcaacaaccatgtctacatcgaggccgaagtggacggacagccggcgcgattcctggtggatacgggcgccatcaatctgctgacaccgaccgccgccaagcgcctggggctgaccaccacgggccgcctgagcgtgcatggtgccggcgacaacgccagcgacctgggcctggcacaggcccgccacctgcgcatcggtggcgcgcaccttgcaaacccggtgttccacatcatcgacctcggccagcagatcaactcgatgggcgtgccgcatgatggcttcatcggctacgagaccttcctgcgcttcgtcaccaccttcgactatggcgcgcgcgtgctcggcttcaccctgccgggccactaccagccgcctgccaacgcggtggtgctgccgttcgaacaggatgaccgcgcgccggtactgaatggcgagcttgacggcatcccgcttcgcctgtggctggacaccggctcacgcaactcgctgagcctgagcagtccgttcgtgcgtacccatggtctgttggagaaataccacgccagtgaggaggcggtgcttggatggggcctgggtggcgcggggcgggcgcgacctgcccggctcggtgtgctgcgcatgggcgatatcgaggtcactggtctggtcggtgatctgtccagcactgacaagggcgcgctggccctggccgactacggcgcgatcctgggtggcggcgtgctgcggcgcttctcgatgggcatcgactacggtgccaagcgcctctatctggtacccaataccgaaagcacgcaggccgatgccttcgatcgcagcgggctgtggctgcaggctgaacacgatgcactgcgtgtggccgatgtggcgccgtccagcgccggggcacgcgctgggctgcgcagggatgatcgcattgtcatggtttcaggcgagccgattgccacgcggatgctggcgaactggcgtgcgctgttgcgtgagcgtccggttgggacgcgcgtgggcatccgttatctgcgcgatggccggcaggtggataccgatctggtactggcggaccgggtggctgcgggatggcgtgccgattga

SEQ ID NO: 511009 - DNA, 264 bp, Stenotrophomonas maltophilia
atgctcgactcatcccatcatcgcgcgaagagcgaagagcgaagagcagccgagcatggctcggctctacagaaggcagattccgcgagcagatccatccacgccatgcgtggatgggtgcagccgcagaacccggggcattacgccccggattcgtccggcttcacccggaaccacgccgcgtacaacgccggcaggaacaccagcgtcagcaccgtacccacgatcagaccacccatgatcgagatcgccatcgagccatag

SEQ ID NO: 511010 - DNA, 3753 bp, Stenotrophomonas maltophilia
atgaaccacatctatcgtcgtatctggagtgccgccaagcagtgctgggtggttggcagtgagttgagcagtccgcgcggcaagtccgctggaggcagggcactattgctggtggcggcactggtgggcctccctgccgcagcgcacgagcactcggaggaagtggctgagggcgagcgtgaagggaccgactccactcaactcctgttgccctctccgtggcgcttctcgtcattttcgaaccaggtaaatgcgggttacacccagctggctctggtaaatgacagccaatatcggaatgccacgatcagcggtgatatgcagatgatcctgggttcacggtcgagcatcagtggctggggatcggtggtctacggcaccgaatcatcgttgtcggggttgggaagtgtgcttgtggggaattcatcgattgcacgcggcgacaggaacgtcgtcgttggatacgggtctgaggccaagagcggatactcgacagtcgtaggcgccagctcgatcgcatcaggaattggtgcaaccgcactggggcatgacgccagggcatacgcgagcaactccattgcggtgggcagcggtgccaggacggtggagagttccgcaggtgtttcccgtattgctattggcggaaacgccttcgctggaacggcgggatattcaggtgccatcgcgttggggggtagctccagggccgagttcgacagtgtttctattggctacaacgccaaggcgtcaaagacgggcgcagttgctctcggtgtgcactcgatagccgatgaggcgaacaccgtgtcggtgggcaacctctcaaccaagcggcgagtgaccaatgtgggagatgcgcgattgagcgccagcagcacggatgccgttaccggaaagcagctccacgccaccaatagcaatgtctctgccgcgcgttcggtcgcggactctgccaagaccaatgctgacagtgcgctggcaaaggccaatgtgctctcaggccttttgaaagagaagtctccttcgggaaatatcctcataggtgcaagcaatagcggctctgtactggacgtccgcaacagtgccagcgccaatcgcaagatcacgggcgtggcggatgccacgctgagtacgtccagcaccgatgctgtgtcagggaagcagttgaatgccaccaacaccaagctggcagatgcacagcgcgtcgcagacgcggcagccgcgcgcctgaacgcatccgccccggctatcgggctggcggcagaggcggaggggagcggaagcaccgccagcgtagcgatggggcgctcagcgaaggcgtacaacaccaacagcatcgcagttggtgcagatgctcgggccagtgtcgacgccaatggcgataagagcgccgccacgggggcagtcgctcttggtgccgcaacgcgcagcggcaacggcgcggtggcggcaggcctgcgtgcttcggcagtgggtgatcgcgccgtggccgtaggcaatgatgcgaccgccgcggcgacccatgccgccgcgctgggctacaaggcagatgcgagcggcaatcaggccgtcgccattggccgggaggccgccgcatcgggtttgtattcgacggcgcttggcaatcttgcaaaggcgggtgccgaaagtgccattgcgttgggcgaccgcgccctggcatcgcacacgggaagtgtcgctctgggcaacggctcgcagaccaccggcatcaatcaggtctcggtcggcagctccagtatcaagcgcaagatcgtcaacctggcggatggtgctgtcagcagcagcagtaccgaggccattacgggcaagcagttgaatgaaaccaacggccgggtaacgactgcacagaatgccgcgaatggcgcgcaggccactgccaacgccgcacaggttgatgccaccaaggccttggctgaggccaccgtattgggtggtctggtcgggcaggtttcggtcacagggattgtccgcctgggtgaaaagaacagcggcaccgtagtggatgtgcgcaatagcgcaaatgcgaaccgtaagctgaccggcgtggccgatggcgtggtcagcgccagcagctacgaggtcgtcaacggcaggcagctcaatgccaccaatgagaaggtgggggctgtggaaggcatggccacctctgcggctgcggacgcgaccgtggcaaagacggacgcgaccaaggcgctggccgaaacagcgtcgctgagcgggctggtggcgcaggtttgggcgtctggcgatgtgcgtttgggagagaagaacagtggtacgacgttggacgtacgcaacagcgccaatgccaaccggaagatcagtggtgtggcggatggagtcctggacaacagcagtgatgaagcggtatctgggaggcagctgtatgcgacgaacagtcgaatttctcacctggagggagcaaacctgtatgtgagcgttggcgtcgacgcgttgagtgagcgcgctgaggccgtcttgcttggggtggctgttggtgattcagcgaaagcaggtgctgagggcggggttgccttgggagctttcgcaacagcgctgggaaagaactcagtggcagttggccgtggggcgggggtttccggtgaagcatccagtgggtttgcgatgggcgtcggcgctcaagtgcatgcagtcaacggagtcgcgattggagcgggcgccgtcgtagagaactcagcctccgggtcattggcgctgggtgcgggttcctttgcagaggaggggcagacggcatccttcggtaatgcaacgtcgcaacgtcggcttacaaacatcgccagcggcaccgccgaccacaacgccaccaccgtctcccagctcaaggattccctcgccaccctcggcggcggcgcaggcatggatgcgaacggcaacatcattgcccctacttattcagtgcagagcggaacgcagaacactgtcgaggatgcgctgatggcgctcgacggcgctgtcgtcagcaccacctcgcgcgtgaaccaggtcgaatcacagctccgctccgtgttccaggaaaccccctcggcccgcgcagacggtacccatcagctcaccctggccggtgccaacggcatggtcatctccaacgtggccaacggcctgatcgcggccggcagccgcgatgcggtcaacggcggccagctgcattcgatgcagcagcagatcaacggccgcatggatgggctggagcagcgtatcgacggtcagccgcaggcccgcgccacggcggcagcatccacgccttcgccatccaccgaagagaccgcgccggcgccggagaccggcggctcgccgcagatcgcctcaaccggtgaaggtgacaagccagccccgcagccgaagtcgaagcaggacgacacgcccaagccgcaggtcgataccgccgagctggagaagatgcttgcccgggccaacgagtacaccgatggtgcgatcagcaccttcgagcgccgcctggacaagatggacaagcgcttcaaccgcatggcggcgatgagcagcgcacagagtgcgatggcgatgaataccgccggcctggctacctacaaccgcctgggtgcgggcgtgggttacagcgagggtgagtcggcgatggcggtgggctaccagcgcgtgctcaacgagaagggttcggccaccttcagcctcaatggtgcgttcaccaacagcggtgagcgcagcatgggcgtcggcgtgggcatcggctggtaa

SEQ ID NO: 511011 - DNA, 606 bp, Stenotrophomonas maltophilia
atgtcaacgaccaagaacaagggtgggcgtccgccgcgcgcgccgggtgaaaagctgcagcgcatcaacctgacgcttaggccgggcctgctgtttggcttagaagtggtggcgcgagaccgccgcacgtcactgagccaggcagcggagtacctgattgagcagcaactgcgcagctatcaagtagagggagcacctgccacaaagctgttggacggtgtggtcggcgtgatgcgggatcacctatcaaatgggaatccgctggtggagaaggagccagaagacgcagaggaagtggccgctatgctgctggccagcccctcggggcgggcgttcttcatgccagatgcgctccagacacccagcgagcgttatttcctcaggttctacgcgaagctacttcgcattgcgaatgagtcagccgccggcggcgaggacgagcgtgcgacagcaacgatgatggcggtcatgagttctctggcgcgtcccgatttgctcgagcaactctatgcagctgcttctgaaggagcgcagaagggggactcggaggaagaagctgcgaggtcggtttacgaccaaatcgctgctatggcagcgggcgactag

SEQ ID NO: 511012 - DNA, 360 bp, Stenotrophomonas maltophilia
atgacgcccatcgtacaccaaccacccgtgctcgcaatcgggcaaacccctgacgcgcattcagacttttccgacaccgcgcgctgggccaccgtcgcactgatcgacagccagaacgcacctagctacctccccggcgacgtgctggtgatcgacctgacggtaaagcagtaccgcggtgatgccctgtatgccgttgagatcgacggcgaggcgctgattcgctacgtgcaggcgcgccctgccggcctgtacgtctacgcgctgtcgggcatctacgagggccacacaatccagcgcgctgcactgcgggtgctgggccttgtcacctacgccagcaagctgcggagggtcggatga

SEQ ID NO: 511013 - DNA, 237 bp, Stenotrophomonas maltophilia
atgagtcgtgacctattccactcgctgaggcgcgcccgcttcgacctgcaggacatgccgggtgctggtgaggcgacagatgccgcggtgcgcatcgtgcgccagtaccgcgacgctgtgaccgttgatgtgatctaccgctcgcaggtgggcccctgcattccgttcacaccgctgcctaagcagtaccagggcaagaaggtgcggatcgttatcgaggatgaaggcaatgaatga

SEQ ID NO: 511014 - DNA, 339 bp, Stenotrophomonas maltophilia
atgaatgaagccaagttcaaccaccggcaaggcgttcgcttttactcctgggagacggcgcaccctgcataccgcctcctcgatccgactgcccgcgcgctgctgatcgaactgcgcgcgctggaatcgctcaccggaagcgccctggtatccctcagcgtcagagacgctcgcaagcgcctgaacgtcactcagcgccccgtggagcgggcattcagagcgctgctgctgcatggatggatcgaagagacgaagacggagccagggcaacggcgcgtcgtgcttctcaagagtccggtgaacgcctctatagaaaccgtaggggaggcagatgagtga

SEQ ID NO: 511015 - DNA, 516 bp, Stenotrophomonas maltophilia
atgagtgagcgagaagcccgcaaagaggccaagcggcgcgcgcgggcgacggggcgcagcagcagcgtctatgtcccggtggcgcctcacgtccgcctgtattcctgggaaatggcttcgccggcttaccagacgatggacatttgcgcccggcaactgctcatcgagctacgcgctctgtatcgccccgtgtctggcaatgaggtgttcctcagcatccgcgaggcgcggcggcgcttgggcggtatcggccaagccaaggtgcagtcggccttcgcagccttggaggaacgcggctggatcgaggaagtgaaaccaggcggattcaatcagaagactgggaccggaagggcgcgctccttccggctcaccaacatagggccagatggcagcgatgcggacgggaagaggacctacatgcgctggcggccctgcgatgaagaggcacagaaaaacacggtactcgtggcgagtacgccaagtgccaaaaacgagtacggtcatgggcaagcgtaa

SEQ ID NO: 511016 - DNA, 192 bp, Stenotrophomonas maltophilia
atgtggatcagtgctgatgggcgcattggcgaggcagacttggccgcgctgatcggcatcgctcctggaacgctggcgaacaagcgcagggaaggcacggcaccggagagctacgcactcggcggcggcaagcacaaaatcacctatcgcctgatcgatgccgcgcgctggcttgaggcgcacaggaagtaa

SEQ ID NO: 511017 - DNA, 1266 bp, Stenotrophomonas maltophilia
atgaccaagccaaccaagatcgcacgcggcattcaggccgtacgcgcagagggcgagccgaccgacgtggccggcatcgtcgccaagctcaatgaggcctttgcccagttcaaggccaagcacacagccgacgtggccgccgtgcgccagcaggtggacgagaacaccaccgcactggcagcgtggcagatgaacggcggcggcccgactgacgcgccctcggcggacctggacggcggcggcatcaaggtgctgcgcactcccgcagaattccgggcgtactacgccagtcgccgcgacgacgctgacaagccgcgcgctgccgaaaccacgttgaccgacttcatgcgcggcgttgccggcatgagcagcaccgaggccgtgatggcttcgctcgccgtcggcaccgacagcgcaggcggctacgcagtcccggacgtggtgatgccgggcatcctgtccgcgctggtcccggcgtcctcgctgctgcaggcgggcgcgggcatcgtgccgatggactacggcgccaagtcggtttccaccgcagcgatcgacaccctgcccaccgccacctggcgcaatgaactgggcaacatcggcgagagcgagccgaccctgcgctctgtccagtccaccccgcgcagcctggcgtgcatcgtgcgcgtgtcgcgtgagctgctggccgatggctctgacgtggatcgcgcgctgcgccaggtgatcgcacaggcgtttgccaaggagctggaccgcgttggcctgctgggttcgggcgcggcgccggagccgcgtggcctgcgcaacaccacgggcatcaacaccgtatcgctgggcgccaatggcgcagccctggacagctaccgcccgttgcttaaggcatacggctcgatcatcgacgtgaacgcaccggccccgactgccgcgatcatggccacccgcacgctgatggacttcgagggcctgaccgacaccaccggccagcctctgcagcgcccgcgcctgatcgatgacatgtcgttcgtgccgaccagccagatcccggttgatggcgacctgggcaccgccaccgacgctagcgaaatcttcgtgggcaacttcagcggcctgtacttcctgatgcgtgaggcgctgtccatccagctgctgcgcgaggcgtacgccaagacgggcgagatcggcttcctgtgccacgtccgcgctgatgtggtcatcaactacccgcagcagttcaccgtgatcaccggcgtgcggccggctgcggactga

SEQ ID NO: 511018 - DNA, 282 bp, Stenotrophomonas maltophilia
atgtccacatcgcccatttcccctgcactcctggctgccgccgcttccttcggggaagcaagtcagcccctgcgcaacttgttggtcaaccacttggtggagaccagtcccgaggctgtcgaacggatggccgaagcctcgctcgcgggccaccgcctgatgctcgcgaccgacgccgacacgccggatccccaagtgcgcctgctcgtggtcgattcagagcagcgcgtcacgcagatcgccgcaatcggcctatttcccccatccgacctgaggaactga

SEQ ID NO: 511019 - DNA, 741 bp, Stenotrophomonas maltophilia
atgctagctgtgtacgtagacgaaagctgcgcggatggtaggaaccgttacctcatccatggagcgctgtttctttgcgggcagcagatcggtgatctgcgcgcggctattgaagctacggtcgcggctagcggcctgtcagatgaagtgaagtggagcggtatcaccagggcaaagcgagcgcgcgagctcgccatcgctgatcagtattttgatggaaccactgatcaggaacttgcggccggccgttggtttcagtcgatggtgatcgatcagcatcagctggacgtccgggggtatcacggcggtgatagagacgtttgcttctataagtgtttgtatacccttcttgtaaagcgcatcgctcagtacgcgttgcctgatgaagacgtgcacgtcgttctagatcagcgcacgacgctcagatacgacctggaagatctccgggcagtgttgaacaacgcgctaaggcgagacctcgctgatcgatctcctcacgttcgcaccgtgatttacagagactcacgcacctgccgactacttcagctgtccgaccttctgactggtgctgttggcttccatcagaaccgtatgcatttggtgccaactgcatctccgcacaagcgcgctgtggcagagcatgttgccaggcgggccaatttggagtcgttgcagatcgccaacaattggtcgccgcatatgggcatctggacgcttcggatgggtgagcgtcgcacataa

SEQ ID NO: 511020 - DNA, 327 bp, Stenotrophomonas maltophilia
atgggagcgagcccgagactacgtcaacgcgatcgccaggtgacgggcctgatcgaccggatgaaggtgggcgacctggacaagggtggcgtcggcatgggcgagctggccgacaccatcgaggcgttgtcggataacttcgcgcgcgctgtgttcgacctggtgatggacaacaaggcgcaggccgcgaccacggcggcgatgcagcagagcaatgctctgctcgcgcaggtggtggatcggttggaccgaatggaggccgtcacgacgcagggcgtacgtaccaccagcagcagtgctctaagggctgcgctcgatgctcgatga

SEQ ID NO: 511021 - DNA, 165 bp, Stenotrophomonas maltophilia
atggatttcaaagctggtgacgttgtaaagctgaagagtggcggcctccccatgaccattgcatggatcaatagcggtgaggcacggtgcgagtggttcgatacgaagtatgagcctcaggttcggagctttgcattggctcttcttgtgcacgccgaatcgtaa

SEQ ID NO: 511022 - DNA, 186 bp, Stenotrophomonas maltophilia
gtggggctggaaatcaacgccaaccacgtgcgtgcggtgcgttcgggcacggtcaccggcaccgcccgcgcgctgcacgtgggccgcagcacccagctgtgggagatccgcatcgaggacgagcagggccggctggtgtgcatctcgcggctgaccctggcggtggtggcggccggccacggctga

SEQ ID NO: 511023 - DNA, 171 bp, Stenotrophomonas maltophilia
atgcgcttgctgatgcttcttcccgcactgctgttcgccgcgctgcctgccagcgccgacgcgttgcagtgtggcgaataccgcagcgccgatggcggcacggcgctcgtgttcaccacctccagcagcggctaccgccacaacgacatccgtgaacgggagccgctatag

SEQ ID NO: 511024 - DNA, 708 bp, Stenotrophomonas maltophilia
atggtccgattccgtcgtcaatcgtttgaggatctgcaaggaccacttgaaccaacgccgctggcaccggcaacactgccgacggcagcattgccgttcgtacagcagttgcgcctgcacctagcaagcgacagcacgccgtcacggcggccggcccatgccgcgatcatccacggcgaggccacggtgtgctggctggatgccaggaacgaccggatgatgaccactgcgccagcgccgatcaccctgacgctgctgcagaggctgttgcgcgatgaggatcccccgctgagtctggtgccggtgacccaggatgtgttcatgcagcgcgcgacagtgtccagcaacatcccgctacgcccgaccctgtggaacgtcggcctgtccacggctgatcacaacgcgccgatgcctaccctgcacgagagcgcgaagctgcgccttcgtcgctggccggatttccgcatcctggcccatcggccggatcatttccggctgtgcgcgctgctgatcaagcaaggcgcatccgtgcaggcgtgctgcgacctcctcgacctgccgcgccgtaccgtgcagtcgttcttcaatgcggcgtttctcaccgcctatgcctttcccgtcgtaggcgaggacgcacccgtgcgcccctcgcccaccgatggcctcgtcaacctgtggcgacaacttcgcatccgctggagtgcatga

SEQ ID NO: 511025 - DNA, 630 bp, Stenotrophomonas maltophilia
atgccggatcgtgcccggcggatcgtttccgcgcctgcggggaggtgtcactttctttgctcgtgcaaagaaagtaatcaaagaaacacgccgccggggcgcgagccgtcgctgcgcgacggttccctgtgcttctcggcgaatcaggggacggcgccgaactcgctgcgctcagacaccggcgcctcttcgcccctgattcccctgcgatgctcggctcgctcaaggcggactggaagatcaagatcaagatcaagaacaacagcatccacacgtggcgtggatttactgggttcagctgtggcatttgaccttgggtccgccttgagcgagccgagcaccgcaggtccggcgagggcgaagaggtgcgggtgtctgagcgcagcgagttcccgcaccgtccctcgacgggccgaggagcgcagggtaccgatgcgtagcatcggctcgcgccctggcggcgtgtttctttggttactttctttgcacgagcaaagaaagcgacacccctccgcggtcgcggaaacgactctccgtgcgcacaaacgaaaacggcaccctcgcaggtgccgtctccatgaaccgcattacgcgaaacctcagaatttcgcgtcgaactccgccgcataa

SEQ ID NO: 511026 - DNA, 2940 bp, Stenotrophomonas maltophilia
atgacttcacgcaccaccgcactggggcaggccatccgctatgccctggctaccaccgcaacgttggccgccctgcccgcgtttgcccaggacggcagcaacgcaacgcccaccaacctcgaccgcatcgagatcaccggctcgcgcatccgccaggtggacgtggaaaccgcccagccggtgttcgcgatcacccgtacggccatcgagcagcagggcttcagctcggtcgccgacatcctgcagaacgtcactgcgatgggcagcccggcgatcagccgcgccaacgcgctgaccgccggtgagaacgcgggtggttcgtatatcgacatgcgcaacctgggcacccagcgcacgctggtgctgatcaacggcaagcgcctgggcatcagcacctccggttaccaggacatctccacgattccggtctcggcggtggagcgcatcgaagtgctgaaggacggcgcgtcggccatctacggttccgatgccatgtccggcgtggtgaacatcatcacccgttccaatgtcaccggtgtgaccgccaacgtctaccacggccagttcagccagggcgacggcgcgcgtgaccgcttcgacgtggtggcgggctggagcaatgaccgcatctcgctgaccgtcgcggccgaacatgccgaagagaaggcggtgtgggccaaggaccgtggcttcagcgcgtacggcctgaccgaccgccatgccgacaacctgaccaactggaccaccatcagccagtggggccagttcaccggcctgaagggtcgcccgggctgcaccactgccagcggctgcaactactcgctcaaccgcggtgctgacccgaccaacccggccaactaccacatcaccgatccgtcggcgttcaccggcgacgtcagtaacgccaacgagcagatgcacctgaacttcccgctcaagcgcgattcggtgtacttcgacggccgcttcaagatcaccgacaacgtcaacttccgcaccgagctgggctacaacaagcgcaaggccgtgcgccagatcgccggctacccgctgcagtccagcaccgctggcgtgggctcgatgtcgatcgacagctacttcaacccgttcggccgccagcacggctacgccaccccgaccgccgtggcctggaaccgccgcacctgggaagtgccgcgcgtgaccaccagcgagctgaagacctaccgcgcagtggcgtcgttcgacggttcgttcgagatcggcagccgctacttcgattgggaagcgggctaccagtacaaccgcaacgagctggaaaccattgccaccggcaacctgcacaaggcgcgcgtcgccggcggcgtcggcccgtcgttctacaatgcggccaccggcaaggtccagtgcggcaccgctgccgcgccgatctcctatgacgtgtgcaagccgtggaacccgctggtgccgtacggcacgatcgatccgaacggcatcgatggcaacgccgacctgcaggcctggctgttcccgccggaagtcaccaccggcaagaccaccagcaagaacttcttcgccaacatcgccggttccatcgtgaccctgccggccggcgacctgggcttcgcgttcggtgtggaaagccgcaaggagaccggtgagtaccgtccggatccgctggcgcaggccggcgccaccaccaacctggccgcaggcccgaccggtggcggctacaaggtcaacgaggcgtacctggaaatcaacgtgccggtgctggcggacctgccgggtgccaaggaactgaccttcaacggcgccacccgcttctcggactacgacaccttcggcaacacgctcaacagcaagttcggcttcaagtggaagccgttcgaccagctgctggtccgtggtacctgggctgaaggcttccgcgccccgaccatcagcgatctgtacggtggcggctcgcagaccttcgcccagttcagcgatccgtgcgacgtgcagttcggctcctcgcgcaccagcgccgaggtgcgtgcccgctgcgcccgtgacattgccaacgccgcgacgttccgccagttgcgccagggcaaccagccggtcgccacctcggtcgacgcgacgccggtgccgttcgtgtccggctccaacccggacctgaccccggaaacctcgaccagcaagacgctgggcctggtctggagtccgagcttcatcaagaacttcaacgcctcgctggactggtggaagatccgcatcgacaacaccatcgttgccgacagcccgacccagatcctgatcgactgctacgagcagggcatcgacgcacgttgccagcgcttcacccgtgacaagtcgaccggcccgaccgccggcatcgtcgataccctgcagttcggcagccgcaatgccggcttcatggaaaccgaaggctacgacctggacctgaactaccgcctggataccagcgtcggcaagttcaacgccggctgggccaccacctatgtcagcaagagcgagttccgctcgaccaacgacagcacggtggtgccgaccgtctccaacggcatcggcagcaacttccgcgtccgttcgaacctggtgctgggctgggacctgggcaacttcggcgtcagctggaccgcgcgttactactccggcgtgaaggagcagtgcgtggacatccgtgcctatccggacgagtgctccgatccgggcgtgtacgccccgtggtacaagggtgcccgcaactacaacgagcgtggttcggtcaccttccacgacgtgcagttccgctactcgctgccgtgggatgccaccgtctcggtcggtgccaacaacgtgttcgagaagaccggcccgatcatgtacaccaagccgaactcggccttctcgtactacggtggctacgatatcggccgcttcgtctacatgaagtaccagcagcgcttctga

SEQ ID NO: 511027 - DNA, 1026 bp, Stenotrophomonas maltophilia
atgattattgtggctcgagctaaacaggtttcagcgaaacagttagctttaagtaaggatgcattcgaggcgatactggcttctcgatcgagtcgattcccagcaattcattcgaaagacccattgcttggtctgctgccgcccggccctgctgccgaaataaggggtatcgagcgaagtctgagaaatctctgtgcagaatggggctatttccctgagattccggaggagatgaggccggaattcgctctgatgtacctgacactttttcgggccgcacgggggctcgcaaaagggtcgaaaacaaagaatcccacttggcataaatcgactagcaacgagcttgtcgagctgtcttcagaagcggttcgtgccgagattgtcgcgatatggaagagcctttcatcggaagttgcccgttgcgccaccaactttggcacgggaaccttgagtgcatcgctatcccaagaaattccactgaaagatgcggcggtagacttaattctgacgtctccgccctactgtacccggatcgactacgtggtctcgaccaccccagagcttgccgttcttgggcttaatgaaagggcgtttgactcattgagaagatcactgatgggcacaacgacggtcgagaaaaaaatcggcgaaatcgatgaacgttggggggcatcgtgttgcacattcctcaactctgtcagaagtcatccttcaaaggcgtcttctacttactacctcaagtcgcatattcagtatttcaaagggctcttcaaatctatcgaggagtgttgccgtattctgagatgcggaggcgccgcagtcttcgtggttcaggattcggagtacaagggcatccgaaatgaccttgcatccattactgtagaaatgttcgagtcattcggactggagtgtaccggcagggatgattttgagaagaggataagcatgcgctctctcaattcggctagcaagatgtacgcgtccggcgcctcaccagttgagagtgttctgacgttcaaaaaataa

SEQ ID NO: 511028 - DNA, 1152 bp, Stenotrophomonas maltophilia
atggatctgattaacctcctcgactctgagtcgagcgctgccaaaactcaaagcctcgatctttctttcaatgaactgtacgacatgtataggtcgccggatcatgagctcaatataagtcctgagtaccagcggatctttcgctggactatcggtgcgcagtcaagatttatagagagtttgctgctcgagatgcctgtgcccccgatctatgtgattgaggatcaggtgggcaagtacgagctgattgatggtctccagagaatatcatcatacctccattttagaggggtgctggactcaccatattctctccctcgcgtccaactaggcgaatctcttaggctggcagactgcgacatcgtgcctgcgctgaacggactattgtattcagaccttccaacggccctgcagattaggctgaagcgcgcgtttgtgcgcgtggaggtcatcagaaagaacagtgatcctcgcctgaaatatcacatgttcaagcgcttgaatactggcggtatacttctcagtgatcagcagcttcggaattgcacaattcgcctcctggataacaggttcacagactttcttggtgaaatgtctaatgatgagaattttaagacctgcattcagaatctcactgatgaccgcctcagggcctcttatgatcaagagcttgtgctgagattcttcgcatttaagtacgacttggcttcgttcaagcatgatgtgtcggatttcctaacggactacatggagaaggtgtccgatgcgggtcatgatcaacacctccccttagattacgttgacgcagagaagtccttcaaagatacgttcaaggtgctcgcaactgcttatggcagcgatgccttttcattcgcaaatgcaaaaaatattaagcggccaccgggcgtcgggaaagagctggtttccggatttagcgtctaccactacgaggctctctgtatcggtgtccagccatacatgcccaagttgctgaggctcgtcgaccaagatcctgatgcgctcagagccgcggtgacggcaatcaaaatggacagagacttcatctctgcaactacaggtggcgggaaaaactcgcctggtcctttgcgcgctaggattgggatggtggaaaaagtgatgggggcgctatga

SEQ ID NO: 511029 - DNA, 690 bp, Stenotrophomonas maltophilia
atgacagaggatgagttctttagtgagctagaggctggttgggcgactaggcaagctgagctcctcgctcttcagaatctggctgcgcgaatggaggaatgcgatgcggaccgataccgtcgtgcaatggtactgatgctttatgcgcacttcgagggcggcgtaaaattcagtttactagtgtatgtcaaatttctgaacgagttggatattgctatcgttgatgcgaatgctgagattgccgcggcaggaattagtgacgtgatgcatgcgctgcgcgatccacaccggaagtgccctgagttttctagggaattgccggatgactccgatctccatagattcgctagggaccgagagcttatgtccgtgcttcccgatattcttaaccggaagctctcaatcgacgacagagtcgtgaacaccgagtcaaatttgaagcccgtaatcctgaggagaattctctttcggcttggactggatcatcatctttatgatcatcatgagtacgcgatcaatagattgattcgaatccgcaatggtattgcgcatggcgagagtatgtctggcgtatcaaaggagaggtacgacgaggttcgagacgtggttttcgatgtgatgcgagatatgcggctcaggctgcgtgattgccttcatcgtcaggtctatcgtcgcaaggtggcagcgtaa

SEQ ID NO: 511030 - DNA, 1119 bp, Stenotrophomonas maltophilia
atgtcagttaatctaatagcggaagtggagaagcagcgccacgacgtcgttgtcgacacctacactgcgacgtggaatgaacttcttgatcagtttaaaaagcacgacatttcaattgatcctttgtatcagcgggcattccgatggacgatggatcagcagacgcagtatttggagtcgttgctgctgagtataccgactcagcctatatttttggctgaaaccgaggatgcgaaattcgaggttatcgacggacttcagagatttagtagtgttctgaagttctttgcttcggaggtgttcgaagaggagggcgcagaggcatatggcgtgaacttggagaatccccgtgacaacaacgtctcaattccgtcgcagctgacagttgctccgatactggaggggctggaagggttgactctagattccatgccggaaacgcttgtgcgcactcttcggtatgcaagaattcaagtaattctcatccaaagaaaatcgagcgagcttgcgaagtatcatgtctttatgcggttgaaccgcgcgggcactactctttcaaaccaagagattagaaactgctccgccaggttgttcaggagtgctttcgcagatgtcttgatggatctcgcaaatgatgcggatgtgataagcgcgcttaggctctccgatgctgataggcgagcaatgggtgttcaagagagcattcttcgtctgattgcattcagcaacttcgagcccgaaactcaaagaattgatgagttcctggatcgcgccatgtacttggcagcttccgggaaatttaacttcacttccaagatgaaatcggcggtgctgaaaactttcgagttaatatcggaggcatatccaaatggggaggctttccgttttcagaaaggcggaattttcaagggggcgtttagcacaaacctctttgatatagttgcgtgtggtgtttaccaaaatcttagaagtgttgaggctgcgggcgcgaaggcactccgttcaaagatattcaaaatgcatagtgttgacgaggcgatcgcgcttactggtgccggatcaaacacaaaggccaagatgcttggtagggtcgagttcggccggcgttggttccgttaa

SEQ ID NO: 511031 - DNA, 684 bp, Stenotrophomonas maltophilia
atggcccgccacttgacgctccgtgcagcccgtcaagagttggcggccgcgaagcagcgacatatgtctctgctcaatgatttgaagaggcattgcgttgatgagaatactacgagagagggattcaaatacctcctggcaattcctatcatttacgcggcttgggagggctactttaaaatttccttcactttgtgcatcaagcgaaaatgtcaatcgactctgagagctcgcgcgtatcccggaatctacaggacgctctggctgcagaagcagcctttcgtaaagtcctacttggcttctttagtcaatgcaatgcagccaggcaagccggtttcaccaaagactggatctcagtacaaggcgttagcgacgttctctgagaacttcgctcactggctagaagagccagttgatcacgcgagtggtttcgaaggtctagtaatgacccactcaaatgttgaccatagtgtcctcactctcaattccgaggtgatcgggcttgatctgacaggagttcctgtgggtcgcttggatagcatggtgggacgaagaaatgaaatatcccacggcggattgctaacatatccaacggaagccgaggtcattgagcttgtcgctttctgtggcaatttgatcaccagtgtcgatgggaagattcgtgactggttggctagctcctga

SEQ ID NO: 511032 - DNA, 1245 bp, Stenotrophomonas maltophilia
atggggtggggcaaggtcaagcgacggctgctggaagccatgctgatgttcggccctgggttgtacagtcgctggtcgatgtcacggtccacaggaacacccgcggaggttccgtcgacggaacgcccgcgggtgctcctcgtggaccatgattttcccgagattgaccgtgatgcgggatcgcgcgcgatctcatgcttcgctgacctgttggtcgatgccggcatggaggtcgtcttctggtcggcaacgattgagccctccgcagctgggagagctgcccttgaagggagaggcatcaccccattgagtcgacgggaaacgggggcactggacggatggttggcgacgttcggaggaagtttcatcgggtcggtgtcaagccgcccactgatcgcggccatgtatctaccggtcctgcgcgcggcgattgccggtactcatctctattacgggcacgacatccactatctgcggttgcagttgatgcgtgctacgtccaaggccacccttgccgatcattggcagtgtctgttgatgagagtggtggaacagcgggcgtggagaaatgccgacgtagttctgtatccctctaaagatgaggctgaaacagtgaaccgttaccttgctgatcgcggcttggccgggaacggcgagatgttcccgctgtggaccgtggatgcaggatccatgcagcacacgcccggcccgggcaagagatcgggattgctgttcgttggcagcatggcgcatgcaccaaacgcagatggtctggactggtttctgcacaaggtgctgcccttgcttcagcgggggggacaggcgccggtcctcaccgtggtgggctccggtatggagaactaccgtgtgccccagcatgcctctgacacggtgcgtattctcggtcgcatcgatgatgctgcattggagcgctgttacgcgtctacgcgcctggtcatcgcgccgttgcgtttcggcggcggggtcaaggggaaggtgatcgaggcaatagggcagggtgttccaatcatcttgaccggtgcggccgcgcagggcctggctggagtcgaggatatactgccgactaccgatgacccgtcgaagtttgctgctgccatccaggcgctggatcaagacgaccaggcttggtcagccgcgtctaccaaggcgcgcctgttcctggcggaacactatgaccatcgtcaattcgtgcaaaggctcaggcacctgctgctgcattcctga

SEQ ID NO: 511033 - DNA, 1359 bp, Stenotrophomonas maltophilia
atggtggctgcgcttctgtccatgctgctcgtggcatccgcttatagccaactatcgaatctgcatgtgttcggtcacgatgaagttcactataaccactatttccagctgaagctgttgcaggatggccggtggctgaactacatcttcaaggatgtgcttgtcagtattgacgcgtcggcttggttcgccgcgtatatcgccgcacatcttttgctggtctatcgcattgcgcgccgcgcaggcctgtcggttgcactggcactgatcatttcggccgtcgtttcgatctctccgccagtcgtggaacaaagcatgtggccggccactgcgttctcggcagttgcagtcctgatcctggccgaggtggtcacgcggcgagtggcgatagcaccggttgcggtctatgcggcgctcgggatccttctgttcgggacgatgcagagctactacttcctggtcccgctcctgttcatcggcgaattcgcgtccgaacagcggagtgctcgagatcgatggaggttgtggttgcaacacacgctcagctgggtgggaggggcggtactcggcgctttggtcatgtcgatgatgctgctgctggcagggcatttcggtccgcaggtggatgactggcgatcgccacatccggccaaggatcttccctctttatggcagaacgtaagctacgtcattggatcattcgggaagtgtgtagcttccattggcaaggcctcgaacctggatggttggttgctgttggcaaccgtgctgctgctcgttccattcgccgttcgccggaagggttcaatccagatcctgttgacgctcgcaatggtcgctgcggcgttccacgcattctctattccgttggcaccagtaattaccacgcgcagcctgatcgcgctggtacttggactggcgctgtttttcggccttcttggaggcgggagtcgtatctcacgggcggtcgtattcctcctcctgctggcgggcggtattggattccaggcacaggcccgtacgttcctccagacccaggtggaaacgacctccttcctgtttgagaagatccacacgctattgccattgccggcagaccggtattcagtactggcggtttccggccgcatgccgggtggcaaagagccagctgccactttcaacaacgaatacttgatgaattcggtggtggtggctaccggggccaggagttttgttgattgccggacgcacgaggcagaagtgtgcgcgatggcggtggaaggtgacgccgtgaatgaaaccgggctgggtgaagggcgactgaggctcttccaggatgcaaagggtggcgcggtcatcgtctatagcgatgactga

SEQ ID NO: 511034 - DNA, 735 bp, Stenotrophomonas maltophilia
gtgccggcaaaagagcaggacgcctggttcgccgaggtcaacgttaccggtacagccaatgtactgaagtggatgcgtaaactgcgccagccacgcttgatctataccagcacggacatggtgtacgggctgccggaatcgctgcctgtacctccaacgcaccgacgcaacccgttgggtccgtatggacgcagcaaggcggcgtcggaacagctgtgcgaacaagcacgaaccgagggctacctgattaccgtcctgcgtccacgcatgattgtgggccccggacgctttggcatcctgatcaagctgttccggctgatggaccttggccttcccgtgccaaccatcggcagcggtcggaaccgctaccagatgatcgccgtggaggatgtcgtcagcgcaattcttgctgcggtcgagaagggattccccgccgtcgcactgagcttgggatcgggcgatgcaccaccagttcgccagttgctgcgcaatacgatcaagcgcatcggctcgcgctcgattgtagtgccggtacccgccaagccgttgaagatgaccctgtcgcttctggaaaagctgggcaaaccgctactgcatcgggagcagtatcagatcgccgacatcaactacgtggtcgacattgcacctacgcaggaagttctggattggcatcccacacgcaatgacgaggacatgctcgttgcagcgtacgcacattaccggaagcagatctga

SEQ ID NO: 511035 - DNA, 204 bp, Stenotrophomonas maltophilia
atggaattgccttgccgcaagatggtggacgacatcaccttcatccaatggcacgcgcgacagcgccgcagtatccagaatatccagctggtgatggacgaccctgccggagaattctgcaggcagaggcagcaggtcaacggtctgaacctgctggccctgtgcaaggagggtccggacgagatgcgatccggtgaaacctga

SEQ ID NO: 511036 - DNA, 378 bp, Stenotrophomonas maltophilia
atgtatctcaaattcatcccactcattctgttctccgtagccctcaatgcgagtgcgcagcttttccttcgcaaaggcatgccaaatgtttcgctggtgaccaaccagggcgtgcttgagctcgcacagggcgccatccgcgttgtcctcaatccgtgggtcttcagcggactgtcgtgctatgcgatcagcatcgtcctttggatgtacgtcctctccaaggtccaggtgagtttcgcttatcccttcctgagcgtgggatacgtgattgtcgttggtgctgcatatctgttcttccgtgaaccggtcagcgtaatgaagctggctggaatcgcgctgatctgtgctggcgtcgttctcgtcgcgcgtgggggctga

SEQ ID NO: 511037 - DNA, 1464 bp, Stenotrophomonas maltophilia
atgtcgcatcacaatgatgtaccggctggatccggtgagttgacgccgggagcagccctgtgcgtcgatctggacgggacgctgctgcgtagcgacctgctgtacgaatcactgctggccctgctggcgcgcaacccgctgtttgctttgctggtaccgttctggctgctgcgcggcaaggcctatgttaagcgccagctcgcttcccgggtggccttgcaggttgaaaccctgccatacgatgagcgtgtcgtggccatgctgcgcgcgacaccgcagcgtccgcgtgtcctgtgcaccgcctcggaccggctgttggtccagccgatcgccgatcatctcggcgtttttgacgaggtcatcgccagcgatggggcccgcaatctggccgggcacgccaaggctgaagcccttgtcgagcgctatggggaacgggggttcgactatctcggcaaccaccgcgttgacctgccggtctggaagcacgccgcaggtgctgtcgtcgtcaacgccaccggatcgctggcaaaccaggcccgcgcgcaaacccggttgatcgaccacctgcctggacagcccggagggctccgcacctggatcaaggccctgcggctgtaccagtggctgaagaaccttctggtactggttccactgcttaccgcgcaccgtctgttcgaaccagaagccgtagtaaacgcggcgctcgccttccttgccttcggcctgtgcgcatccggcgtttacctgctgaacgacctgctggatctggcgccagaccggcagcatccacggaagcggaagcgaccattcgcggccgggaccttgcccctgtttcatggcctggtcgccacccccttgttgacactggccggtttcgcactggcgctgtggacaagtcctgcgtttgcactggtcctgctgatctacttcatcacgaccctggcctattcgttcacgctcaagcgcatcgtgatgatcgatgtcgtggtgttggcggcgctttacaccgtgcggatcatcggcggcgcttttgcaatcgattcgccacggtcattctggctgctcgcgttctcgatgttcattttcctcagccttgcccttctcaagcgctataccgaactaaccgcggctgcaacgcagggaaagcagaaagcctccggtcgcggatactccgtggccgatctgccgctggtgcagtcattcgggacagctgcgggctacatcggcgttctggtcttcgccctctacatcaacagccctgacagcctcagactgtacgccacgccccaagtgctctggctgctctgtcctgtgctgctgtactggatcagccgtgcctggtttgtcgcccaccggggcgacatgcatgatgaccccatcgtgttcgcagcgcgcgaccgcgtcagccagggcgtcggcctcgccgggctgatcatcgtaatggcggcgacacgccactggtaa

SEQ ID NO: 511038 - DNA, 2682 bp, Stenotrophomonas maltophilia
atgcagatggcgatgaaatgcctgttttttgcggcatggatcggaatgctcgcgttgcttgcgcgacattgcacacatggacagcgatggaagctgctggtcactgcgctctgcggagcactgctggcgatctggcttttcattgatgcactcagtggcaacggcatcgattacgccgtgatctatcatctgcgcgcaggcatgcgcggcgcaggcgccgctgatttcagcttgcccatcggcctgctttcggcagcactggtggcatgcctggccctcgctttcatgccccgcctgcattcggcacggaggtgggcacccgccggtcccctgttcgcggcttctctgctggcgacgctggttttcaatccgatcgtctacgacgtcgcgacactggtacgccaggatcggcaggcacgtcttgcaccggcacaaggggaccagtacgtacgtcccgacgccccgctcgggaatcaccgcaacgtggtgattctctacgccgaaagcttcgagcgcacctatctcgatgagtcgcgattccctggccttgcgccagagttgaacaagctgcgcagcgaggccgtggatttccggcacgtggactcgcgcgaaggcggcacgtggacgatcgccggcatggtcagttccctgtgcggcgtccccctttccctcagccaggacgccaatggctatgcaagcatcggccgcttcctgcctggcgcgtactgcctgaccgatcacctgcgcgagcgcggatacgacgtcgagttcatcggtggcgccgcttctgatttcgctggaaagggacagttcctcgccagccacggcttcggcacggtacgcgatcgctcctatttcaagagcctgaagctgggcgacaaccgtttctcgccatggggcgtccacgatgatgtcctgttggatgcgctctgggaccgcttcgctgcgctctcgcagcagaccacgcctttcgccctcgtcggcctgactctggatacacatcatccaagcggacacatcccccatgcctgcctcgatgtcgcctatgaggggcttggccagcgcaggccgatgctcgacgcaatccattgctcggaccgactggttgctgatttcgtacgccgcatccgcgccagtccctacgctcgcaatacaatcattgttgttgcatcggaccatctggccctgcccaacgacattgccgacctgttgcgagatgctgatcgcagcaaccttcttctcatgttcggcagcgacctgcgcgcgaggcaggttgatcgacccgcgaccaccctcgataccggcgcctcactgcttgatgccctgcaagggggagtggcactcggctttggccgctcacagctttccgtgaagggcgcaggtacttcattgagtgtccgacccggtcgggaaccagatgccagcgaggaccacctgccaggtttcatggcctattccagcacgctatgggagctgggccggatcgacgatcacctgcagttggtggatggcgtcatccagttgggtaagcagacgctgactccgcccttggccatcgctgccgatgaccgcggccgaattgcccagcttggcacgaacggcatccgctctggccaccttctggccggcggtaattcccagcaggtcctctacattgatcgttgctttgcgttcgacgaacggcagcccgccgatgagtggtgcctgtgggggagcgctgacggaacggctcgcgtggtgtcacaacaatcgctcaaggccggcgcgttggtgccggaactgctgcaggctgcacgcgaagcgcccccggcatcccagctgcgcaacgatttcatcatccgcacccacttcgatgcgagccatacgatcgtcggtgaagcggtggatggaaagctgttctcgcagggtgcggaagggaccttggcctatggcgcctaccaggatctgtgcgcaggcaactacaccctcagcctgcagggcgtggcccaccccgccaacggtgcctgggccgacgtcgttgccagttacggggcacagacctacgaccgccatgcgctgctggacacggccgatggacgtgacgggacgatgctggaagccaggtatgtattccctgaagacctgcccctggctgaagtccgtgtcggcgtatcgccagacgctgcggtgcgactggatggctataccctgctgcctgcctacgaggcactgcctgtgggatcgtcggtggatttcagcgccgatgccagcaatcgtttcatttcctgtggctggcacggtccctctccccaagggcgcagcgttcgtggcgcggccgcctcgctacgactgcgcctgccatccgagcccgcccggctggaggcagtcctttcactgtcggcgcagtcacctcgcgagctcacggtgctggccaacgacgccccgctcggcttgcttcagatcgaagcagggacgcgtgaataccccatcgacctggcaggcctgtccagcgccgccggcgggcagctcaccttgacgctggtgcctggacaaacgacctgcgctacggaggactgcgagctgattaccctgcaccgtctgcacttggccccggctgcgacggctcaaccggctgctccagcctgtcccgggatgcgctgccttcacgcccccgcgctggtacctgaatctgtcgcaatgtaa

SEQ ID NO: 511039 - DNA, 1284 bp, Stenotrophomonas maltophilia
atgccttcattgacctcgccccctccataccgcctgctgctggcgattgccgttgctggtgtggccatgcgcctgctgttcgtgcaatggatccccttgcagcccgttgccgatttcggccgctatctggaggttgccagcagcgttgccagcggtggcggcttccggatttcaggcattccctatgtgtcccagcctccgttgtaccccggagtgctcggcgcctggttcacgctcaccggcgtgaacgtgggcgcgggcaagattctcaatgtcctgctctgggccggcacgctggtttcgtgggtcggtctgggggtgcgcctccagctgcgcccggcctggcaggttgcctctctggcagtgctggcattccatccggcgctggtcgcctacagcaatgtactgggtaccgaatcgctgtcactgttccttgccgtgttcggcatgcttgtggcggtcgtgcgttttccgggccgatggctgctgctgggagccgtgctggcacttaccgcgttgaaccggccacagatgctgccgttgccgggagccgtggcactggcgttgctcctgcgtgatgggatgcgcatcgccacctggcggcggatcagcatggtggtgctgggttttctgctggtactggggccgtggaccctgcgcaacgcagttcttttcggccagtttgtgcccgtcagtgcaaacagcgggtatgtgctgatggtcaacaacaacgatgccaatgcgcatggcgggtggatgcccttgaaggatgtccccctccaggctgacgacaaggcccggttcgccgatgctggatttccccaagggttcttcagcggagaaagcgaggactggaagctccgccactggacgcctgcggccgacgtgattggctcagcaattggccgccgttggatttccgaacaccccggccgcttcctggagttggcgctgctgcgcgtgcgcggatcgttcgatgtcggcagcctcctgcattggccgttcctggagagaggcggtgctccggtgtggctgggtaggttgacgctggcactcaacattgcgttgacggcctggacgatggttgcgctgctgcgcatctgcctccacctgcgccgctggcagcccgttcattggcttgccgtggccacacttggcctgggaatggtgtcgatcctgctgttcgaggggcagggacgctacctcctgccactggtcccaggggcgctgttcatcattgccgccgcgggcaggctacgcttgcccagccggatcaacgcttga

SEQ ID NO: 511040 - DNA, 135 bp, Stenotrophomonas maltophilia
atgccgaccccgcagacttttcgtcgcatcttccacctccacgagcatctgatggtgcgtacccgctggtatcccatcacggtggccttcgcgctgatatgggcgacggctatgatcaccaagtccgctctgtaa

SEQ ID NO: 511041 - DNA, 702 bp, Stenotrophomonas maltophilia
atgtttgagacccgaacttatgatgatccgctcgttctccctcccgcgataagggcgcgttgggagttcttggagacaagctcagccgccgctgtgctgaggtctgtttgcccggatgagtgggctgatatcgtttccgtgctcgacacctttcggctcgatccgccgcattggcttaaagctggcgggaaccgaggcgacattgctaagactatcgacgaaatgttcgctcaacggggatggagcgaaaccagggtcgatctgcacacccagggtattctttactccaagaacaaccgggaggtaggaaggctacctgtcgtgacgcaggagggttacctagtggacaacttcaaggggcgtgttgcccttgatgttgaatggaacgcgaaagacggcaatcttgatcgcgatctttctgcgtaccgagcctggcacgaggctggggtaatctcggcagccgtcctcataactcaggatcggttgtctctgaaagcattggcgaccgaggtgtgggaggcgtatcagggggcgttgccagaggagcagcggcgtagcaagctccccattgatctgggaacgtcaacgacaaccaacctggagaaggcagcactccgcgttcggcgtggtgtgatgggaacctgccctctcctggtggttgccgccactcgctctacttggaacggccagccttacgtatag

SEQ ID NO: 511042 - DNA, 879 bp, Stenotrophomonas maltophilia
atgtctagtagccccctacgtcccgaagaagcccccgcgccgctgcccgaagtggttggcggattcgccactgtcctagccgatccgccgtggcggttctccaaccgaacgggcaaggttgctccggagcaccgccggcttgaccgctattccaccatgtcactcgacgcaattaaggcgttgcctgtgaaagacgtggcggcgaaggacgcgcatctatacttgtgggtgccaaacgctctactggttgatggcttagccgtgatggaatcgtggggtttccgatacgtgagtaacatcgtatgggctaagcggcgcatggacggtgggcctgacggcagaggcgtaggcttctatttccgcaacgttacagaactgctgctatttggcgttcgtggctctatgcggacgctgccgccggggcgatcccaggtcaacatgatcgagactcggaagcgggagcattcccgtaagcccgacgagcaatacgaccttattgagtcctgctcgcccggccccaggctggaaatgttcgctcgccataggcgccccggttggacgctgtggggcaatgaagcggacgacagcgtcacgcctcgcggcgtagtccacaaaggatatgcgggcggccctatcctcccccagctcaaaccaaacgagcacattgaacatgatcgcgcggaggcgatgggccgaaaactccgggatcggtacctcaaaggcgaaagcgtccgtgagctcgtcgaagctaccggctactcgattcagcgcgtccgtgcgctgctcgctgctgcaggtactcccatgcgtcctcgcggtaggcacctggggcaagctcagcttgaaatgcctatacgtaaggctggccgttccaagtag

SEQ ID NO: 511043 - DNA, 891 bp, Stenotrophomonas maltophilia
atgatccacggcctcagcgcctttcctcttacgccgatgaacgaatcgagcatcgacctgcacgccttcgccgggctggtcgagcgtctcgcggccgctggcgtggggtcgatgggcgtgctcggctccaccggcagctacgcctacctggaaaaggccgagcgcatgcgcgtgctgcgcgaagcgttggcccattcgggcgatgtcccggtcatcgtcggcatcggtgcgctgcgcacccgcgatgtgctggcgttggcccgggacgcggaagatgcgggtgcagccggcctactgctggcacccgtgtcctaccagccattgaaggagcacgaggtctacacgctcttcgaatcggtgtgcacggcggtgggcacaccgatctgtgtctacgacaatcccggcaccacccacttccggttcagcgatgaactgcatgggcggatcgccgccctgcccaacatcgcctcgatcaagatcccacgcctttccgacgatcctgccgaagcagcggcgcgcgtcaccgcactgcgcgcccatcttccagcgcatgtcacgctgggcatcagcggcgacgcagccgccgtgcgcgggctggccgctggctgcgatggctggtactcggtaaccggcgggctgttccccggggtggtgcagcagatcacccgcgcggccggcaccggcgacatggcgacggcgcaggccgtgtcggcgaggctggcgccgctctgggcgctgtacgaccgcttcggtggcatccgcgtcatggcatgcgcggcggcactgatgggcctgtgtgcggaggactgcctgccacggccgctgcttgggctgcgaggcgaagagcgtgcgcacgtggcgcaggtactgcgcggcctggagctgctgtag

SEQ ID NO: 511044 - DNA, 2037 bp, Stenotrophomonas maltophilia
atgagtactgcttcggacgccaccaagaccggcaagctgcggctgggcggcagcaacctctggctgttcctgctgctggcatcgatgatcctgttcggcgtcaacaccggcgtcgccacctggcagggcagccgccttgccgacgccggctccaaggccgccgacctgcaggtgctgtcgcagcagctggccaaccagggacgtgacgcggtcggcggcaacgcccaggccttcaccgccttcaaggccacccgcaacgcgatcgaacagaacgtgtcgacgctgcagggccgctatggcaaggagccgggcgtgtccggcgccatcgccaccctgggcgaaacctgggcgccgctgggcaagcaggccgggcagctggtggccagcgagccggcggtgctggcgctggccggcaatgccaacaacttcaccggcgcggtaccgggcctgcaggcccagctgaacgagctggtgcgcgcgatgtccgcctccggcgccccctcgtcgcaggtgtacagcgcactgcagcaggtcgtggtggccggttcgatggcccgtcgggtgaccgaaatgcgtgccggtggcagcgccgcagcgacctccggggatgcgctggcgcgtgacatcaccgtgttctcgcaggtgctcgacggcctgcgcaacggcaacgaggaactgggcatcaccgccgtgcgcggtgctgccgccgtggccgcactggagcagtcgcagcggaagtgggaagcgatgaagcaggacgccgacgcgatcctggccagctcgcgccagctgttcgcggcgcagtcggccgccaccgcgctggggcagggctcggcacacatgctggacgacagccgcaagctgttcgatgcgttctcctcgttcggctcggtgtccgacacccgcctgttccccaacttctggatcggcgtggtgtccggcgcgctgtcgctgatcgcgatcatcggcttcgtctccaccaacgtgcgcagccgctcgcgcgagcaggaactgcgttaccagacccaggtggaattcaacagccgcaaccagcaggcgatcatgcggctgctggacgaaatctcctcgctcggtgagggtgacctgacggtgaaggcctcggtgaccgaggacatgaccggcgcgatcgccgacgcgatcaactatgcggtggacgagctgcgccacctggtgaccaccatcaacgacacctcggccaaggtcgcgatgtccacccaggaaacccaggccaccgcgatgcagctggcagaggcggcgggccaccaggccaaccagatcacctccgcctcggaccgcatcggtgaaatcgcagcgagcatcgagcaggtgtcgcgcaactcggccgagtcggccgacgtggcacagcgctcggtggtgatcgccgccgaaggcgccggcgtggtgcgcgagaccatccagggcatggaccagatccgcgaccagatccaggaaacctccaagcgcatcaagcgcctgggcgagtcgtcgcaggaaatcggctcgatcgtggaactgatcaatgacatttccgagcagaccaacatcctggcgctgaacgcggcggtgcaggcggcgtcggcgggtgaagcgggccgcggtttcgcggtcgtggccgacgaagtgcagcgcctggcagaacgtacctcgggtgcgacccgacgcatcgaaaacctggtccaggccattcaggccgataccaacgaagcggtcacctcgatggagcagaccacggccgaagtggtgtccggtgcgcgcctggccgaggacgccggtaccgcgctgaccgagatcgagcgcgtgtccaacgccctcaataccctcatcaagaacatctccatcgccgcccagcagcagtcggccgcggcctcggacatcacccgcaccatgggcgtgatccggcagatcaccggccagacctcgcagggtgccgggcagaccgcagagtcgatcggccacctcgcgcagctggcggcggacctgcgccgttcggtcgccgacttcaagctgccggcgtga

SEQ ID NO: 511045 - DNA, 177 bp, Stenotrophomonas maltophilia
atgccgccctgctgcatcgcctggctggtcatgccgtcgctggaggcgccttcgagcaggaacttgttgaccagggcggtggaccagaacgcggtcgagacacggatcaccatgtccagcgcgatcgataccatcgctgccagtaccgccatcgagaacatcgtgccgatgccgtag

SEQ ID NO: 511046 - DNA, 1041 bp, Stenotrophomonas maltophilia
atggaggtctacgcgttcggctttcgtgggctcaaagtgcctttcgtcaagcagttcgcggatccccgaaagtggcgtgatctgccttccaacgccgtgttgttcgttgatgaggcacagcaggtttggcgcacacgtgctggcggtcgacctgttccgcctgaagtgttggatctggaaacgcaccggcatcagggcatcgatatttacttgatcacgcagagtcccatgtacctggactcgcacttgcggccactgatttcttcgcatgaacacttgatcagctacgacaagagttctgcgcgtctgtttcgattcaccgagtgctatgaagatgtcaagtcgtccgcgcttcgcagcaaggcccagttcgaggtctggaagtatcccgttgtccactacgcggactatgactctgctgaggtgcacactgctaaagctaaagtgccgtggcgccagcgcatcgccaagctgtttttcgttcttgcggcacttctgatcgttggcagcgtcgcgtggttcatttgggggcctgacacgccgaagcggcaagccgcgcctgcagccgcacaggccaagcctgctagttcgtggctctcaggtggcttggccgggatgggcggtcagcagttgggttcccagcgacgttatgccaatgcacaggagtatctggaagcgcacacgccacggctggcgcagatgccttggtcaatgccggcattggatggtcgggaggccaaggccgagccacggctttactgcatgtcatctggcgaaggcatcgaccaaacctgcacgtgtctcaccgagcaaggcacgaagtggcagattcgggtcgatcagtgtgtgcagatggcccgctggggtccggcgtataacccgtacaaggaagccccccaggttgcgtctgtgcggcctcaggagctgcaggaggcccggcctgagccccgccgtgcaagtggcctgcaggaggtgtcaggcgtcgccattggagctgagggaacctttgagcgcaccaaggcgtacccgtcgagctggtag

SEQ ID NO: 511047 - DNA, 477 bp, Stenotrophomonas maltophilia
gtgaaccgccaagaagttctcatcagccgcgccctgaacaaggcgcgcctaagcagctacggggcactggcaaaaaaaatgggcgtgtctgcggccaccatgtcgcagtggcgcagcgggaccagcaagctgtctgatgagcggatcacggagctatctgagctcgctggggatgacccaggtgtgtggctgctggcgatgatggccgaggagtgcaatatcggacctctgcgcaaatcgctggaacgaattgtgacgaaggtcggcaaaggcgtggcaatggcgctcgccctgggtgttgcaacactgcccctaccggagagcgcaaaagcctcgcagattcagcagcttagcgaggcaaagggacacggtatgtatattatgttctcaggttgctggcatggctggcacgactcttgcccagcccccagctcctacgttggcatggagcctgatcaacgcgtgatcggaaactga

SEQ ID NO: 511048 - DNA, 381 bp, Stenotrophomonas maltophilia
atgattgagttcgacccgcaccaccgtatcgacttgaccggcccttgggccggtttttctttcctgggtgaccgtctgattacgcccgaaggccgcgagctgctgcccgaggatctggcctggctgtcgctcactgcctgccaggcgcaggaatggcgccggatgatggaagctgcgcgctcggcaccgtcgatcgacagttccagcattgtgcacaatcggaacgccggcattcaccatcatcctgccactgtcgtcaatctgcgagacgttgtgagccggcgcaaagagcgttcggcggtggcgatggctggccccgacgccgagccaccaggagcaatcctgccggtatcggggccgaaacgtcgcgagcgcgtgtaa

SEQ ID NO: 511049 - DNA, 687 bp, Stenotrophomonas maltophilia
atgaccagcggtggacgtgaactgctcaagtggctggccctggtgctgatgaccggcgatcacgttgtgactgtgtttggcttgggtcacgtgccagtcgtttcccagctcggtcgggttgcattccctgtgttcgccctggtcatggcttacaacctggcgcaacctggcgccgatgcggggaagtctgctcggcgcctggcgctttggggcttggttgccactcccgcggctgtgctggcattcggccaggcgttgccgctcaacgtcctgctgacgttcgccgccgcagccggctgcatatgggcgctggaacgccgtcagtgggcgctgggcgcactgctttgcattctcgcccctgtcgcccttgactacgcctggcccggcgtatggctcgttctggcggcctgggcgtggttcaagaatcatggaaaccgcccgcacttcctgctgggctcttgggactggcgtcgccaacgcctctacctggtgctgccgatctgggtatgggcttgcatgggtctgctctgcctctacaacggcaacggctgggcgttgttggccctgcctgtcatcgtcctgggcgaactaccggcacggattccacgatcaggccgggccttctacgcgtattacgtgggccacctcgcaatcttggtcgtgcttgcggctatagtcggtgcatga

SEQ ID NO: 511050 - DNA, 1185 bp, Stenotrophomonas maltophilia
atgatttactggtataccggccagcctgggcacggcaaaacgctccacgccatcgaacgcttgcttgagttcaaggatcaggggcgcatcgtctacgcgtgcaatattcgcgagttcgactacgctaaaactggcgttctagagatgacgccggagcagttccgcgactggcccaacttccttcctgatggcgctgtcgccctggtcgatgaggcgtatgagcacggcatgctccccaagcggccagccggtgcgaaggtgccgcatcacgtggagcagcttgccaagcatcggcataagggcttggacttcatcttcgtaagccaatcccccgacaagcagtgcgatcagttcgtacacgacctgattgagcgccacgtacatgttcgtcgccgcttcggaacgaagtttgtgcacctgcgcgagttcgacaagttcgaggcacgggctgagaaggccacgcccctgacgatcaagcgcaagacgctaccgaagcgcccgatgggcatgtacaagtccaccgaacttgataccactgagcgcaagattccttggtactacatcgcgctgccgattctcatcgtcgctgccgtggtgatgctatacgtggcgttcgggcgaatggacaagcgcatgagcggcggcgagcttcccgcgccaggtggtgccagtggcgtcagcgctccgcgcgacggagcgtcagcgacggcgggcggagcggtggcgaccaatcctgcgcaccctctcaaggattacgtcgacaagttcttaccgcgtgtcccatcccagccatggagcgcgccggtatacgacgacgcactcagtgttcccagcgagccgccgcgtgtgttctgcatgtcgtcgttgggtggcgagaatggcctcggtggtcatgacgagcctagctgcaattgcgtgacggagcagggcagtcgttacgacctggacgagccaacgtgtcggtacgttgcacggcgtgggcagtacgagccgtatctgcctcggcgtgagaacaggcttgtggacggtcagacacagatcaaccgcgccctggatcagatcgagcagcgggggcagggcgtagctattgagcggcagcctcgcgcaatggggagctttcccgaatcgcctcccatcccgaccagcacctatatgacaacgccagctggggagaatcggctatga

SEQ ID NO: 511051 - DNA, 1401 bp, Stenotrophomonas maltophilia
atgggcctccgtctacttagcacctttaccctgatcctgttgatgctggttgtggggacttcgtttgaggccactgcgcaggttccggtttacccctgttcaacgtcgaaggacgtgtacagtagtcaatgccctgatgagggtaaggcgtatgccgcagcttgggcagtggcgagggctgtagctcagtcctcaaacgcgagttcgccgggtgtttggtgtcctggcgtgaagcgtgcgggtggggcaactgcatataccgcctatgtcacaccttgtgccaatcaaggccctcagtgggagactcgcactcgcacgtggccgcaaggccaggagtgttcgagtcagacaggcggagtgacgccgttcttccctccatcgggctcaaccaggtgccgcgaggggtgcgagttccagtaccgcgataacggcgacgatacgacgacctatagtgctaccggcaaggtttgcgatggcaagccggattgcacggcgggcggtcgcaacatggtttggaacgccatgctgggcgtgtgccagccggtggagcccgagtgcccggagggtaaggtcaaggtgggtaacgcttgtgccgatgagaagccctgcccggatggcatggcgttggtcgcaggctcgtgtaagaagaaggacgaagagtgtccttctggcatggtgcgcagtcctttgggcagctgcatacctggcgacggacagtgcgccaagggagaggtgcgcggccccgatggaacgtgtaagcgcgatagtgataacgacggcgaccctgacccgaccgggccggatgatccggagacgttcagcggtggggatgcttgtaatgcccctccttcgtgcagcggctccccgatcatgtgcggccaggcccggatccagtggcgcatcgaatgcaatacacgcaggaacaacaacatcagcggtggacactgctcgcagtcgggcatgccgacttgcaccggtgagaagtgcaacgccatggagtacgcggggttgttgatgcagtggcgctctgcgtgtgcgctagaaaagatggcgggagagaaggcggagtcgcccggcacgagcaagaccgacgggaatgggaacggtgtccctgatgccctggagggcaggggagaggtcaccgggattggggacaacgcagctgatatcgccagtgccaaaaagtggggcatcggtctttcgaccgacagtcttgacactagcaacatgttcggcggtgctggaacgtgccctgagcctccggcgatcacgatcatgggcaaaaccgttagttcggcagagttcccttacttctgccgtattgccgcaatccttcgcgcattgatcctgatctttggtgcctactccgcgattcgaattctcatgggaggtcttttctga

SEQ ID NO: 511052 - DNA, 243 bp, Stenotrophomonas maltophilia
atgaagtacatgaacatcgcccgccgtttcggtgcctccgcggtcgccaagctcagtgccggtaccaccgctctggtcgtttcaggtgccgcgctggcttccggcagcacctcgcctggtgcggccatcgctgcggaggtctccaagggcaacgcagacatggcgatcgtgatcggcgccatcgccctgctgctgggcatcctggtggtgtgggctttcaccaaacgcgccgccaagggttga

SEQ ID NO: 511053 - DNA, 222 bp, Stenotrophomonas maltophilia
atgtccggcccggcacccctctacgtggtcggttgcgctactgagaacgtgcagcaggacggcacgtgttcggtgccggtctggatgccataccaccagccaattctgcctcccctggatttggccgatgggaccctcgttgcaggagcgattgttttgtcctgggcgattgggttgaaggcgcgcctcgtattccgcgctgcgcgcataggggtctactga

SEQ ID NO: 511054 - DNA, 297 bp, Stenotrophomonas maltophilia
atgaacgctcccaagatcacgatcaacagcgctgtcgagacccgctatgtcaccacgaaggccggcgtgcaaaagcctgtgtactcacagcgtgccacgttggaaaccgaagccatgcgcatccaggtggaagtcgaggttgatggccccgagaagggctacgcggttggctccgtcaaggaatgggacgttgtcactgacctggtgcccggtcgttatggcatcgaactcgctcgccgcatgaccttggttgacccggcaggcgcgaagccgcagccggctaacaaggcggcctga

SEQ ID NO: 511055 - DNA, 750 bp, Stenotrophomonas maltophilia
atgtccgatgaacagtcacttccccaacagtccgtgctacctgtgcgggggcagcctacagaccctccgagcatcggatgcgacgctgaactgctgcgccagctgcggcacgttgattaccaagcgcagggatacgccgagctactccagcgcgttccctggcaacagttttggacgctcacgttcaagctcagtaagaccagtcgaacaggcggcatgcacgaggaagcggctgataaagcgttccgctacttcgtcagctgcctcaaccgcagcatctacggtcccaagtgggcatcacgctggcacggcggcattcagtgggcgcgagggcaggagttccatcgcgatggccgcttgcacttccacgccgttgcagctgcacctaccgatgacctcaaccgcctcgccagtcgttacgagtggcacgaatggtggtaccgggagttcggccgcaatcgcatcgaagcgccgcgcagccaggcagacattaccggctacgtaagcaagtacgtcacgaaagggggtgtggtcgatttctcgcggaacttcggggcatggaacccgccgcccatcgactacacccgccgcccagagcaagacgccttgatcgcaggcgacagcaacacgcgatccgaccggccagggcgacacctggtcaccgggcggactgatgcaagcatcgcgcaacggggcaacaagcggtccaccacgtctccctgcgggggggtagggggggacttagcttga

SEQ ID NO: 511056 - DNA, 240 bp, Stenotrophomonas maltophilia
atggacgcacttgttctcgccgtgctgctggggtgtatcgcagccgtgtcgttggggttagccaaattcgtgacgtggtgtgttgatcggcgtgcgttctccgctggtcgtactgcacgcgaaagccagtttgttgcccaggcggtcgtcgaccttcgccgcatggaaatcgaagccaccaaacgcggcaacctgctagccgctgctgaactcgctgaagagcaggagcgcgccgcatga

SEQ ID NO: 511057 - DNA, 417 bp, Stenotrophomonas maltophilia
atgacacccatcatttcccgacgcgcgcacgcagccgacatgaccatgctcgtgctcttcatcgcgctgtttccggtcatgtcagcactgcatgcccggatttccaacgagctctatcacgttctggccggcgtgctcctcggcgggatcgccgcgctcagccaagccttgctccacgatggcttcgtgcgctggcgtcacgccggtgtggcgggccttgaacggtcccgttcactgcgggtgctgctggtggggatggtgtatcccgtgctcgcgctggtcagtggcgtgattgcactgtttggcactgcacccaacgtcggcctgcactatgcgatcgcttttgcggcgggcggagcgctgatgggctggcgcgcgagggcggcgctggcgcacaaacgagcgctggatctgtga

SEQ ID NO: 511058 - DNA, 522 bp, Stenotrophomonas maltophilia
atgatgagcaacgcccagttgaaccgaatccccagcatcgaattgcagctcttcaaatggatttcactggttgaggctgatgagatccccgactgtgttgagctcaagcgcgcaggcaaccggatctggatcaagcacgcgcgacaggtgctagccggactgggtgatgacgtccccgtgctgaccctgagcagtatccagctcaacccgcgcctcaaaggccggggttggctgaccgaattcgtagagctgtgcgataccttgattccgtggccagccctgttcgtggagcgcgtgcagaatcccaggctgcccaccttcctcagacgcaaagggtttatcgagctgcagcacgccaacttttatcgtccgtccaaggcctggcgagcgcgccacggttggtcgcctgaccaagcgctggccgcacagcaacaggctgaccgagcacacgtacgacccctatgggaaaaccccgacgccaccgcctacttcatagcacgacagaaggagaaaacccgatga

SEQ ID NO: 511059 - DNA, 171 bp, Stenotrophomonas maltophilia
atggctactaacccaccgaaaggcgacggtcaccgcaatggcgcggtgcgcaaccggtcgcaaacccagaccccagctggcaatttcgtcaagcgcgacacgggcaccgggcgcttcatagacgtcaaagcggacaagacgcctttcaagggcgtgcgcaaggaaaagtaa

SEQ ID NO: 511060 - DNA, 321 bp, Stenotrophomonas maltophilia
atgtccactatttttggcaataaaatcaagaacctaaggcgagagaagggatttacgcttgactcgctcgctgacgccgctggcatgagtaagagctatttgtgggaattggagaaccgagagtcccctcgcccctcggtcgaaaagctcgctgcgttagcaaaggcgctctccatggatgtgtcctatttcctggatgaggaggcaacaagtcctgaggagcgccatctggaccaagcgttctttaggaactacggcgaacttgacgcaaccgccaaggagcaaatgcgcaggatcatggaaacattcaagaagtcctaa

SEQ ID NO: 511061 - DNA, 867 bp, Stenotrophomonas maltophilia
atgaatgctgatgtgctcaccccctctaaagctgcctaccgtctgacgcacttgctcaacatcctgtcggaggcccacggagacccccgctttccagttgacgtcgtggctttggccaagggggcggcggagatctttcactgggacgaccccatcactgacgtcgaaccggccgacatcaggtcctttgaaggtgcacttttcgccaacgacacgtgcagcagatggatgctgctttacaaccagacattgaaatccgctggtcgcattcgctttacgcaagctcacgagcttggccactacttgctgcatcgaaaagatcgcctcgactttcggtgcgcaacgcaagacatggtgagtctgacggagcaggaggcgtctatggaagcccaggccaacgcctttgcggcaacgcttttgatgcccctggatgacttccgccaaagcacacaggacggtgccgactttgaggccctcgccgactgcgccgatcgatatggcgtatcgctaactgctgctgcattgcgctggatcgaccacaccgatcagtgcgctgtgctcatttctcacaccgatggtttcatcaactggtcggtctcgagccgatcggcacgggctggtggcgcattcttccgtgcacggcagagcgtaatcgccatcggcgaggataccttggcggccaacggtcaggtagtgcacgaccgattgggcgtggagctacccgcacgcgcctggttcaagcatgcagaagaagggctcagtcttaaggaaatgaagatcagtgctgatcagtttgactacaccctgacgcttctggtgctgccaagggggtcaaaggtgtgggctcctcggatagatttgcgttag

SEQ ID NO: 511062 - DNA, 276 bp, Stenotrophomonas maltophilia
gtggatctgtttacgaagaatggtaagcctctgcaggtgcgcggggagtttgtctacagccgctcgggcgcagtggtcggccgcatcaagggcgagcgtgtttttggcacggatgggaagtatgtgggctccattgttaaggatcgcctgatttaccggtctactcatagcgcagcaatcagctcgccgttctcccgggcaagccgtgccggcatcgctagggcgaaccgggcaggctcggcctcttggggcgatgagccgaccattcccgattag

SEQ ID NO: 511063 - DNA, 702 bp, Stenotrophomonas maltophilia
atgcatccgggcagccttccgcgcagatgttcgcccggtctcaagtcatgcgacgggtgttcgtatccttcccgccatggcctcttcgtccaaatttcctgcgtgcatgaccgcctcccggccatccggctgggtgcagagcggcgagcgctgggatctgtggtggaacggccgttcggtggccagtatcgtgccgcatgccgcgctagggttccgcctgtacctggacgcacgcaagatgtcacaggtcaaggtcgtgtccgccaccagcacccgtcaggccaagcgctacgccgagcgatggtgtgctgtacggctctgcccgcagttgcctctgcgcgatgcggtggcgcgattggtggatgccggtactccaccgcctccggcgctcacgcgggaacagcggcagcaggcccggcgcctggccgaagccggggcaggggagatggggcggatcaaggaagcgctggcaccaaggccgcgcatgacggccgccaggcccgaggtgcaggggcgaggtggagcctggtctgtacccggccaggttccatcctccccgcgccgaaacgggaacacatccccagccagggctacgctgaaagctcctcacgtacgatcctcgcccccgcgctgagcgcacgcagcttgccccgtgccacttcacgggccagcggcgccatgccgcagttggtgctcgggtaa

SEQ ID NO: 511064 - DNA, 312 bp, Stenotrophomonas maltophilia
atgggtgctgaccgctgcgcatgcagcaccgaaccatcaccggcggcaacgaacgctatctctggtaccggttcgatccgcccgcgcggggggctgccactggagggcgtgttgggaaacggcgacagcggtggtccgctgctgatcgaggatcacggaacgccagaggtggtgggtcttggatcgtggatcaccgccgttcccgagcatgcgctagaggcgggcttctatggccaggtggtttacaacgtccgcgtgtcccgctacctcgactggatcgaaggcgtcatcgaacgtgacgcgtcacgttga

SEQ ID NO: 511065 - DNA, 1227 bp, Stenotrophomonas maltophilia
atgggctatcttgagcgcccgttcccacgccgcctggatcgcccacgcatggaagcccgttcgatgactgtccgaagcaaggtgtggctgagcgcctttgtcctgtccactgcgttgctggccgcaggctgcacgcacaaggacgtaccggcgaaggatcttgggacggatatcgagcaggtggcgcagacactgatcgagcagccactgctgcactccacttcgatcgccgtcgtgcaccgtggcaggacgttcatccgtcatcacggcgagatggttgccggcaagcctggcgcaccgaccgatgcgacgctctacgagatcggctcgttgagcaagaccttggctggcactctgatcgcccatgcggtcctggagggcaggctggggttggatgacgatgttcgcaagtatctgcagggtgactatcccaacctgcagttcaaggatgagcccatccgcatccgccatctgctgtcgcataccagtggcctgccgaacatgctgccggagcgcgcgaatacggtgctggaggacttcaccgatcaacgcacgcccggtgagctgaatgccatctatgccagctacggaaagtcggacttcctgcgggacctgcatgcggtgcagatcctccgggcgccgggaggcgagtacgcctactccagcgccggaacgcagctggtcgcgcacattctggaacaggtccatcagcgcgattacgaggtgctgctgcgtggcttcttcagtgattcggccggaatgacgggcatcaggatcggcctggacgacaccgaggcatcacgcctggcgatcggttaccacagcgacaacccggtgccgaccacccccatgccgacgttgccgtggggcgcctccgggaacgtgaaggccaccgttccggacatggtgaaataccttgaattccagctggccaacggtccggtggtaaccgaatcgcatcgtgcactggccaggttcgacgacaccttcagcatcggctacttctggaacatcgtttccggcgatcgcctgaagggcgtgtattacgcccaccatgggggagtgccgcgttcgcagtgctacgtctacatcatccccaagcacgatcttggcatcttcgtcatcaccaaccagagcggtgaccagacggcgcacgccatggaaacggcgatcgatacgctcgtcgaaagaattgctgcacgggatggcaatggagggctccgatga

SEQ ID NO: 511066 - DNA, 351 bp, Stenotrophomonas maltophilia
ttgagactttcccgtgagttcgtggatttctacctggagaacaatggtggatatccggatgttgagccggacgaggcgaatccacttcagctgaacagctttctttcgattcgctacggtgatgggacgattgacgctgcctaccaaacattggtgagaggcaacccggcgttggatgggttggttcccttcgcttacgacgattgcgggaatattttcttgctttccggaaagcttggcatgcccgaagaggtctttctctggttgccgggggaggaggagctggagaccattttcagttcattcggtgagtttcttcgagccctcggtgaagacaagaatgcccactaa

SEQ ID NO: 511067 - DNA, 948 bp, Stenotrophomonas maltophilia
atgaacacacggaagacaatgcgggctcccaagtggctggctgccatcgccatggctgtggtgacgtttgtagggactgcgacagcacaaacggtcacttatatccacaccgacgccttgggctcgccggtggccgagaccgatgcatccggcaacgtcatcaagcgatacgcctatgagccctatggagccgtcgttgggggggaagtgactgatggacccggctataccgggcatgtgagcgatgcagcaacgggcttgagctacatgcagcagcgctacatggacccacagttaggagcgttcctatctgttgatcccgtgaccgcccaaggcaagggcgatatgcgcctgttcaatcgctatgcgtatgcattcaacaacccctacactttcgatgaccctgatggaagatgcccatcctgtgatcgatttggtgatgcatttgccaaggagccgcaggcctttgatcatccgggctttacggttccagccgcaattgtggcggcggccatggcggcgccagtggtatgggaaatggggatggccgcaatggccaatcctgcgaccacgaccgctatagtgggtgaggtgggggcggcggcaggagtgactggcgttggtgccaatcaagcagtgggaaaagctgcagaaagacttgccgcaaaagagcttgttgcggaaggaaataaaattctgggtagccaagtaggagcaaggacgtcctcagggttgcgagttatcgatcatttggttgaaacgccttccgggaaagtgatgggcgtcgaggtcaaggcagggaatggcgttcgcaattcggctcagctaacaaaggacgcaaagatggctacggaaggcgcagtactgaccggcaagaatgcgccagaagcactgcggggtcagcgaatgatcattgaaacggttgaacggaggtatcccaataaatga

SEQ ID NO: 511068 - DNA, 1878 bp, Stenotrophomonas maltophilia
atgtctgcagccgcccctgccgcactcgcccttgaaggcttcacccggcgttggcgccggctggcctggtggtcgctgttcgtcgccggcaatgcggtcctggctgcggcgatcgcactgggcaacgtgccgctgcgggacaatccaggcggcagcgcgggcctggcctacctcgcgatcgccctgcccggccacctgctcgcgttcggcgcgctggccggcctgctgccgttgctgctggggctgtggccacgcactgcccgtacgctgagcatcagcgccgttctcctgcagggcctgtggctgtgcctgctgctggtcgacgccaaggtgttcaccctgtatcgcttccacctcaacgccatggtcgtgaacatggtgttcggcggcgccctgcaggaccaggtcgccctgtcctggaagacctggctgcaggtcgcgctgctggtcgccgcggtcttcgccgccgaaggcctgctggcctgggcgtgctggaagctgctgccggccgtgccgcgccggcgacgggtgctgcaggcgtgggcagcggtcgcgcttctgatggccggcggccaggtggccaccgcctactacgacgcccgcggcgaccgcgatgtgatcgcgcagtggaactacctgccgtgggcgcaaccgatcaccgccaagagcttcatgcggcgcctgggcgtggtcagccagcagcaggccggcctgcccgacccgcgccatgcgcaactgcagtacccactgcacccgctgcggtgccagaacccgcatcgtcccaatgtgctgatggtggtgctggaatcgctgcgccaggacgtgctgacaccgcagctgatgcccaacacgtcggcgctggcgcaggacgcgcgcgtgttcgaccagcacttcagcaccggcaatgccacccgctacggcctgttcgggctgctgtacggcctccccggtggttactggccaagcatgctcgacgagcagcgcggctcgcagctgttccaggtgctgggccagcagggctacgacctgcacctgtacggcagtgcgccgctgtacagcccggaattcgatcgcacggcattcgccgatgtgcgcgaccagctgcaccaggggccatcggcactgaagtccgacggccgcgaccgcgcgatcatcagtgcactgcagcaggacatccgcgccagccaggcggcgcagcgcccgtggtttggcttcgtgttcctcgactccactcacgcgccctaccacatgcccgatggttacccgcccgtggcgacgccgatggctgcggacatcgacttcctcaaattcggcccggagcatgacccgacgccggaactcaaccgctaccgcaccgccgtgcactacgcagacagcctgatcggctcgctgctggacgacctgcgcgcacagggcctggccgaggacaccatcgtgctggtcaccggcgaccatgccgaagagttcaacgacctcaagctgaactattggggccacaacggcaacttctccgactaccagctgcaggtcccgttcgtgctgcattggccaggcagggccgctggccgcgacgcccgcaccagctcgcacgaagactgggtaccgacactgatgcgccatgcgctgggctgcgagaacgcgctgagcgattacagcaccggccaggacctgctggccgaaccgcagggcccgcgtgccctggtggtcgaaagctggtcgcagcgcgcgatacgccatggcgacgcgatctacgtgttcgacaagttcggcaacgccacagcgctggaccggcactacctcccgctgccccagcaggcccctgatgcggctgccgtacgcactgcatgggaagcgttgacccgcttccgcaatcgttga

SEQ ID NO: 511069 - DNA, 741 bp, Stenotrophomonas maltophilia
atggacctctggacgttgatcgaagcgggcggattgaggatcggcactattcgccgttgcgaatgggaactggtcgatgcccaaggcatgaacatcaacgccgcccatcgctgctcccgtctcgcgtactgtatcgaaggtgctttcaagccaatcatcagcggcttggagcatgagcgcttccttcgcactctccgcggagcgaattctgggaagtacttgaatgccggtggtgcggtatccgacggcccagtgtcgcgggtccgcgttgccccaccgggctggaccggcgcccctctccgcatcacggaactggaaatttctggtgactactgccgcctacggctggatcccatggaatgcgcgttcaacgagagagccttcttcctgacgcgtgcagaaagggacgctatccgcgcattgatcgctttcgttcgcgcaggctgcccggatggccccagccctccaggcttccccattgggcgcaacgaagacttccgacgtgcagcgctcgagtacttctctgatccgcccgatcccgccaatcacttccggatcgatgttcccagcgacgagtatgttgccaggcatgcagccatccatgggcccagctctgtcgttctcatcgaactggatctgttcgcagatggcgagcgttgtgacctgacagctacgttcgaccttgatcgccggagcacggtggacagcggccccaggctctatgacatgcatgtgatgtag

SEQ ID NO: 511070 - DNA, 264 bp, Stenotrophomonas maltophilia
atgaagaagcgtttcaccgacgagcagattattggcttcctgaagcaggcggccgctggcaccccgatcaaggagctgtgccgcaagcacggtttcagcgatgcctcctgctacctgtggcgccgcaagttcggcggcttggaagtgcccgacgccaagcggctcaaggcgcttgaggcggagaacgcgaagctcaagaagacgctggccgaggcgatgctggataacgaaacgctgaaggtcgtggcgcggggaagattttga

SEQ ID NO: 511071 - DNA, 768 bp, Stenotrophomonas maltophilia
atgcgcgccctgatcctgcttgcccatcccgaaccccgctcgttcaacgcctacctggccgcgcaggccgccgaacagctgcggcgtgacggtgtgcaggtggaggcaatcgatctgtatgcggaaggcttcgatccattggaagccgcataccatcatcctcagcgcctgcagcgcgaacgcttcgatgcccagcgcgaacaacgccacagcgccgagcatgattttctgcccaccgacgtgcgccgccacctcaagctgctgcaggccactgacatgctgatcctgcagttcccgctgtggtggttcgcggcaccggccatcctcaagggctggctggaccgcgtgctggtctacgggccgatgtacaacagccgccagcgccacgagcacggcgtgatgcgcggcaagcgcgcgttgctgagcgtcaccaccggctcatcggcacgggcctgcgccgtcgacggccgcgagggtgatacccggttgttgctgtggccgttgatgtacagcctgcgctacgtcggcctcgacgtgatggaaccgcatgtagtgcacggcgtgcgttccgggctggcaccggagcgcgtgcaggcgcacgacgaggcgctcaccatggctgcaagcaactaccggcaacgacttgctcagtggacgcagtggccgatcgtgcctttcaatgacagcgaggacttcgaggacggcgtggtgctgcgcgcggaggccacagcctacagccccttcatccgccatcgccacaccggatga

SEQ ID NO: 511072 - DNA, 507 bp, Stenotrophomonas maltophilia; identical to SEQ ID NO: 342010

SEQ ID NO: 511073 - DNA, 1041 bp, Stenotrophomonas maltophilia
atgattcacattggagactgcctggacgtgatgcgcggcatggccgccggctcggtgcagacctgtgtcaccagcccgccctactacgggctgcgcgactatggcgtggccgggcagatcggcctggaagacacaccagccgagtatgtcgcgcgcctggtcgctgtcttccgcgaggtccgccgcctgctgcgcgatgacggcacactgtggctcaacctgggcgacagctatgccaccgacagcaaatggggcggatcgactggcggcaaggctgcggccgccttgcatgggctcggcggcggcggccgcaacaagacggctacaggtctgcctgacaagaacctgatcggcatcccatggcgcgtggcatttgcgctgcaggaagacggctggttcctgcgccaagacattatctgggccaagcctaatccgatgccggagagcgtgaccgatcgctgcacgaaggcccacgaatacctgttcctgctgtccaagtcgccccggtactacttcgaccagcgcgcaattcgcgagcaagctacccaaagcagcatggcgcggtgggcacaggatatcgaaggccaagcgggtagtcggcgggtcccaggaaagaccaatggcgccatgaaggccgttggcgggaggtcaagacgcgattccttcgcgaggaatggcgccgtcagcaatcacatgttgcctgggcagagtgctgcccagcatcgcaggaaccggggagccgacactttcgacacagatggccgcaacaagcgcagcgtctggaatgtggccacccgtccattccgtgatgctcacttcgcgacgttcccagagcagctcatcgagccctgcatccttgccggcgcgcctgctggcggcctggtgctggacccctttatgggggccggcacaaccgcggtggtcgccgagcgcctgggccggcaatgggtggggtgcgaattaaaccctgattacgccgcgatcgccgaggcgcgcatccgggtcgcacagcctggcctttcatttggagacgtcgcatga

SEQ ID NO: 511074 - DNA, 2058 bp, Stenotrophomonas maltophilia
atggctgacggctcccacgctttcaacttccccatgccgcagcgctcccggctgcgccccggcgagatcgttgtggatctcttcgccggcggtggcggggcatcggaagggctcaagcaggccctcggcatcgatcccgccctggcctacaaccacgacgagctggccatcggcatgcacgccgccaaccaccctctgacccagcaccaccgcgaggatatctggcacgcagacccgcgcgtggacgtggccggccgctccatcggctggttccatgcctcgccggactgcacgcacttcagccaggccaagggcggccagccgcgcagccgcaagacccgcgcattgtcgtgggtggtgctgaagtgggttggccagctgctgcgtgctgatcgcctccacggcaccaacaccgctccgcgcatcatctccatggagaacgtctggcagatcctgacctggggtccgctggtggcgaagcgctgcaagaccaccggccgtgtcatcaagatggacggcaccgttgcagggcgcggcgagcgcgttcccgtggagaaccagcagctggtgccggacaagcgccacagcggccgcacctggcggcagttcgtggctgccctgcggtcgctgggctacgcagtcgagtggcgcaagctggtggccagcgactacggcgccggcaccagccgcgaacgcctgttcctgctcggccgccgcgacggtcaggccatcgtgtggccagaaccgagccacggctctgctccgggccagaagccgcgcgtgaccgccgccgactgcttggacttctcgattccctgcccatccatcttcacccgcgcccggccactggccgatgccaccatgcgccgcatcgccaagggcgtcatgcgccacgtcatcgagtcggccgatcccttcatcgtgccagtgacgcaccaaggcggcgaccgcgtccacgacgtgcgcgcccccctgcgcaccatcaccgccgccaaccgcggcgagctgatgctggcagcgccggagctggcgcctttcctcactgagcacgccaatgccagccgccagcgaacgatggcggccgacgagccgctgcccacggtctgcgctggggtgaagggtggccacttctctgtggtgacaccgatcctggccggcgtcggcggtcgggccgcccagtccgagccgcgcaccggcggcgaaccgctctacaccatgaccacgaaggccgacaccgcgctggtcgctccgacgctggtgcagaccggctacggcgagcgtgagggccaggctccgcgcgcgctcgacctgcagcagccgctggggacggtggttgccggcggcgtgaagcatgcagttgccgccgcttcgctggtcacgctgcgcaacaacatggttggcgccgagcccaccgagccgctgaccaccatcgccgcacagggtgggcatcacgcattggccaccgccttcatcgagcaggcgaacggcgggttttaccagggcgcaggcaacgacgcacgcgatccggtcagcaccatcaccgccagcggcagccagcagcgcctggtcaccgctcacctgatgaccaataccagcgcgcattgcggtgcaggcggcgcagaccccgttcccaccataaccagcgcgggcaaccagaccctcgttgaatgcaccctcagccccgaacaggaggccggtgcactgcgcgtcgccgccttcctggtgaagtactacggcaccggcgccaacgtcccctccctgctcgatcccgtggataccgtcactacccgcgaccgtctggcgctcgtcaccgtccacctcaagggcgtgccgtacgtgatcgtggatattggcctgcgcatgctcaagccgcatgagctgtaccgcgctcaggggttcccggccaactacatcatcgatcgcaccgccagcggcgcgccgctcagcaccagcgccgccgtgcgcatggtcggcaacagcgtcagcccgccgccgctgcgcgccttggccgaggcgaaccttgaccgggtgccggccgacatggcggtggcggcgtga

SEQ ID NO: 511075 - DNA, 291 bp, Stenotrophomonas maltophilia
atgactacgatcaccacagacacgcacagcgcaatggataggccagagatcatcggcggcgacgctatcgctgaggcaaacggaaaactctgctcgttctcgatgcgatgggaactcgatggcgactacatgcgctgccggatctgccaacgcccacagctgaccagctacgcacgctacccgttcccgcacgtggccggctgcaagggcgcgaaagcccatgaggcgcatccgtgggtcaccttcgtgcagctgatggctccgctcagccatgcggtgtgcaatggctga

SEQ ID NO: 511076 - DNA, 237 bp, Stenotrophomonas maltophilia
gtgaccgcgctcgagttgaagccgtgctggggcctgcagccagtcagagggctgggaatctcgaagcctcacatcaccttcggtcggtacttcgatggttcgcagatggtgaaggtcgactactggccaatgtggccagtggatgctggttggtcccatgccgctggggaagacctggaagaggcatgggaggcacacatgcagtgctacgaagaagacgatgaggagctgtcctga

SEQ ID NO: 511077 - DNA, 360 bp, Stenotrophomonas maltophilia
atggacgccatcgagaagcgggcgcgtgagctgctggccatggcgtatgaggcagatggaatggttggtcgcgcaggggtgatccggaatccgacccagtacatggagaagccggacaggcgtgctttggggtgcatcatcgccgccctcgcgccgcccgaggagccggatcaggcgctgctggtgagcatggcgatgctcgtctaccacgggttcggcctgctgacgccagaacaaaagcagttccagctccgcgaaatgcggaagctctgggacgaagtcatgggccgagggtactactcgcccgacaaccgtgagcgctacgttgccatgctcgccgctcgcccggaggtgccctga

SEQ ID NO: 511078 - DNA, 1251 bp, Stenotrophomonas maltophilia
atgccgcagaaactcattgaccagacgaccatccagccggatggcagcccaggcgacgacgcgttcaccgcgttcgctacctgcaacgacaacttcgaggatgccgaacagcgcctttcggcgttggaaggcgggtcatcgaacatcggccaggatgtggccgacctgaaaacgggcttgcagcaggagacgcagctgcgcactgatgccgacgccgccgaagccactgcacgccagaatgcggacgcagcactgagtgcacgcatcctcggtaagaacatcgtcatcaacggtgacttccggttctggcagcgaggtacgggcttcgccgctgctggttacggtgcagatcgcttcttgaacaacatcaatggcatcacctgctctatgactcggctggcgctcggtgtgggtgagatcgcaggtttcaagtacgcgtgccgtatgtcattcaatggaggtagtgaccctgctcactacgcaaccttgcaacatcgcatggagaacctcggatactactcgggtaagactcttacgttctcaggttatatgcgcgcaaacacaactggcgtaaaggttgcatttgagtgcgcgcttatcgccgcaggtggaactattccgggcgtggttccgtccactgctatcggagtgactacgttcactttggggacttcgtggcaaaagttcactgctaccttcactgtgcctagtttggttggcgcgacactcaatgatagttcttcgttgagtttcaacctgtggctgtcggccgggtctaaccacaacccgcgtaatcataatctgggtttccaatctgccattgttgacttcgctggattgcagttggaagaaggtgctgtttcaacgccgtatgaattccgaagcgatcctctcgaattgtcgctgtgcctgcgctactacgaaaagagctacaacctcggagtcttccccggaactgccgaccgtaatggtagttatcgatgctctatcgtaaatggtttcttcttctctgctggcactatcgcgtttgcggtgcagaagcggactacccctgcaattagcgtgtacgcagcgcgtgatgggacggctggtgcaggctcggaggtaaacaactctggcgtatttgtggcaaacaggaacgttacgccgagcaatatgggcaccggccggttccagacgggtagcaacaacggtggtgctgcagctggcaacactattgagttccaatggactgcggacgcggagctttaa

SEQ ID NO: 511079 - DNA, 819 bp, Stenotrophomonas maltophilia
atggatgatcagggacaagacattgcggtagttccaatccggtatgacggcggcgacgccgcgaatcaccagattgagctgaatgtactcggcgaatccttgcagggtatggcgcgcatcttggcggtaaccgggaattttgctgcaaccggagaatatgcaaagcagtaccaggccatgaacgtaaaggtcttggtcaaagagcctcgggcgaactgctatacacttgacgccgtaatccagtttgcccagcagcaacagctatttagcggcgtagcgggccccctcattgggggacttgttggatggatcttcagccgggcgagtgggaagaaagaagaaatgaagatgctcaaagacgccttggacaaggtcctggctatgcagagcagcaatcaggacaggttgcacgccactttggacaagatggcggattcgctgcgtcctgcagttcgccaggctgttgccccggtcggcagaacgtgcactacgatgaccgtaggcggtggcatgtatgttgtcgatgaggcaacggccgatgccattcgtgcaggtggggagctcgaagtaggcctcgagcgtgtatgggagctctggatctctgaacttgatcgcgagaacagcactgcgaaggtgcggcttgtggacgatgactccaagcgtattaaggcgaagatcaccgatccccttggcgcgaccattccgagcccttacgcagccgcgctggctgctggtagtgtgatcaaagtgaagggcaaagctgtgatgaaggatggcgagatcgactgcttgtacatcagcgacctggttctcggctga

SEQ ID NO: 511080 - DNA, 423 bp, Stenotrophomonas maltophilia
atgaagaatggtaagcaggttgtacccgtttttccccgtccgatgctcggcaagatgctgaatgttgacggcgtttccttcacgttcccgaccgtaaagctgctcaatgcagcaaatttgcctgacgcatctttccccgaagcctggagcaaggcagctccggtagcgattgtcgttgacggtgtccgttgcttcactccaaccgaactcggccgccggcgtggcatctcagcccagaagttcaacaagctgctggaaggacgtggtctgcagacgaagcgcgatggccagtggtgcatgactccagctggcgaagccttcggggttctcctgcaggtccacaagaagcagctctccggcactgacgtgcagcagctgaagtggaaggagagcgttctgtctcagctggaccatctgacctga

SEQ ID NO: 511081 - DNA, 216 bp, Stenotrophomonas maltophilia
atggcgaactggcaaaaggacccggcctcattggaggccaaggctgcggccaagctgcagcaggcgtcggacctcgaacgtgatacctctgggagttggcgttcccgcgcgcgccgccggcagagcgcgcaacgtctgcgcgctaccgccagttctcatcaacgcgccgcaggccgcctggtaggcctggatctgcccgaggacctgccgttctag

SEQ ID NO: 511082 - DNA, 135 bp, Stenotrophomonas maltophilia
atgggctcgaccgaagaggagtacgtgctcggcaatacagcccctttggccgcgcagtgccgcacgctggagctgcgcccgggcaacggcggctggaccttcctcagcgaaatcggaatggccgcagagcagtaa

SEQ ID NO: 511083 - DNA, 492 bp, Stenotrophomonas maltophilia
atgccgactaagcaactgctggcactgtacaaccgaatcgccgacaagcccgccggccccaagacattcgcgacccgggcgaagctcgtggcccggatcgagcaaatcgcggcagacaaggacattcatctgtcgtcgtccgggcagccgaagatgcccgaggtggccgctaagcgcgcagagccgaaggccgacgtcgccgagcggcccgatgcctccgataagaagtcccaaggcaagggtatcggcgctctcgcacgcgcgatcctgatggacccggcgggctattcgcacgcggtggtggccgaaatggtcaacgcgcagatcgacggtgcggcgactacggacaagtgcgtccgctggtatgccaacgagatgaggaaaagaggtgtaaacgttccgtctcgacgccgcgcgcgacggctcaccagccagcttaaggatagcgcagagcaagcacaggccatcgctttccttagcgcgagccgttga

SEQ ID NO: 511084 - DNA, 867 bp, Stenotrophomonas maltophilia
atgagtgcaattgtggcccgcgacgtcagtgcgccccccgtcggtggatcgaaaaagaagccaaaaaagactgcccgtgtcaatgggggtgttgcaactaatgacttagttcactcggcgtacgttgactccaacgatgcggtattcccgcacatcctcgacatctatgtaccgcaaggagcgcgcatcgctgacgtcacgtacggccgaggcgtcttctggaagcgagttgacttggccaactatgaagttctgttcagcgacctgaagcgtgatggaatccctgaatttgtgcgaggcggagtggatgcgaggaagctcccgtatggggacgccactctggatgccctcatctttgacccaccgtacatgcataccccggggggcactgcacacaatggtcatcagaacttcgaggcgtactatgcgaacaatgccgagcagaacccgcaggtgattgaagaaatatggcgcgagacttcaggcaatccgcccaagtatcacgaagctgtcttggatttgtactatcgctccgcccgtgaggctcttcgcgttcttaagccggaggggatctacgtagtcaaatgtcaggacgaagtctgtgcgaacaagcagcgtctaacccatgtagagataacgaacgagctcgagcggcagggctttgtagtcgaagaccttttcgttgtaatacagacgatgaagccaggagtttctcgtttaaagaccaagcaatatcacgccagaaagaaccattcctacttcatggtttatcgaaagccaaaagtgaagaagcctcgaaagaccaagaacgccatcaaccttgagttagggcatcccactcgaagaaaaactcgccaaaaggtttaa

SEQ ID NO: 511085 - DNA, 888 bp, Stenotrophomonas maltophilia
atggcgaagaagaaggtcggtaccaagctggagcaggcatacgaagacctgaaggccgaggtcaggaatggccatgactcggcagcgatgacccagatcattaccgacttgtatgccgaaagtctcgcgtatctagcaggatttaaatcggttcaacttgattcgaaggtcgcaggtaagaattacatcgcgcatgacaatggaaagcgcatctcacgtgccattaatgtaggtctgtatgtgcctgatctggcgcagtggaaggcgctgagtgcgctactaacgccgggtgcgaacctcaatgggaagacagatgcagccacgataacgcgggttctatacagtatggcgatctcgttttgtgcggctattgatttgttgaaaaatggtgatcagaagactccaggtacatacttcgagcacttcattgctagcttcttcgcatggcgcgtgggtgttcgtcccacaaattccatacaggttctgagcctggatgaagagaacacgaagctccccacagactttatatttgacctgggtaaaaacgctcagaagttccacatgcccatcaaaacctccactcgtgagcgcgcgatcatgctctgggcacaccagaggctactggatggtgtattcggtaccgaccggttcatgggcactccggtgctgctggctgagacgaagactgatagtaagaagcgtgatgtgatggaaatttgcttgcctgagcaatggcggttgtaccagctttacatcgctaaattgaagcgtgtctactatttggacatgccagcggcgtacgagaagctcggtcggaacttcccgccgctcgtagttaaaccttttggcgagtttttcttcgagtgggatgccctaactcaaggttga

SEQ ID NO: 511086 - DNA, 1161 bp, Stenotrophomonas maltophilia
atgcgcctgaaccgacgtgccaccatggccggcctgtcgctggtggaactgatgatcgccctggtaatcagcctggtgctgatgctgggggtggtgcaggtcttcatggcctcgcaggctgcctcgcgcctgtccgagggggcctcgcgcgtgcaggagaacgcccgtttcgcgctggatttccttgagcgagacatccgcatggccgggcacatgggctgcgtgaacgaccaggcccacgtggtgaagaaccaaggcgatccggtatcgcatctgggtgcatcctcgggcgatggcagcccgcttgatttcagcgtttccatccagggcttcgatgcaccgggaaccgcgccgggcgggaggctcgcactcggggcgacatggtccgcaccgtcagcgctgccggcagcgatcacccggctcagccctgcgccggcaggcggaagcgatgtgctggtactgcgctacctggcccctgagggggtgccggtgaccggcatttcgtccagcggcggcaatgcgctgctggacatggacagcacccgggtggccaggctcacctcggggggcgtggcggcaccgaccttgttcggcatcgccgactgtgcccatgcggacatcttcgccggtacgttgagtgcggcacgtgtgaccgcgccctcgctggacctgtcgcgctatgccgcgcagccgaccgggcagacgatgctctatcgcgccgagtcgatggtctattacgtcggcatcaatccggagaccggtcagccgggcctgcgtcgtgcgcgcgccaacagtgctggcgcctatgcggtcaatgaagaactcgtggaaggcatcgaaagcctgcagctgctgtatggcctggacagtaccgccaacatcagcctgggcacgccgccggccggcaacatcacccgcctggccgccgcgactggggtcagcagcaacgctaacgccgccggtgccgcgcagtggctgcgggtggggcaggtgcaggtggggctgctggcacgcagcccgacgccgtcgtcttcgagcacgccggccaacccgctgtcggtactcggcgttggctttgccagcagtgacaagcctgacggccgctaccgctccagctatgaagtctcgattgcactgcgcaatcgcctgttcgggaactga

SEQ ID NO: 511087 - DNA, 138 bp, Stenotrophomonas maltophilia
atgtctgtagagccgagccatgctcggctgctcttcgccgggaaaatcccgggcttcgcgctcaagtcgagcatggctcgactctacaaaaacgaaacgggcgccctgggcgcccgttctgcttatttgaacttgtag

SEQ ID NO: 511088 - DNA, 3348 bp, Stenotrophomonas maltophilia
atgcctcgagtcgttcccatttttcagcaacatcacgccatcgagcaacagacgcttggcaatagtcgcttgctcaaggctctggctgatgcgggtcgcttcaacatcgatgccgatcagaacctgatcaatatgccccacgacaaggcgctcgcgcaggccttgggggtgtcacctcacaacggcggaccgattcgtgagtatcgaatcggattggaggccaatctcgcccgcctcgagagaagccgggatggccaagcagcgctggctggcgacctggaggcaatggatcgcatcgctgccaaggttcatcggttgagcgacatttcacaggtcggcttggtcaacggagacctgcggacgaacactgctttaggacaaagcaccgatcaggcacgtgcccagacgagggagttctacaggaggcccgaggaatacgcccagcagtactctggacagctggagcaccaccagcagtcttccgttctttccaggcaatggagcgccgtcacacccaacgagagccgcgttgtatacacgctccagcactttcaaggatccggacagccgctgatacgtggcggcaacatcgagctgcagcgtaacggattgtcgaatgctatcgctgatgcccatcacgccgggcgtctccaaatttccccgggcggcgttcttgtagttgagtctgttcttggtgaagaggccgcgtcacgccttcgtgctccggtcgggcaacgcggcggagttacattggatctcctcctcggcgaagcctccaccagccaactgatccgctccggcggcctgctcgcatccggcgccgacgctgtcattaccgcccgtcgcacctcgcagctgctggaagagggcaacggcaccgccgctcagtccgagctcacccacgctctggcacgcaacggcggtggctggatcggtggcatggccacggcgtcggtgattggcacctccagtttcgtccctgcggctatcgtcgcgggcgatgcgctgctgatgagcaaggcgttcgacaagggtgccgatctgctcgacaaccgcgccatctaccggcagaccgacaaagccgatgtcacatggcagttcgatggccgcaactggcagcgccaggcggtcatggacagcgcgggcgatggcctgggcaatccgactgagcgcagtgtgggcgccagttacgagaaggcccgcgagctgggcgcatacgcccacgtaaaagcggtagagctggcgctgggcaaggcgccgccgccgcaggatcctttcagcattccggcgaaggacggcgagggccgtctggacaatcccaactggcaccgcgatgcgcagaccgaacagtggacgcggcaggtcaagatcggtgtgtccggcgtcaacgaccggggtgtgtatgagacacagaccgccagccccgaacgcgccaacgagttgaatcgtgaggcggtgcagcgcatcgagaacaacttcgccaacggcaaggccgcgattgccgccagctatctggagacctacgccgctacccgtgccagcgacttcgtgccgctggtgccggaggcggtggagcaggcccgtgccaggcccgacgccatccagggctcggacaaccagctttaccagcgcgatgaagcaggacaatggcaccacgctggccagatcgcgcagggcaacatggcgctggagttggagctgacccgcaccatccagcagccatcgctcgatcagttcaacgagaccattgccgcgttggacgcgcggccattgccgtctgcggcggaagtgaaccagaacgagctgcgccacagctactacgctgcgggcatcgcgctgaccccggcgtgggagcaggccattgcgctggccacggcgcgcacgcgcgagcagcacggcattacgggtcccacgctgcaggaactggggcctgtagccgagggcaacgcgggcgcgtcccggcccatcacccattaccaggtgggtcaggatggcgtggcgcgtgccgtcgcgaccaccagcacgcaggagttgcaggccgcatggaatgaggtgcgcgcgcgtgccaatgagcaggcgccgttgccggactcgcccgagctgcgcattgccgcgctgtcggcgggggagcaggaggcgtaccggcaggcaatgcaggaggcaaatcggctgggtgctgcgcaggtggatgcagggcaggctgcacgagcagccgcgcaggtggcacatggcgacaagccatccgagcaggatgggagcgtggaagtgcggcctgaagagccggcgactgcgcaacccatcgcgcctgcggcggttgcggcagcgccgcccgcgataggggtcacgccaccgcctacgcccgccccacaggacaagcccgcgcctcaacggcacgccgagcagcgcgatccgccgcggcgtgaggcggagccccaacctcagccccatccaaacagcgaggcgcccaccgaaaaccgtaccgcctcacagacgccagagcccgctgggccgatgcaggcgcacccggccgcacctgagcgcgcgacgccacatgtcgccgcgccactggatgcggcaacgcagatgatgcccgcgcaacgcacagagcaggcatcggagccggagcggatcgccccggtgcctgcggttgctcccactccaaagcaggacatggcagtgcaggaggtggaaccggtgcccttcaaggagccgctgcctgctgagcctgcgcgcgattcatggcctttggagcaggaagcggcacaaaccgtgccagagcccgaaccgactccattggatgacctccagcccgtcactgcggctgtcactgttcctgccgcgcccacgattgcgccaagccctgagccagccgaacctgcaccggatgaggcatcggccccgagccgggtggtgcaggaccccacccagcccggccatcccgatcatgcgctgtatcagcagatccgcgagggcgtggaagcgctggacgccaagcacggccgcagcttcgacgaagtcagcgaacgcatgaccgccagccttctggtactggccaaggacaacgacctggaccgggtggaccatgttctagtgagcaacgccacgcgtgaacacccggctgggcacacgctgttcgtggtgcagggcgagcccagcaatccggcgcatcagcgcgctgcgatgccgactgagctggcggcgcagacatcggtggaggaatcactgcagcagttcgatgcggtcagccgtgaagcgcatcagcgtgcgcttgtgaatcagatggaccagcagctggaagaccagcgggtgcagcacgacatacagattcgtgcggcgagcgggggatga

SEQ ID NO: 511089 - DNA, 645 bp, Stenotrophomonas maltophilia
atgcccacgttagaacgtaatcagcctgtgcccggcgagttctatctgctcatgcctgacacgacccgaaggggaagagggcacggcattgagatcgagaatgaggacgcactactgacgcctcccaggctgatcatccgccccgaagaaggcggtttcccccctctggcgcagagaccgcgtctggttctcgatccaaagctgggggatccacctcaggacctcgaaggaggaatgagtggctactggttggtatcagagcgcctcaagatggccttcaccgaaatagatcccgttgcctttgagttcgtggagtgtgattacgtgcttccggatggcacagagggcccaacgtactacctgtgcgaggttgctcgcgaactggatgccgtcgatgaggaggcatcgaagttccgggtcatcgtcgatgagggctatccgggcggaaagttctacgaccttcgtggcggagcaagcttggcattcaagagggatgtaatcgggcgcagtcatgtcttcaggagcccgtactccggcgatcttgtctactgcgatcgcatgttccgggatgccatatgggatgcggaaatcggaagtgacagggaaacacgcggtctgaggttcaaggacgtattcagaatatga

SEQ ID NO: 511090 - DNA, 642 bp, Stenotrophomonas maltophilia
atgggatcaacttccacccaccagccgcgcaagggcgagttcttcaagctacgaccggatgctacccgtagagggaagggtcacggggtggtctttgaaaacgaggacgcgttgcttgcgactcccaggctgatcctcttacccgaggccggtggcttccctccactgcgtgaaaccccgcgcttggtctatcgggagcggcagggtgtccctacacaggatctggaaggcgggttgagcggctactggctggtctccgagcgtttgcgccaggtcatggaagagattgaccctgacgcgttcgttttcgctgataccgactaccgcttggaagacggttcaaaggggccaacctacttcctttgcgacgtggtccgcacgctggatgccttggatgaggaagcctcccagctcaaaatcgtgatcagcgatgagtacaaggcagggaaatactaccgcctgaccggtgatgtccggctggcgttcaaacgcgaagtgctgggttcggctcatgtgttcagattgccgttccatggcggggttttctgcgaccgaacgttcaaggatgcggtggaagctgccggcatcgtcacggccaagagatccaacgggctctggtttgaagatgtggtgaactgctga

SEQ ID NO: 511091 - DNA, 363 bp, Stenotrophomonas maltophilia
atgaagtctctgacgtacgctgccgctgcactgtgtttggtagcgctgattggttcagcgctcgcccacttccacctgccaaaaggcgatttggagctgaagacctaccccaaggtctcggctgcagagtttgctgacatgcgcgaggaagccctaagcgtagtggttgaagatgcagcgctcggtgccggacgctttgaagccaggtacttcaagctcacttgccgaggcaagcccgctctgctggtggacaattcctcatcacagttgctcatcctaggcttcataggccaaaccagtgaggcgccttgcgttcaacctctactccggcgctggagtagccgactactttcggccgactag

SEQ ID NO: 511092 - DNA, 714 bp, Stenotrophomonas maltophilia
atggaggcccgtcttgccaatggatctacccttgagaaggcaagggtctatcgggaactggctgcccgccacggacgcacgtccaaggcctgggagtaccgcatgcagaacatctcccatgttctagatcaggcaggtaagccctggctacccgggcttcttccagcatcgaacgtgggtgcaaaggttgagccgaaactggccaagctcctcgggctctccggtgagacgctcacgtcggtctctggtcctacaagggaactgttggagcaggaggccaaagcggcggaggcatctggcagtttctccccaacagacgaggtggacgagaggcggcgtgtgctggcagctatcgttcggcgccgcgggcagcctgccttccgtaaggcactgctggacgcatacggcggctgttgtgcgatgacgggatgcgatgcggcggacgccttggaggcggcccacatccggccctactcaggtcccaaaagcaacgaagtcacaaatggacttttgcttcgcgctgacgtgcatacactcttcgacctgtacttgctggcagtcgacccaaagtcctttcgagtttccgtatcccccaccctgatgagttccacctacagaaagttgcaagatcgtcagctagctaacccgataacaattgaactagccgccagccaggaagcactggcctggcatcattcgcgctgtctctggtag

SEQ ID NO: 511093 - DNA, 960 bp, Stenotrophomonas maltophilia
gtgagtttgtggcgcgagtttgaaaggcttgagatcgcaaaatcaagcacggagttttctgctctaagaattgcgggggataggtctgatttcttagccaagaacgagaggggggcgccagtttttctggtacaagattcgtcagacgtcccttcaactcacgggtttaggtttagaaatatgtccgtgaggtttaacatcctctgtcgagtgagtacggccgagggcgatctgagcgggaaattcgccattgttgtatgcgaggcttctgcagcggaactcttcgatgttttcattagctgtttgcagccagcaatatctgctctgcctgtactagcaaactcaagcgatatcgccgctacgctgcgatcgcttcagaatttgttcaaggagttaggtcgaggaggggggcgtgagatatcaggcctgtggggggagttgaaagctattttactttccactgattgcgtcggagctgttaatgcttggcatgacgtgggaaatgagcgatttgacttttcttggcctgatcgggttgtcgaggtgaagacatctcagaaggatcgaacgcatgacttttcactagatcagctaactcagcccctggcaaagtatggattcgttatatctatcgtaatcaggaggtcctccagtggacaggggattctggatctcgctaaggaaattgaggctaggcttgccggaaatctaagttgtcgcggtaagttgtgggccactatcgcagcctctctcggtgcagacttttccgaaaagctcgattcctgctttgagttggatgagtcgctgggtgctgttgtggtccacaggatgcaggatattcctcgtccaccgccatcagatgatgagcgcatctcgtctattcgatttcgtgttaacattaatgacttaacgggcgaaactaatggccttagtgtttcaagtgtaatgagttgttcctga

SEQ ID NO: 511094 - DNA, 2256 bp, Stenotrophomonas maltophilia
atgtctagtacagtgagtatcgtggaggaagttaaaccgccgttgcgttggaatccgattgttggagaattcaccgaagattttctgactagcaaatccagcgatcctaatggcccctcgctatctgatttgaaggacgggacacattccgttctgcaagaggctcttagaatcctcgggcggtgcctgcccccttcgctaccccatggtagtgagaccggtcttgtagttggttacgtgcaaagcggtaagaccatgtcatttgagaccgtgatagctcttgcgagagataattgctatggtctggtcgtggttcttgccggaactaagaataaccttcgtgatcagtcggaagaccgattgaaaagggattttggcatcgatgagggtggggatcattggtatcatctctcgaatcctggcagagcacaggcaagtcaaatacagagcaaggttgacgcctggaggaaaaattcttcgaagaagtcattgcttattaccgtgctcaagcacggagctcaactcgataaattgacggaagttctttctagggttaacttgtcgggcctgcctgcacttatcattgatgacgaaagtgatcaggctagcctaaatacatttgcccgcgacattagaaataatagggtttcgccgaataagctaagcactacatatgaaaaaatcattgcgcttagggatgttctgccacaccactcgtatctgcaatacaccgcgactccccaggcgaatctgcttttggcacaaacagatctcctgaatccctccttctccgagttggtcactcctggtgatgcatacaccggaggtaaggagttcttcgaatccaacatcgggcttgtcgaggaaattcccgcgagtgatgtgccgggtaaaaataatgtactgaagtctccgcctaagagcttgctaaaggcgcttagattctttctgcttgtttcggcccagcattcacttactaggaaaaaaggattagcttcaaaggatagaaatcgctctatgatggttcacccagcggtggctacaactcagcataaagtttataaggactgggttgagaaggcttttaatgggataaaggagagaatatcttcgggcgatccgtcgttggctcgagcaatgttcaaggaagaatacgcggcgctttcaaaaacatttcctgatctgaggccgctgtctgaacttgtggcggcgctcgctgatgaggtgatcgatgatctgaactgcgtggaggtaaatggcacgcctgacgcggagaagaaagttaactggaaggcgacaaaatactggattcttgttggcggtgctaagctcgaccgcggttatactgtagaaggcctgtgcgtgacttacatgccaagacccttggggtcttcgccttccgccgataatcttcaacagcgtgcgaggttttatgggtacaagaagaagtacttagggctctgcagggtgtttctgcaaaagccggttcaggccgcgcttacggcgtatgtggagcatgaggaattcgtccgcgcggcgctcctggagaatcgaggccgcccactgcgtgaatggcgtcgtgattttatcctgactcagttgctgaagccgactcgcccgaacgtgattggtatcgacctggggcgaatactagtagagaactggatggttcctcgggcgttgcaccgagatgaagacgcggtccgagagaataggagtctgctcaattcgattcaggagcgctggtctttggaatatcagagagttccttcgtctagccttgtgaacatcggggacgttagtgctgcggtgggtactgacgttatccaaaatgttccgttgtcagttgttatttcagagtttctgcttggcctgcaggtcaaggatccattggatgcagaactccatagcgcgcttcttatagcgcttagctcacttctggcagtaaatccagaatcgatggttgatgtctttctgcttgataatcttcgcccggcctaccgaacgaggcagaaaacagttgcaattccatccagttctcgcaccgctccgatgaatcagtacttcagcaatagtgctaacacagcaaatgatcgaagcttttttacgccgggtcgagtcagtcttcagttgagagcgttcgatttgggttcccgaatccgggacagagatagcgcggatgttcacgatgttgcgtggtacgccctgtacgtgcccgctagtatgagccaaagtatcgtcgtggaggggcgctag

SEQ ID NO: 511095 - DNA, 1587 bp, Stenotrophomonas maltophilia
atgtcacttgattcaaggatggatccgataggaattaggcctgaagttacgatgctgtcagttctaaggcatcttaactatagaccttggtttgcgctcgcggaattcatagataattcaattcaaagcttcatttcccttgagagcgagcttctgaaagctcatggctctgattacaagctgaaagttgatattgttattgaatcggcgctgccgggagagatagttatctccgataatgccgcgggtatttcacgagaagattttccgcgagctttccgggcggcgcaagttcctgatgaccggacgggtttgtccgaatttggcatgggtatgaaaagcgcagcctgttggttctccagggagtggagtgtccgcactaaggcgcttggggatgacgttgaaagaactatcgcctttgatgtcgagagcatcgtggaaaatgggattgagtcccttggcgtggcatcccggcccgtagatagctccaaaagctatactgtagtaaccctgcgcggtttgcatcattctccaaagggtagaactttaggaaagattcgcgatcatctttctagtatatatagggtttatttaagggataagcggctcgtcctgacgattaatggcgaagagctagattttttatctcccgagatattggttgccttgccatacgaaagccccggtgttgcgaatgtttcttctgctccgattcaatggaaaaagcagatcaacctcgacttcggacaggggcagaaggtgacaggatttgccgcgcttagagagacgggttcgacgctatatgcgggattttctctttttagaagggggcgattgattgaaggtagtcatgacgagacctaccgccctgcttctattttcaagcagaccaatagctacctatatcagcgcttatttggtgaactgcatgtcgaggggtttgaagtaagtcacacgaaggatggtttccgctgggaggaatatgaagatctgtttcttgagttcctgaaggagtctcttgaaagtgggcctattaatctaatttcacaggcggagaactatcgcgctttgcccacaaagcgcagcataacaacccaggcactcggagctacaaattcagtagtggctcatatagagagccaagttgagccagtgttggtcgacgtgcgtgaaaatccgcgacatgcaacacccgtcccgcagcatctcgattctgttgatgctattgcctcagagaggactgcgaccattaatgatgggcgctatacctggatagtgacactaagggccaccgtcgaccctgctcagaacaactgggtatctctcgccaaggcagatgtgaaagtagacgattgccgctatacaaggagaatcgagatagaggtctcacttgctcatccgttctctgcggaatttatcggaagtcgcaatgagaatattgagttgtttcttcgatttgcaaccgctacgtgtatttcactaatactttccgaggacgtttcgggtgatccgccggagggcatcctgctgcactttaactatctactcaggggggcgctctctagcgctatgattgataatgtctag

SEQ ID NO: 511096 - DNA, 1350 bp, Stenotrophomonas maltophilia
atgaactactacgcaacatctcttcaatcaaatcgcagaaatatgtcgcattttcgattcgttgatctttttgctggtctcggaggctttcatcttgccctccagcgtgtcggtgggaaatgcgtatttgccgctgaatggaaagagcatttgcggttgctctatcagcaaaactttgggctgatgcctgagggcgacatcacattagttgatcctggatcattgcctgatcatgatgtgttgactgcgggatttccctgtcaacctttctcgaaggctggcgagcagcttggtttcgagtgtactgagcaaggaagtctcttctttaatgtcgccgaaattcttaggataaagcgtcctcccttctttattcttgagaatgtgccaaacctccttaagcatgacgaggggcgaacatggcaagagattcagcgaatcttgaccgttgacctgaggtacgatattagggctgagaagttctcgccacataacttcggaatacctcaaattcgtgagagagtttatattgtgggttcgttgaagccgcttgaggattttgagtggccgaaaactagcagtgccgaaaccaacatagaatctgtacttgacgacaacccagtagatgcaaagaggctatccgcaagagccatccaatgtctgacgatctgggaagaatttttgatggcctgtcccccagatgtcgagcttccttctttccccctgtggtcaatggaatggggagccacttacccatttgaagagactaccccatatgcgttgaaaaagaagtttgggtatgcaggactccagggattcaaaggtagtcacggaaaaaggatcgggtaccttaaaacgctcgaggagcgttgggattcgctaccaagccatgcgaagaccgctcagattaaatttccaaaatggaaggtggattttattcggcagaatcgagagttctacgataagaatcgagagtggatcgatccctggcttcctaagattcttgaatttccatcgagctttcagaagctggagtggaacgtaaaaggtggtaagagggatatttggagttacgtaatccaatttagggcgtcaggcgtgagagtgaaaaggaggacaaccgcgcccagcctcatcgcgatgaccgatactcaggttcccatcattgcgtggcaaaagagatatatgaccccaaccgagtgcgcgaggcttcaatcattggatgggcttaaaagtcttccaagtagtcccacgcgagcatttcacgcgctagggaatgcggtgaactctaatgtcgttcaaatggtcgcagaagcgcttctgaaaagttcagtcggaaaaatcaaaggataa

SEQ ID NO: 511097 - DNA, 300 bp, Stenotrophomonas maltophilia
gtgggctcggctctacaatggcccgctgtatcacccacggaagtgcgcgaaggcctgctccgcggcatggtggaagacacgctggtggacaaggcgggcaccctcggcctggagcggctggtgaaggcgcagatcaacggcatgatgcccggcgtgtacttcgggctgctgctgccggtgctgatcatcgccctgctggtggcgctggagatatgggccgcgaggcggttcgggtggacgcggcagggggcgcccagtgctcctgtagagccgagcccacgctcggctcatcgcgcgtag

SEQ ID NO: 511098 - DNA, 783 bp, Stenotrophomonas maltophilia
gtgggactttatgagaggtggtgcgagtccaccaagaaaaaggacaagcgcaagcactactggacctatgtcgagaaggagggcggtcgcgacgagatccgcgaggaactcgccgagaccatccgctcgcactacgaccgactcgaacggatcgccgatgacgtggagcgactcgggtacaaggtcgcagccaagattctcagcgaggcgatgcctcagacagacaagggtcgttccggcgacctcggcgaaatcctcgcgactgagttggtggaggaagagattggcctgcgtgtccccgtgcgccggcttcgctacaaggacggccgcaacatggctatgcgcggagatgacttcatcggcgccggttacgatggcaatggtgaaaagctctggctcctaaagggcgaggccaagagcaacaagaagcttggcaaatccacggtcaccagcgcccgcaaggtgctcgaccgcgacaatggccgctgtacgccagactcgctgctgttcgtcgccaaccgcctgctggagagcaacgaccccgacgaaaacgcgctgggtcgcgatctccgcgacgaggtgggcctcaagtccctccgtgccgatcgcatcgaccacatgctcttcaccgtatcgggtaacggtcctcacgcctccctgaaggacgacctcgacgctgctgggaccaaccgcgaccactatgtcgtgaacatccacgtcgaggaccatcaagactttatcgcggccatgtaccaggaggcggaagaccttggagacgcctga

SEQ ID NO: 511099 - DNA, 3501 bp, Stenotrophomonas maltophilia
ttggagacgcctgacgagctgacagccttcctcaccgacgcgaccgtcgacggaatcctcggccggctcctctatcgcggtgcggcctggtcgttgatgcgggaagcaggcgtgttaccgcaaaacgcaccgcccttgggtccgaccatcgaaaccgatctcgccgaacatggcttcgctctacttcggggtgccatggctctgcgcgctaagaccggcgcgtctgaccttaccagcaaggctttcgagcgggccgccaacgccttcgaagccctagtgagaaatggtgatcctgaggcgcccgatcgaggtttccgtcgcaccattgccgcttccgcctatcacctagccggcttctcggccgtggcctattccctcttcaacgagacggcagaaaacctcaacaccgcgccgggcgaaacggcgatccgtcacctgatcctgcgcgacctcgaccagctgcgcggcttcgtccgtgattggcttggcaacgaggcccacggcgacgagcagttggccaaggcgcttggtggcgatgagtccgacatcgacgaggttttgtccaccatcctcaatacgacgatctgccgggctctggcatttttcgatttcgcgcttgagacgggcgaagatgagccgatcgaaagcgctcggagtctgctcgccaccgccgtcagcttggccgacaatgccgagaacatcccgttgtggtggatttcaaacctatgtcgccacctgatcgatgacctgtggcagcactcgcttcaccagaatctgccgactgaaccgcccgaggggacggaagaaacataccccgatctgcgccggctgttcatctcctcgctctacgcccgcaagacctccgaggtggagctatggccctcgcagcgagaggccaccaaacgctccacggacgtggcggacgatctggtcgtggccctgccgaccagcgcgggcaagacgcgggtggccgagattgccactctgatgacgttatctttggcacgccgggtcctgatcgtcacaccgctgcgcgccttgtcggctcagaccgagcgttctttccgaaagaccttcgcgccactcgggttcagcgtctcctcgctttacggggccagtggcctttcggcgggcgacgaggacgccctacgtacccgcgagatcgttatcgccacgcccgaaaagctcgacttcgcgctgcggagcgatccttccttgatcgataacgtcggcctgatcgtcctcgacgaaggccatatgatcggaccgagcgagcgcgaaatccgctacgagacgctcgtgcagcgtctgctacgacgcacggacgcagccgatcgccggatcgtctgcctctccgccatactgccaagcggcgacgaactggacgatctcaccgcgtggatacgctccgacgaaccgggcgcaccagtgcgttccgactggcgtcccacgcgccagcggttcggcgctctcacatggcgcggcaaggacgcgctgctccgactcgacctcgatgacgatggtccctttctcgagaagttcgtcgtcgagaaagccgcattgggcaaagagaagaaaccttatccacgaaagaactcgcatctcgccttgtttgcggcgtgggagttcgcgagccaaggcaagcgcacattgatcttttccacccaggcaaactgggtcgaaagctacggcaagcaggtcgtggacctctgcaaacgagggtacctggagtcgttgctagaggacgaggcgttggttgcacgtgccctggaggtcggcaaggaatggcttggcgaggatcatcccgccgtggccagtctgaaggcgggcgtcgccatccaccatgggcggttgccgagcccgttcctgcgcgagctggaagttcttctgtccgagggggtattgaaggtcatcgtagcatcgccgacgctctcgcaaggtctcaacctcaacgctgcagtactgctggtgcccgcactttatcgggcggctgagaagattaaaggcgaggagttcgccaacgttgcgggccgcgccgggcgcgccttcgtggacgtcgaaggcctcatcgtccacgtcatgtttgacaagatcaactggcgaaaaaaggagtggggggagatagttgcctccgccaaggcccgcacactgaaaagcggcctcattcagatcgtcgccgagatccttgagcgcctgtcgcgcgagggcgtcctgggtcgcgatgatgcctgggaatatctcgccaattcgcgcgaagcttggagatcgcccgaggaagaggcagcggtggctgagcgtctcgccaccgccgtggaatacgagggcgatgacgacgacgatgaaggtggcgacgacgacgaggagagcatcgatgaggagccgctgtcgcagctcgtcgaacgcctcgatgcgacggtgttcggtctgatcgaagccctggacgccgatcgcgccgacctaccgaaactcttggacgaagcgctcaaaggatcgctgtgggcgcgtcagatcgcccgcgaggaagaggatattgcgcctttgcacaagaaggtgttcgaggcgcgcgccgacctcatttggaaaaccactacgacgcaggcgcggcgcgggcatttcgcaatgggcgttgggctcgaagctggcctctctatcgacgctatggccgacgaactcgccgagctgctcgaccgggccgacgacgctgctctgagcggcgacgtcgacgaactcgccgacgcccttggcggtctaggcgagcgcctgctattcatgcgtcccttcatccccgacaaggcgaatgcgctgccggcgaactggaaggtcatcctgcgaagctgggtgtccggcgaagaggtcgccaagatcggaccgcagaacatgcgagcggtcgaagaggccttcacctatcgcctggtctgggcgctggaagccgtccgcacccgccgcatgtccctaggttggtcgccggacacggtggcgggcggcgcagcggcagcggtcgaaaccggcgtcccgcagttcatgatggcgatgctgatccgcgccggcctgccgtcacggcgcgcggcgatggcagccattaaggacgccatgcccgtcttcgtcacaccggcggagatgcgggcctggctcgaatccgacgagattacggcctacaccgacgccggcgactggccgacacccgacgccgccgcgctatgggcgcgcttccgaactgaggctctcagtggcggcatccaaaaatggtcggttgaacgctacaagcgcctgctcgacatcgaggccgtcccgcccgccggcctgtatcggatcgtcaccgacgagggggacggacggacctggctggcaacccccgactaccagcgggtcgcctcgttcaagaagccggcggtcgatcctaaacccagcctcttttcgggccggctgccgggcaatactaggctcgtggaagccttgcgcgtcggccgcggaaaactgcgctggccgcctgccgatgcgtaa

SEQ ID NO: 511100 - DNA, 705 bp, Stenotrophomonas maltophilia
atgctctatgcctgggtcggcgacgagaagcgcgcccccgtcgcgaagggagaacggacaagctgccgcgactgcggcggcctgctcacggccgttatgcctgtcgagaacacgccccactggcggcacaaggccggcgactgcgatccctggagtgagccggagggtccctggcacctcggctggaaagaactctttgacatgtcctgccgcgagatcgctctgcgcgacccggcaacgggagagttgcaccgtgccgacgtcttggttggtagaggcaccccgcgcgcgaccgttctcgagttgcagcattcctcaatcagcgaggacgagcgaaacgcgcgggaggccttctatcggcgtgagcatcggatgttctggctggtccacatccacagcgaaagctcgttcttggggacctatttcagcatgtcgcttgacttcagctcgcgcgtcatcaatctcgacggcaaggaatttgcagtcatgcgttggatgggaccgaacaagcagttcatcgagaaatggaagcgcgcaaacgcccacgtcttcttcagtgctggcccccaaatcttctaccttgccagccctggcgtggccgctcgcttgggaggccccgtccggcgtggtgagttcgctctctcctccttgactcgcgatgaatttctgcgggccgtccgctgggaggatagtgccccttcctag

SEQ ID NO: 511101 - DNA, 888 bp, Stenotrophomonas maltophilia
atggatctcaatctgctggtcacgctggaggctcttctggccgaacagaacgtgaccaaggcggccaatcgccttcacctcagccagccggcggtgagcgcgcagctcagccgcctgcgcgacctgttcgacgatcctctgctgattccggcacaacgaggcatgacccctacggccaaggcccttgaactgctcgatccgctgcgccatgccctggagcaggttcgcgccacgctggccgagcaccgccatttcgacccgggcaatgccaagctcaccgtggccattgcgtgcaccgactatctccaggccgtcgtggcccgccccttggtggtggcgctgcgcaagcaggcgcccggcgtgcggattgccttgcgccatcttgacccaccgcagttggaagcgcagatggtcaggggcgatgtggacttggcgctgatgacgcctgagcacggcccaggcagcctgcgcgcacggcgtctattcgatgaacgctatgtgctgatcggtcggaaacgccaccccggattgcggcgcgggctaacggtagaggagttcgcgcgtctggatcacgtcatcgtctcgctgcgcggcggcgactttacgactccggtggacgatgggttggcagcactgggctaccaacgcaacgtggcgctgtctgccgcgtcgtttctgatcgtgcctgagatcgtcagccactcgaacttcgtggccctggtgccggaacggctggtgcgcgatcgtcgcgatgaactcaagatcgtcgagtgtcctttcccggtgccgggcttcaccgtgagcatgctgtggcatgagcgaaatcatggtcacagcggtcagcgctgggtgcgcgaaaccgtgatggaggtgacgggctcgctgtag

SEQ ID NO: 511102 - DNA, 264 bp, Stenotrophomonas maltophilia
atgaggatgaccatcccattcttgttggctgcgatactgactggctgcggcccgactgaaacgccagagaacgagaacgtgccgaccgttgaagaactggcgtccgatcccgcgcgcctgaaagagctgcgccagcaatgcaagaccgatcgtgccgcgctgggcgacgtactgtgcaaccgggtggccgaagccacgcgcaagcggttctatggtgatggcaacacaccctatacgccgccggagagtccgcctaagttctga

SEQ ID NO: 511103 - DNA, 843 bp, Stenotrophomonas maltophilia
atgacgaagcatcttctcttgcggaatccttttctccacgcagcaggtcttggaaaatttcaagggctcttgcgactatttgcagctttggtctttttgagtatgtcctgccaatctttcgcggctcaagctgcttatgaagggtttcaatcgcctgttggaattacagccattcctggacgatccgtttacgtaaccgattggtcggccaatacggtaacgcgcattgacaaggatggaactcgaacggttgttgccaaggaaattccttctgcggcgggtttggcgctggatcagcaaggtgctctgttcatagcgtcctattcggctgactatatcctgcgacttgatcgcgacggctcgacccgtcgcgttgcggagaatctatccacgcccaccggcatctctttcgctcgcgacggccgcctgttggttgccaaccggggcgcaggacaggtggtgtctgtggatgtttcaacgggacgtgtgagcctgttggctgacggtttttcgctgcctgtcggtgtggtcgaaatggaggatggcagcatcgtcgtttcccagtacggcggccgagtgacccgcgttgcacgcgacggcgcgcgccaagagttgggagctccgttcagccgcccgggtgtcggtatcgccgctgatggagcgaacgctgtgctcgtggtggacaacggcgcgagcctggtgcgcagggttgcgtttgacggcagcacatcggtcgttggtggaaagctttccggtagtgccgtcgcacttggcagaggcattgaaggtgagtggcttgccggtgcgtggggaacgggcgccatctatcggttgcagccttag

SEQ ID NO: 511104 - DNA, 384 bp, Stenotrophomonas maltophilia
atgaacccccaagatcgctacgagcgcggactcgcaaaactgagagagatagacggccaagccggtgagcatgtgctggaaagtctggacggcatcgccccggacttcgcacgttatttgatcgagttcccgttcggggacatctattccaggccaagcctagatctgaaaagccgtgaaatcgcggtggtcgctgcgctgacggcgcttggcaatgcggttcctcaactcaaagtgcatatccagggcgccctcaatgtcggcgtgagtcgtaccgaggtcgtcgagaccatcatgcagatggctgtctatgcgggtttccctgccgcgctcaacggattggctgccgccaaggaagtctttgcccaaggagagccggcatga

SEQ ID NO: 511105 - DNA, 264 bp, Stenotrophomonas maltophilia
atgagcgggccacgcagcaagcgcgtcggcatcggcgcacgtccgcccgcgaatccgcacgccgaggcgtggattcgccagggcgacgccgatgcgctcaacaagggcgacctctacacggctcgcctgacgctcgacattacgcccgccatgcgggcgcgcatcaaggtgtcggccttcacgcgaggcgtgaccgtggccgaactgctgcgcggcttgctggagcgggagtttcccgacaagcgcccggagaacctgccatga

SEQ ID NO: 511106 - DNA, 639 bp, Stenotrophomonas maltophilia
atgatcgtcgctctgctcaatcaaaaaggcggcgtgggcaagaccacgctcgccacgcacatcgcgggcgagctggcgatgcgtggccagcaagtcatcctgctggacgccgacccgcagggttcgtcgctggactggacgcagcgcagaagccagcagggcttgccacggctgttcagtgccgtgggtctcgcccgcgaaacgctgcaccaggaagcgccagaactcgcccgccgcgcagatcacgtcatcatcgacggcccgcccaggatcgccgccctggcgcgctccgcgctgctggcggccgagcgcgtgctgattcccgtgcagcccagcccgtatgacctgtgggccagcgccgagatggtggcgctgatccgcgaagcccaggtgttccggcctgcgctgcgcgcggccttcgtcatcaatcggcgcgtcagtaccaccatcatcggcagagaagcacggcaatcgctggccgaacagccgctgccggcgctgcgcagcgaagtgcgccagcgcatcgtcttcgccgacagcgtggccgctggccggctcgcccgcgaaaccgcgcccgacagcgccgccgcccgcgagattgccgcgctcaccgatgaactgctgcggtggccgacatga

SEQ ID NO: 511107 - DNA, 858 bp, Stenotrophomonas maltophilia
atgtccagcactgcgctgcccatgcggcagcggccgttgcaggagcgcgaacagctcgacctgttccgcgccttgcccggcgacatggcgccgcgcgacagccaggatttgatggcctatccgttcttctcgctcggcaagtccaagcgggtcaagcccatcgacttccgtgcgggcaacgtgacgatccgcgtggaaggcacgcaggagcacggcatcgccacgatttgggatgcggacgtgctgatatgggcggcctcgcagatcgtggaggcgaaggacgcaggcttgcgcccgtcgcggctgatgcgcgcgacgccctacgagatcctgcgcttcatcgggcgcggcaagtcgctgcgcgactaccagcgcctcaaggccgcactcgaccggctgcaatcgaccacggtggccacgtccatccgcgagacgaccggacggcgcctgcaccgtttctcgtggatcaacgaatggaaggaactggccgatgccagtggcacgccgctgggcatcgagctgatcctgccggactggttctatgcgggcgtgctcgacgccgccctagtgctgaccatcgacccggcgtatttccggctcacgggcggcatcgagcggtggctgtaccgcttagtgcgcaagcacggcggcaagcaggcatacggctggcagttcgactttcgctacctgcaccggaaatcgggcagtaccgcgaagccctacgacttcgcctgcgacctgcgcgcgcttgtagcgcggcagtcgctgcccggctacgtcctgggcatcgagcggatgccggacaacggcatggagctgctgaccttccggcccgtgccgcatacggcacggggataa

SEQ ID NO: 511108 - DNA, 282 bp, Stenotrophomonas maltophilia
atgcgtcccgctcccttgcggcctgccgccgctgtctcgaccgctgccgcgcagccccaacgctacctcaccaacgatgaagccgccgagtacctgcggctgtcgccgcgcacgctggaaaagcagcgcgtgatcggcggcggcccgcgctttcgcaagttcggccggcgcgtcatgtacgccgtggccgacctcgatgcctgggccgccgaccgcagcttcgagacgacttctgatcccgaatacgccgagcaccactcggccgacagccgtgcgcgctga

SEQ ID NO: 511109 - DNA, 759 bp, Stenotrophomonas maltophilia
atggtcgatccccatcacgtcacgcattggtatccaactgcggcatacctctacgtcttgtggctggatgcgctcgcactggcctgggaatacctgcgcaggcatcccgactaccggctcgactggctgcgccgtcaccgccgacctgaagcgcatcgctggggtttgcgcctgctggaagaccccgccctggatgcgcgcgacgcgcatccggcctggctgcccggccatgccgccgtggtgcagctctaccccgatactgatccgccgcaggatgccaccgccttcgcgttctggcacatcccaggccacaaacagctattccacgacggcaagaagctggcgctgatcgcacgcagcccaggccattgcctgcgctttgccctggcgcccggtctggaagacggcatggccgtggcctatgcccggcggggcggcactgccgcggctgtgcgcggtcatgcgtccggcacggccttcgctgccaccacgcccaggccaacaccctccgcgctgttggagctgcacaccttgcaggcgctcgacgcgactctggcgggcgcgtccttgcgcgatgtgggcgaaggactgttcggtgccgacgccgtggccgactggtacagcgacggtggcctgcgctcgaaggtgcgccgcctggtacggcgcggcgatgcgctgatgcgcggcggctatcgccgcctagcacagcttccgccgcttgagaagggccgttttgaggacgacgcaaaacggccctga

SEQ ID NO: 511110 - DNA, 1749 bp, Stenotrophomonas maltophilia
atgagctccgtgctagttgcccagcagagtgccaggggacttgccgcccggcagtcggccttgccgggactttgcccggtcgcgcaggctgtcgaagtacttgcaaccgacgcaggcatcgaagcgcgcggtgccgtatttacacgccgcgaaatcgtcgagttcctcctcgatctctgcgggtataaggccgaccgtccgctgcacaaactcaagctccttgaaccgtcgtttggcggcggggacttcctgctgccggctatcaagcggcttctggcagcgtggaacacctcggatgatccgcgcatatcggtgaaggctctggcaggcgctattcgtgcggtcgagcttcatcgagagaccttcacgcaaacgcgcggccaggtcatcgacttgctgtcccgaagcggctttacggcttcgcaatccatcgcgctggctgatgcgtggctggtcaatgacgatttcctgctggctgatcttcccgaacccttcgatgtcgtgatcggcaaccccccttatgtgcggcaggaacgggttcccgatgtcctgctgacagaataccgctcgcgctacacaacgatctacgaccgggccgatctctacatcccgtttatcgaacggtcgctgcgatcgctgacgaatggcggcgttctcggatttatctgtgcggaccgctggatgaagaaccgctatggcgggccgcttaggaacctcgtttccgagcagttccatctgaaagtctacgtcgatatggtcgatacgccggcctttcattcggaggtgatcgcctatccggccatcaccgtcattgcgcgtgagcgcggcagaagtacgcggatcgcccatcgtccgcccgtggaggccaaggcgttacacgcgcttgcgttggatctgacttcatcgcacctccctgaaaagggcagtgccgtgcagttgattgacggtgtggcgagcggcgcggagccgtggattctcgattcatccgatcaaatggccatcatccggcgtcttgaggcagcctttcctcttctcgaggatacgggctgcaaagtcggaatcggcgtcgcgaccggagcggataaagccttcatcgggccgatggacgaactcactgtcgaagaggaccgcaagctgccgctcgcgatgacgaaggacattgcggacggcaccgtgaagtggcgcggcctgggcgtcgtcaacccgttcgccgacgacggcaagcttgtcgatctcgcgcgctatccgctgctcaaacgctatctggagtcacggaaggaacagatcgccgggcggcattgcgcgcaaaaagtgcctgccaactggtatcgcaccatcgaccggatcacaccgtccatttccgaaacgccgaagctcctgatccccgacatcaaggggcaggcccacatcgtttatgaggagggcaagctctaccctcatcacaatctctactacatcacggcgagccagtgggacttgaaggcgttgcaagccgtcctcctttcgtccgtgacccggctgtttatcgcgacctactcaaccaagatgcacggcggcttcctgcgctttcaagcacagtatctacgccgtctgcgtctgccgcgctggagcgatgtgccgcaggccctcaagaccgcgcttatcaacgcagccgacgcgcgcgacctcgcggcctgcaatgccgcaacatttcaactgtacggattgagccaccaggaaaaggcggcgctcgacgggaacggggactaa

SEQ ID NO: 511111 - DNA, 690 bp, Stenotrophomonas maltophilia
atggcgttctggggaaatcgagagaaggcgcggcagaagcaagtcgaagctggggtcgtcgatcagggcgagcgtgccagtgtcaccggtggcaagaacatggatggattcgtcgcgctgataaaagacatcgtgcgcgccaacggccttgctcatgcacaactccatttggaacgtcgcgtcctcacactgccgggatatttccggccgacaaagctctgggacttactcgtcatgaatcaaggccgtctcatcgcggccttcgagttcaagagtcaggtcggaccgtccttcggcaacaacttcaacaatcgcactgaagaagccatcggtacagcgcatgatctgtggacggctttccgcgaaggcgcgttcggcgaacagaccaagccctttatcggctggctgatgctgctggaggattgcccgaaatctgccacgccggttcgggacatgtcgccgcacttcccggtcttcccggatttcagggatgcgtcctacgctcagcgctacaacgtcctttgccgaaagctgatgcaggagcagctttacacagtggcgtgcatcctgacatcaccgcgcaccgccgctacgacaggcgactatgcggagctttccgaaatgacggggctgcgcaccttcgtaacggagttcgctgggcacgtcgcagccgaagcgtcgcggacctaa

SEQ ID NO: 511112 - DNA, 2193 bp, Stenotrophomonas maltophilia
ttgcctatcgtcctaaacgctttccctctcaaaactcccgaactggagcttgaagcccgccaagtcccttatgacaaggagacgctggacggctttcgcgcgacgcacggatcgacccactcgttccgccggcagggcgacaatatcctgatcttctctggagacggcaccttccccgtgtccggcacccagcaggctatcgcgctcaaggacaatttcggcatcttcttttcgctggtgaaggacggtctaacgcggcactttgcgggtctgggccgcaatccctccggcttcaaccctatcgaactggtgagcgccaggccggaagacaatcttctggttccgattctgggcgatgcttaccccttcaaggtctgcgctaaatacgccatcgacacgcgcaccgttctgggccagccgtgccttgtcattgattgcacaacgcgccgggtggtcaaggagaatggcctgttcttcctcaatgccgggttcgatctcactggccgttacgtggtcacgcagcaggaggacggatacaggaaactcctgggctcggtgaacgcccgcaagggcgaaacgctcttcatcacgcggcctgacggcgaggtcgttcaggccgaggcgaaagacgtttatctggaggccagccgcgagaacttcgatgcctacatcctgcatacgcacggcacgaagaaagaagccatcgtcgagggtatccggcaatccgtctccatctttaatggcggtgagaacaagaaagcgcgcatcgacacgctcaagaagtacatccagtcgaagagcattactctgatcgacggaactcgcatcgagatcgaagattcgcccaacattcagacggattgcgggcagatgccaaagccggtgttcgttttcaacgacaacggcgaagcggattgggccgaaaagggcctgacccagagtggcccctatacgaagcgaaccttcgatagaaacgatccctcgatctgtgtgatctgcgcccagcatgacaagggtcgcgtcgagcagttcgtccgcaagcttctcaaaggcatctcgaacagcaagtatttcagcaacggccttgaaggcaagttcacgctcggaacgagccatgtcgaagtgttcgcgacggcgaccgacagcgtggaggcgtataagaacgccatcgaaaccgcggttcggaaaaaagcggatgacggcgggcggtgggacttggcgctcgttcaagtccggcagtccttcaagaagctcaaggtcacggagaatccgtactatctcggcaagagcctcttcttcctgcatcaggttccggtacaggacttcaccatcgagcttctatcgcagtccgattactcgctcggctactcgctcaataatatggcgctggcctgctacgccaagatgggcggcgttccatggctgctcaaatcctcgccgacgctttcccatgaactcgtcatcggcatcggcagcgcgaatatcgggcaggagcgcggggccgataaccagcggatcatgggtatcaccactgtcttctccggcgacggcagctacatcgtctcgaacacatccaaggccgtcgtgccggacgcctactgcgatgcgctgacctcggtgcttagtgaaaccatcgagaaaatccagaagcgcatgaactggcagaaaggcgatacgatccgcctgatctttcacgcgcaggtcaagaaattcaacaaggacgagatcgcagccgtgcgcgccgtgatcgacaagtaccgcgaatatcaaatcgaatacgccttcgtgaaaatctcggaagatcacggactgcatatgttcgactcggcgacagcgggcgtgcacaaggggcggctcgctcccccccgcgggaagaccctcaaactctccaagcatgaaatgttggtctatctgatcggccagcgcgaattgcggcaggacacggacgggcatccacgcggtgtgatccttgatgttcataaggactcgactttcaaggacatcaagtatctgagcgcgcagctctacagcttcgcctcgcattcctggcgcagctatttcccgaatcccatgccggtgacgatcagctattccgacctgattgcccggaatcttggatggctcaaccagcttcctggctggaacgactcggtgatgatcgggaagatcgggcaatcccaatggttcctgtag

SEQ ID NO: 511113 - DNA, 1158 bp, Stenotrophomonas maltophilia
atggttcctgtagaaaaagacaatgcgtaccagttgcgcgagcacctgcacctcaaggttattgagagtgcgcacgctgatccgttcaaagcctgctttctgtatttcctaggattgtcgaaggacgacccgtcatccttcgacttttcggcgctctccttgtatcaccgctgtgcgatttcaggcctcggcgttctcaacgaaaccgtctccagcccagatgtctcgcgcctgctcgggcaggccgcaaagatcgactccacgccgcgcccatgggtttcggacgtattcggtgtcatggccgtgaaatggctggtcgggcggatgaacgatgcgcgtgtcgcccgcgagttcgagaattggatatccggtttccttgcgcagcaggcgggcggtgaccatctcaatctcttcgagaaagatatcgcagcgtatgtcctcaacggcgaatcctccatctatgccagcgcgtgcgtaccgctctttcttcactaccggacgatacggcggatcgacgatcaccagaaccgcatggccctgatcggccgtttcatgggcgagttccgggcgcaggcgcaaggtggcgcctcaacggcgctcttgagtttgatggtttacgttttcgaccaagtcaatcaggacgtggctgccgtgccgccaaaaggctggagtctcgatgacctcttggagtttctggagcatatccctgttggcctcaaacgatggacgtgggaggatgcgggccgcaccaggggcgcggaacccgtcaaatggccggtagagaacgaataccacgtccagaatcttctctattttctgctcgggccgatcttcaacgacatcgcagatgaagtgaacctccagcccgtcggacagaagaatccgcgcattgatctttacctgccctcgctccacacgatcattgaggtcaaataccggaaggacgtgaagaagtccttccaatcgcttatcggcgagattgccgaagacgcttcgctttatcgcgccgatgcaaaatacaaagacgcgcggatcgtcagtattctgtgggactgcacgcgcgcgacacaagaacatgccaaattcaaggaaggcgtcttaaagatcgacggaattgatgggtgtgtagtaactaacgcgccctcaactatgaactag

SEQ ID NO: 511114 - DNA, 573 bp, Stenotrophomonas maltophilia
atgcggaccgaaatccatttcccgcagccgttcgagaacacacccaacagtgcgaagatcaccatcttccgcgcatcggggattgctgcggagattgactacctcagccacatcatcggctatgtagggaaggacgaagatcgattaaaggatagagcgatcgagatcaccgatctctacttcgcgggatcgtcgctgcacgtgatgcatcccttcgattgcctacgcagccgtctctgcaacatccacagccttccaagcaagcgcaataccattcatgtggcgcaagcccacctggcattggatgtcatgagggcgttcatcctcaaactgacggaagaagagtccgacacgagagcgcagatgtatccgcttcttgaggaaatcatctccttggcctccagccgcgtcggcgtcgacaccttccatcatttcggaatcgacgttctgtcgtgcctaccagtcgatcagctgccggagcccttcgttaacaggcgactccccctagcccaggactacatacaccgccgtcgctttggaaagaagggcgggaaaagggtgccaaaacgctga

SEQ ID NO: 511115 - DNA, 129 bp, Stenotrophomonas maltophilia
atgctctcgggcgtcagtggcagatccgaggaaatccacgtctacggtgacaccgcctgccaacgccgtcggcagcggaacatccaatgcattcacccagagtgcaagagcctgtccgcccaccagtag

SEQ ID NO: 511116 - DNA, 177 bp, Stenotrophomonas maltophilia
atgaacgccaaatttcacaagtctgtcgacgcatcccccagcctgaaggctctggacgatgctcgccgtgcacgtgaagttgccagctacaagaacgatccttcccgtcccatgcccgtcgttttcaaggtcagggagaatggcggcaggatcgcgtggccgcataagttccggtga

SEQ ID NO: 511117 - DNA, 5016 bp, Stenotrophomonas maltophilia
atggcgccttttggggactctgtggtcgatctactaaagcatgggcacgtttggattcaggagccgccgagtgggcccgagcctggggcgccagttgagacgcgtacgcagagtctccccttgggcgaattgtcttggcaaaacttcgaacggcttgtgctcaggatcgttcgcagagaaagtcaagtaattgattgctctatttatggcgcgccgggtcaatctcaaggcggaatcgatattattgcggtgcgttctggggcttcttcttcgaaagtgtgctaccagtgcaagaaggtcaatgatttcgatgcttctgatgtggcctccgcagtggataaatttatttccggacactgggcaaaggaagtggcggaattcgtattgtgcgtatcctcgtcgcttgagaaaactcagctgcagaacgcactggataagcagcgaaaaaagctggcggctttgggtataggattttcggtgtgggatggtgctgcggcaggcgggatatgcgagcgcttaaaagctcactgcgatatcgtcgacgacttctttgggcgctcttgggtttctagttttaacgggaaagacgctgcggatagtctcggtgatcgactgaatggttatgaattcgggatgcttcgatctaagcttgcgaatctatactcagttttgttctcacagcacgatcctggctttaggacggatcgcaatgaaaatatggactatcgtgatcgatacgtggtgcccgatattatcgagcgcactcagattgatacgggtctattcaatcagtccgcgatgaggggtttgagtcaagaggaagatgctcttgggatctctagaggtcaggaagtggtcgggcctctgaatgccaactctacaatgtatgagatcaggaagcctgtctttgaatggctgcgtgatcggggaaggtgtgttgttcttggtgagcccggttacgggaagagcgcactgctcagatacttggccttgtcaattttgaggccagataagctgcaattcgatgttttgaactttggttacttctcacgcttgcctatatggatatcgttctcccggctctcggcctccattggtcgcgagtcaggtgttagcgttgacgcattctttagagagtggcttcagcagtatggtttcggtgatgtatacccgctcttcaggcgagctgtgaagggagggcaggttctgctccttgtcgacggtttggatgagtcaaccgaagaatacactggtcgtgaggcgcttgatcgtgttgtgaccttcctggaggctagcgattcatcaatcatctgcaccggtcggcctcaaagctacggtagcctcggcataccgccttcttgggcaacggctacgcttgcaccattaagtgaaaagaagatagaagagttagctactcgttggtttgaatttctggagtcggatccagaggcatcgttgcaagctgcctgtgaaaatgaagatttcggccggcgtcgggcacaagcattcctgcgcgaggcaagtagtagctcaaggactctggagctggctcgcaatccgctactttgcatgtcgttgattcagttgtttagattctcccatcagcttcctgaggctcgtgtggaagcatataaacaaattgtagatctgttgctatcaaagcatcctgctgcacgagcacaagcgagtggcaccactttgccgatcagttctctggggctgaagtctgcagatcttagagaaatgcttattcgattggctagggagatgcaatcgcaaccgacgcgatctctctcggaagagcggtgcgagcaagtgtgtacagattttctgatggacgacatgtatggattaggcgagcctgtggcgagggcaaggagaattgccgcggaggcggttattcaattgaatgaccagtatggagtgcttgttgagcgatctcccaaggagcttagccttcttcatttgagtattcaggagtacttggctgctgaatcggtcgcgcgcgagtcacatgaagatcagattgcatggatgactgatatctggattagtcctgcatggcgagaaactctgattgcctggttcggtattctgggggcgcgtggagaaatggtgctctctggtcgtgcatcacaacgattggaagatctgggggagggcaatgaatggcttcgtgcccaatctatcgagcttcgcatggaaatagcaatatcggacttgggacttccgattggcgaagcacgtcgaatcgttgagcttgccgtcagtgaggtggaaaactctcccatcgtagagttgcgtgtgtccctggccaagaacattgcaataggcgcactgggaacacgtgtgcgttcagagtgtcgatctgccatccggcgttggctacctggtcagccgagttataagcggagaatgctcattgcgtcctttaaggattgggcaccatctactgatctgtggtccactctagttcgtgcccttagagacgaagatgtcatgtgtcgacgcgccgctgccgagaccattgcgcacgtcttcatgaatactgatgaggcgttggcggccttggagagaatggcaatcgttgatgtgcggcctgaagtgagggccgctgcgctgtatggattgaccgccagatcggagtggcggacgcaagctattggatgtgcaggtgccaacagaagaacagccaacgttgatctgtttctggggacggtgcgaactcgtgtcaagcaagggctacaaaccgccgaagacatcaatcggatattgatgctgtgggatgctgattctctggaatttcaagagcgacgtgatgctgttggattactgtgcgaagggtggccgcaggatctaagactacgcagacttctgttggaccgattgaacgaacatggggctggatttgaagtcgaactgccacttcaatatttggtccgctgttgtccgggtgatactgaggtggcggagacggttgcggcgatggttaggcggtttggtcgaatgctaacgcttggtgataatcaagtgtgggaagacctttcttcgggatttcgtggtaatgccaacctgtcctcggcgattagagattcattgagtgcggatcgggagaggtacaagaagactctatgggatcctcggaccgcccatgcaatggttataattggcgatgacgcagctaagcgtgagctcttggagtcttatgagttggcggacatccgagggcgatattggatcgcgttcgctcttcagcgaggatggggagatgacagtgctgtgcgagagaggcttcagtactgggcagatggaagtattgagatggctgcacccttggggtcattggcgcgagtccttttctctgaatcaaccaaacgactcaagtggcttcgcagaatcgcgcgcgcttccgctgtgactagagaggtcggagccgctatggctctcctggaggaatgccctgatgaagaaactaaggagttagtaagagatctgttggataaccccggggtatggtattaccatagaacggacctccaggcgcggtttgccagcgcatacccggacgaccctaagagcttggagataattgaggattcactatctaatatcgatggtcccaatttcggaagaattactgcgatgttcgagaacgttccagacctgcggtctcgacttctcgacgccgcagcgccggcgccatctgatgtaaggatcgctgttgcaaccattttccgtgagcgagccatcgagcttgactccgtggttgagttgactccgttgccgctagcggaagaggatagtgcggttagagcgagttatctgatggcacgcgcgcgcgctgcaaaaggtgactccgtactcgctgatcagttggagcaattcctcatgcccgagttcaacgccaccggcacgtatatggacatgagacggcggacagcgttggcggcgcttctggagcttggggcgtattccaggatagtttctcaatttgcaggtgacggtggaatcagatggactcacgggcttatcgactggcttggacatgatctggtttcaccgggtgctgtgattgagcattgggaggcgctcaatccattgctgatagaaaataatgcgcgggagaatgagctccctgtggcggagtttgtgcgttctggatacgacgcactttttgaacgaacccctgcattagagcgcctacttggggactactttgagacacaagttccggatctgatcggagctgcctactttgatgctttcgcgcgtcaccgtcctagaagcagatcattgcgtctgctattggttaattccattggaagaaatggtcgtgctgacgtggcatgcgcagccgcacgcgtgctcgctagccatttttccgggaatgacgacatttggggcgagctttcgactgcgatcagaagcccgcaggacgtttcgagtgagtttgccgatggtgtacttggacatttggcgctaggttggccggagggaatcgccgccgcttgggcgcgttcgctgaagtcagctgagctagccaagcttggacttcgaaatcgactgcttgtagcgatactcaagggtagttcagttgaagcggagagtgccgtcattgagctcatcgaggagtccatggaatcgtggcgatatcgcacggaggatgtaaatgttttgcatatttgggcgaaatgggatggagcaaaggcgtcgcttgatcgtttggcaaagtccgacaattcttcgcattcaatcacggctatttcgctgctgtcgattgcggggagggatgtcgaagggcttattgaaacgctgatagatcgctataacctccagttttcaaaatcttttgcgacgccggaggatggtctcaatgctgcactggggcgacaggcttcttgggctatttcggtctactcaacacttaaggcttgggccggcgtctctgggagagtggctgcgacgggcgccgcaagtaaccatgggtatcgcttcctggccagtcatccagcttga

SEQ ID NO: 511118 - DNA, 969 bp, Stenotrophomonas maltophilia
atgtctgactgctcgtccccggcgccggtgaagccggctcgccggagacgcgcaggcctgtgggtcgccgccacggcggcggcctacctggcggtcctctggtacatcgaccgcgaccgcaacatcctttcgcagctggccgcgcaggccagcacgctgctgctgtgcagcgccctggtgctggccagctatgtgttccgctaccagcgctggcgcgcggtgctcgccgcacaagggctgcacccacacagctggggccggggcgcactggcctacctggccggctttgccttcaccgcctcgcccggcaaggccggcgaactgctgcgcatccgctatttcgactggcagggcgttccggccagtgccaccctggccagcttcatcttcgaacgtgcgctggacctgctggtgatcaccgcgctggcgatcggtgcggcccacctgattccggccttcggcgcgctggcggcgatcattctgggcgtgctgctggtgctggccctgctgggctgctggccgccgctggcgcgcaccgcgcatcgcatcatcgagcacctgccgggttcgccggtgcggcggctgggccacttcctggtcagcggcgcaggcgcccttggcccgctgttgcacgtacgcctgctgttgcccgccagcctgcagggcgctgccgcatggttgttgaccgccactgctttcgccctgctctgccaggcgctgggcattgccctgccgtggccgttggcgctgggcatctacccgctggccatgctggtcggtgccctgtcctttgttcccggcggcgtgggcaccaccgaggcggcgatcgtggtcatgctcggtgccagcggcgttgcggtcgataccgcactgaccgtggccatcggcatccggctggtcagcctgtggctggcggtggctgtgggaatgcttgcaatggcgtttctggagctgaaagccaggccatga

SEQ ID NO: 511119 - DNA, 1887 bp, Stenotrophomonas maltophilia
atgctggcaggctatcccggtacgatgggcatcaccctgcgggcagtgtctctggacacagatgcttgggccgaactgaatacgcctcagcccggcgagcgctggcagcgggtcgttgtcgatgtaccgaccgccgtccaatccggcgcgtttgccattcgcctggaggataagtccagtcaacctttcggctgggccggagtcggcgcgtcccgccagcccctgcaccaagcactggtagcgggcgcgctaccgctgtttgccgccgtggtgcttgccaactgctggcttctgctagtggcgatgctgctgccgggtacaggtacacctcagcaacgcctgctgaacgccctgctcgcagccggctgcgtctggatgctggtcttcaatatgttcgtactgtcgcccccggtgggaaaagcgggggcggcgctcacgctgctgctacccttcctgacgctgccgttgcgccgacaaggtctgcgtgcggcgggggcggatgcggttgcgctccagcgtcaactgctacccactctgctgctgagctgcttggtgctctggatcggcttgttccccttccgtggtgacggcgggagctggaacgacgccgcctcgcgctggcgagatctgccgatggattcgtggctcccctatgtcttcggcgaaatgctggccaagggccacttggatgtacccatgatcggcgactggctgagcagtgaccgccctcccctgcaggtgggactgtatttgcagatgcgcggcctgctgccaagtcctcatgggcttacctaccaaggcgtttctacctgggcccaggctctggtgatggttccgctgggaatattggcgggcagattggttcatcggccagcgcaggccatttctctgtttgtactcgcgctgtcgccgctgatgctgctcaacacgctgttcgtctggccaaagctgatcgctgccaccttctgcctgatctactaccagtacctcttcccgctggatgtgcacggcaggccgtggatcaaggcgggtattgctgcgtcgttggccctgcttgcacatggcggcgcactgttcttcctggtcggcgtgaccgtactccacttcgcctggtatcgaagggacagccttaccttgctcgtacggaccgcgccggtagccgcgctgctttatcttccctgggtagcctaccaacgcttggtcgacccgccgggtgacaggctgatcaaatggcatttcgctggacgcatccaagcagaccaagatacggtactgcaagcgatcagcagtgcgtatgccggccttacactaggggaatggatatccggacgcgcccacaacctgtccaatatcatcaagggcacgttttcgggcccagtcgatgcctttgctatcctcttggggcggaacgttgattcgatgtcgcaggtcgtgaaccagagcttcttccatctcggctactcaatgtggttcgcttcccccctgctgctggttccctgcatcgcactgctgcgccggaatgccgatccggcgttacggccggtcgtccaggcgctggcggcggcggtggcctccctcctgttctggctgctggtcatgttcgagagcggctccaccctcatccaccagggagcctacgccactgtgctgctgctccagatggtcatcctgctggccctgcgccgcacgcttccttggctgttctatgccgtttcgatcgggaatgtggccgtggccatctctgtgtacatgcttgatcggcagttcctgaccagcattcagaccacgtacgtcgtggttacgttgctgctgacgggcgggctgttcgtggccctgctctatgccgctccgcacggactgcagcccaccacggaggcgccgaagtga

SEQ ID NO: 511120 - DNA, 1296 bp, Stenotrophomonas maltophilia
atgagcaagtacgccatcgtcggcgcaggccccatgggcctgatggccgcagtccgcctcctcgatgcaggccaccaggtcgacatttatgagcgcgacgaccgcatcggcggcatgtcggcagcctttgatttcgatggcctgtccatcgaacgctactatcacttcatctgcaagaccgacgacccgctgtttgcactgctcgaccgctacggcctgagccacgcgctgaagtggaccgataccaagatgggatatttctacaacggccgcctgttcaagtgggggacgccgtttgccctgctgggcttcccgcatctggggccgatcagcaagttccgctatgccctgcacgtgatgtacaccaagggcatcaaggactggacagcgctggacaaggaagaggccggcgcttggatccgccgctggatcggcgagaaggcctataacgtgatgtggaaggatgccttccgcctgaaattcttcgagtacaaggacaacctgtctgccagttggatcggtacgcgcatcaagcgcatcgcgctgtcccgtcgcaacctgatgaacgagagcctgggctacctcgaaggtggctcaatgacgctgcttgaccgcatgaagcaggatatcctcaatcgcggcggtcgcatcttcctgtgccagggcgtcgatgaggtcgtcagtgaaggtggccgtgttagcggcatccgcaccggtgacaccttcaccgcctacgacggcgtcgtttccactgcccccattcagtatgttcccaacatggtccccggcctgccggaaagcttccgcgcgcagatccgcgcggtggagaacattccagttgcctgcgtaatcctcaagctaaagcatcccgtcagcgagaacttctggatgaatatcagcgacccgggcatcgccattccgggcgttatcgagtacagcaacctcaacccgggagaatacccggggcagaagatcctgtacgcgccgttctacatgcctaagacacacccgaagtggaaggcatccaatgccgagttgatcgaggaagtgctgggttacctgccgcacctgaaccctcagttcaagcgcgactgggtattggctacgcactgccatcgctatgagttcgcgcagaccatctgcccgccaggtttccaggacaggttgccagccatgcgtacaccgatttcgggcttcttcatggccgataccgcgtactactaccctgaggaccgctccatttcggagagccttcaggctgccgagcgcctgatcgaagaagtgctcaaggcatga

SEQ ID NO: 511121 - DNA, 393 bp, Stenotrophomonas maltophilia
atgcagttcatgcgcttcattgtcgcgggcggcattgccgccgcagcgaacttcggatcgcgcatcctgctcagccaggtcatgccgtacgtggcagcaatcgtggtcgcctactgcatcggcatggtcacggcttttctgctgaaccggcgtttcgtgttcgaagcttccggcaaccgactatatcaccaagccggctggttcatcgccatcaacctcctggcggtactgcagaccctggttgttagcctattgctcgcgcgctggctgtttcccactgttggcatgaccttccaccccgaaacactagcgcatgcggcaggggtggcggtaccggtcttcaccagctacgtaggacacaaagcgtttactttcaggaacagccagccatga

SEQ ID NO: 511122 - DNA, 1398 bp, Stenotrophomonas maltophilia
atgatcatgcatgccacttctcctgcccgcagcccacttctttcaccgctgcaggttgccgccgccgtagcgatacttgcgctggtcgtgcgtcttttctatgtgcagcattttgcggtgccgatgccgttctgggaccaatgggacgctgagggtgcattcctactcaaaccctgggtcgacggcacattttcgtgggaggatctgatccggacccataacgagcatcgcattctccccacccgtctagtgacgctggcgacctttatggtgaccggtcagtggaacaacatgtacgaagcacgtgtggcggcgctggtgttctgcgtgataccgggcatgctggtctggcagagcctgcggcagcgagaggcgggtgcccatcgctggctgctggtcgtcgctgcattgctgctctcggtgctgccatttgcgtgggagaacttcctcgtaggcttccagagccagttctacttcctagctctgttcagcctgttcgccatccatctggccgctagccagcacgagaacattctggcgatggccgcagtagtggcgctgagcatcctggccactctgaccatggcctcgggcctgtttaccttggtcgctgtcggagggacctatgtgctggcatgcctctgtctgccaggtcgacgctggcccgcactgtgcgccacggctgtattggctgccttggcctgctatgcctaccaaaaattgccgatgattcctgagcaccgtgcgctgcaggcgcagaatgcgcgtgagctgatcgacgcgataagccacgtactgggctggcccttggtcggaccccactgggcaatcgcggcgctgtggcttccctgtattgtgtacatcgcaagaatggtggtgctgcgtcgcgccaccgcgaccgatctgagcatggccggtctatgtgcctggtccgccctgcagggactggccatagcgtacggccgcggacacgggctggacacaccggccgcccgctacaccgagctcttcacgccagggttgttcggcaacgcttggtttgcgttgcgactgtggaataccgaaaacctgaagaaaccactgcgcttaggtgcccagatgcttgcccttgcctttgcgggcacctttctgattggcattctgatccgggtgccgatggacacgcgcgcaatggcggccaggcacgatgcgacccggctgcaggaaaagaatgtgctgagctacctaacaagcggcgacccggccgcgctggaagtgaacgctttcgagattccctaccccaatgcctcacgtcttcgcagcctgttggatgatcctgcactgaagaacgcattgtacgtagaggtagtcccggcacaacaaccgcagaaaccgggccctgcgcagcagagccactga

SEQ ID NO: 511123 - DNA, 243 bp, Stenotrophomonas maltophilia
atggcgtggtacaccgaagcagcgcacctgcaggcagagaaggtcacacaggtatggactgacacgcatggcccggccgagaaggtccaggcgtcaggcatctatcggtgcaagggctgcaagcgtgaagtgacgtgcaacaagaacgatccattcccgccccaatcccatcaccagcacgcgccccacgagggcgacatccgctggaagctgatcgtgcgcaccaacaccgacggcatctga

SEQ ID NO: 511124 - DNA, 132 bp, Stenotrophomonas maltophilia
atggcgtggaattactgggagcagctgtggcctttgaactgggtccgccttgagcgagccgagcatcgcaggggaatcaggggcgaagaggtgccgatgtctgagcgcagcgagttcggcaccgtcccctga

SEQ ID NO: 511125 - DNA, 393 bp, Stenotrophomonas maltophilia
gtggattcctttcagttttcgattgagcgctatttgagctttgatgatgttcgcaaggtgctgtcggagtcgttgggcgtgccgcaatcgaatgtgttcgattctgatgagtattgggatcacgcgcagatcaaggattcggtggggatatgggttatgcatgatgacggtcagttcaaaaccatcgtcaatgcctacagtggcttgaatttaaacgatgaggagctcgggcgtctggccattcggatggcgccgaagttcgattctggggttcttattggagatcacttcagtgatgtccctgatctggaggggcggtttgttgtttgctatccggatgggagtttacggtttgggtacgaagtggagggggttattgagttctttgaatga

SEQ ID NO: 511126 - DNA, 1509 bp, Stenotrophomonas maltophilia
atgaaccagaagcttagccttggatccctttctgttctgctgtctctcttgggcggcggactgttgatcagccccgcgcaggccgttgacgctcctcgtgcggtggagcaggacactgggctcgacatcctcttgacccagaaggcgcgcgacattctggagcgcgttcgtcttgtggatggccaagctcgcagtcgccgggttgaggtatcagcagatatcgccaacggtgtactgaccgtggcgctggatcgggacttccttcctgccgattacgggccgtcgttcgaggatcagcgaagtgagatcagctttggactactgcattgggccgagcagatggcgccgttcagtcgtgtcgtttttctgtatgacgggaaagagatcgaatactactttcctaagataaaggctgcggacgatgcggcgcgggaagcgggggaggcgctgcggcggatgcgtggaacgcctgggtccgggatggcatttgtcgcagccgggcatgggtatttctacagctacaaggacaaccggtgggtgacctcaagggatgaatggaatggcgtctccgaggggctgttgactccgtcgtacgccgcagacctgaaggcgatgatcgagcaaaggagccaaatgcctgtcgtccgtccgcgcgttcagatcacggggacgactcatccgccgagtggtgaggagtggtggaccatagctgcgcgctacgcaattgcggagcagtatccggccgagacaaagatatggaatacgtacgcaggcagtacgctttgggatcgggaggagcgcgaagacatcaatagtcggccgcttcttgcaaaccaccacggcgctgaggtggcgattcatctgcacagcaatggagaacccacgggggccgcgcgcggtactcgtgtgatcgtgcaacctggtaggccgatggatgctgcccttgcacagagcgtcctgtgctctatgaaggagctgattcactcggttccggtgtatgccgattttgcggtagccccagctccccacgctgaaaacaaaggggagaatcgtgaggcaaagatgccgtcaatcattgttgagacggcctttcataccaatccggatgatgccaaggccctccaggatcccgtcttccgcaccgcctccatgaaaggcgtcgagaagggctatcgcctgtgggcacagggcaaggcttgtgagcctttgatgctccaccctatccccgatgtcgaggttccgctgcaggcgatgcgcgagctgacagtggctttcgcgggcaatccccagtaccccctggagcttgaagtggtcgtggcagattgtgatcggcccggatactgcacgccgtggaagggccgctttgaggatccggatgcgccggtgaagttcggagtgagctgctcctccacggagcccggctcagtccgctggaatgtcctgatgcgcgatgcggacgatgtcgtcgcggcgccggtggcgttcacccagtcctgtgtccgggcctga

SEQ ID NO: 511127 - DNA, 618 bp, Stenotrophomonas maltophilia
atgcttcatcttctctgcactaggcttggtataattaggcgttgtaatcagagtgcacccggacgttctggagagccgtccctccgaccgctagcgcgagccatgccaaagtcgagcaaaatcatcaagacaacaacgcatgatccatccattgtggattttttgcttgtcgagagtcagtctgatctaaaggcttacggtcattttagagaattgaaggacgcactgagcgcactgcttggggtaagcatcggctcaaagagttggtcctcattttattttctgatcctgagggtccaagcgatctcaagatcgactgtaagctgcgcaatgaatggacggcccacctctcacgtcattttcaaatgcaagctgtactcaaccctctatcgtggctcggtgaaggatgattgtgtaaggagcgcatccttcaatgagcatttcgttcaggcagtggataggatttccgaggctgcagctgacccaaaggttcgatatcgctttagtaagacgagaaatttcatctacagttcgaagcttgaaggcataagcattactgcccccaagggaaagtcaacaacgcttgcaaaactgttgaagaagcatcgagagcactga

SEQ ID NO: 511128 - DNA, 2175 bp, Stenotrophomonas maltophilia
gtgaaacggctgttgtcgcagctgcggctgcgcctgtcccagcgccaggacagcgaacacggccagcagatcgtccgtattgtcctgatcagcctgatcctggtctacgtgctcttgccggcgccgcgccacgacctgccgcacacgcagtacgtgggcgtgctggcgatcgtattgaccggcctgagcctgtcgctgctgttgttcggctggctgctgtggcggccggcgcgttccgatccccgccgcgtgctgggcatgctcgccgactatggcctaatcgctgccggcatggtgcagatgggcgagcccctggcctgggtctacatcgtggtgatgtgggtgacggtcggcaacggcatgcgcttcggcaaccactacctgtacgtggcggtggcgatggcgatggtgagcttcggttgcacggtgctgctgacgccttactggcaacagaatttccgtctggccatcggcctctggctcggcctggcggcggtgccgctgtacttctcgacgctgctgcggcagctgaccgaagcgatggccgaggcgcgccgtgccagcgaggccaagagccgtttcctggccaacatgagccacgagttccgcacgccgttgaacggcctcaacggcatgaccgaagtgctggcgaccacgcgcctggacgatgagcagcgcgagtgcctcaacaccatccaggcgtcgtcgcgcagcctgctggcgctggtggaggaagtgctggacatctcggccatcgaggccggcaagctgcgcgtggtggccgaagacttcgccgtggccgacgtgatccaggcaatcgggctgatcctgttgccgcaggccaaggccaagcgcctggattaccgggtgagggtcgccgatggtgtgccgccacgcgtgcgcggagacgtcgggcacctgcggcagatcctgctgaacctggccggcaacgcggtcaagttcaccgatcacggccgggtcgaaatccgtgtcagcgtggtgcaggccgataccagtggcgcggtgcggctgcgcttcgacatcctcgacaccggcatcggcgtggccccggccatgcgtgcgcggctgttcgatgccttcgagcaggctgacgtcagcatggcgcgacgccacgagggcaccgggctgggcacaaccatcgccaagggcctggtcgaggcgatggacggtgacatcggctatctggaaaacccgccgcgcggcagccacttctgggtcgagctgccgttcgcgccgccgcagccgcaggtgccgggtgcggtgccgagcctgaccggcgacgacgacgtggggccgggcggcaacgtgatcgcatttgccgacccgttcctgcgccatcgcgcccgcgtgcgcagcatgcagatcctggtggccgacgaccacgaggccaaccgcatggtcctgcagcgcctgctgcagaaggccgggcatcgcgtgctgtgcgtggatggcggtgaggcggtgctggatgcgctggccgacagtgaattcgacgcggtcattgtcgacctgcacatgccgggcatgagcgggttggacatgctgaaggagttgcgggtgatgcaggccggcggcggtccgcgcacgccggtgctggtgctcagcgccgacgtcacgcccgaggcgatccagcgctgtacccaggctggggcgcatgcgttcctggccaagcccgtggtggcggcgcgcctgctcgataccctggccgagatcgccagcaacacccagctgaagaccatggccgcaccggtggtgcgaccgatggcgctgcaggatggggtgctcgacagcagcgtgctggacgagctggcctcgctgggcatgggcgagggcttcgaacgtgagttcatccgccaatgcctggaggacgtggcgggctgcatgggcaaggccgagcaggccggtgaggccacgaagtgggatgtgttccgcgaacaatcccacgcgatcaagggcgtggccagcaacctcggcctgatgcgcgcgtccaaccgtgccggcgagctgatgcggatggccgactggcagctgaagaccgaatggcgccagcgcctgggcatcctgcaggaggcgatcaaggaaggccggcgcgcgctggaggcacgggccgaacgccggctgcgcggcgctgccgacgatggcgaggcgcgttga

SEQ ID NO: 511129 - DNA, 654 bp, Stenotrophomonas maltophilia
gtgctgcgcttccgctttggcggcgccgccaaggaaaaggtcttgggccgctatccggatctgtccttggcccaggcccgcgagaaggcgcgcagcgatcgggccctgatccagcaggatatcgatgtggccgccggcaagcggctggcccaactggacgcgcggcgtacgcacagtgtcaagaccgcacctcggcctacgtcggccgcaccgaacacgccgctggttgtgcaggccatcgatccgcagcgggccaccgtctgccggctggtgcaggcctggctggaccgctacatccccccccgctacaagcacccggaccgcatccaagcggtactggagcggcacctctaccccacgctgggcaccacccgcgcccgcgacgtcgtgccgctggacgtggatcgcctgctggtggccaccgtggcgcgcggggcacccaccgtggccaatgacctgttgcgctatctggtgcgcctgttcaaatacccgttggtgctgggctgggccaccgggaatccggccgccagctttggctcgcgcgatgcgcacctgcgagcgtttcgggcgggagaacgagctgggcatgtggctgctgctggcgctatgcgtgcgcaagatggagctgctctcggcccggtggagcgagtttga

SEQ ID NO: 511130 - DNA, 333 bp, Stenotrophomonas maltophilia
atggccgggtcgtctttcgaactcgcaaggctgatcccactgtgggatttccagcacaaaggcagatttcccgaatgggagttcatttcgcccgagcttgacacattgagaaaggatctttggaacgaagtggacggctacctcaatctactggccttccaaaccttcccaacacgcaccccgggatggaacagcgtccctgcagaatgggagattgaaaagccggagcggttctggcgtacggttgagggattgcacgcgcgtgccgagaagatcgtcagcctgcacgcgtccttcgtccgcgcgggtcgaagcaaagggtacagccgctaa

SEQ ID NO: 511131 - DNA, 3798 bp, Stenotrophomonas maltophilia
gtgttgacaagagctggctctcacgcaggacgaggattccgataccaagacgcggtggcagtttacttctgtgcccaggaatattcgggccaaggccaccacggctcggttttcccggagggaggcgacgacttggagttgagatctgccaccgctagaacgctggtgcaagtcaagtcacgccgggatcacctcggccccttttcgcctcgggcagccacctccttcatccgaaagatgtgggatgccgatgacgtggcggatagcgatcggttcctgctggtactagaaagcgacgtcggtgagcaccgcagcgcgaaagaagagcttctcaatttatcttcgtatccgcacatcgtctcggaactgggaaagagcaacgcagcggatggattgatcgcaagaacccaagtactcgtcctgcccaatccgcgctctggcgcgatagacctcatcgcaaccacacagggctgcacactgcttgaggcagagatctacttctcggatcttctcggcctggttggccgagtgtccgatgagaatggcctacgctcacctggcactttcatcggcattgccgtctctgacgtccaacatcgcctggaggtactgcaaccgctattgacgtcagtcgtcctcgaggaggcactaacgctcggctactgcgatacagtcgatttcctgtggcaggacgcagaccccctattttacttgggcgtggacgtgcaggcatcgcatgtggcggcgggcctagttgtggagcgccctgagcttcgtgccgccgttctctctggtctggagtccagaagaaacgctctaatctacggggcttcgggatcaggaaagtctgcacttctgtgggaggcggcgcacgctagtcgccactcggttcgctggttccggatccgcagcctctcgccgcccgccgtgccatcgctgatccagttggcccgcgcccgccgtgcctcccctgaatcgccggtaggcttcatcatcgacgacgtcggtcgagggttcacggaaggctggaccacactggccttagaagttgaccggacccctggaattctgcttctggcgtcggtgcgtgaggaagaccgctatccgctggcggacgttcgccgggcctcgcagatcaaagtcgtgggagatgaagcgctcgccgagcgcgtctggctggaacttcgcgaacgaagacagacgagctggcagggatggaaagagccatgggaacttgccgcgggacacctgctggaatacacccacgtgctcacccaagggcaacgcttaagcgagacacttcacgcgcaagtcgctcagcggatgaatgatcccctgcggcacagcgagctagacctgctcagggtcgtcagttgcgcgaatgctgctggatgtggggcgaacatctcagacatccccaagcggctgggcgttgctccctctaccatgtcccacgcccttacccgtctcaaggacgagcatctggtccagaacaccggagatgggcttatcgtcgggcttcacgaagttcgttcacaagagcttctgcggctgtgccatgagtatccgccaccactccttcccgagacagcggccatggcggtctggctcgttcccgccaacgacctcaagcgcttcttggagcgtaccctctcccgacacgcagagtgcgacgatgcggtcctcgaagcgctggcgcttcgactggaagatgccccgagcccagcgcttttcagtgccattctgactggcctggaccgtgccaacgcgcatcgaattgcccgcgtgtggctggacacgcctgaggccaaggcagtgccgaggtcattgctggacacgcccgccggactcgcgatagcgaatgtcgatcctcccgatatcgggccggtggtcccggcgtgtcgacgcttcggtgagatccgggcggaagtggtgacttccggcctgactgcacgccttctagcacgtctgccggcggttcaactgcggcgcgtacttgagtcggtcgttcaactacccgagctcacagagtgcctcgccgcactcttggggcaagccgtgccagcagaccacctgctcgagttcaagcagctgtgcccgccactcctttcggcaaactttgaggatgtggtatccctgcttgacgttgcggcacgaatcgaccgatctctggcggtcgaatgggtcgacgatgtcgaccaatccttgctccatcagcgcttcaacgagcacgtgtcctgggccgaaatccccactctgcagacctgcgaagaaggctggatggtccagtcaaacctctggattgtagcttcatccgaccagcaaaacgttcacgaagcagtggtgcgggcgtgcgacgttctggtggctctgacaccgatcgccgatgtagtggcgagtacagcgttggccccagacgggcatggggtgatgctgccgggcacggatcaacttctagtgcgaaagcgcatacccaggaccagtttcttcgctgaaccggaggtggcccgaaaccgtgcctggattgccatcttgaaggcgcagcttgcggtcgacagctatacgtcctatctagccaagtgccttgaatttattcgaagcctgaacctgaatatcaagaagcttctggatgagaatttcagaggaaagaaaaatccgtctgcgggcaaagcgcttggccaaatccacgtgcagagctctacgctggttgtgccccaacagaaattttctgccacccctaggacccactcaaggcttcagggagtcatcgcgagctgctcctcagatttgatcgtccggttctacaaactgccaacggatgctgccgcctacctgggctggttgagtgacctaacgaagagcatctcatcggcagaagctgacgagccttgggaaatcctgtcgccattgcgtcccacggatctgagtgaactgcgttcactcattgaaggtatgcagacgctggcgggagaagctcacgcaaggaaccgctcgccattcatcacccatcgcagagtagcgatgcccagaggtaaaggccttgaaaccgctatcaaagcctcagcccggcaccgcgaagcggaactgagagctctcgagagcgaggtcaggtcacaacttccccatggagaaggacgccttggagtacacctactacctgacagagccaacccatccctttggcctccggcagacattctgatcaccgcagagctcgatggttccggaactgacatcacgttggaaagcatcactgcagctcttcacgcgctcgccgagaacgggcgaaaggtatgtctgttgccggtcatgcgtaggcgaggactgaccaatcttgcttctgccggctacagcacgctgctccccgcgaccagcgaggaggcacgcacctggtgccatcaggcaggagtggaaatagctcctctaccgcgggtgaatgtcttcatgcggatcattagctacttaggagatgtccaaggaatcaaggcgtactgggagcataagcaacacagaacaagctctgagcagaacacataccaagccattctgggaagcttggacgaatccatatcccattggcactcgtttgatatctccgccgaccatagggccgaaggagcggcgttgattgaaggatctctgagcggcgaattccctctggtcgctggctcattagaggctcttcgaggaacggaaacttccgcaatggcgcccctgaaggaactcatagcccagctaaccgtcgttgactgcttaaatgccgagcctccatccgggtctggcatcgacattgactga

SEQ ID NO: 511132 - DNA, 990 bp, Stenotrophomonas maltophilia
atgctcgtggagtatgaggctgccgacgcatcgacagtttcctttaagtttgaaagcagggagcaaggcaggaggttccgcaagctcgccaagaagcacgacacgctggcagctatgcgtgagctgggtctgcactcggaggcaaggcgcgtcatcttgaatcagatcacggcggcgatgacttccgactgtgcacatcacatcttcgagtcgctgaggtgtttcgagaagcggaagttcgttccgggattcaatctactccggaagtcccttctggatagcctgatgtacctatcttggatggtggcggatgaagatggattctattccgcattcgcggctggagatcccaccaagctcacccagaaactactcggcaaccgccgcagagagatcctatcttccgcaatcgccaagattggcctttccgatcttgtctccgcggaggaactgatctctgccgtcttcgatgcggggaatccatacggtctctatggattcttccagcacgcggttcatctgatcactgttgagcgaatcgagatcaggacatcaccggagaacttcaacttcatcttcaaggacccaagcgatgacggcttgtacgagaccctctacatggcgctccccacggcgctgctctatctctcgcatgtgatcatggcgcttcatgaacgagtcgcagcgcctgatgagggcgctaaagcagcgtttgctttccgcacaacgaatatgtacaggtgcttgcatcacaagggatatgcggaagctttttcagagctgatgggtgagatcctttcgcctcgcatcacatgccccagttgctcatcgccgttgaaggttacgatgcataacgttccgctgcttctgctcgctgaatcgttcagatgtacaaggtgccagcgccggagcgcgttcccactctcatgggccttcggacagccattctcactggcggaatcggaagaggttccgacgataggcgcctga

SEQ ID NO: 511133 - DNA, 849 bp, Stenotrophomonas maltophilia
gtgaaccgggaattgcctgccggcgcttggcaggcgctgctgccccgagcgctggtcctcatcgaggagattcgccgccacggcggcgtcatcgatccgttctggacgctgggcggcggtaccgtgctgatgttccggcaccgtcacaggctcagcaaggacatcgacattttcgtgccgaatccccagtacctgggattcgtcactccccgcttgagcgatgtcgccgccagccttaccggcgactacagcgaagatccaagctcatgggtcaagctgcagttcgaggaaggcgaggtggacttcgtcgcggctcccaatcttctcgatgatgcctgggaggaacggacgatcgatgaccaacgtgtccgcgtggaaacctcggcggaaatcatcgccaagaagatgttccatcgcgggaatcggacgacacacggggcagaaccagcgtcgcggtcatggcagcggcgggagtacgttactggggagcgccagccgaaccggacgctcgttttgcgcaggtgccgcctcggccaacaaactccacgcgcccgaggcgcgtccgacgcctcgtcgttccaggacggaagacagaccggcgacgatcggcggtgtgcggccctcaccctgcgcttggagatcgcgtgcgaacgcggccagatgcttgccgccccggcccccttggtgccgaccgccttgcggaagacgaactcctgctttccatcggccaccggccccacgtcgatctctgcactgagaagttccggatactgcgcgccgtacagatcgcgcaatgccttcggctccaatccgggtacgtccggcaaggtcacctcccggcagcgctga

SEQ ID NO: 511134 - DNA, 4371 bp, Stenotrophomonas maltophilia
atgaaccacatctaccgccgcatctggagtcacgccaagcaatgctgggtcgtggccagcgagttcgcggcatcatccaagagtgtcagcggcgtgagaaggcgcccctcgatgaggtctgcggcggtgcattcgctgatagctgcgatgattgccacgggtactgcacaggcagccacgtatccgttctgtgaccagaacttcgatgagttcgagggagcgtgcttgccatcgttgttcagtggtggcgccggtctattgggcgcaacgggttctggttatgcagtgctggggtataacgcctatatccccgacaccggcagtgtctcagtcgggtacagcgcttactcagccaagcaggatgtcgcagtcggagcgtatgcccaggcgcttgggtacgatagcgttgctattggatatgaagccaaaacaaacggcgatcacaatgtggctgttggtgcaaaggctgaagcccattaccttggggccgcgtccttcggaaatgcagcacgatcaattgccgccgacgcggttgcgcttgggagtggtgcgctcgcttccgccgccaacgctgtcgcgctgggagcaaattcgcgggcaaccgagctgaactccgtttcggtgggtagtgtcgataacaagcgacgaatcgtgaacgtacaggacgcacgtcttaacagcgccagttcggacgctgttacgggcagacagctgaatgccaccaacaacaatgtcacggccgcgcgctccgtcgcggactcggccaagaccaatgccgacagtgcactgacaagggccaacacgctttcgcgcctcctgggtgagacatcagcctcggggaacgtccgtctgggcgcatccaacagtggtaccgtcctggacgtgcgcaacagtgccagcgccaaccgcacgatcacgggtgttgcggacgcaacattgtcttcaaccagtaccgatgcggtgacgggtcggcagctcaacaccaccaacagcaatgtcacggccgcgcgctccgtcgcccactcggccaagaccaatgccgacagtgcattgacaaaggccaacacgctttcgcgcctcctgggtgagacatcagcctcggggaacgtccgtctgggcgcatccaacagtggtaccgtcctggacgtgcgcaacagtgccagcgccaaccgcaggatcacgggtgttgcggacgcgacattgtcttcaaccagtaccgatgcggtgacgggtcggcagctcaacaccaccaacagcaatgtcacggccgcgcgctccgtcgcggactcggccaagaccaatgccgacagtgcgctggcgaaggccaatacgctctccggtctcctgagccagacatcagcctcggggaacgtccgtctgggcgcatccaacagtggtgccgtcctggacgtgcgcaacagtgccagcgccaaccgcaggatcacgggcgttgctgacgcgacattgtccacgaccagcactgatgccgtgaccgggcggcagctcaacaccaccaacagcaatgtcagcatcgcgatgagcgatgccagttccgccaagaccacagcgaacaccgcgatgacgcagttggggacgctcaacgggttgttgaatcaggtcagtgccagcggcaatgttcgcgtgggtgagaagaacagcgggaccgtactggatgtgcgcaatagcgcgaatgcgaaccggaagctgaccggcgtggccgatggtgtggtaagcgccagcagctacgaggctgtcaacggcaggcagctcaacgccaccaatgacaaggtgacgacggtggagggtgtggccaggtctgcgggtgcagacgctgccgtggcaaagacggatgcgaccaaggcgttggccgaaacagcggcgctgggcgggctggtggcgcaggtttctgcaactggcaatgtgcgcctgggtgaggagaacagcggtacgacgttggacgtgcgcaacagcgccaatgccaatcggacgatcagtggagtagcggatgggctattgagcgcaagcagtgccgaagctgtgtcgggtcggcagctgcacgcgacgaatggtcgagtttctgatctggagagcgcaaatcagtatgtgagtgttggcgttgacgcgttgagtgagcgcgcagaggccgccttgcttggggtggctgttggtgattcagcgaaggccggcgctgaggggggcgttgccctgggtgctttcgcaacagcgctgggaaagaactcagtggcagttggacgcggggcgggggtttccggtgaagcatccagtgggtttgcgatgggagtcggcgctcaagtgcatgcagtcaacggggtcgcgattggagcgggcgctgttgtagagaactcagccttcgattcattggcgttgggtgcgggttcctttgcagatgaggcggagacggcatccttcggtaatgccacagctcgacgtcgtctcaccaatatcgccagcggtaccgctgaccacaacgccaccaccgtctcccagcttaaggactccctggccactctcggcggcggcgcaggcatggatgccaacggcaacatcattgcccctacttatgcagtgcagggtgggacgcagagcaccgttgaggacgcgctgatggcactcgatggcgctgtcatcaccgcaagccgtcgcgcggacaaggtggaaggccagctgggttcgatcttccaggactcaccttcggcccgcaccgacggcctgaaccagatcgcgctgaatggcgtgaatggcatggtgttgaccaatcttgccgacggtcgagtagccccaggaagccgtgatgcggtaaccggcagtcagttgtacgccgcagagcagaagatctctcagaatcggaatgatctggaggcgatgcgcaaggagcgggagatgggcgagcaggcagtgcgtggattggatgcgagcggtccaatcgactttggcggtgcgcgattgactggtgtggccgaggcgacgctgtcggctgatagctcggacgttgtgcgcggcagtcagctctatgagaccaacagccgcgtctcggaacttgaggggggcgcgcagtttgtgagtgtcgggtcagctcccttcagtgaacgcgcagaagcgggtgctgcaggcgttgcggtgggaaattcagcaaagacggggctggagggaggaactgcggtaggcacgtttgcggaggccatgggaaagaactcaaccgcaattggtagagcggcgactgtctctgtggattctgcgaatggattcgcaatgggagtcggtgcacaggtcggtggaggcgcggacggtgcgaatgaaggtgtcgcgattggtgctggcgcaagagttggaagcggggctcacgggtcgctggcacttggaagcagcgctcaggcaaatgaagccggagttgcatcgttcggaaacagtggcatgcagcgtcgcctcataaacatcgccaacggcaccgccaaccacaacgccgccaccgtcggccagctacgcggtgcactgtctgcactcggcagcgaagtcgatgccaacggcaacatcgtcggccccagcttcaacgtgcagggccagtcccaaaccacgctcaatggtgcattggaagcgctcgacggcgcggtcgtcagcaccacctcgcgggtgaaccaggtcgagtcccagctccgctccgtgttccaggaaaccccgtcggttcgcgcagacggtaccgcccagctcaccctggccggcgccagtggcatggtcgtctccaacgtggccaatggcctggtcgccgccggtagccgcgatgcggtcaatggtggccagctgcattcgatgcagcagcagctcaacggccgtatcgatggcctggaagagcgcatcgatgcgccgcagccgcgggcaatggccgtcgcttcggcgccggagccggaagcaccggtgccgcaggccgaaggcggccagcaggtggcgtcgatcggcgagggtgacaagcccacgccgcaacccaagtcgaagcaggacgacacgcccaagccgcaggtcgacaccgccgagctggagaagatgctggcccgtgccaacgagtacaccgatggtgcgatcagcaatttcgagcgccgcctggacaagatggacaagcgcttcaaccgcatggcggcaatgagcagcgcgcagagtgcgatggcgatgaacaccgccggcctggccacctacaaccgcctgggtgcgggcgtgggttacagcgagggtgagtcggcgatggcggtgggctaccagcgcgtgctcaacgagaagggctcggccaccttcagcctcaatggggcgttcaccaacagcggtgagcgcagcatgggcgtcggcgtcggcatcggctggtaa

SEQ ID NO: 511135 - DNA, 1059 bp, Stenotrophomonas maltophilia
atgagcatcccggttctgaccttcttcaacaacaagggcggggtaggaaagacctccctggtgttccatgttgcgtggatgctttctgatctgggatatcgagtggttgcagtcgatctcgatcctcaggcaaatctaacatcagcgtttcttccggaagatgacctcgaagtcctatgggaggggggggcgtcaacttcaaatggcacgatttatcaatgcgtgaagccgctaacagaggtcggtgatctggtagcgccccagacacagagaatcaactcccgcctgcacttggttcccggtgacttgagtctcgctggcttcgaggagactctttcacaagagtggccaagttcactgggatcgagttcgctttttcgttcttttcgcgtcttgactgcgttctggcagatcgcccagttggccgcgtctcagacaaatgcggacatcattttggccgatgttggtccgaacctcggtgcaatcaacagatcagcactcattggaactgactacgtcgtcactcctttggcagctgacatcttttcgctgcaaggattgagaaaccttgggccgacacttcgcggctggcgttcggattggcagaagcgagtttcaaactggaagcagccagcgtttgagttgccatctggtgcgatggatccgatcggctacataatgatgcagcatagtgagcgacttgctcggcctgtgaaggcctataaaaagtgggcggatcgcatgcccgagacttatcggcggtccatcctaaatgaccagccattggttatcggcgggaatccgtacggtgaggcaatgggcagtttgaggcattaccgtagtcttgtgcctatggcgcaggaggtgcggaagccgattttcaagctttcgattgcggacggcgctatcgggagccattcctatgcagtgagagacgccgcaactgatttctctgtgttgacgcgcgaaatattgaaaagaattgaggccgacagaggagggctgtctcgcggcggtgacgttctccccattgcccttccgccgcttccaaaaatatga

SEQ ID NO: 511136 - DNA, 1209 bp, Stenotrophomonas maltophilia
atgccgttttcggatgagcaactcgtccttctcatggaagggcttgagtcttcaagagtcgaaaggaagcgtagttggagcggggatgtctccgataaggcgcgccaagcgatctgcgccttcgcgaacgatctttcgggaagcggagaagacggggtgatcttcatcggcgtggaagatgacggcactccatcggggctcgccattaccgacgagctactgctaacaattagtcatatcaagactgacggtaggatcctgcctccaccgactttgactgtcgagtcgcgcagcctcagaggggtcagtgttgctgtggtcactgttaagcctagcgactctccgcctgttcgttacgacggtcgagtatgggttagagttggccctcgccgtgcgctagcctcagcacaggacgaacgagttctttcagagaagcgccgattcaatgatcgcgcattcgacgcaaggcctctttacgacgccggacttggagatttgaaccgggtgcagtttgagggtgattttttgccgcaagcctttgcccccgacatccttgatgccaatgggcgaagctatgaagcccggcttgcgtcattagggtttgtgagctcggttgatgagcctttgcctacgcttacgggaattctggtccttggcaagagtccgcgaacattcgttcctggcgcctacattcagttcctgcgcataaacgggactgcgtggggtgatccagtaatagatgagcgcgatatcgacggttcgctggatcagatgttgcgggcgttggatgaaaaaattcgcgcgcatcttgctgtatcagtgaattttacgacaggtagttcgcaggaagtcagggaggcggcttacccgattagcgctattcagcaggtcgcgcgaaacgcggtaatgcacaggaactatgaaggaagtaatgctcccattcgagtttactggtttaatgatcggattgaggttcacagtcctggtgggccgtatggcatggttaacgcagaaaacttcggtcggccgggagtgacggattaccgaaatccccatcttgcaagcgcactaaggacaatggggtttgtgcagcgctttggcttcggcctagccgagactaaacgatccatggagtcgaatgggaatcctccacctgaatttattgttgagcagtcggtaattcttgtcactctgagagcacgtcaatga

SEQ ID NO: 511137 - DNA, 348 bp, Stenotrophomonas maltophilia; identical to SEQ ID NO: 344067

SEQ ID NO: 511138 - DNA, 819 bp, Stenotrophomonas maltophilia; identical to SEQ ID NO: 344068

SEQ ID NO: 511139 - DNA, 2064 bp, Stenotrophomonas maltophilia
atgaacgccactacgcaaaccgaagcccgcgccgtcaataccgccgcagctatcccgctggaagccgccgacccgaccaagaatctgattctggttccgctgtcgcggctggtgctgcgccccacgggccgcaacgtgcgcaagaccccgcgcatgtccatccccgaactggccgcgtccatccagcgcgtgggcctgctgcaaaacctgatcgtgattcccgctgccgatggcctgcattacgaggtggtcgccggtggccgcaggctggccgcgttgaagctgctggcgaagaaacaccgcatcagcaaggaatgggaggtgccttgcctgcaagtggccgatggcaccgcccgcacggccagcctcaccgagaacgtacagcgcgaagccatgcacccggcagaccagtttgaagcctttgcggcactggtggccgaaggccgccccatcgaggacattgcagcggatttcagcgttacgccgctggtggtgcagcgccgcttgaagctggcgaacgtctcgccccgcctcatggccgactatcgcgccgatgccgtgagtcttgaccagttgatggcccttgccatcaccgacgaccacgccgcgcaggaaagcgcgttctacgatgccccgcagtggcagcgccacccctcgcacttgcgcgaacgcctgaccgagcgggaaatcgacgcttaccgccatccgctggtgcgcttcgtcggcctggacagctacgaggccgcaggcggcggcatccgccgtgacctgttcgcggaaggcgatgcgggcgtgtatctgaccgatgccgcgctgctggaacggctggcgcaagacaagctggcaggcgtcgccgccactgtccgcgccgagggctgggcgtgggtggatgccacgccgggcgtgacccatgccgacctgcacgccttccagcgtgcgccgagggaacggcgcgagccgaacaagcgcgaggcacagcgcatcgcgaaactgcaaaccaagatgcacgagctggccgaagccgtggatgccgcgctggacgccgacgacgaggacaaggccgacgccttgcaggaggaaggcgaaaccctgggcgaacagttgcaggcgctggaagatggattgcaggactacagcgccaatgtgaaggccgcagccggtgccatcgtcaccatcgaccgcagcggcgaggccgtcattcatcgcggcctgatgcgcgaggccgaggccaaagcgctgcgcacgctggaaaagctccggcagggtttcagcggcgatgttgccgccaacaatgacgaaggcgaggaaggcgaagcgcccaaggccgcagcgatttccgaccggctggcccaacgcctgagcgcccatcgcaccgccgcactgcaaatcgaagtcgcccggcatccgcaggtggcgctggccgccgtggtgcatggcatggtgcagaccgtcttgcaggaaagccgctacggccgcagccgtgattctctgccgctgggcgtgggcctgaaagtgcaagaccggctggaaggcatggccccggactggccggaatcgcccgccgccgtggcgctgcgcgaactgcaacaggtggcgggcgaagccttgccggaggacgacgccgaactgttcgccgcgctgctgacgaagccgcaagatgaactggtcaagctgctggccgtgtgcgtggcttccacggtggacgtggtgacgcctcgcgccacgccgcaccagcccggcacggaactggcgcaggccgtgggcctcgacatggccgcatggtggaagccgaccgcagaaggctatttcaagcacgtttccaaggccgtgattctggatgccgtgggcgcgtttgcaccggaatccgtcacccggctggcgaagctcacgaaggccgacattgccagtgaagccgagcggctggccgagggcacgggctggatgcctgccatcttcaaggccgcaagcccgcaggacgcggcgcaggaggaaggcccggagcaggacgccccggaggacgccgaggcaatggcggatgaacccgccgaggcgctgaccgcttga

SEQ ID NO: 511140 - DNA, 927 bp, Stenotrophomonas maltophilia; identical to SEQ ID NO: 344069

SEQ ID NO: 511141 - DNA, 507 bp, Stenotrophomonas maltophilia
atgtcgcaactttccctctctctcgatactccgctgatggtgcgcgatggccgtggccgctatcggccggcggacgccgaccagattctggaagctgcgcgtcaggtcatcgaacagaagatgcagcgcggcgagacgttcacgtcgtcggaggcggtgaaggactacctgcgcgccaagctggccggctacgagcacgaagtctttgcgattctgttcctcgacacgcgccatcggctgatcgactacgtggagatgttccacggcacgatcgactcggccgaggtgcatccgcgcgaagtagtgaaacaggcgctgcggctcaatgcggcggcggtcatcatttcgcacaatcaccccagcgggaaccccgagccgagcgcggctgacaaagctctgaccgcgcagcttcggcaggcgctggcgctggtggaggttcgcacgctggatcacatcatcgtcgcgggcagcagcaccacgtcattcgccgaatgcggcctgctttga

SEQ ID NO: 511142 - DNA, 1797 bp, Stenotrophomonas maltophilia; identical to SEQ ID NO: 344070

SEQ ID NO: 511143 - DNA, 249 bp, Stenotrophomonas maltophilia; identical to SEQ ID NO: 344071

SEQ ID NO: 511144 - DNA, 981 bp, Stenotrophomonas maltophilia; identical to SEQ ID NO: 344072

SEQ ID NO: 511145 - DNA, 321 bp, Stenotrophomonas maltophilia; identical to SEQ ID NO: 292085

SEQ ID NO: 511146 - DNA, 360 bp, Stenotrophomonas maltophilia; identical to SEQ ID NO: 344074

SEQ ID NO: 511147 - DNA, 1209 bp, Stenotrophomonas maltophilia
atggccaagatcaaactcaccaagaccgctgtggagtcggcgcagccccaggcgcaggcggtcgaactgcgggataccgtggtgcctggcttcctgtgcaagatcaccccggcgggtcgccgggtgttcatgctccagtaccgcacgaatgccggggagcgccgcaaacccgccttgggcctgtttggggagctgaccgtcgagcaagcccgcgttatggcccaggactggctggccgaggttcgccggggtggcgatcccggcggtgccaagaccgaggcgcgcaaggcccccaccatcgcggagttgtgcaagaagttcatggaggactactccaagaagcgcaacaagcccagcacgcaggaaggctatcagggcgtcatcgaccgctgcatcatcccattgctgggccgcaagaaggtgcttgatgtgaagcgccccgacattgccgggctgatggaaaagctctcgtacaagccgaccgaggcaaataaggcattcggcgtactgcgcaagatgttcaatctggccgaggtgtggggctaccgcccggacggcaccaacccgtgccgccatgtcccgatgtttccgccgggcaaggaaacccggctcatcgtggacggcgaactggcgctgatctaccgccacctggacaagctggaggccgaaggattggagaactacgtcatcccgctggcgatccggctgcaatttgagtttgccgcgcgtcgctccgaagtctgcccgctcgaatggacttggctggacttcgagaaccgccgcgtggtttggcccgacagcaagaccggcggcatgtccaagcccatgagtgcggaagcctatcggctgctttcgacagctccgcgtcgggaaggctgcccctatgtcctgccttcgccccacaaccccgacaagcacctgacttttggcgagcactatggcggctggtgccgggtgctcaaggccgccggcgtgccacacgtcggcacgcacggcatccgccaccgctcgacgaccgacattgccaattcgggcgtacccaccaaagtaggcatgaagctaacgggccacaagaccgtggcgatgttcatgcactacgtccacaccgaggacaagccggtgcgcgatgcggccgaactggtggccagccgacgccaagccatcactggcgcgaggcgaactgatccggtggaaacagcagctacttaa

SEQ ID NO: 511148 - DNA, 1971 bp, Stenotrophomonas maltophilia
atgacctttcaccaagccaaggggctgcgtcccatccggcgctctaccttgaaccgtgtcagcgcgctgggagtcgcgctgatgctggcctgcgctccggcgctggctgccgcaccggcggaaaagccggtgggcgccaccgtggcaccggccgctgcgccggcaggcctgtcggtggccaagatcgatttcaagcgtggcgatgacggcgccgggcgcctgatcgtgcagttcgacgggcagggcgcgatccctgacctgcgcacgcagggcaacagcgtggtggtcgacgtcggcaatgcccgactgccggccaacctgcagaagccgatgaacgtcaccgacttcgccacgccggtacagcgcatcgacgccaagccgtccggtgccggtacccagctggtgctgagcaccgggggtgccgtggagtcgctggcctaccagagcggcaatgaatacgtggtcgagatcagcccgcgacaggccccggccgccgtcggcgcggtcaccgccggcagcgtcacccaggcggccaaggccgtcggccagcgtggtttcaccggcaagccggtgaccttcaacttccaggacgtgccggtgcgcaccgtgctgcagttgatcgccgaggagtccaacctgaacgtggttgcgtccgactcggtgcagggcaatgtgaccctgcgcctggtcaatgtgccatgggaccaggcgctggacatcgtcctgcgcgcgaagggcctggacaagcgtcgcgatggcagcgtgatctgggtggcgccgcaggctgaactggccaagttcgagcaggagaaggaagacgcgcgcatcgccatcgagaaccgcgaagacctgcagaccgactacatccagatcaactaccacagcgccacgcagatcttcaaagccctgaccgaggccaagggcatcggtggcagtggtggtggtggcagcggcggtggttcgggcagctcgtcgcaggaagacagtggcttcctgtcctcgcgcggccgcatcgtggccgacgagcgcaccaacacgctgatgatcagcgacatcccgaagaagatcgcgcgcatgcgcgagctgatcaacgtgatcgaccgcccggtcgaccaggtgctgatcgaaagccgcatcgttatcgccaccgataccttcgcccgcgaactgggcgcgaagttcggtgtcagcggcagccgtgacaacgtgtacttcagcggcaatctcgaagccaaccgcttgacccgggaatcgcaggtcaagtccgcgcaggacaacgccaaggccgaacgcgactggatcgccggtggccgcgtgggcccggctcctgtcccggtgggctcgaccatcacccgtggcctgaactggaacctgccggtggctgccgccagcaacccgggttcgctggcactgtccatcctcaatgccgggtacctgctggacgtggagctgtcggccatgcagcaggagtcgcgaggcgaggtgatctccaacccgcgcgtggtcaccaccaaccagcgcgaagcgatgatcaagcagggcaaggaaatcggctacgtcaccatcagcggtggtggcgctggtggcgtggcgacgccgaacgtgcagttcaaggaagtggtgctggagctgaaggtcaccccgaccatcaccaacgacaaccgcgtgttcctcaacatgcaggtgaagaaggacgaagtcgaccagctgatccagctggagggctacggcaccgtgccgtcgatcaaccgccgcgaagtcaataccgcggtgctggtcgaggacgggcagaccgtggtgatcggtggtgtctacgagttcaccgatcgcaacagcatcagcaaggtaccgttcctgggcgacgtgccgttcctgggcaacctgttcaagaagcgcggtcgcaacaaggacaaggccgaactgctggtgttcgtcaccccgaaggtgctgcgcgtggccaagcagaactga

SEQ ID NO: 511149 - DNA, 366 bp, Stenotrophomonas maltophilia
atgagaatttttcgccgccagctgatctacgtccaagtgcaccaggaccattttattgcgcgcctggtcggtggagacaggaccatccgccgccagtgtcacgcccttggcaatcgcgcgggtccgatcaaggacttttcgaatatccggcccctgctcaaggcgatcttctcggaactcatgcctgggttctctctcgtcaagccgtgggggattctgcactttgatccggttgagtacccggtcacgaaggaagaactggccgggttccagaaggctgccatgcgaagtggtgtgagcttttgttttctctccacgtgggagcagcggcatgaagacaaggatctgttggagatgttcaagtag

SEQ ID NO: 511150 - DNA, 681 bp, Stenotrophomonas maltophilia
gtgaaaggcattgcgttcccccatcgtggcctgcgcctggccacaggcctgctgctcggcctgctggtcggctgcagtgcgcagtcgcgcatggacttctattcgaaggacatcgcctgcgaggagctcggccagcagtggtcgatgcccgacagccacggcaccgtgcgtagcccgaaggacctgcaggggcaggtaacctatctgttcttcggtttcaccagctgcccggacgtgtgcccgaccacgatggtcgagctgagccaggtgaagcacctgatgggcaaggatgccgatcagctgcaggtggtgttcgtcagcgtcgacccggcccgcgacacgcccgaggtcgcgcgcacctatgtggaagcgttcgaccccaaggcaatcgcactcgtcggcaacgaagcgcagctggcggcgatggccagcgacttcaaggcgttctaccagaaggaacccggccaggtgccggacacctacacgatgagccacattgcgggcggctacgtgttcgaccgccagggtcgactgcgcctgttcgcgccctatggcatgccggtggacaagctgttttccgacgtgcagcgcctgctgctcgaacccggccacccggccgccggcaacgacgcactggcgagctgccacctccagcacagcgatacgctcgccgcgcgctga

SEQ ID NO: 511151 - DNA, 660 bp, Stenotrophomonas maltophilia
atggtcgtagtcccgacaattgttcaatcggtgacaaggagtttgctttcggttacggtttcagcagtcggttgtcagaggcaaaaaaaatggctgagaaggacgcgaaggataaattgggtgccaagtcgacccaccacattcaatgtaggtgcacaagcccgaccggagaggggatcatcccacatgggtaatttgcctacagccctttcggaaaatttctcagttcttctggattccggggacatggctggtgctgcatcactgattcgtagtgccgctgttgtgggctccgcagaagcaatctttctttcttcgagctttagtcgccctcatgaaagcatcgatgagttcgagttaagaagcttggctgaggtagagctctcagcagcgaaagggtacgcccccgcgcaatatagactcggctgctatctacaattcggagactttgtggatgtggatcctgtgggggcagcccagtactttaagctggccgcgaaggctggatatcctcccgcaatgtatgagtatgggttggcgcttctccatggcataggtgtagatagcaagcatgacgaagcgatctcgtggatcatgctctcggctgagaaaggagatgagactgctgctgagttcttgaagaatatgcgagacagctag

SEQ ID NO: 511152 - DNA, 246 bp, Stenotrophomonas maltophilia
atgagctcgaccaggaaactgcggctggggccgctgcccaagaccgaaagcgtcaagctgaccttcgcttgctcggccagcttgaaagccgatctcgaccgctacgccgcgctgcatgcgcaggcgtatggcgaggcggtcgatgcctcgacgctgatcccgcacatgctggaggcgttcatggcgggggatcggggattcaggaaaggaaacgccaacaagtccttgccgccgaacccaagctga

SEQ ID NO: 511153 - DNA, 1278 bp, Stenotrophomonas maltophilia
atgagccaggacgatacccccgaccttgacgcgccgcaggcggacaaggtggcacccgaggcggtggcgctgcgcgcccaaccgcgcccggtcacgcgcctgaaccggcgcacgctggccatcctctccggcgggctgtcggtcggcctgatgggcgcactgatctggtcgctgcaaccgcagcaacgcagcgcgagcgagtctaccgagctgtacaacgtggatcgcgtgtccaagtcggaagggctggatgcgctgccgacggactattccaagctgccagcgctgccgcccgacgtgccggagctcgggccaccgctgccgggcgatttagggccagccatcgtcaattcgcagcagccagttgccgccacctatgccgcgcccggctacgaccccaacgatgcgctacgcaaggaagaagaagcagcggcagcttcatcggtgttcttccgcacgggttccccgcaggctgcgcccgtggcgcagtcgcaggtcgctgccgcggcaggcttcgctgccaatgccgctttcgatccgctggccgctggcccagcctcgacggcggcccagcctgctgatccgactgccgtgcagaaccggcaagaccagaaagaggcgttcctgacaggcggctctagggaaacccgtaactccggcaacctgcaaatgcccgcatcgccgtaccaagtcatggcaggaacggtgatcgcaggtgcgctggtgacgggcatcaagtccgacctgccgggcgacgtgatcgccacggtgacggagccgatctacgacacggccacaggcaagttcctgctgatcccgcagggttcgcgcatcctgggcaagtacaacagccaggtcagctacggccagagccgcgtgcaggtggtgtggaaccgcatcatcctgccggacacgtcttcgctcacgctcgacaacctgatcggcaccgacccggcgggctatgccggtctggaagacgacgtggactggcattgggatcggatctttgccggtgccgtgctgacgacgctgctgggcgtcggtgccgaactggccgcacccgagaaccgccaggacggtgatcgcgtcatcatcgccgggcgcgacagcctgcaggacacggtgaaccaagtcggccaggaagtgacccggcgcaacctcaacatccaacccacgctgaccagccgtcccggcttgccagtgcgcatcatcgtgaaccgcgatctggtgctgcggccctatcagccgctgttcttcaacaaggggacttcgcgatga

SEQ ID NO: 511154 - DNA, 1005 bp, Stenotrophomonas maltophilia
atgaatgcacgtttccgtaaaaccgcattgccggtgatcctgctggcatcgactgtcctgtttgcgggctgcgccacgcagggcaagccgccgccggtgatctcgctcgatgagccggtgcaggctcagccattgcccgagccgcccacgcccatcgaagtggtggcagtgcccgaaccgttggcattgcccggacagttgaaaccgctgccggacgttgatgcgaccccggcttcaccggagcctgccgacgagaaggtgcgcgtttcgcgtgccaatgccgaggcgcgcattgcgccgacccgtgagggctacgtcaatgcgatccaggtctggcccttcactgacggcgcgctgtatcaggtctatgcgtccgtgggccgcgtgaccgtgatcgcgctccagcccggcgaggaactggtgacggtcgctgcgggcgataccgtgcgctggatcgtgggcgacacctccagcggcagcggggccgatctgcgcgtcaatgtgctggtcaagcctatccgttccgggttgaagaccaatctggtcatcaccaccagccgcaggacgtacctgctggaactgacttcgaccgacaaggcatggatggcgtccgtgtcctgggactatcccaaggatcgaatgctggccttgcagcgccaggcccaagccgccaacgctgccgcgccggtcgatgcaggcttgtcgctggagaacatccggtttcgctatgcaatcagcggcagcaatccaccgtggaagccgctgcgcgccttcgacgatggcgagaaggtctatatccagtttcctgcaggcatcgcccagggcgaactgccgccgctgtttgtcatcggcgcgcagggccatgggcaactggtgaactaccgcttccgctcgccgtactacatcgtggatcggctgttcggtgcggccgaactgcgcctaggggccgacaagggcgacgtggtgcgcatcgagcgcacggatggcattgctgggaggaactga

SEQ ID NO: 511155 - DNA, 705 bp, Stenotrophomonas maltophilia
atgcgattcaaacgaccgcaggtgcgctatgccgatacgccgcagcctgccactccgtatcaagccgctgcccaggtgtgggacgagcgcatcggctcggcccgcgtgcaggccaagaactggcggctgatggccttcggctgcctggtgctcgcattgctgatggccggcggcctggtgtggcgctcggcccaatccatcgtcacgccctatgtcatcgaggtcgatcagtccggccaggtgcgcaccgtgggcgaagcggccacgccgtatcggcccaccgatgcgcagacggcacaccacatcgcgcgcttcgtgacgctggtgcgctcgctgtccattgaccccatcgtcgtgcgccagaactggctcgatgcttacgactacaccaccgatcgtggcgcggcggtgctcaacgactatgcgcgggtgaatgacccgtttgcccgcatcggcaaggaatcggtgacggtgcagatcaccagtgtggttcgcgccagcgaggcgtcgttcaacgtgcgctggacagagcgccgctacgtcaatggcgcggcgaccgggctggagcgatggacggcggtggtgtccatcgtgcagcagaccccgcgcaccgaagaacgcctgcgccgcaacccgctgggcatctacgtcaatggcttgtcgtggagccgtgaactggattcttctgaaggagccaaaccatga

SEQ ID NO: 511156 - DNA, 1389 bp, Stenotrophomonas maltophilia
atgaatgacgtgacagtgatcgaccgattcctcgctaccttctcgcgctacatcgactcgggctttgggctgctgcagggcgaagtcgcgttcctgaccgccacgctgatcgtcatcgacatgaccatcgctgggctgtactgggcgatgagccacgccaccggccagggcgatgacttgatcgcaaaactgctgcgcaaggtgctttacgtcggcgccttcgcctacatcatcaacaacttcaactggctggccagcatcgtcttccgctcgttcgcgggcctgggcctaacggccagcggctcgacgatgagcatgggcgaatttctgcaaccgggccgcctggccaagaccggcatcgacgcggcagcgccgattcttgagcagatcagcgacatggcgggcttccccgaggtgttcgtgaacatgacgcccatcgtggtcatgttcctggcctgggccgtggtgatcctgtgcttcttcgtgctggcgatccagcttttcatcacgttgatcgagttcaagctgaccacgctggcgggcttcgtgctggtgcctttcgccttgtggaacaagacctcgttcctcgccgaaaaggtgctgggcaacgtggtgtcctcgggcatcaaggtgctggtgctggccgtcatcgttggcatcggctcgggcctgtttgccgagttccaagtgcatccggccgagccgtccatcgaccatgcggtggtcatcatgctggcctcgctcacgctgctggcgttggggatcttcgggccgggcattgccaccgggctggtatccggtgcaccgcagcttggcgcaggcgcgatggctggtgctgcgattggtgccgcaggcgcggcggttgccgtaggtgccgcagccaccggcgtgggcggtgctgtgatggccggtgcgcgcatggcaccggctgccgccaagctcgccgggtctggtgcgcgggctgcaacctcggcggctggcagcgcgaagtcggctttccaggccggttccgccgctgcgggcggcggagccaagggcgcgatggccgggctgggcagtgttgccaagggcggcgcacaggccgctggccagcgcgctggtgctggcatcaaggcagcagcggccaaggctgcagcgccattcaaagcaggctggcaaggctctggtgccgatggcggctcaggcggtggcactgcggggccagccgccgcaggcgatgccgctggcaacacagccaacgcgcaaaaacaagagcagcccggttgggccaaaaacctgcaacgccgccaacgactcatccaggccaccactacggccgcgcacacgctgcgcggtggcgacggcggcggttcgggccaaggcccgagcctgcgggattccgatagctga

SEQ ID NO: 511157 - DNA, 315 bp, Stenotrophomonas maltophilia; identical to SEQ ID NO: 330746

SEQ ID NO: 511158 - DNA, 744 bp, Stenotrophomonas maltophilia; identical to SEQ ID NO: 330747

SEQ ID NO: 511159 - DNA, 2451 bp, Stenotrophomonas maltophilia; identical to SEQ ID NO: 330748

SEQ ID NO: 511160 - DNA, 1071 bp, Stenotrophomonas maltophilia
atgagtgccgttccacagaccccgcccgatccacgctcatccgctgaggcgtcccaggatcgccgcatccagatgctgcgcacggcgatggggccggtgatcgctgctgcgctggaagacccggacgttgtggaggtgatgcttaaccccgaccggacattgtgggtggatcggctgtcctctggccgtgcgccgctcggcgtcgaactgcccgaggccgatggcgaacgcatcatccgcctggtggccgcccacgtcggtgcggaggtacatcgcggccaaccgctcttgactgccgagctgccggagacgggcgaacgcttcgagggcatcttgccgcccgctgcacctggcccggcctttgcgctgcgcaagcgtgccgtgagcatcatcggtctggatcgctatgtggccgaaggcatcctgactgctgggcaggccgagtttctgcgtcacgccgtgcgcgagcggcacaacatcctaatcgccggaggcaccagtaccggcaagaccacgctggccaatgccttgctggccgagatcgccgccaccggcgaccgcgtactggtgctcgaagacaccatcgaactgcaatgcgctgcccgtgaccatgtgccgctgcgcacccgcgcaggcgtggtgtcgatgcaagagctggtgcgcgccacgatgcggctgcgcccggatcgcgtgatcgtcggcgaagtgcgcggcggcgaagcgctggatctggtgaaggtctggggcactggccaccccggtggcatcgccaccatccatgccggctccgccttgggtgcgctgctgcgcctggaacaactgatcctcgaagtggcggtgcatccgccccgcgccctgatcgccgaggcggtcaatgtcgtgatccacatcgcaggccgtggacgcaagcgccacgtcgaaaccatttctcgcgtcgtcggtttcgacggcgagggctaccgcctggcggatgcgctggaagcaccgttctccgagcttccgccggttcctcttgcagccgctgccgctgcgccttcctcgatccctgaccaacctggagaactgccatga

SEQ ID NO: 511161 - DNA, 489 bp, Stenotrophomonas maltophilia
atgagccaataccgattgaacctgttcattcagcacgagcacgccaagcgcctggacgagctagccacgaagaaaggcgtctcgaagtccagcatcgtcgccgctgccttggcgtcctggctgtcgcccgatgctggcgaccagcgtgaggccgccatcgccaagcggctggatcgtctgtcgcggcaggccgagcgtctggagcgtgaccagaacatccagatcgaaacgctggcgctgttcatccgctactacctgaccgtcagtacgccggtgcccgaagcccatcaggatgcggctcgcgctcagggcaaggctcgtttcgagcagttcgtcgaacagttgggtcggcacctgatgcgtggccgcagcctggtgcgcgacgtggtggaagaactgcacccccaaggtcgtgagttcggcatgcgcatggacgacgcggcggcgttggccgaagcccatcaacgcacagcggagcgtgcgtcatga

SEQ ID NO: 511162 - DNA, 2007 bp, Stenotrophomonas maltophilia
atgcaggctcaaggtgtgttgttcgggcagatcgccgccgtgttcggcatcgtgatcgccggtgtgtgggttgccacgcaatggacagccgcagccttgggctaccaactacgcctgggctcgccctggttcgacttccacggcaagccggtctattacccgtggaagcttttcgagtggtggttcttcttcgatgcctactcgccgcaggtcttcgacaccggcggcatgatcgcggcaagcagcggcctgctggccgtggcggtcgccatcgccatgtcggtgtggcgctcgcgccaggcgcgcaaagtgacgacctatggctcggcccgctgggccgatgccgccgacattcgcaaggccgggctgacgcagcctgctggcgtctttctcggccagcatgacggccactacctgcggcacgaagggccggaacacgtcctgacctttgcgccgacgcgctccggcaagggcgtgggcctggtggtgccgacgctgctgtcctggccggcatccgccgtcatccatgacataaagggtgagaactggcagatcaccgctggctggcgcagtcgattcagccactgcctgctgttcaacccgaccgatgccagttcagcggcctacaacccgctgctggaagtaaggcgcggcgcgcatgaggtacgcgacgtgcagaacatcgccgatatcctggtcgatcccgaaggcgcgctggagaaacgcaaccactgggaaaagaccagccacgcgctgctggtcggggcgatcctgcatgtgctgtacgcgggggaagacaagacgctgcgcggcgtcgccaacttcctcagtgatccggccagcccgttcgagctgaccttgcaccggatgatgacgaccaagcacctgggcggtgcccagcatcccgtcgttgcatccgctgcccgcgaagtgctcaacaagtcggacaacgagcggtcgggcgtgctgtccaccgccatgtcgttccttggtctgtaccgtgatccgaccgtggcggaagtcacttcgcgctgcgactggcgcatcggcgacctgatcgcagcagagtatccggtatcgctgtatctggtagtgccgccttccgacatttcgcgcaccaagccgctgatccggctgatcctcaaccagatcggccggcggctcaccgaatcgctcgatggcagtgacggtatcgagcgccggcacaagctgctgctgatgctcgatgagttcccggcgcttggccgtctggacttcttcgagacggcgctggccttcatggcgggctacggcatccgcagctttctgatcgcgcagtcgctcaaccagatcgacaaggcgtacgggcagaaccattcgattctggacaactgccatgtgcgcgtgaccttcgccaccaacgacgaacgaaccgccaagcgtatttcagaaactttgggcaccgccactgagttgcgcgcccagcgcaactacgcaggccaccggcttgcaccgtggctggggcacctgatggtgtcacgccaggaaaccgcacgtccgctgctgacgccgggcgaagtgatgcaactaccgaccgatgaagcggtggtgatggtgtccagcgtcgcaccgatcaaggcgaagaagctgcgctacttcgccgacgccaatttcaaacaacgggtattgcccccgcctgtagtaacggctggcccctacgccgatgtaccgcctgcacgacctgacgattggagcggcctggcaatacccgcggttcctgcggcaccggccacggcatccgccgatgacctggaggccttgggctcgactgacgacggcggcccacgccgccagcccgaactgtcggaagccatcgcctatgcccccgagatggacgccccgaccagcgatctgtcgctgctcgatgacgacgacatgcccccggtgcttcccgaccagctcgaccccgcactgcaacgcacggcgcgactggcttctctcgaccccaacgacggaatcaacctatga

SEQ ID NO: 511163 - DNA, 273 bp, Stenotrophomonas maltophilia; identical to SEQ ID NO: 330750

SEQ ID NO: 511164 - DNA, 912 bp, Stenotrophomonas maltophilia
atggaattgcgtcatctacgctgcttcttggccgtcgcagaagaactgcacttcgcacgcgccgctgaaaaactacacatcgagcaatcgccgttatcgcgcaccattaaagaactagaagctgatgtcggcgagcagctattcatccgtactagccgcagcactcgattgacacgggcagggaagcttttcctcgagcatgttcctcgcatcttcacggccttacagcaggctcgcgatagcgttaaggcagcggccaatggctttcatgcgcaactgcgcatcgctctgtctgacggcatcacgccttcacgtttaccgacgttactcgcgctatgtcggcaggaggaacccgaagtcgatttgcgccttttcgaggtgccgctttctcaacagatcaaggggctacatgacgatctatacgatgttgggtttgcgcagtggaacaaagtcggccaaggtatcgtagccgaggcggcgtggcgtgatgcgttaatggtggcagtgcctgcgcggcatccattgctcaggtacaagcgcattccgcttgaagaggttctgcgtcatccactagtgctttgtgatccttcgatttgcgaagggcatgcccggcaggttgacggcatgcttcagcgagcaggcctggaaccgctgattgcagaacgtgttgcgtccttcgacctaatgatggcgctagtggcagcaggctttgccttgggtttagccggagcgccacatatcacaggtagccgcgaacccggcgtagtcgcccgttcgctggcagggcgaactcccatgctcgttacgtatgtgctgtaccgcgaggacgagttcaccgaatcggtgacacgattcaaacagcgcgtccacgcaatcgactctcccgaagggacggaaaaacccacgttttaa

SEQ ID NO: 511165 - DNA, 864 bp, Stenotrophomonas maltophilia; identical to SEQ ID NO: 330751

SEQ ID NO: 511166 - DNA, 1992 bp, Stenotrophomonas maltophilia
atgaccgaccaccgcgacgacgatttccgcgtgcgtcccagcgccccgaagaaccggggcaagggccagggccagagcttcgtttccaaggtgctcaagcaggcgggcaaggccagcggcggcaagtcctcgatgcgccgtcccgcagccagcggcagcggcgcacgcgcaggccagcggcccggctcgcgcctggggcgcggccacacggcggcgcgtttcgccggggcgaagctgacgcccatgtcgcggcgcgtgaccatcaagacgctgctggtcaatcaccaacgggccagcccgcagtcactcgccaagcacctgcgctacatcgagcgcgacggtgcgggccgcgatggcgagccgggtctggcctacggggcgcaggccgacgatgccgaccttgaagccttgaaggaacgctgtgccgatgaccggcaccatttccgcttcatcgtctcgcccgaggatggcgccgaactggacgacctgcgcacctacacgcggcatctggtgaaccgcatggaagctgacttgggcacgcggctggattgggtggcggtggatcactggaacaccgacaacccgcacacccacctgatcgtgcgcggacgcgacgacaccggcaaagacctcatcatcgcgggcgactacatcgcccacggcttccgccaccgggccgccgagctggcgacggaatggctggggccgcgcactgaactggagatccagcagaccttgcagcgcgaggtggaacaagagcggtggacgagcctcgactgcacgctgcaacgcgaggccggcgaggatggccgggtgcagatcgaacgcttcaatgaaccaaagctgcaacgccagcgcctgctgttgatcggccgcctgcaacgcttgcagcgcatgggcctggccgacgagacgcagcccggcacctgggccgtccatgcggatgccgagaagaccttgcgcgccctgggcgagcgcggcgacatcatccgcaccatgcagcgggccatgagcggccagccgcgcgagctggcggtgttcgagcccggcgacgacggccgcaccgtcatcggccgcgtggccgccaaggggctggccgacgagttgcacgaccgcggctatctggtcatcgacggcgtggacggcaaggcccactacgtcgcgttgaacacccgcgacgagctggcgaactatcccaccggagccgtggtggaggtacgcggttccgccgtggtgcgggcggccgacaggaacatcgccgcgttggcgagcgatggcctctaccgcgccgatcatcacctggcgatcgagcaaggccgagctgagcccggccgcgacccgcaggaggtcgtcgcggcccacgtccgccggctggaagccctgcgccgggccggcatcgtggagcgcgtggccgatggcttatggagggtgccggacgacctggccgaacgtggccgccagtacgactcgcaacggctgggcggcgtggccgtagagctgaaatctcatctgccgattgagcggcaggcacgcgtgattggcgccacttggctcgaccaacaactgatcggtggcggcaaggggctgggcgactcgggctttggcggtgacgccaagcaagccatgcagcagcgcgccgacttccttgaagaacaggggctggccgagcggcggggacagcatgtgatcctcgcccggaatctgctgggcacgctgcgcaatcgagaactggcgcaggtcgccaaggacattgccgccgaaaccggcctggagcaccgcccgaccacagacgggcaacgtgtagcaggtatctaccgccgatccgtcatgcttgccagcgggcgctacgcggtgctcgatgacgggatcgggttcaacttggtgccgtggaagcctgtgattgagcggcgactaggacagcaacttgctgcgacagtccggggcgatacggcggtttggcatttcacgcggcagcgcgggttaagccagtga

SEQ ID NO: 511167 - DNA, 639 bp, Stenotrophomonas maltophilia
atgatcgtcgctctgctcaaccagaaaggcggcgtgggcaagaccacgctcgccacgcacatcgccggcgagctggcgatgcgcggccagcacgtcgtgctgctggatgccgacccgcagggttcatcgctggactggacgcagcgccgcagccagcaaggtttgccacggctgttcagcgccgtgggcctcgcacgcgaaacgctgcaccaggaagcgccagaactcgccaggcgggccgatcacgtcatcatcgacggcccgccgcgcatcgccgccctggcgcgctccgcgctgctggcggccgagcgcgtgctgatccccgtacagcccagcccttacgacctgtgggccagcgccgagatggtggcgctgatccgcgaggcgcaggtgttccggcctgcgctgcgcgcggccttcgtcatcaatcggcgggtcagtaataccgtgatcgggcgcgaagcgcgccaagcgctcgccgaccaaccgcttcctgcgctgcgcgcggaagtgcatcagcgcatcgtgttcgctgacagcgtggccgctggccggctggcacgcgagacggtgccggacagcgctgccgcccgcgaaatcgccgcgctggtggacgaactgctgcggtggacgccatga

SEQ ID NO: 511168 - DNA, 819 bp, Stenotrophomonas maltophilia
ttggcgacgcgaatcgaccctttcagctcacagcatcttgaagccgcctgccgcgtccttgccgataccgaacgcggcctaagcggcacgcagatcgagcgcctgctgcaagaaatcgggattgccgacacgtcgcccggcatgaccaagtggaagcgattgttcaatgcgctggccggcgcacagaaccagcaccaggtcggcaaccatctcatcatgttcatcaatcgcgcgatgaacccggtgaactatgcccgcgatcccgcgacgttctcctggcggcgcgacgaactcaatgtcgtccttgccttctccggcttctacgtgcgcgacgacggcaaggtcgggcacgcggacaaggccacgacgctcgatgccgcgcgcgcccgtgcgggacgactcaaggctgcgctggaaagccgcgtcgtccatgcggaggtgctgaactactgccgcgccgaactgctggacgaaaactacttccatgccgtgttcgaggcaacgaaaggcgttgcggagagggttcgcctgctgtcgggcctgaacggcgatggtgcggacttggtgaacaaggcattcgcaggccagctgcccgtcctcaccttgggaccgctcaccaccgagtccgaaaagagcgagcagaaaggctttgccaatcttctgatcggcctgttcggcgccgtgcgcaatccgctggcccatgcgcccaagacgaactggccgatgtccgaacaggacgcactggacatcctgacgctggtatcgctgattcaccgcaagctggatggcgcgacgaaagttgctgccgtatcgccgtaa

SEQ ID NO: 511169 - DNA, 939 bp, Stenotrophomonas maltophilia
atgccgtgggcgttcaaggatgcggatgcgtcggactatccgctggaaggtaacttgttgctcggcgccgaccaggtggcaaccgagcatcccctggagacgccgttcggcagcaaattccggctcgacgttgcggtgctcggcccgccggttaaagccgagccgatggtgctgggcggcgttgaaatcgagcttggccacgccttcgacgggcgcaaggcgctgatcgggaagtcgctcgggtttccgctgatctccgtcgacatcaccgagatgacgctggacgagctcacgcccgagtgggcgcagcaggtattgaccgcgaccacgcgaagccacgagcagggacgccggcagacctacatctatctccacgacctgctgtaccccctctacgcgcaattgccggtgtttctggacgatgaacagcgccatcagttcctcgtgtttgccgacgatgagaccttgaacaagctggtgggttggatgaacctgctcgccgaaaagctggagtacccgaagggtacggttgccgttgccctggtcaatggcaagaacgaacagtcgcgcaagatgctggaacgcgcgggacaggtcgttggccccgactggagggagttcaacagccagcgatgcctgcggctgaccctgccgcgccccaaaggcccggcggatctccaagcgcatcgcttccacatgacgatggcgcgcatcctgctgtcgcacactgatgcgctcgttggctacaagtattgcaatggcgtggacaacaaccaccccgaagaagacgtgtgggttgcacatcgctggattgccgacctgaaaacccacagtcagcaccgcgtgttgccgaagcggttggccgagccaatcaacaggctaatcgcgattgtctcggacttgcatcgcaatctcggggcagccactcacggagcgtag

SEQ ID NO: 511170 - DNA, 708 bp, Stenotrophomonas maltophilia
atgtcggaaatcatcctacaagcaggcactctagccgaactcaggaacaagcttgccgagctagacattgatgtgcctgcgcgctcggaggggcgtcggaatcatcacgcggaacgctattgcatcgcgcacttgcttgcgacactgccggctgaacggctttcgtttcctctgacccttgtccattccgacaaaccagacttcgtgctgacgatgtcgggcactgaggtcggaatcgagcataccgaagcggtaccggagaacgtcgcccgagccaattttctgcgcgagaaaggcttggggcccgacgtttacttcacgcctcatgccacgcccggggaacctcgaaaaacggccgatgaacttcgtcatgaaatcagggcggacaaccctggctccggctggtgcggtgattcaccggagcgtgagtgggccgccgcgatggcgcactacgtcgaggagaaaatgccgaaggcaacagcagacggcttcgttcggtatccggccaactggctgatcatctatgacaactggccgttgccggctatcgactacgccaaggcggcgaagtatttggctccgcttctgacggaaatggacgccttctctgtgttcgatacgatttttgtccatgatgactcgcatatgggcgaattccgccatgctcctgtcatctattcacttgttaagccgggctcaaatcgttaa

SEQ ID NO: 511171 - DNA, 969 bp, Stenotrophomonas maltophilia
atgatctctctcgaagccaatatcgccttctacgacacgcactacgacatactgcgtcagtggttcctgcgcccaggcgataaggtggttctcggcgacaagcaaaatcgcgtctgtcgattttgtagcaggaagtcgcccgaagtgaccttccgcaaggtcgcacacgcgataccggaagccctcggcaataaaagcattgaaagcgcgtatgagtgcgacgactgcaatgaagggttcgggcgtggcatcgagaacgatctaggcaactggtcgaagccgacacgcaccttcgcgcgtattcgtggaaagagcggcgttccgacgttgaagaaaggcggcgacgggaaaggctggagaatcgagcatggcgctgtgggcttcagtatcacctcgtatgaggatgatccgctgtaccagattgacgaggtgaaccggcgaatcacctttcagctcaagcgcgatccctatacgccggttgctgtgctcaaggcgttcatgaagatcggcctgacgctgctccccgacgaagaaatcggaaacttcccacacttgatgagctgggtgaggtcaactgatcacattcgccgatttgccgatcagtgtccggtcattcgttcatttcagccagggccaatgccgaacgacttaatcgcggcatttctcttgcgacgaaagtcacacgtaacgaactacccctacatgttcttggtgcttggctatggaaacgaagtattccaagtgcaattaccttccgaacagcacgacctcaccttaaacggccagccaatttcgattcttccttttccgacaccggactcgcctgacccagcgcgatacgggccaaccagggttcaagtgctggacttgactggtcgcgaagttgtcaagggagaggttatcccggttcaagtagggtacgaccttgccgttcacaagacgggatcgaacacgacctcgaaagactag

SEQ ID NO: 511172 - DNA, 1560 bp, Stenotrophomonas maltophilia
atgtcatcgatgctagacaggttctataagcggtccgctcatctgaatgccttgctgaatagcgatcccgccgaagcagtgaaacaggcccgagagatcaatctcgatcctggtacagatgagcgattcaacatgatggggctacgcgcagcgattctggtcgatggtggcgcgttgactcagcagcaggatgcgattgaagaaggactcgccctgtttcgtgaacttcacagttcgtttccagttgctgacgtcacctataacttggccaatgggctgatcgccgcgacaggtgtcccacctcgtaatgcaaattggttgagtcatcaggagtcaactagagagcgtcgcgcagaagcacgacgatgcttctggaaggtcgctcaggatgtggatgccgattcaacgctgcgaactcaagcttggacgaacctcgccaaccaattcagtggcagctatcggcttggcgaagcccaagatggatggcttgccgcgctagagattgatccggagaacggagttgctgcaagttccgcagcccgcaatctgctttggctctatgagcgcggtggctgctcagaacttacgcgcatcgaggcgatcatgctggctaagattgcggatcggcacagggatcgagtcatccaatatgccggcgcacaggccgcggcacagatcgcggcgttcgcatgcgaattgggtgatccgccgccacgatccccacataaagatccgttcctccattgggtcgaacgcgaacgattggcgctcgcgccagtcgtggaactcattgaccccaccatgggcaagctggactggctcatgcttcccggaattctggagcgagagcacggtgctgctgggatgcctccgcctgtgttcgccatgttcaacatgctgaagagcgacttcatcctcgcgcgtgatttgctatggcgggctatagatgaaaacgtgtggcccgcgacaggtcgatttggggacacgcttgactatgccacctatggcccagatgcatcggcgctcatcttggcgcaccggacggctctcgacctgctcgacaagatcgctgtcacggcaaaccactacttcgagtttgggctgccaccagataaggtctacttcggcaagctgtggcgaggaagccccgataagacaactggcgtgcgcccactcaacgaaaaggtggaacaggcgattcgtgggggcgccagtgccctatatggccttgttgaacttgccgaggactacgacagcagtgcgggaatcttgcggtcccaaaaggacctccgcaacgcgggcacacatcgattcgtggtgctgcatgaccttggcgacccagcagaaagcaggcaagcacctgaaattgagcatcatcgacgggagccgtttactcaagaggtgttgcgcgccttgcgtgttgccaggtcggccatccaaatgcttgcgctttcgatttcacagcacgaacaaggtttgccgcagcggacaggcggccttgttggatcactgctcgttcccgactacgactgggttcgtggtcgcgaccacgaaacttag

SEQ ID NO: 511173 - DNA, 1005 bp, Stenotrophomonas maltophilia
atgccgtttgagatcgctccatgggaggccatctccgaaaactacggatgcacggtcctgctcggcaacggcgccagcatttccgtcaacccaagcttctcctacgcatcactgctccagcatgccgccgaccagcatctgctcccagaggacgctcaacgcctgttcgagttcttccagaccaatgatttcgagttggttcttcggatcgtctggcaggcatcgaacgtcaatcggtcgctgcagataccggatcaacaaacgcatgctgcttatgccagtctccgagattgcctcatccaaaccgtccgcgacattcacccggagcacggtgcggtaagcgcccacctgccgaatatctatcagttcctgaagcgattcaaaacagtcatttcgctcaactacgacttggtggtgtactgggccatgacctacgggttggacatcgacgaccagcatgctttcaaggactgctttgtaggaggtggcgccttcgacgatgactggcagcgattcaggcaaccgatccgaggggatcgttcaacctcgcttgtgttttatgcacatggcagtctggtgttgtgccgaaacttggtcgagcaagagcgcaagatccacaaccttcaggatggtctgctggaggccgttcttcaacgctggcaaaacggagaggtcgtgcctttgtttgtgagcgagggaacgtggcctcagaaagtctcttccatccataacagctactacctctccaccgtgtacagagaggttctgaagtcgcagcgggacacgctggtggtttacggctggggcttcgccgagcaagacattcatctcctgcagcgcatgaaggatacgggaatcaatcgcgtagcggtgtcagtattccgaggcgatcaagcgtactgcaaccgggtcttccagatgatccatgatgtattgggagcgcacgtcgaagtggagttcttcgacagcgaaagccccggttgctggattcatccgccccactag

SEQ ID NO: 511174 - DNA, 726 bp, Stenotrophomonas maltophilia
atgatttccatcgtgctcctgggcaagtacggcgtacagcacctttcgctctcccgaggacaactactgtacgaactgctgaacacacttcgcgggctcgatgaccacaccatcatgcaggtgctcgccgaggtagtggtgacccaaggcgatctgcggtcgagagtcaatccgaagtaccggtttgacgagcgggtgcgcgatctgacgcaatgcctactactggacggctacatcatccaggacgagaggttgatccagaccgacccatcgattgccgacgccgcccccttggaggatgacctgatcggcgccttgcagaactcgggggctcctcgtgcccaggagatcatcgccaagatcaacgattcagccagcgcgttccgggcgacgccgcccgactacaacgcttcgctcgtgaatgtccgcgtggcgctggagacattggcaggtgatgtggctgccgacgttgcttcgcgctcgccagaccatgcgacctacaacacctcgaagtggggcgaggtgctttcgttcctgcgcatcagtggcgagatcacaaccgaagaggaaagaggactcgctggtgtattcggttttctgagccctggcgctcaccgtccggtgggcatcccggaagatcagatgacgcggcttggccgctccttcgcgctcaacatgtgctggttccttctcaaaaatcatctcgcacaggaccaccggtcgtga

SEQ ID NO: 511175 - DNA, 483 bp, Stenotrophomonas maltophilia
atgtcgcaactgaccctcactctcgacaccccgctgatggtgcgcgatggccgtgggcgctatcggctggcggacgccgaccagattctggaagccgcgcgccaggtcatcgaacagaagatgcagcgcggcgaggcgttcacttcgccggaggcggtgaaggactacctgcgcgccaagctggccggcttcgagcacgaagtcttcgcggtgttgttcctcgacacgcgccatcggctgatcgactacgtggagatgttccacggcacgatcgacgccgccgacgtgcatccgcgcgaggtagtgatgcaggcgctgcggctcaatgcggcggcgctcatcgtttcgcacaaccatccgagcggaaactccgagccgagcgcggccgacaaggcgatgacctcgcagcttcggcaggcgctggcgctggtggacattcgcacgctggatcacgtcatcgttgcggggactcgcaccacgtaa

SEQ ID NO: 511176 - DNA, 351 bp, Stenotrophomonas maltophilia
atgaacaacgcactcatcaccgacgagcagcgcatcgtgttgctggccaacggccgcgaatccttggagaacccggacttcgatccggcccccgtggtcaagctgttcacgccggacgccggcgcaacctggctgctgaccgagattgatcctgatgaccacgaccacgcctttggtctttgcgacctgggcctggggatgccggaaatcggctgggtcagcctgggcgagctggcgacggtgcgcggcgggctgggcctgccgatcgagcgcgacctgtctttccgcgctgagaagcggttgagcgcctatgcgcgcgatgcgcggcatgccgggcggatcatcgtgtga

SEQ ID NO: 511177 - DNA, 1104 bp, Stenotrophomonas maltophilia
atgtcgccacttctcgaatcagcaatcagggcatccgctactcggttgagccagtacatcaaggtgcatcgagagcatcccgaaatcagcttccatgaccacgtcaagcagcggcgcagggaaaaggccgtccacgcgagttcgttcaagctgatctgtctcgacacgcttgcttggaaatgcgtggcggactaccggcagaacaagaccaccctgacggcggcgatgaaggaatttggtgcaagcattgatcgggccgtgcaaacagggcgcttcgcatttcccatcggcgttcccacctacttggagttggactcgatggtcgatccggccacccgagaagcgctcaagaaactggttgacgaactttcccgaggactctgcatcacctccttccatgaccggatcggctccgagttgcagatgctgcggacaaacatggtgggtagaaccgaggggttggaagacttcttgtgcagccctgtcgaaatgatgggaataccagccatctcgctgccagaattcgtcaaggcacaggtggacgaagtcacattcaacaagtccttctttgatgctctgtacgagcttccgttttccattcaactggaggttgccggcaacgcaccgggagagaaatgggacaactcgcgcggcattaccgacctaaactatggaaaagcacagcatcaatccgaagtcgtgaatctcaacacgggcatcttcttggagctgaagggcggcatcgaagcatggttcatcaacgaaggggtagagcccaatcataaggagatcaccctggatgccttgaacgcaatgaatcactggaagcaggaaccctcctcgcgcgcattgccgacgatgcgcatcctcagctcactatatggcttgatgcgatttgacccgaaccgtcgatacaagaatggagaccccaacgacttcctgatagcggcatccgccctccctgttgcccacgcactgttcacggacagaaaattcgcgaacctcttgtccgacaagaggatcgctctggacaagttctcggattgcacagtggtgagcggcttcgaggaaatggcccgatatctcgaagaacaggcgtcttag

SEQ ID NO: 511178 - DNA, 831 bp, Stenotrophomonas maltophilia
atgactcaagtcattcaaaaaggcaccgcttggcggcgctttttctgttgcacctgttcgccgccgttactgcgtccctaccgccgtcgttttggcggccgccgcgtcggagacttgctttgcagcggttgcggccgcatctgcagaacgtgccgcctgcgcctgggccgccgcgaactcggcctgccgctgttcactgaacctgcgttccagttccatcgctgcggcaaggctctccggattcttcgcagcacatgcctgctgtatcagttgtaccgcacggtcggacaacccgggttggatgttgccaagcaggcaatcggcgtaggttggcgagccggcggccagcgcggtccagcatgtgaacctccttgcaagtctggatgggtccgagaagggaccaggccgagcatggcccggatcatggagcagtgttcctgcttcggcgtccggcgtgcggcggctggggtcagacaaggcgcaaagcgcggaatgcggatgacccggcccgaacggaggggcatgaggcgagttccgcgtccgccatcaatggagaacgcgcgcacgtgtcgtgctggctttgtatgccattcgctgtgcgtgccgtcagtgacgattcaaagacgacactttcacgggcgcccccggcaaggcctggatctatgcaggcctgctgagcccgcgctgtgccatccgttgcggcaacagcagcaacggccgctcgaccacgcgatgcaccagatagccgaccacgcagcacgccagcagggtcgcagcgacgaagaggccgtgattccaccaggcacctgtgggcagcagcatcgaccatag

SEQ ID NO: 511179 - DNA, 1509 bp, Stenotrophomonas maltophilia
atgtccgactttcgcattcttcgtggtcaaccgtcgcgcttggcggtgtgcctgctcgccctcgcaatggctggctgcgcggtggggccggatttcgtcaaacccacgccgtcggccccggatgactggacaagttggcgcagcgccgacgatgcgttgcgtacccctgtcggcaacgagcaggcgttgccggcggactggtggcgggcgttcggcgatccgacgctggaccgccttgcgcaacgggctttcgaggcaagcccggacttgcaaacggccgcgctgcacttcgcccaggcgcgtgcgcagcgcagcaccgtcgaggctcaacgcgggccgcaggtcaacgccaacggcggcgcgatccgccagcgccagagtgagtatggcgccagcacacgcatgatcgacgccatcggcggcgaccgatcgacgctggcacaagtgctgagtgagcctttcacgctctaccagatcggcttcgacgcctcctgggagctggacctgtggggccgcgtgcgccgctcgatcgaggcagccgacgccgaagtgtccggccaggcggcgctgctggatctggcccggttgagcctcatcagcgatgtggtgcgcaactacttcgagctgcgcaccacacagcgccagatccgcctggcgcgcgaggacatcgccgcgctggaggagcgcgtgggcctgctggaagcgcgcgtgcagggtggcatcgtcgatcacctggacctggagcgccagcgcgccgaattggcggcggtgaaagcgcaattgccggggctgctggcgcaggaaggcgccagcgccaaccagatcgcgctgctcctgggcgagcggcccggtgccttgcgcaacgagctggctgccgtcgccgacgacggcaggacggcgttgccggacttggcgctggggctgccgtcggaagttgccctgcgccggcccgacattcgcgccgccgaggctcgcctgcatcgggccacggccagcatcggcgttgcgcaagccgagctgtacccaagcatccgcctgggtgcgcggttcgggtacgagtcctatctgagcggcgaattctcagcctggggcagccgcacatggtcgataggaccgactctgagcctgccgctgttcgaccgtggccgccgcaagagcgtggtgcagttgcgcgagctggagcagcaagaagcggcagtgaactaccagaggaccgtgctcaaagcctggcaggagatcgacgacgcgctcagcggatacaccgcagagcagcagcaggaacgtgaactgcaagcccgaatgcacagcgccggccaagcctacgaactggcccaggcacgctacgacggcggcatggccgatttcctctccgtgctcgacagccagcgtagctatttgcaggcgcgccgcgaattggcagcgagcgaagggcgcgtgggcacccgctacgtgatggtcaacaaggccattggcaatacacaactatcggaaggcggcgtgacgaaatga

SEQ ID NO: 511180 - DNA, 1113 bp, Stenotrophomonas maltophilia
atgcacgcatttctcactcaactggcgtcgatcggcttcctctgccgcaaggagtttctggcgctgttcaaggagcggtccagccgggcaattctgttcgtacccgttctgatgcaagccctgctgtacggctacggcgcgacctacgatctcagctatgcaccctatgcggtgctggaccagagccggggcgcggcctcgaccgagttgctggcgcgtgtggatggcaccggcgtgttcaagcgcgaagcctcgctgaatacgccgcagcagatcgctcaagtcgtcgatcggggccatgtgctgctggtgctgcacttccccgcagacttcgacgcccggctggctggtggtcagcaagctccgttgcagatgatccttgacggccgcaattccacgaccgccggggcggcggcagcccaggtcagtgccatcgtcgccgcttacaaccgatcgcgcaccggcacgcctgcggtcagcgtggagcgacgtgcttggtacaacctcaacctggagtcgcgctggaacttgatgccggcactgattgccgcgttgagcctgatccagactttgctgctgtcgtcgctgtcggtcgcccgcgaacgcgagcagggcaccttcgaccagttgctggtgacgccgctgacgcccatgcagattctggtcggcaaggccgtgccgccgatgctcgtgggcgtggcgcaagcgaccatcattttgctgatcatccgcttctggttccagataccgatgaacggctccccgtggctgctctacctggggctggtcgttttcacctgtgccaccgtgggactcggcctgtcgatttccgcgctgtcgctgaacatgcagcaggccatgctctacaccttcctgctgatcatgccgatgatgctgctgtcgggcttgctcacgccggtgagcaacatgcctgaacccctacagatcgtcacctatgccaatccgctgcgctttggcatggacctcgtgcgccgcgtctatctcgaaggcgccgggttgcgcgaggtcgccttcgacttcgttcccatgctggtgatggcaatcgtcacgctgccgctggcggcctggctgttccgcaaccgcctctcctga

SEQ ID NO: 511181 - DNA, 1128 bp, Stenotrophomonas maltophilia
atgaatacctcgggattcatcaggcgattctccgcgctgctgcgcaaggaagtgcgccagatgctgcgcgacaggagcacgctggcggtcggcctgatgctgccggctgtgctgatcctgctgttcggctatggcctgtcattcgacgtgaaaaacgcgccggtggccgtagtgctggaggacagttcgccgtccgcgcgcgaggtgcttgccggcctggagggatcgccctatctggcgcccgtgtggacgaccaatatgacggaggccgagcgccggatgcgcgacggggaagtgcgcgccatcgtgcgggttccggcggacttctcgcgcagactagcagcggggcaagcccaggtgcagttgctgctgaacggtgtcgattccaacacggccgctgccgttgacggctatgtcggtggagccatcgcaacctgggcgcaacagaaggccgaccgcgctggcagcaaatccggtgccggtggcgtggagctggtgcagcgcatgtggttcaacgaagcctcaaccagcacctggtatctggtgccgggcttgattgcgctggtaatgacgctgatcggcgccttcctgacttcgctgctgatcgcgcgcgagtgggaacgcggcacgctggaatcgctgtttgtcacgccggtacggccgctggaaatcgtgctggccaagctcgcgccctacctgttggtcggtgccattgacctggcgctgtgcctgctcgcggccaagttcctgttccacgtgccgatgcgcgggtcgctgtgggtgatcgtgtttgcctcgctcttgtacctgacggtatcgctgctgctgggcctgttcatctccggcaagacgcgcaaccagttccaggcgagtcaggtagccctgctggtcagcttcatgccggcattgatgctgtcgggtttcatcttcgacttgcgcaacgtgcccgtggtggttcaggcggtcagccagctactaccggcaacgcacttcgtcgggctgatcaaaacgctgtttctggccggtgacaactggccgatgattctgcgcgactgcgcgattctgagcctttacgcgctcgtgctgaccggcgccgtgcgccgcacgttgcgcaagacgctggactga

SEQ ID NO: 511182 - DNA, 1776 bp, Stenotrophomonas maltophilia
atgaacgacagcgacacaacggtcattgccgagggcctgcgcaagaccttcgaggcgccgggcggcggcccgttgcttgcggtgaacgatgtgtcgatgacgatacgcgcgggcgagctgaccgccctcgtcgggccggacggcgcaggcaagacaaccttgctgcgcatgatggccgggctgcttaagcccgacgccgggcgccttgaggtgctgggcatcgacgtggcggccaatccgcaggcggtgcaagaccgcatcagctacatgccacagcgcttcgggctgtacgaagacctgagcgtgcaggaaaacctggacttgtacgccgacctgcacggggtgccgcctgccgagcgcagcagacgcttcgcccggatgctggagatgaccgacctcgtgcgcttcaccgcacgcccggccggcaagctgtccggcggcatgaaacagaagctgggcctggcctgcacgctggtgcgctcacccgatctgctgctgctcgacgaacccagcgtcggtgtcgatccgctgtcgcggcgcgacctgtggaagatcgtgcagcaattggtcgatgacgagaacctgagcgtgatcgtcagcaccgcgtacatggacgaggccgagcgatgcgcgcaggtgttcgtgatgaacgcgggccggttgctggacgaaggcacgccggccgcgttgagtgagcgcgctcgcggcttgaccttcaccacgtcgcctccagcggggatgcctgcccgcgatctacaggcgcgattgatcgacgccaccgaactgatcgtcgatgcggttccccagggcggcgcggttgacttcatccgccaaccgcaggccaccaccgacgaggtgaacaagctgcttggcgatgccggctgcgagccacgcccggcggaactcgaagacgctttcatgatgatgctgcgcaagcagcagcaggacgagggccaggcgccggaactgcgagcagcgtcgcacgcgcaggtcatgaatggcgatgccgatgggccggtgatcgtggtccgcgatctggtacgcaagttcggcgacttcaccgccgttgccagcacatcgttcgaggtgagccgcggcgagatattcggtttgctcggccccaatggcgcgggcaagaccacgacattccgcatgttgtgcgggttgctgccagccaccagcggccatctggaggtcgctggactcaacctgcgcacggcgcgcgcgcaggcgcgtgggcgcatcggctacgtggcgcagaaattcgcgctgtacggcaacttgaccgtgcgcgagaacttggagttcttcggtggcgcctacgggctgcgcggacaggtgctgcgcgagcgcgttaacggcactatcgaggaattcgggctggaaccgatggcggtcagcggcctgctccccggcggctacaagcaacgcctggcaatggccgctggcctgctgcaccagccggaaatcctgttcctcgacgaaccgaccagcggcatcgacccgctggcacggcgtgccttctggcggacgatcaccgcgctggcgcagagtggcgtcactgtcatcgtcaccacccacttcatggaggaagcggaatactgcgaccgcatcgctatccaggacgccgggaagatgctggcactgggcacgccgcaggaggtccgcgaacaggccgggggcgacggcagcactgacatgaacagtgcgttcatcgccatcgttgaacgcggtcgcaccgaaagccagcgcgcgatagtgggagccgctgcatga

SEQ ID NO: 511183 - DNA, 1002 bp, Stenotrophomonas maltophilia
atgaagaagcctctcatcctccttgcagccatcgcggcagtggttctcgtagcctgggcctggtggcatttcagccaccgtgatggcgacggcgcgctggtgctgtacggcaacgtggacattcggcagatttcgctggcgttcgacggcagcggccgggtggcggaactgcacgccgaggaaggcgaccgcgtaacgtcgggaactgtgctgggtgtgctggatacccgcacgctggcgttgcaggccgagcaagcgcaagcacagatcggcgtccagcagcagacgctcctgcgcctgcgcaacggctcacggccgcaggaggtcgcgcaagcccgcagccgtgtgaccgcagcacaggctgacgcctcgcaagccgaacaagacctcaagcgcctgcaaggcattgcggccaatacccaagggcgcgccgtgagcgcgcaggatctggaccgcgcccgaagccatctacaggtcgcgcaggcgaaggtcgcggagcaacgcgaagcattgcgcttgaccgaacttggaccgcgtgcggaagacgtggcgggggcggaggcacagctcaaggcggcgcaggcgcaactggccttgttgcagcaccagatcgcccagggcgaactcaaggcgcccgccgacgcgatcgtgcgttcgcggcttcttgagccgggcgacatggccacgccccagcggccggttttcgccttggcgttgacgcagccgaagtgggttcgcgtctatgtcggcgaacccgacctgggccgggtcaggcccggcatggaggcccgcgtcgtcactgatggccgccccggccagtccatcactggcaaggtcggctacatctcatcggttgccgagttcacgcccaagtcggtccagaccgaggaactgcgcaccagcctggtttacgaggtacgggtgctggtcgatgacccgcaggacgtgctgcgccttggacagccggcaaccgttcacctgacgaccggcaccgcgcaatga

SEQ ID NO: 511184 - DNA, 1155 bp, Stenotrophomonas maltophilia
atgtttacgaaacggctggttccacccgacggcagcgccattgccgacttggccttgggtcgccctggcgctccggcgcgtgctggccgtcggcacctcgcctcacgcatggccgctgtcgccgcgttgctcggattgctgtgcgtagtgcccagtagggtggcacaggcgcagtcgtgccctgacgggaagacacctctgttgtcgtccgggacgatcaacctgcgcattgacaacgatctgttcggaaggctgggccaggatcaaggctactcgaacggctttttggtcagttgggtatcgcccaacctggtcgattactcccatgatccgtgtctgccattcctcgcccgccggctgaaccaacgcttggcctggctacagccggacgggttcgacgagcagaacatgacgatcgggatcgggcagatgatgtataccccgaccgacaaggtgccttctcacctcatcgaggatgatcgtccattcgccggcgcgttgatgctgagttttggctacaacgcccgtcgcggcgattctctgcgtacttcgcaaatccgcgttggcgtcgtcgggcctgcttcgcgggccgagcaggtgcagaactggtggcatggtgtcatcggcgtggatcgcttcaacggctgggatcaccagttgcgtgatgagccagtcgtgcagttgatccatgagcgccgcaagcgcgtagcgcggcacgtaggcacaagtggctggggttgggactacacgcgccactggggcatgagcctgggaaattttgcgacctatgccaatgccggcggcgagttgcgcttcggcctgcgcctcccggatgatttcggcaccgcgccgctgcggccggctggcgagaacaccgcgccggtgaaggtggccgccggccaaccctggaactggcacttgttcgtggccgcagacgcccgctgggtactgcacgacatcacactcgacggcaacaccttcaagtccagccacagcgtcgataagcgcccgttcgtggccgacctcggctatggcgctgcgatctaccgcagccactggcgattcgcattcgcgcgctacttccgcacgcgcgaattccacggccagaaggaaaccccggtctacggcacgttgaccatcggcaggcgattctga

SEQ ID NO: 511185 - DNA, 945 bp, Stenotrophomonas maltophilia
atgaacctgcataaacatgcccgtttgagcccgcgcggtcgagccctgctcgtggaccgcatccttgttcagggccttcgcgtcgaagaagcagcgcatgcggccggtgtcagcgtccgcacggcctacaagtggctcagacggttcaaggaggaaggtccgcaaggcttggtcgaccggtcctctcggccacgttcctgcccgcatgccacgccacaggagattgtgcagcacgtcatcgagcggcgccgctcacggcagacgtatcggcagatcgccgggcaactgcctgttgccccgagcaccatcgcccggctgctgcgtcgcgccggcctgcaccgcttggccgaactgcagccggcagcgccggagaaccgctacgaatacgccttgcccggccagctgctgcatctggacatcaagaagcttgctcgtttccgacagccggggcatcgggtcaccggcaatcgccaagtcaactccgatggcatcggctgggaatacgtccatctggccatcgatgaccactcccgcgtggcgttcggctccatcgagccggacgagcgcggtagtagcgcgtgcagggcgctgttgcggacggtgcgctactaccgacgcttgggcgtgcaattcgagcgcgtcctcaccgacaacggcgcctgctacagatcgcgtagcttccggcgtctggtccgtcggttgggcatgcgccacctgcgcacgcgcccctacaccccacgcaccaacggcaaggctgagcggctggtgcagaccagcctgcgcgaatgggcctacgcccgctcatacgccaactccgaacagcgagcccacgcgctgcagggctggcttcatcactacaactggcatcgaccacatgccagccttggctacaggccacccatcacccgaatcccactgaacaacgtggtgggtttacacagctag

SEQ ID NO: 511186 - DNA, 705 bp, Stenotrophomonas maltophilia
atgaccaaaccgcgccgcagcccccgtaccgatggcgagctgacccgtacccgcatcatggaagccgcaggatcgttgttcgcggccaccgggtacgctgaaaccaccagcaaagccatcgctgcgaaagccggcgtggacctcgcttcgatcaactatcactttggcagtcgccgcggcctctatcaggccgttcttgtcgaaggtcaccggcggatcatcagcttcgacgatctgcaacaagtcgtcgaaggcgcgctgcccgcgcgtgagaagctgaaatggtgcatcgacagactgaccgaagccacgataggaaacgacggctggcacgcacggctctttgcacgcgagttgctagcgccgtcgtcgaatcttcaggttctataccaagaggatctggaaccgaagttcaccttcatcaggcgcgtcatcggcgaggtcactggcattcctgaaagcgacccagcattgcttcgctgcatgatcagcattgcggctccctgcttgatgctgctggtcgcaggcaacggcggactaccaggccccccgcagcaggtgctacggatgccaaggcaagaactgacgtcacacctgcacaagttcgctcttgcagggctggaggcgattggccgggaatatgctgagagtacgccgaaggggcgcaaatcaccctcgaagcgacgcagggctagcgagacgtga

SEQ ID NO: 511187 - DNA, 177 bp, Stenotrophomonas maltophilia
atgctcggcttgatttatcgcaacctgtccgaagagcagccgagcatggctcggctctacagaaagcagaaaacccgcgctgtcgccagcgcgggtttctgtttggatcaacccttcaatgccgcctgcacgaacggcggagtcaccagcacgccggtgtgcagcgcggcggtgtag

SEQ ID NO: 511188 - DNA, 621 bp, Stenotrophomonas maltophilia
atgcgtccaacccgtgcccagcgcaccgccaggggcgctggacagcgaatgatagtggcgacggaagctggcccagcccatatcaacgtccgactcaggctgcgacttgtctccggttgtggggtcgcacgggtttccaacgtcgtcgcactgttttggcacaggagtactggtgtacatccggaccgcggacgacggacccgtatccagcgccggaggcatgccacacatctgcagatcttcacgccacttcatcaccgtagtgctggtattcgggcacttcacttcacgagtgcgctgaagatagtttctgccctgcatcgtcttacacgcttgtgtctgagcgtcgaagtaatagtagtcaacagtagcctctccgtcctcagcgatgttgctcccgtcagcgcccccacccgctcctcctcccgggatgcccttccatggcgtcgtcatcgacacctcggtcttcggacaggagggatcctgaggcatcagatccctcattgcctggaagaggctgtcctccgagtcatacgtcttgccgttgtggctgtacttccagtcggtcctgatcagcttcgccggcttgatcgcgtagtcgtagacaaccttgtttgctag

SEQ ID NO: 511189 - DNA, 216 bp, Stenotrophomonas maltophilia
atgctgccgttgctctcggtgatgccgttgaccttgcgcggaaggccactggtgccgctggcggtcaatgcgtacgtactctgcttgcccagtgcgtcggtgacgatggtggtgcctgccggcgtgtactccaggcgcacgccatcaatgcccacgtcggcttggctgcaatcggcggaatggcggctgcaggtgacccgccccttggcgtcgtag

SEQ ID NO: 511190 - DNA, 246 bp, Stenotrophomonas maltophilia; identical to SEQ ID NO: 335182

SEQ ID NO: 511191 - DNA, 1293 bp, Stenotrophomonas maltophilia
atgagccaggacgacacccccgacctcgccacgccgcaggcgggcaaggttgcgccggaggcggtggcgctgcgcgcccagccacgcccggtcacgcgcctgaatcggcgcacgctggccatcctcgccggcggcctgtcggtcgccgtgcttggggccaccatctggtcgctgcaaccgcagcggcgcggagccaacgagcagaccgagctttacaacgtcgatcgcgtctcgaagtccgaagggctggatgcgctgccgacggactactcgaagctgccgccagccttgccgcccgatgtgcccgaactggggccgccgttgcccggcgaccttggtccggccatcgtcgcttcgcagcagccggtgacgccgggctattcgccgccaggccatgatcccgaagatgccttgcgcaaggaggcggacgcggcggcggcctcgtcggtgttcttccgctcgggcggccagggtcagggccaggccgccgccacggtcgcgcaagctgcgccgggtgcgcctggtgttgcaaacacactcgcggccttcgatcctctcgctgccgggcctgcctcgacagcggcccagcccgccgacccgaccgccgtgcagaaccggcaagaccagaaagaggcattcctgaaagccggttctacggaaacccgcaattccggccatctggcgctgcccgcatcgccctatcaggtgatggccggaacggtgatcgcgggtgcgctggtgacgggcatccagtcggatttgccgggcgacgtgatcgccacggtgacggagccggtctatgacacggccacgggcaagtttctgctgatcccgcagggctcgcgcatccttggcaaatacaacagccaggtcagctacggacaaagccgcgtgcaggtggtgtggaatcgcgtcattctgcccgacacatcctcgctgacgctggacaaccttgtcggcaccgatccggccggctactccggcctggaagacgacgtggactggcattggaatcgcatcgttgccggcgcggtgctgacgacgttgctgggcgtaggtgccgagctggccgcgccggagaaccgccaggatggcaaccgcatcgtcatcgccgggcgcgatggcgcacaggacagcatcaatcaggtcggccaggaaatcacccggcgcaacatgaatatccagccgacgctgaccgagcggccgggcctgcccgtgcgaatcatcgtcaaccgggatctggtgctgcggccgtaccagccgctgttcttcaatcggggagcttcgcaatga

SEQ ID NO: 511192 - DNA, 1380 bp, Stenotrophomonas maltophilia; identical to SEQ ID NO: 335183

SEQ ID NO: 511193 - DNA, 333 bp, Stenotrophomonas maltophilia
atgcgatgcgtcctcgccccgtctgttgtggtgcttgtcgtgctgctggccgcttgcggcaagcagccggccgacaaccttgccgatgccctggccgtcgatcccgtgcggctcaaggcattgcgcgcgcaatgcgcggccgaccggcaggccacgggcgaggacgcttgccgtgccgccgccgaagccttccggcggcgcttcttctccggcaaggccgggccggatgaataccagacgctggccgacctgccgccgatcccgccgagcttcgatgaaccggccgatggcatggcgccggccgttcccgccgagccggagaacacgccatga

SEQ ID NO: 511194 - DNA, 633 bp, Stenotrophomonas maltophilia
gtgcagaacacgctgaccgcgatccgcacgctggagcagatcaacaaccagatccagcagctccagaacgaagcacagatgttgatgaaccaggcgcgcaacctcgccagcctgccgtccagcgtggtcggccagttgcgcgccaatctggcaacgaccgagcggctgatcgcccaggcccgaggcttggcctatgacgtgacgaatctggatcgggagttcgcacgcctgtatcccgagcagtacgccgccaccgtcagcggcgaccagatgtaccgcgacgcacaggagcgttggcggaacacgctcaacggcttgcagaccacgatgcagatgcaagctcaggtgtcgcagaacctgggtgaagacgagagcgtgctggccgatctcgttggcaagagccagtcggccgaaggtgcgttgcaggcgatgcaggccatgaatcagttgctggccttgcaggccaagcagtcgatccagtcgcagcggctccagatcacgcaagaccgggcggcgtcgctggagctggcgcggcaggcggcggccacggagcgcgcccgcgaagtgcggcggcgcttcctgggcgaagggacgccgtacacgccgcagtccgtgaacttctacggcaactga

SEQ ID NO: 511195 - DNA, 216 bp, Stenotrophomonas maltophilia
gtgcccgccttttcctgggccggcaccttcgccgaaaccgccgacggcctgcccttcttcggcccgcacccgcagtggggcccgcgggtgcatttcgccatggcctacggtggcaacggcatcacctattcaatgatcggcgcccagctgctgcgggcccggatcgagcggcgcaagcatgcactggaagggctgttcgggttcgggcggttgtag

SEQ ID NO: 511196 - DNA, 264 bp, Stenotrophomonas maltophilia
ttgaacgcgcggccggtgcacggcctggcgcagatggtgcgggcgctgagtgcgcagcacacgccgatggcctggctgagccgcgccgaggtggtgcagctgggcaacatgctggtgttcgcgctgcccggcagcccgaaggcggcggcgcagtgcctggacatcctggcaccggtgctgggtcatgcgctggcgatggtagagggagggcgacatttccctggtctccaacctgccgatcaacgcgagcgggagggcgcatga

SEQ ID NO: 511197 - DNA, 1794 bp, Stenotrophomonas maltophilia
atgctgggcgaccagcacctgcgcgtggtgtcggtgcggggcttcccgacctcgacctggccggggattctggacgacctcaaccgcctcggatttgcctatcgctggagtacgcgctttctctgcctggacaaggccgaggcggaaaaagaactcgcccgcctgcgccgccagtggttcgccaagcgcaagaacgtcgtcgcgctgctgcgcgaaacgatcttccagcaggaaagcccgctggtcgataccgacgccagcaacaaggcggccgacgccgatgccgccctgcaggagttgggcagcgatcaagtcgccttcggctatctgacggcgaccgtcaccgtcatggacgaggacgccgccatcgcagacgagaagctacgcatggtagagcgcgtcatccagggtcggggcttcgtcaccatccctgaaacgctcaatgccgtggatgcctggctgtcctcgctccccggcaatgcttacgccaacgtgcgccagcccatcgtctcgacactgaacctggctcacatgatgccggtgtcggcggtatgggccgggccggagaagaacgaccacctcgacggcccgccgctgatcgtcacgcgcaccgatggcgccacgccgttccggctggtgacgcacatcggcgacgtgggccacacgctggtcgcggggccgactggcatgggcaagtcggttctgctcgccacgctggcaatgcagttccgccgctatcgcggctcgcgcatcttcgcgttcgacatgggccgctccatgcgagccacgatcctcgggctggacggcgagcactacgacctgggcacggatggcgaaatcgccttccagccactcgcgcgcatcgaccgtgagggctaccgcacctgggccgccgaatggatcgaaggccgcttgctgcacgaaggcgtggcggttggccccgacgagaaagcggccatctggtcggcgctcggcagcctcgccggtgcgccggtggagcagcgcacgatgacggggctttccgtgctgctgcaatcgaacgcgctgcgccaagcgctcgcgccctatgtgctgggcggcgcgcacggcaagctgctggacgccgatcacgaccggctcggcatggccgacgtgcagtgcttcgagatggaggagctgatgcacagcaaggccgccgtcatggccgtgctgcattacctctttgcgcgtttcgatgaacgcttcgacggcgcgcccacgctgctgatcctcgatgaagcgtggctattcctcgatgacccggtgtttgccgagcgtatccgccagtggctcaagacgctgcgcaagaagaacgtcagcgtcatcttcgccacgcagagcctcgccgacatcaaggattcgagcatcgcgcccgcgatcatcgagagctgcgcgagtcggattttcctgcccaacccgcaggccaccgagccgcagattcgcacgatctacgagggcttcggcctcaacaggcggcagatcgaaatcgtcgccaccgcgcagcccaagcgcgactactactaccaatcccgtctcggcaaccgcctgttcgacctcgacctggggccggcggcgctggccttcgcgggcgcgtccacgccgcaagaccagcgcgacatagaccgcctgctgctggacgccggcgcacccggcttcgcgggcgcttggctgcgccatcgcggcctcgattgggcggccgacctgctgccctcgttccccggcctggcgccgggttccctccgtaccaccgaccacccacaggagagcctgtcatga

SEQ ID NO: 511198 - DNA, 282 bp, Stenotrophomonas maltophilia
atgcgtcccgctcctttgcggcctgccgccgctgtctcgaccgctgccgtgcagccccaacgctatctcaccaacgacgaagccgccgagtacctgcgcctgtcgccgcgcacgctggaaaagcagcgcgtgatcggcggcggcccgcgctttcgcaagttcggtcgccgcgtcatgtacgccgtggccgacctcgatgcctgggccgccgaccgcagtttcgagacgacctccgatcccgaatacgccgagcaccactcggccgacagccgtgcgcgctga

SEQ ID NO: 511199 - DNA, 336 bp, Stenotrophomonas maltophilia
gtgccggtcggccgctacgccaagggcgcgctggaagcggccgggctgtggcccgcagtgcagggcaaggccatcaccacccagaacgtgcgccagtcgctggattacgtggcacggggtgaagtggatgcgggcttcgtctatgccaccgatgcgcaggcgatgcccggccgggtgcgccgtgcgttcgcggtgccggtgtccgggcgcatcgcctatccgctggcggtgaccagggccagtacgcagccggcggaagccaggcgcttcgctgccttcgtgcgttcgccgcagggtcaggcgatcctggccaggcacgggttcggcaagccctga

SEQ ID NO: 511200 - DNA, 354 bp, Stenotrophomonas maltophilia
gtgatcgagcagctgctggccgcgggctggcacgagcggccgcgcgccgctgatgccgggccggcgcgcgagttcgtgcacccggagcatcgcggcagcattgggatcatcgcgccgtattcgcgtgacttctgcaagggctgcaaccgcctgcgggtgaccgccaagggcgacctgcggctgtgcctgttcggcgagttcggcgtgccactgcgcccgctgctgcaacgcgacgaggaccatgacgcgctgctggcacgcatcaccacccagcttggcctgaaagcggccgggcacggactgcaccagggccagaccgggctgatcccgcacctggcctcgatcggaggatga

SEQ ID NO: 511201 - DNA, 483 bp, Stenotrophomonas maltophilia
atgctggccgggatgttccgcttcgtttgcagcaatggccttgtctgcggcgacaccgtggccgacgtgcgcgtaccccacaagggcgacgtagccgctcacgtcatcgaaggcgcatacgaagtcctgcacggcttcgaccgggtgcaggaatcgcgcgatgccatgcgcgccatcacgctggacgccggggaatcggaagtgttcgcccgcgctgcgctggcgttgaagtacgacgaggacaagcccgcgcccatcacggaatcgcaaatcctgatgccgcgccgccatgacgacgaccgccgcgacctgtggagcgtgttcaaccgcacgcaggagaacttgaccaaaggcggcctgtccgcccgcgccgcgaatggccgccgtcagaccacccggcccgtgcagggcatcgaccaaagcgtgcgcctgaatcgcgccctgtggctgctggccgatggcctgcgccagttgaaagcctga

SEQ ID NO: 511202 - DNA, 483 bp, Stenotrophomonas maltophilia
atgctggccgggatgtttcgcttcgtttgcagtaatggccttgtctgcggcgacaccgtggccgacgtgcgcgtgccgcacaagggcgacgtagcagcccacgtcatcgaaggcgcttacgaagtcctgcacggcttcgaccgggcgcaggaatcgcgcgatgccatgcgcgccatcacgctggacgccggggaatcggaagtgttcgcccgtgctgcgttggcgttgaagtacgacgaggacaagcccgcgcccatcacggaatcgcaaatcctgatgccgcgccgccacgacgacgaccgccgcgacctgtggagcgtgttcaaccgcacgcaggagaacttgaccaaaggcggcctgtccgcccgcgcagcgaatggccgccgccagaccacccggcccgtgcagggcatcgaccaaagcgtgcgcctgaatcgcgccctgtggctgctggccgatggcctgcgccagttgaaagcctga

SEQ ID NO: 511203 - DNA, 150 bp, Stenotrophomonas maltophilia; identical to SEQ ID NO: 365273

SEQ ID NO: 511204 - DNA, 318 bp, Stenotrophomonas maltophilia
atgcgcgccatcacgctggacgccggggaatcggaagtgttcgcccgcgctgcgctggcgttgaagtacgacgaggacaagcccgcgcccatcacggaatcgcaaatcctgatgccgcgccgccatgacgacgaccgccgcgacctgtggagcgtgttcaaccgcacgcaggagaacttgaccaaaggcggcctgtccgcccgcgccgcgaatggccgccgtcagaccacccggcccgtgcagggcatcgaccaaagcgtgcgcctgaatcgcgccctgtggctgctggccgatggcctgcgccagttgaaagcctga

SEQ ID NO: 511205 - DNA, 726 bp, Stenotrophomonas maltophilia
ttgttgctggggttggtggcctccgtgccggcctgggcggccgacctgacggtgtcggcggcctcgagcctgaccgagagcttccgcgaactgggcactgcctatgagaaggcgcacccgggcaccagggtcgatttcaacttcgccgcctctggcgtgttgctgcagcagatcagccgtggcgcgccggtggatgtgttcgcctcggccgatgaaaccacgatggaccaggcccagcagcagcatctgctggcggccggcacccgcgaggtgttcgcagtgaacgcgctgtgggtggtggtgccgccgcaggccaaggcggcgccgcgtaccttgaaggacctggccggtgccggtgtgcagcgcatcgcactgggcaacccggacagcgtgccggtcggccgctacgccaagggcgcgctggaagctgccgggctgtggcccgcagtgcagggcaaggccatcaccacccagaacgtgcgccagtcgctggattacgtggcacggggcgaagtggatgcgggcttcgtctatgccaccgatgcgcaggcgatgcccggccgggtgcgccgtgcgttcgcggtgccggtgtccgggcgcatcgcgtatccgctggcggtgaccagggccagtacgcagccggcggaagccaggcgcttcgctgccttcgtgcgttcgccgcagggccaggcgatcctggccaggcacgggttcggcaagccctga

SEQ ID NO: 511206 - DNA, 195 bp, Stenotrophomonas maltophilia
atgtccgctgtgccggcagggcggcacgcgtaccgctgcaacgacgaaggcacggccggggccgtgccttcgcggttcaatgcaggtggctggacttaccagaagaactgcgcgcgggcttccaggatgttgggatcgtcgttgacgaaaccgcgcgccgtggagctgtacttcttgctgtcgaccatcacgtag

SEQ ID NO: 511207 - DNA, 264 bp, Stenotrophomonas maltophilia
gtgaccctgttgttcgatcgtttcgacagcccgatcggcgtattgaccatcgccggtgacgagcgtggtcttgcacacgtgctgttcccggagaaccgccaccccgcgcgcgggcgcgacggctggcatcacgcgccgggcgcattgcccgaagcgcgcgaacaactgctgcagttcctgcacggtgaacgcagccggttcgacctgcagctggcaccacgggcacgcctttccagctgcgtgtttggcaggcgctggcgttga

SEQ ID NO: 511208 - DNA, 147 bp, Stenotrophomonas maltophilia
atggtattcgtggtgcggccccgccatgcgttgaagggcgagtgggggcagagccctttcccgcggaaagggatccgcccccctgcatccgatcagaagaacgcgcggatgccgaatgcgaccccgcggcccggcagcggcgagtag

SEQ ID NO: 511209 - DNA, 1023 bp, Stenotrophomonas maltophilia
atggtggccctcgccaccgcgctgctgtccaccagccccgctgcatgggcgcaggacagcagcacatcgacgacgcccgacgcggccaccaccctggataccgtttcggtgctgggcagccgcaccaaaccgcgcacggtgtcgtcgtcggcggtgccgatcgacatcatcagcggtgaagagttccgcaaccagggcgcgaccgacgccctcgaccagctcaaggtgctggtgccttccttcaacgtcagcacgattcccatcgacgatgcggccagcctggtgcgtccggccaacctgcgtggcctgccgccggacaacaccctgctgctggtcaacggcaagcgtttccaccgctcggcggtgatcaccttcctcggccatggcctctccgatggtgcgcagggccctgacctttcggtgttcccgtcactggcactggagcaggtcgacgtcctgcgcgacggtgccgccgcgcagtatggatcggacgccatcgccggcgtgctcaacttcggcctgaagaagctgcgcgaaggcggtactgccggggttttcgccgggcagtactacaagggcgacgggcttaccacccagtactcggcgcagatcggccttccgctgaccgagcacggtttcgccaccctgacggctgagtggcgcaaggccgacgacacttcgcgcagcgtgcagcgcgatgatgccgctgcggtggcggcggccggctaccccggggtgaacgacccggcgcagatctggggatcgccgaaggtggacgacgacctcaagctggtcgccaacctcggctacaacaccgaaaacgtggagttctacctgttcggcaactatgccaagcgcaaggtggacggcgggttctactaccgcgaccccaccgcgcgttcgggcgtgtactccaatgatgggggggagacgctgctggtgggcaacctgaccggcgtggcagctgcccttccatcgccctgcgcgacggcgccggcagcctgctgccctacagcaccgtaa

SEQ ID NO: 511210 - DNA, 1119 bp, Stenotrophomonas maltophilia
atggcgacactggtaaagaccccctccggcacctggaaagccgtcatccgcaaggtcggctttccaaccgcaaccaaaaccttccgtaccaaacgggatgctgaagactggtcacgtcgaacagaagacgagatggtgcgcggcgtttacatccaacgcgctccggccgagcggatgacagtcgccgacgctctcaagcgctacctggcagaggtctcgcccaccaagcgaccatcttcagcagctagcgacgcccggcattccaaaccattgatccagcacctcggcaattactctctggccgccctatcccctgagatcatcgccaagtatcgagatgaccgactggcagggctggatagaaaggacgccaagggaagacccgcccccaagccccgctccccgaacacggtccgcctcgatctggcactgctgggccacatgttcagcaccgcgatcaaggaatggggcattggtctgccaagcaatccggtacagaacatccgccgccccgcaccgccacccggtcgcgaacggcgccttagtctggacgaagaaacacgactgatgcaggcagtcgatgcgcacagcaacccaatgctcggctggatcgtccgtatcgccttagaaacaggcatgcgttcgtcggagatcaccacccttcgccggagccaggtcgatctgaaacggcgcatcgtgcgccttctggagacgaagaacaccctgccccgcaccgttcccctgaccagtgccgcagtagacatatttcgtcaggccctggccaacccggttcgacccattgaaaccgatctgatcttcttcggggagcctggaaaagatcggcagcgtcggccctacaatttcaacaaggcctggttgaataccaaggaaagtgtcgggctaaaagacctacgattccacgaccttcgccatgaagcggtcagccgttttgtcgaaggcggtctgagcgaccaacaggtagcggcaatcagcggccacaagtccatgcagatgctgcggcgatacacccacctgcgagcggaggacctggtagatgagctggatgccatctcgacgcgcagagcaggcaagcaacaagacgccaaaaagccaaactga

SEQ ID NO: 511211 - DNA, 873 bp, Stenotrophomonas maltophilia
atgaatacaggcgcggaaatgccgaatatcacgcaaaagaaaacaaagttgagtcgtagccgtggaaggccctccaggcatgaaagcgagcgtatgaaaacgattgcctggtatcactttctggcaggggaaagagcgcccgctgaaatgtgtgactggatgccttttgatgatattgatcaggcaaccatatatcgctatcgacggggagatatttctccgagagcggatatactcggcgcaaattgtgaggtttttcaggctgcccgcactgttttcgaagtcggcccgctgatggtgcccttgtgggatgctttgtggggaagcataacgccccacgatttccggatggctgattgtttgatgccagggggcgaatggcccgaaggtggattgagtcagtttttcttcgaggatgtgatcttggccagggtctttgcgtttcagaccaagtgtcttcggggcagaccagactctgtcgttgctgagctggagtgttttgtcactgcaattcgggtggttcgtgcctgggatgtgcttgggcagataaaatcaactgctttgcgggtcttgcttgaaggcctcatgtcgatgccaggcacccgggaaatactttctcggcacgggttggtcactccgctcaaggattggatttctcagtatttcggcagcggatcggcagcacctgcgaatacggtttattgggcaccctggatgacagaccaaaatgaattgctgaagcagcagttgtgcgcagaacagcaacgcatggtggtggcgaagagtttacgcgcacagctgtttcaaggtgacgccgcagagcccgacgatttttcggtagccggtgcaggtgacgatagcacctggcattga

SEQ ID NO: 511212 - DNA, 213 bp, Stenotrophomonas maltophilia
atgaccaccgaagaacaactgcttgaccgttatgggccgctgctgtcactgacagaactttcagagttgcttaagcgtagtccagatggtctccgcatagcgttgcgaagtcaaaccgagtttgcgcagaaatggaacgcagccaaacgcaaagtaggccggcgcgtttatttccgtgcaagtgatgttgccgaactcatcgacgaggcatga

SEQ ID NO: 511213 - DNA, 366 bp, Stenotrophomonas maltophilia
atgatgaaagagacgagccgcaaacgccgacaccatcttcgggttccggtactgcctgaagagaaaatccatatcgaacagcaggccaagcaggccggaatgagtgttgcccgttatttgcgggaggttggtcagggctaccaaatcaagggcgtcacggattaccagcgggtgcgagagcttgcccgcataaatggtgacctcggtcgcctgggagggctgctcaagctgtggctaaccgacgatgtgagaaccgcagctttcggtccggaaacgatccaccgccttctggcaaggatcgaggccacccaggaccagatgaccctggtaatgaggaccattgttcggcctcaggctgatcagtga

SEQ ID NO: 511214 - DNA, 789 bp, Stenotrophomonas maltophilia
atgagaactcgcaaaattttagcggctaaaaccgcgctcctgatctcgctcgccatcggcggcggctcgctaccggctcaggccgggattccagtcattgacgggggcaacctgacgcaaaacgtcatgaccgccatcgagtcggtggcacaaacgctcaagcagatcgagcagtatcaaacccagctccagcagtacgaaaaccagctacagaacaccatggccccagccgcgtatatctgggaccaggctacccgcacgatggacaacctgcgttcggcaatgaacaccctggattactaccagacccagctcggcagcctggatgcgtatctcggcaagttccaggacgtggcctactaccgtggctcgccgtgcttcaacgccaccggcggttgcacagaggccgaatgggcagccatgaacgagaaccgccgcctggcgagcgaaagccaaaagcgcgccaatgatgacctgttccatacactgaaacagcagcaggatgcgctgcaatcagacgcccgcacactggaacggctccagcacagcgcacagggtgcggatggacaaatgcaggccctcggctatgccaaccagcttgccagccagcaggctaaccagctcttgcagatgcgtgccatgttgcttgcgcaacaccaggtcattgcaacacggatgcaagccgaggccgacctcgatgcgaagcaacaggctgcccatgccgcttccaccgaatcgcggatagcgccgaccaacagtcccaagaactggctcgaactggcccgctga

SEQ ID NO: 511215 - DNA, 264 bp, Stenotrophomonas maltophilia
atgaacaaattcactattccgatgctggcaggcttccttctcgccatcactggctgcgacaacaccccacccgccccgaccatgccagaggtgaacgatgccaactgccagatggcagaaatcatgaagatcgaagacaaggcaactcgggagacatttgccgggttgtgctcgcgccggccagcaggggacggcatttcccccacagagcagccgcttaactggctggagttgaccgagccgcaacatcgggagggcaactga

SEQ ID NO: 511216 - DNA, 1380 bp, Stenotrophomonas maltophilia
atgaagaccatgactagagcaatcctgagcggcggggtcctggtgctgcattcgagcctcgccagtgcaaacctgaccaaccaagggattctcgaccaggtagtaaccgactacgccacccgagcagccagttggcagcacgtgattatcgatgctgcgtcgtggctgttctggacgctggtggtgatctcgatggtctggacgttcggaatgatggccttgcgcaaagccgacattggcgagttcttcgccgagctggtccgtttcatcatcttcactggcttcttctggtggctgctggtcaacgggccggcgtttgccaactcgatcatccagtcattggccagaatcggtgagcaggcggctggcgtgtcctcggtcacgccgtccggcatcgtcgatgtgggctttatgatctggaagcaggccatcaataacctgtcggcctggtcgcccgtcgatagtctggtgggcgctgtattgagtgccgcaatcatgctgcttctggctctggtcgccatcaacatgctgctgatgctgatcgcagcctggctactggcctatgccggcatcttcttcctgggcttcggcggatcgcgttggacctcggacatggcgatcaattactacaagaccgtccttggcgttgccgttcagatcatgacaatggtactgctggtcggcattggtaacgacatgctgtcgaccttctacgccaggatgaaccagaacgtgctcaacttcgaagagctaggcgtcatgctggtgttctgcatggcgttgctgttgctggttaaccgggtgccgccaatggtaggcgggatcatcacaggttccggcatcggatctgccggcggcatcggcaacttcggtactggagctgcggtaggtgccgttatgggagcggcaggaatggcagcgggtgcagcaagcatggcaggttctgccgtcatgggtggtgcggtaaatctggcgggtggcggttcagccatcaaggcggcgttcgacaaggcacaagcctcgatgtcgagcgggagcgacatgcccagcatgggaggaatgtcgaacagtagtcctggcggcactggtaccaacgccggcggtgacggcaatgccggcagcagcccgttcgcccaagccgccgggtttggtggcaattcggagagcggcgtaaagcgagctgttagcctggcggccggcacgacgggcaacctggccaagggcatcggctcgatggccgccgagaagttcaaagaccgcgttgcggatacagcaggcggtcgtctggcgtcatcgctacgggcaagcaccccttcgttcgagggtaacagcctggctggcacggccgaacataccggccacaacaagagtgagtcctaa

SEQ ID NO: 511217 - DNA, 912 bp, Stenotrophomonas maltophilia
atgtccaacgaacagcttgacgaccttacccagccgcagcgcgaccgccttgcctttgtagagctgcgggtgcgcttcattggggatatccgccgccaggatctggtatcgcgcttcggtatccagtcggccgctgccacgcgggatttggcggtttacaaggaactggcgccaggcaatatcgactacgacaccaaagccaagtacttcgtgctcggcgagcacttcgaacccgtttttgacttccagcccgagcgggtcctggcctggttgacccagggctttggtgatggcgaaccatcccggctgagagcctgggtagccagtgagatcccaaccagactcacgcatccagatctggacgtactggccgccgtcacccgggccattcaccaggagcggcccctggccatcgaatatcactccatttccagcggccgcacccagcgcgaaatcgtgccctttgccctgatcgacaacgggctgcgctggcacgtccgcgcctttgatcgcaaaacccaggaattcagggatttcgtcattacacggataaagcgtcccgcggccccacgggttgccagcgtgcaaacccacgagcgcagcgaccaggatatccagtggacccgcatcgtcgagctggaactggttccgcatccagcacagccgcgccctgagatcaccaaaatggattacggcatggatgacggcagcctacgcatgaaactgcgggctgccacggcgggctacattctgcgcaaatggagcgttgattgttccccggatcacagcctgcgggggcctgagtatcgcctgtggttgaaagaccacctggccatttatggcgtcaagagcgctttgctcgcacccggctactgctcgtcagagcagcagcaagcggccgaactggactga

SEQ ID NO: 511218 - DNA, 468 bp, Stenotrophomonas maltophilia
atgctggagcagctcgaacaacgaattaacgaagtaggcgccttgcaaaccaagctggtcctgctgattggccgccctggtagcggcaagagtgccttgatcggtgcattagcaaagcagcacggcatccgcgtgatgaatgtcggtgccgccctgggccgccagttggccgcgatgcctcagcggcagcgagcactccaggcaaatgtggttctgcgggatctggctgatgaacatgccgagggcgacctgctgttactcgacaatctcgagctgctgttcgaccgctcgctcaagctggacccgctggacctgctcaagcgccacgcccatggccgccgcgtagtcgcggtgtggcctggtgagctgcgcgaaggccggctcgtctatgccgagatggggcatccggaatatcaggactacggcctggatggcctggttccatttgtaattgaatcgttggggtaa

SEQ ID NO: 511219 - DNA, 3726 bp, Stenotrophomonas maltophilia
atgcgctacggggatcttattcagttcgagccgattgagtcggtcattcagctgctcgacgccaatcggcccaacgaggccaagaagctcgtcgccacctatgtcatttccgatgacatggccgagcgcattgccaagcagatgatcccgcagctctccttcgatgagtcggttgaccataagggtgtgctggtggtcggcaactacggcaccggtaaatcgcacttgatgtcggtactgtcgctgatcgctgaagacgccgcctatgtgccgatggttcagcaccccaaagttgccgaggcggccgccagcatcgctggcaagttcaaggtgcaccgcatcgagatctccagccagatgtccctgcgcgacatcatcacccaggagctggagatcttcctggagaagcagggcgtcagctacgccttcccgccggccgacaaagtcgtcaataacaaggccgcgttcgaggaaatgatggcggcctttgacgaagtacaccctggcaagggcgtgctgttggtggtcgacgagttccttgagttcctgcgctcgcgcaaggaccacgacctggtgctggacctgtccttcctgcgcgagatcggcgaagtcaccaagcacctgcgcttccgtttcgtggctggcgtacaggaagccattttcgacaacagccgcttccagcatgtcgccgacagtttgcgccgtgtgaacgagcgtttcgcccaggtactgctggcccgtcaggatgtcagcttcgttgtcgccgagcgtctgctgaaaaaatccgctgaccagcagcacaagatccgcacctacctcacacccttcgccaagttctaccacaacatgaacgagcggatggatgaatacgtgcggctgtttccggtgcacccggattacatcggcaccttcgagcgtctgatctttaccgaaaaacgcggcgcattggtcaccctgcgcgaccagatccaggccatcctggacgatgaagtgcccaccgaccgtccaggcctgatcggcttcgacaagttctgggaaacagtcacatccaactcggtattgcgctcagacccgaatatcggcccggtactcaatgtcgctgaagtgctgggcgagcgcgtgcaaaaagcgttttctcgccccgcctacaaggccatggccattcgcgtcatcaaaggcctgtccgttcaccgcctgaccaccggcggcgatatctacgtgccggtgggaccaacggccgaagagctgcgcgacaccctctgcctgtaccagcccggcatcgaggacatggggggcgagccggccgacgacctgctgaccgccgtgcaaaccaccctgcgcgagatcgtcaagacggtgaacggtcagttcatctccaaggcgcccgacaccgagcagtactacctcgacctgaagaaagacgtcgactacgacgcgcaaatcgagaagcgtgccgaagccctgtccgacgatgctctggatcgtgcctactacggcgccctgatgcagttgatggagcgcaccgaggaagacacctacgtcaccggctaccggatttggcaacaccaggtggagtggcaggagcggcgtgtcgaacgcaacggctacctgttccttggcgcccccaacgaccggccgaccgcccagccggaacgtgatttctacatctacttcatccagccgttcgagcccccgcgctttcgcgacgacagccgcacggatgaggtgttcttccgcctgaaaggcctggacgatgccatcaagcgctatctggcctgctatgccgctgcccaggagctggcatcctcggccagcggtggcgccaagtcggtgtatctggacaaggcgaaagaagccctgcgcgacatgagcaagtggctgcaagacaagcaaatgacggccttcgaagtcacctaccagggcaagaccaaaaccctgcaggagtgggccaagggcgtttccatgcgtgacaagctgcgcctggggccggatgagcgcgccaacttccgtgacatcgtcaacgtgacctcaggcctggccctcggcactcattttgctgacctggcaccggagtacccgacgttctcggcgctggtgaccgaagccaaccgcaagcagctcatcggcaacgcactgaaggcactggccggtggcacccgcacgaaggacgccatcgtcatcctggatgccctggagatgctcgacggtgaccgcatcgagccgacccgctcccgttatgcccaggaagtcctcagccgcctcaccgccaaaggtcacggccaggttctcaaccgcgccgagctgatcagtggcgccaccgacgtcgagttctttgcaccggtacgcttccgcctggagcccgatctgctgatggccgtgctgggtggcctggtgtactccggtgacatcgtgctcgccatcaccggcgacaagatcgactccggcaaactctccctgctggtcgagcgcaccctggatgatctgaagacattcaaacacgttgaagcccccaaggagatcaacgtcgccgttcttcgctcattgttcgagctgctgagcctgccaagcggctttgcgcagatggccacccagggcaaggaagagcccgtcaaagaactgctagaagccgttgccaagctggtcaaccgcgtgctcaccgtgggtaccgacctgcaaacccgtctgagcttctggggccagtccctgctgcgtgaggaagagctgcgcgattggcgcagccgcctggaagccctcaagagcttcctggaaagcctgtccccctacaacaccgtgggcaagctaaaaaacctgcgcatcacccagaccgacatcgaggcacagcaaaagaacctggacgtgctctccgccgttgagaggctgcgtgatctggtcgccgagctgggtagcgtggctggctacctgtcccaggcggaaatggtcctgccgagtgaccacctctgggtgaagcaggctcagtcggcccgcaaggacattctcgacaaactcgcccaggacaagagcgcagcccaggccgccatctaccgccaacaactggctgcgcttaagaaggactacatcaacgcctatgtggcccagcacagcaaggcgcgcctcggggtagccgaggacaagaccaagagcgccctgcgccgcgactcgcgcatcaccacgctgcgcgccctggcgggtatctcgctgatgcctacggggcagctcaccagcttcgaagacaagctcgacaaactcaaaagctgcgcctcgctggtcgaagccgagctggccaccagcccggtgtgcccgcactgcgctttccggcctgccaacgagcaagccgacctgctgccggccgccaacgtactcaaagccctggatgaagagctggaccgcctgctcgaaggctggcagcaaaccctgctggacaacctcgacgaccccatcatccaggccaacttcgagctgctgaaggccagccagcgcgagctgattaccgccttcctggcgtccaaaacactgcccgacccggtcacgccggaatttgtggccaccatccaggaggcgctgtccggcctggaaaagatcctggtcaccggcgacgacatcaaacaggcgctgctggccggcggctctccggccacacctgaagacctgcgccgccgcttcgagtcatttatgaccgagcgctgcaagggcaaggacgccagtaagctgcggtttgtggtggagtga

SEQ ID NO: 511220 - DNA, 1890 bp, Stenotrophomonas maltophilia
atggacattgaaacatctggagcaatcaggctgttcttccccaacccgtcattgacgttggtgtattttgaagccgttgccaacgctctggatgccggtgccactgacgtgagcatcaatattgacgtgcatgcatttgataagccagacacactcaagataactgtttcggacaacggcgacggcttcaccgacgaaaatttcgagcgcttcagaaagctactgcgacccagggacaagttccataaaggcataggtcgcttggtttttctcaactactttaatcgtgttgaagtgactagcacatggggaaggtgccacaggcacttcatcttcaaagattcttttgatggcaatgcaccactcgaaactcttgcagccgagcaaccggccaagaccacattggagttcactggctttgccaaggaccgggttaagtcctacgacgacctgaagccggatgcactaaagccgctcttaatcgagcagtttttgcctaccttggacgcacgcaagcgtgaggggaaagcattcaagatttctatcaacctgaagaccaatgaaagcaatgcgcagaaggagttcttcccgcacgaaaccacaataacggcagacgacttgccgtcaatgactaaggttacgatccaggacgataccctagatgctatctccaacatcgacatgtactaccacattgagtcagtgacaggtaaggggcgctcactgaccgcgttcagtattgatggacgaacgataccggccaacctgataccgccatcgtcttttccagcgggctatctatgtgtttttttatttgaatctgagatcttccactccaatgcggacagctcaaggcaaaagcttgtgctgcctgaaggcatacaggaagcacgcctttaccgcgtaatgcgcaaggagcttggcaaagttcttgccgaacagattccgttaataacagaaagaaacgccaaggtcagagcgaagtttgaggagcaattccctcacctactcggctacttcgagacagataccgtcggcttgattgaccgtgacgatgctttaaccatcgcacagcagcgtttcttccgtgttcagaaagagatccttcagtgcgaacatctgagcgagtcagcttacgaaaaatcacttgagctctcatcccgaaccctcaccgaatacatcttgtaccgggaaaaaattatcggccgcatgaaagaaatgacagccgataacgccgagtccgagatccacaacctcattgtcccgaggttcaaagagttctcgcaagatgcgatgccatctgagatttatcagaataatgcttggctgctggacgacaagtttatggtgttccgaaccattctcagtgaaaagagcatggacaccgtcatcaatgccatacgacttgatgaagaaaagatcggagacacgggacgacctgatatcgccatgatcttctcagcggacccaaatgatgatgtgccagtagatgtggtagtggtagagataaagaaaaagactgacgaggaaaaggacaatttctacgcagtcaaccaactacttgatcgcgcaggaaagcttgtggcgcactgccaaaacatccaaagagtttggtactacgcgattgtggatatcaatgacacagcagcttttcgactccggcaaatgaagtggacgccgcttttctccaaaggcagagtgttttatcaggaatttgagaccccgcatccagatggccgcattattcctacgccctcgtttgtggtttctttcgatgcgatcgtagctgacgcggagtgccgtaatcacacgttcctggagatcctgcgagccggaatgaagcagtatgctgaagatcatcgcaggtccagatcttcggccgatgactga

SEQ ID NO: 511221 - DNA, 1875 bp, Stenotrophomonas maltophilia
atgaccagggaagaactgctggagcgtctgcagtccatcgaatgggacgatatcgagttcaaggaggcgggctgggccgtgcccaaggatgccttgtcatctgtcagtgcatttgccaataccgctggcggttacctggtgtttggcgtcaaggaagccaaccggactttcactgtcaccggtgtgatcgacgcagacaaggtacagaatgacttcctgggtcaggtcagggaccgtaacaaggtcagcatctttttgccgatcaacggcacgctccatgctttggaagaaggcaccgtcatcgttttccacattccggaggccggtcgcaacgagaagccggtttatatcgacggcaatcccaaaaaagcttatatccgccgtggcggccgagacgatacctgcacgcctgatgagctgatgcggtttatgcgcgacgccgctgcggatcgcttcgatgccgaaccgctcgacctggacatcactcgatgcttcgatcaggccaccgttcgttggtatcgggaacgctttaccgcaagcaaccccggcaaggacggcgcggatgacgacaccgcctttctgcgcaggtgggggtttctggtagaacgcagtgggagcctgaggccgacccgagcagccattctggtgctgggtgccgatgaatatgtgcggcaagtgctaccgcgcatgagtgtcgatctgcagctctatcgctacaccgccgaagagtactctcccagcattcgctgggccgaccgcctcatggtcgaagagaacctgatcaagtcctggcaggccgttgtcgacttctacttccggcacagcgagcggccgttctcagtcgatgccgccactctgcggcgcgatgacgacccaccggattacatttccttccgtgaggctgccatcaacctgctgatccaccaggactttggtgataccacacgggtgccggttatccgcttcttccgtggacaaaccgattttttcaatcccggtgatgccttcgcctcgcgtgagcagttgctcgatccgggtgacaaagaggttcgcaacccgagcatcgtcaatgctttccgccgtattggtctatccgaccagggtggtacgggggtgggcgccattttcgagagctggcgtaccctggggtttgtccccccggtcatcgacaacaacaaggcggagaagagctttcgcctgcggctgtgcaaggaaaaactcatctccgaagcccagatgctggctcaggcaagcctgggggtcagcctgtcgcaacacgaagcggcggtattcgcctacctgactcgcaaaggtcagatcgacctggctgacatcaaaggcctgactggccttggcagcgcagcagcccgggagcttgcccatcgactggctgtacaagtagttctggaggaagccgacaacgcccccaaccagtttgtcctggccgagcatttgcgcgcacggttcgggcaaggagaagccgaaacaccgtcggaaaatcagcaggttactgtgactgaccctgatcagggcacgactgaacaagtacctgaacaagtcggccagccggctgttgaacatgttcagacacttgttcagttgaccgacacccagtggcaggtcgtcagccacgccgacgtgccccgctcactggccgaactgatggagcacaccggctatagccagcgcccctacttcaaggcccagcacgtcgaacccttactgaccggcgggattctgcggatgaccgtgccggacaaaccccgctcatccaagcagcgctacgtgctgaccgaggcgggcatcaaactcagagcctggcatgccgaccagcaggccacgaaacaacggacgaatacccatgaaaacgactga

SEQ ID NO: 511222 - DNA, 2775 bp, Stenotrophomonas maltophilia
atgaaaacgactgactctttggacttgagatcagaagccacagcttgcccggtggaatgcctgggccaaaccttccccagtgatcaggctcgccgggagcattatctggagctgttggctgaaaagctgaaagatccggaattccgcaagcaggaaggctttccgcagggcaccgatgaggcgatcctcgccatgtccgatccgccttattacacggcctgcccgaacccttggttggccgagttcgtcgagcactacggaaagccttacgatccgcagcagacgtacagccgggaacccctggcgattgacgtttcggtcggcaagactgacgctctctatcgggcgcactcctaccacaccaaagtgccgcacctggccattgtgccgtcaattctgcactacacccagcccggcgatattgtgctggatggcttcgcgggctcgggcatgaccggcgttgccgcccagtggtgtggaactgcaccagctagctatcggcacgagattgagatggcctggaagcaggagggccgcaagcccccccagtggggcgcacggcgggttgtattgaacgacctctccccggcggcaaccttcattggtgccaactacaacatcccttttgatgttgatgcctttgcgaaagcaggcaagcagttgctcaaggaggtcgagcagggaatcggctggatgtatgagaccttgcactccgatggcaagaccgtagcccgcatcgactatacggtatggagtgaagtgctgaactgttcagcctgcgcgggagaaattgtttttacagaagcggctttggatgaagaaaccaaagcagtcgcggatgttttaacctgtccgcattgcggagctcagggaaagaaggagcagatggatcttcgcttcgaaacctttgtggaccccgctacaggagcaacacaacgtcgccccaagcgcatgcctacaatgatcgtgtacaagattggtaagacagtctacacaaagaagcctgacaaaactgatctggcgcgcatcgaaaaaattgcacatctacccattcccaaggaactgccggtggaccagtttcctgactgccagatgacgcgagttgggcgtatgaaaacaaccaactctacagcagttcactttatgtttctgccacgagcggcgcaggctatggcacttttgtggcacaaggcccaagcaacttcggagcctcgcacaaaaagcatgctgctgtttatggtcgagcaagccatttggggaatgtctattctcgcaagatatacccctacgcacttctctcaggtaaaccaatatcttagcggtgtttactacgtcgcctctcagcactcagagtgtagtccttggtacatccttgatgggaagttagaccgtctaattaaagcattccgcaagtatttggcacgtcccgcaacagctgcagttaacactggaacagcagcaagactgcccttggctgataactctatagattacatcttcaccgacccacccttcggtgagaacatttactactcggatctaaatttcttggttgagtcttggcatggtgtaaaaaccgacgccaatccagaagctatcgtcgaccgcgtccgtcagaaaggtctcccagaatatcagcacctgatgtatagctgtttcgccgaatactatcgggttctcaagcccggacgctggatgaccgtggtgttctctaacagcaaggcggcagtttggaatacgatccaggtagccttgcagcaaacagggtttgtcgtcgccgaggtcactgcgctggacaaaaagcagggcagcttccagcaagtggtatcaccaaatacggtcaagcaagatctggtcatttccgtttacaagccgaatggcggacttgaagagcgcttgaacaaacggggcgcgacggttgattccgcttgggacttcgtacagacccatctaagcaacctgtcggttgtaaaggctcgcaacggtgagcttgagttcattgtagaacgagacccacgccgcattttcgaccgcatggtcgcctggtttgtgcgtcacgatgtgcccgtgccaatttccaatgacgaattcctaaccggcctgcgcagtcgcttccccgaacgcgatggcatggttttcctgcccgatcaagtcgcagaatacgacagaaagcgcgcccaggtggcccaggcgccgcagatggagctgttcgtctccgacgagcgtagcgccatcgactggttggctgacttcctcaagcgccgcccttcgacttatcaggaagttcaccctgagttcaccactcagctgggcgctggctggaagaagcacgaagccaagccagagctgatggcactactggaaaacaatttcctgaagtacgaaggtactggcgatgtgccgagccagatccatagctacctctccaccaatcacaaggacctgcgtggcctggagaagagcgatccgcgcctgatcgccaaagccaaagaccgttggtttgtgcccgatccgaacaaggcacaggatttggagaagaagcgggaaaaggcgctgctcaaggagttccaggtatatcaggccttcaccggccgacgcctcaaggagttccgcctggaagtgctgcgcgccggcttcaaggaggcctggggcaagaaggactacccgaccatcatcgccgtggccaagaagatccccgacgaggcgctgcaggaagatgaaaagctgttgctctggtatgaccaggcactgactcgcaccgaggacggcttgtga

SEQ ID NO: 511223 - DNA, 2838 bp, Stenotrophomonas maltophilia
atgacacggcgaccaggcgattacagcattggcgattggtgctggtttgtccgccaggcgaccccgtgccgcgtcgttgaacgccaggatgtatggggcgaggtggcctatcgcgtgtggctaccggccaagaacacagtggtacgtgcccgcacccaggatctcgatgatctggcagcggtgcgcccggcggttgagcagatcctgcatacggcggcatccgcaaagctgctggatgccctggaagacaatctgctgctggcccctattcagtccagtgtggtgccgctgccccaccagctgtacgcactgaaccgagccatgagccgcgaccgcattcgctacctgctggccgacgaggtgggtctgggcaagaccattgaggccggtctgatcctgcgcgagctgaagctgcgcggcatggtgcggcgggtgctggtggtggcccccaaaggcctgatccggcaatggcaggcggagatgcgtttgcatttcggcgagcacctgcgctttatcgaagccaccgagctggccgcctttcgcgcctggcgcgccgagggcacccagaatgacgataacctctggacaatgcacgaccaggtgattgtgtcgctggactcggtcaagcccatcgaaggccgtcggggctggagccaggaacaactcaacagctacaaccgcgagcgtttcgaagatctggtttccgccggctgggatctggtgatcattgacgagtcccaccgcatgggcggcagtaccgatcaggtcgcccgctacaagctgggcgctgcgttggcagaagctgccccctacctgttgctgctgtccgctacgccacaccagggcaagaccgatcaatttttgcgcctgatgcagttgctcgaccgcgaggcctttgttgatgagggcagcatccaccgtgaccgggtgcagcctttcgttatccgcaccgaaaagcggtccgccatcaatgccgatggccagcccttgttcaagccgcgttccacgcggttgcaggcggttgcctggcaggcacggcacacggcgcagaagcagctgtataacgcagtcaccgactatgtgcgccacggctacaaccaggccatggccgccaaacagcgccacattggctttctgatgatcctgatgcagcggctggtgacctccagcaccgcagccatccgtgccacgctggaaagacgccaggccttgctagatgcgccgcagccacaggccaacctgttcgataacgtggacctggacgaatgggcagagcttgacgggcagtcacaactggacgtggccctacaggccagcaactgggagcaggaaaaggccgaggtcgagatgctgcttaatctggcccgggaaaccgaacggcaaggcaccgatgccaaggccgaagcgctgctggaactgatctacaagctgcaacaggaagagaacgacccagaactgaaagtgctggtgttcaccgagttcgtgcccacccaggccatgctggccgagtttctggaaagccgtgggttttcctttgtcttgcttaacggcggcatggatctggaggcgcgcacccgcgcccagcaggcattttcccgtgatgtacgagtgctgatctccaccgacgctggtggtgagggcctgaacctgcagttctgccatgtgatcgtcaacttcgatatgccctggaacccgatgcgcctggagcagcgaatcggccgcgttgaccgcattggccagccccatgtggtgcgtgccatcaactttgtgctggaagacacggtagagcaccgggttcgcgaggtgctggagcagaagctggagatcattgcccaggagttcggtgttgataaagccgccgacgtgatggactccgtggaagtcgagccgctgtttgatgagctctttgtgtatggcttgcaagacccggaatccatcgacaaggagtgcgacacggtcatcaaccaggtacgcgagaaagtggccgcgagccgcgctgatacggatttgctgaccgatgatcacccgctggaagcggttgagtcccagaagtggcgggaccacccggcgcagtactggctggagcgtgcggtaacaaccggcttgcccacccgtggcggcgcagcggagcagtcaggccatacctggcgtttaacctggaccgatggcagtgaatctttcccggtctgcttcgatgcgcgaaccgctgagcagaacccggagatggaatggatcaccttggaagatccccgagcccgtgcgctgatcggcgatctgccgcgctgcgtggccggccaaccactgcctgtcgtacaggtaaccggactgcctgacaccgtgcaaggcacctggtcgctgtggagcgtgagcctggcggcttccaacagctcggccaacttcacccggcgtcgtttcctgccagtctttgttaccgatgatggacgcagctttgttcccaccgccaagcggatctgggatctgttgctaaccgaagaggtgcgtctgacggcggacccggacagtgagcatgcggccgcactctttgagcaatcgctgacggcagccaaaggtcagggtgagcggctgttctccgaactgctggaagagcaccgaacctggctcactgaggagcgcgagcgcgcccgctatgccttcgagtcgcgctttcaggccattggccgaatcggcctgcctgccgtccgcgaacaccggcgtaagcgcctcgaaaccgaacatcaggctcgtatggcggatctggcggaagcagaagcctgcacgccggagctgaatgccgtgctgatactgcgcatcggctcggcgggaggggccgcagcatga

SEQ ID NO: 511224 - DNA, 2031 bp, Stenotrophomonas maltophilia
atgacgtatttatccagggacaatgtcgcccatcgcagcacgctgctggctgatcgcattctgaaggagttcccgtccgacctggcccggctgtggattgtgacggacccggacaacgtgctgctggacgagcaggtactggccggactgcgtgaccgcggctttgatgtgctgctgttcgaggacagcatcgcctttcgagccgagtacgaagaccgctaccgcgccgcctgggaggcaggggagcccaatgcaccaagcgctctggttatccaggtgcgcgattccagcactgcggagctgccctgggattacttacgccaggcgcgcaaggttagtctctcgctcgcagagctgtttccaaaactcagctatacggtgctgaggcagctgggtagcgagatcctgccgtcgctgttcgaggtgcaggcccgccatgcgacccaggcgatgggcgaagccgccaccaaagaatttgtgctgacgcacatctaccgggtaagcccccacctgattacccggccagaggatttgtggcgtgagctgctgcggctgcactaccgcgagacgctgctacctcagaccttggccgagcacattcaccaggtgttggccgaccggccggtgttcgccagcagcccgatcgccgagctgttcgccaacagaagttttgcgctgcgtgtggtgcaggacgcctggtaccgctatctgaacaaactggggctgatcggcagacgcacggcggagccggtagcgccggactatataccgcagctcgatattcccttcgagcatcacgacatccgcgtcatcgttgattcgatgttcctggacggcacgctgcacccgctggccattcagggcgtaccggtcagcttgccggagtgggcaaaagccggggtggtgcaagaccccgcagcgatgcgcaatctggtgctggtgggcatcaagagcctcagtgaagagctgcctggcgccccatcatctcacagggattggacccactttgcccggcgcctcggcgaagtgatctcgcgtttccacagcctggatgccgtgcgcgcagaaggcctgaaggcggacatgaaggatctggtggctcgcgccgacagtgagctgcaagcctgggttcaggcgcactacgctgacctgccttccctgcccgctgccaaggggccggtgatggtgcatcaagtgccgcgctacctggcgatgcgccgagctaacggtgaggaaaaaattgcgctggtcgttttcgacgggttggctgtcgatcagtggacacagattcgcgaaaacctcatccagcatgcgccacgtctgatgtttgatgaaaacgcctgctttgcctggctgcccacgctgacgtccatttccaggcaggcgttattctccggcctgcgcccacgcgagttcgctgagcacatcgaaacaacctcaagagaacctcagcattggacccggttctggcaggaccagggtttgcgtgccaatgagattctctatcgaaaggcgatcaagcgcactgatgagctgccggagttgcaggagctgctctcgaatcctgccctgaaagtcgccggcctggtggtggataccgtggatgaaatcatccacggcgctgtgctcggcaaacgcggcgtggctgcgcaaatcaacagctggtgtgagtcggggtttgttgatcggctgtttgcgatgctgctcgaccagggcttccacatctatctgacggccgaccacggcaatgcggaagccgtgggcattggccgcccaaaccagggggtcgcttcggagctgcgcggcgaacgggtgcgcacctatcgcagtgaaaccatgattgccgagacagaaactgcgataccggacagctttcgtctcgatatcgctggcctgccggccaactttatgccgctgtttgcaggagagcgcggagcctttgttccaaagggtgaccaggtagtggtccacggtggcatgtccctggaagaacttatcgtgccctttgtgaaagtgagttacgtcaattga

SEQ ID NO: 511225 - DNA, 732 bp, Stenotrophomonas maltophilia
ttgaaaacgaccaatccgcctgccccaaaaatcggcttcgaccgctacatagcgctggagtgggcgtcagcagctttacgggtgcgtgccggcctggctgaacccgatgacttgaatgccctgctggatgaggccggactcggcgtggcggcgcgcaaaaagacgcgcaccgtactgaatcgcttatggctcgaaccacgaccggaactggccagcttcgctgaacgcggtatcgccctctacaaggccaaccctggcgttccaaccgctgccttgacctggggaatggccatcgccagttacccattcttcggcaaggtcgctgaactggtgggccgcttgtccgcactccagggagactgcgcctcgacagaagtccatcgccgcatgagcgaagtctatggtgaacgggaaggcacctaccgcatgaccaacatggtcctgcagtcgcaagccagctggggcgccatcgagcgcgtggagaaaggcaagcgcttggtccgcctgaaaccccagttgctcagtgatgccgagacggtcgcctggctgatcgaggctgccttgcgctacggcggcaaatcagtgtccgtgccggccctgtcgtccctggccgtgctttatccattcgttctcgatcaacccctgggctacctggcgtcacaaagcccgcacctcacgctccacgcccgaggccctggcagccaggtggtcggcttgcggacagaagactaa

SEQ ID NO: 511226 - DNA, 183 bp, Stenotrophomonas maltophilia
atgagtgccggtgaggatgaaaatgtaccgacccaagagaacggtcaacctgagccgttcttcatcaccgaagacgttgaagcagagcttatcgccgcaggctacgagtttgagccgccaaaccatgtgcgcacggcaggcaccaccagcctgagccagaataccggctcttcgatgcagtag

SEQ ID NO: 511227 - DNA, 297 bp, Stenotrophomonas maltophilia
atgagcctgctcggcgaagcgctgtcggcactgcggggccgtcgccgcgaggatacggcggcgatggcggctcccgccaaagcgctggacgcggaccaggccctggtgcgggccatcatcgatggctcgcagtcggccttcgcgcagctggtggagacccaccagcgcacctgcgcgcatgtgatcggacgcatggtgggcgaccgcgaccaggtcgccgacctgctgcaggaaactttccttgccgtgttccgccagctgcatcggtttcgttttgaatgctcgctgcgcacctag

SEQ ID NO: 511228 - DNA, 180 bp, Stenotrophomonas maltophilia
atggcaggtcgttcgttccagtctctcggcgagagtgtcgagcaccttgccgatgcctgcgccgggtgtagcatcaccgtcgagctcacctatgattgcggccagcttgtcgcccgccaggctgacgtgatcgtgctcgacgtctaccttcacgggcagatcgtgagggtcggactgtga

SEQ ID NO: 511229 - DNA, 2628 bp, Stenotrophomonas maltophilia
atgcagaagcccgccgcacagcagaagaccgtcctggatacgattctggactggtcaaaggatcgtccactctggcagcgtgatgccctgcgccgcatcatcgcaaacggccgtctgacggacgccgatatcggcgaactcgtggacctttgcaaacagggcaaaggtgcccccgtaggcgcgctgaaagcggtaccgctggagaaggcccaccttccggccaaccccggtcagaccgccgcggtatcgcttctgtcgatcgccgacgtgaccggcgtgaacaaccttgccgccggccaaaccctcggcttcgagccgaatggaatcacgatcatctacggcgacaacggtgcgggcaagtccggctacgcacgaatcctgaagcgcgcatgtcgtgcaaggcatgccggaaagatcgaacccaatgtgtatgccgatcagcccccgaagcgcgtcggcgcgaacatcacgtacggggtcggcggtgtgccgcagccggtcgaacagtggcagaacggcgtgaatccgcatgcaacgctgtcagcggtgagcgtgttcgatagcgactgcgcctcagtgcatatccgcgagaagaacgaagtcgcattccgcccctttggcctggacgtaccggatgagcttgctgcagcctgccaggcggtgaaggatgccctcgcagctgagcagaagcagcttgagaaggcccgcaatccgatctttgcggcgccgacctggaaggccaccacggccgtggggaaggcgcttgccgcgctgaacgccaacacagacgcaaagaagatcgaagccctggcggcgctctcggcagacgaaagcgcccgtcttgagcgtctgcgggaagacctgtcgaagaatccgaccaaggcggcggcggaacagaccgtcaaagccgacaacgtcatgcggctgattaccgtggtgaacagcgttgcagccagaaccaccgatgaggacctgctggcagccgctgccctcgcgagggacgcacggtcgaaacgggacgctgcacgtcttgccgcggagaaggccttcacgggcgaaccccttgccggcgtcggcggcgagacgtggcgggcgctttgggattccgcccgacgctactcgacggagatcgcataccccggacagccgttcccgccgtcggccgaagacgcgcattgcatgctttgccagcagccattggaagctgaggcacgtgcacggatggcacgcttcgaggatttcatccagaaggacacggaacagctggcacgcgaggcagagaaggcagctcagaccgcacggcagaccatagctgccggggcaatcggcacgcgggcggtgaaggccagtcttgacgagctgggcctccagaatgaggtgctgcagcagcagacgcgccgcttcatcgccgcagcccggctgcggcgccacgttctgctcaaagccctgggcggaaacggcgaggtacagcttccgcccgttccactgtcgccgctgcctgatctcggccagcttcagaccacgatccgcaactacgccgccgagctgcgcaagtcggctgacgcggatgaacgcaagaagctcgaagccgatttcgccgagctgagcgaccgggcgctgctcgccggcatgctgccggtcgtcactgacgaaatccagcggctgaagaccatccggtttctgaccgagtgtgcgggcgacacggcgacgaacaccatcaccaagatgggcaacgacattgccgacaccgtgattacgccccggctgcgcgacagatttcaggaagagatcgtcaggcttgcggcctcgaaggttcgcgtcgaaatcgtgcgctccggcggcaagtacggttcaccgcagtatcaggtgcgcctcttcgccaagccggatgccaaggtccacgaaatcctgagcgaaggagaaaagacctgcgtggcgctggccgccttcatgaccgagcttgccaccgcgatgcaccgctcggctctggtcttcgatgacccggtgtcctcgttggaccatcgctggcgtgggcaggtggccaagcgtctcgtggaagaagcggagaaccgtcaggtcatcgtcttcacgcatgatctggtgttcgtgaacgatctgaacgaccacgcgacgaagaccggacggccagtgcggctcacgacgctcagtcgtgccgccgcgggagccggtatggtggccgacggcctgccctggaaggcccagagcgtcgaagatcgcatcgacaagctggagaaggcggcacgtgcggcaaagctgctgcatgacaacaaccaagaagacgagtacgcggtcgaggtggcaaagctctacaacgcgttgcgcgccacatgggagcgcggcctggaggacatcgctttcgtccgcgttgttcaacgccacagggactacatcaacgccaaggacctgaagaaggtcagtgcgctcaccgaggctgactgcgatgctttcgccgccggattcaagaggtgctgcgacattgtcgacgcacacgatccatccagcggcaggaatgccgcgccgccaccacctactgatctctttcaggacatccaggctttgaaggactgggccgcgtctctgcgagacaggcagaagaagattgcttga

SEQ ID NO: 511230 - DNA, 1707 bp, Stenotrophomonas maltophilia; identical to SEQ ID NO: 329352

SEQ ID NO: 511231 - DNA, 1791 bp, Stenotrophomonas maltophilia
atgccggcgctcgaacctcagtacttggccatcttgaagcaggtgctcgccgcccgcttcgtgccgttcctgccgccattgctcggcaacgtcaatcccgccgatcacgcggcgaaacagctttcgcgggccttcagcgccttcgtcctccacaaactgctcgacattacgccgcaggtggcggccgcctcggtcgtggatgatttcaacgacaagggcatcgacgcgatccactaccacgcgccgtcggagactctgtacctgctgcaaaccaagttgaaggagtccgagcagttcaagcaggaggatgcgctgccgttctgcgagggcattcgcctgttgctcaaacaggacttcaccgcgttcaacgggaacgtcctaaatcggaaggctgatatcgagggcgcactcgatgcgtgcagccacatcaagctggtcgtgccctgcaccggcgatggtgtatcgcaaacggcccgcgacgccttgcaggcgctgctcgacgacgaagacctcgacgaagagcggctggtcaaacaggtggaatactacacggcaaccgagatcgcccgcgatctgttggcggagcaggcctaccaacccgtgcacacggatatcgcgttgcagaagcacgcgaaagtcgaaagcccgcgagccacgtactacggtgtcgcgcggctggcggacttggtggccctgcatcagacgcacggcaaggccctgtacgaacgcaacatccgctacttcctcggcagcagcaagtctgatgttaacaaggccatcaagacgaccttgcatgacgccccggcggacttcttctacctgaacaatggcgtcacggccgtctgcgacctgatcgagccgaaggctaacaagaatggcgccaagaagttcaaggtgcgcggcttgtccatcatcaacggcgcgcagacggtggcgtcggctgccgagttcgtgcgccagcatccgggcaagagcatcgatgacgccaaggtgatgctcactttgattaaggcatcggcggacggccagtttgggaagagcgtgaccaaggctcgcaaccaccagaacccggtgcagaccgcgaacttcgcctcgctggacgagaaccaggagcggctacggcaggagatcgcccacctcagcttcgattaccactatcgccccgaggccctcgcgaccggccccaaggccatcacgctcgatgaggctctgcgggcaatggcctcgcaacagaacgacccacgctacgccgtatggctcaagagcgaaccggtgcggctcgccaaccccgactccaccgagtaccaggcgctgttcactgccgcgctaccgggcgtgacgctgatcaatgcggtcctgtgccaccgcgccatccgcgccctggtggtggattacgagcagaaggctccagcgcgcagccaggaacgtctgatctaccgtcacggcgtacacgtcatcacagccgtcatgatgaagcgcctgcgcagccgcattggcacggcggccgtcatcgacccggcagcgattcccgcgctgatcagccagccgctcgatcagctccggcagcaggctttcgacctcggccagcaacgactcgttcttgaggggccgctggcttacttccgcaaccagggcaacgtcgccgccttcctggccgacctgatggaagcacattttgcgctgggtgccgatccggccatagcgccactacgcaatattcagaatgcagcggacgcgtatccgcgcaagcgcctgatcgactacttgtcgagccgcgcgccacaactatga

SEQ ID NO: 511232 - DNA, 2346 bp, Stenotrophomonas maltophilia
atggcctatgaacacttgcgcttggagcgagaagcgccctcaacggagcgccatccgaggcgtcatccgggaattcgccctcctgccgatccgagagcgcatggtgccgcgttagccgggcggctcgaccaagcgcggcaacgtgcgatggcagaggacgtcggcgggttcgacgaccgtaagctgctcaagattcggctgcgcgcgggcgacaagagcgtgcccgccttcgatgccattcctggcgtggagattgtcagccaggaagatgaatccatcgtgctggcattcgccactgatgacggcttgagcgagttcgagagccgcctggccacccttgcacgtgatggcgttgttacacgcaaggaactgttctacgtcatcgaagacttcgaccactggacaccccaggaccgtaccggcgcggccttgcttgagcaaggatttccagccgcgccaaccttcatgctcgatgtcgaactatggccccaggagcgacaggacaagcgccagcaaatggtgcgtgcctttctcgactggttgcatgcacaaggcattgagcggctggacgacatccagcaaccctcgctcgtcatggtccgtgtgcgctgcaacggtgcgcaggccgagcagatcttgcaccatcgcgatgtgcgcactgccgacctgccgccccgcttgggtgtggccgtacaactgcttcataccgacatcaaccaatttcctccgatcgatcccccttctgacgatgctccgtccattgccgtgctggattcaggcttgacgcgcggacattcgttgctcggcgcagcggtcggcgacgcgcagggctacctcgcaccgcatcgcagtgcggatgacaccgatccccactggcacggcaccttcgtcggcgggcttgcgttgtacggcgatgtccatagcgctattcagcaagggcagttcgtcccgcagcttcgcctgttctccggcaaagtgttcgaagacgacggacaagaccaaactgagttcgtcgaaaaggcggtcgaggaagccgtgcgcgaactgcatgcgcaatacggctgccgggtcttcaacctaagctatggcgacctgaacaaggtctacgatggccgtcatgtgcgcgggctcgcctacacgctggatcggctgacgcgtgagctgggagtcctgttcgtagtaccagcgggcaatttgttgtcatcccagttgccagccgatacacgcgcgagttacccggactacctgttcgaaggccacgcccgcctgctggaccccgccacatcgctcaacgcgctgaccgttggcggcttgagcctgaatgaggccacacgcaatgcacagcgccatcccaacacgattgaagaccacgtgttggcacgggcggagcagccgtttccattgactcgcagcggcccttctgccagcggcgccatcaagcccgacgtggtcgcgcatgccggcaacatcgccttgcggcgcactggaggtggcacagaccatgccggtctgggagtggtgtcgctcaacggcggctttgccttggggccggcgttcaaggaagacatcggcactagctacgccgccccccaagtcgcccaccaagccgcgcggctactggccgaagtgcccgacgcttcgcccagcctgctgcgcgcactgatcggcgcccatgcccgctggccgcaagcctgcgaagcgctgttgaaccccggcaacaatgctgaaggccgcgacaaactcctgcgcctcgtcgggtatgggcgcgtggacgatgcggcgctgttccgctcgcttgatcacaccgtcaccctgctggccgaagagcgcgtcggaaacgaccagcaccacttcttcgaattacctctaccagacagcttctgggacggtggccgccgcacgcgtgaggtgaccgtcgcgctcgcctacagccctgccgtgcgcaccacgcggctggactaccgaagagccaaactgtggttccacctggtgacggctggcagcctggatgaggtcacccaagcctaccggcgcaatcgggaagaaggcatgggcgaacgcgccaacggccgctggctacccaacgacacccgcaagaacggcacgttgcaggtctctcgatggcgcttcaaacaggcgctggccaacggtcacaaggtgttcgtcgtggtgacccggcaagacagcctttggtccgatgggcgcgatggggacgagccctatgccgtcgccgtggtgctggcggatcgggagcaggccaacgctcagctctacgcccaggtgcaagcagcgctgcaagcgcgtgcccaggcacgtgcgcgcgctcggattggcgggagggcctga

SEQ ID NO: 511233 - DNA, 192 bp, Stenotrophomonas maltophilia
atgcgcggcgcgcgcgttgcgctcgatcgcggcaagggcttcggcacgcgtcgccgcttggctggcccggtgatgccgaacaccagggccagggcgcaggacaaccagcaggatcctggcatcgcaatctcgtccaatgagtgtgcgtgcagcgtgactacatgtgtagtcccactgcagtggctgaagtga

SEQ ID NO: 511234 - DNA, 246 bp, Stenotrophomonas maltophilia; identical to SEQ ID NO: 362598

SEQ ID NO: 511235 - DNA, 1449 bp, Stenotrophomonas maltophilia
atgcacagcacgcatagcgtaggacaagccaattctgacggctcggatattttgcagggcgcacagccgccgctacagcaagcgcagcaccccagccagtaccccaatggcggcaaccttgcgatctcggccccagcgcccgcgcagccgcccgcatggttgcagcaagccgctgaacgtaacccgcatctcacccccgaggtagcgcatgctcaagcggaggctgagcgtgtgaaggggctggccgatttcgcgcgcgagtcgaccaaggccgaggaaacgcgcctcaagcaagaggaggtgaagctcaagcgcgaaatgctcaagaagggcttaggcatcgaggacagcacgaacggcccccggtcgctcgttgggcgcacgcttggcaccgtgcagatgcgcgccatcgactggctatggactggctggattccgaaggggtacataacccttcttgctggggagactggcgcgggcaaatcgacggtgctggcggacgttaccgcgagggtcaccacaggggcaccatggccgggtgagtatgaaccgcgccagccgggccgcgtcctatggcttggcagcgaagacagcatcgaagaaatgactgcaccgcgtctggtggcgtgcggcggcaacctaaatcacgttatcgagattcagggcgtgacgcagcaagggaagcgcaacaccttctccatgcaagatgaccttggcgagattcggcgctggctgacagccgcgagagatgaaggattcccattcgccatgctcgtcattgaccctgtgaccagctacctgcccgggcagaagctgcgcaaggtcgatctgaacgacgcggggcaactccgcaccgtcctagagccgtggctggtgctcgcgcaggagcacaacatcgcaatcgtctgcgtcactcactttgccaaggacaccacgcgctcaatgctgcatcgcgtgctcgggtctgctgcattcacgcagacctgccgtagcctgatggcaattgtcagccgggaggacgacggcccccacgccaaagcgatggtgcaggtcaaagtgaacctaccggagcatccgggcggctcgtggaagttcagcacgatgaaagtcgatgttgcaactgacccccgcaatggcaagcccatcagcgcgacgcgcccgaattgggaggaactggacagcgcactgaccccgcagagcatggtgggcaacgcgcggggccccgtcagcaagtacgaggcggcttttggcatgtggctgaaggcgcactttttgaccacgcctgcaatgccgtggcagccgatcagccaagtgaagcaagcagcggcgtccgcaaatgttgtctctgaacgctggtggaacgaacacagcggcagctacatggacaagcagaacgtcggagggatttggtactgccgcccgaagaatttgtatgcagaaactacgtaa

SEQ ID NO: 511236 - DNA, 429 bp, Stenotrophomonas maltophilia
atgaccgacaagacctacacgaaacgcgagaacgcccgccgcgctggtgttgccgctggggtgcctgccgaactggtggagatcaccgttcacaagaacggcgacgaggtgcgcttcggctggaaggcgatggaagcaccgacacccgctgccgccgacgctgtattgaccacaagcaagccgaagaaagcagccccgaaggtggagcgggtcgagcagaacggcgtcaagcgtccgaaggatggcgggctatgcgctgcggtttgggcatggctggacgcgcacccggaagcaacgatcaaggatgcgaaagctgctgcaccggagagcggctggaacgcgaacaacgtggcctgcgagttctacgcatggcgcaagttcaacgggatcagcaggcagaccggcgacaacgcgccggcgcatgcgtaa

SEQ ID NO: 511237 - DNA, 708 bp, Stenotrophomonas maltophilia
atgcctaccgaaattgattcacgggttacgcccacacttcatgccgaaacgctgaaagcgctggacggctttgatgattcgacaatgccctatattgccccggctattgaagcgctggacgatgcttatcagaccatcgggaaacttcacgatgggcgcgacgcggcgaagaagaaccaagcctggacggaggggcagcaagtgctggccgtatccgagacagcaaaccgccatcaacagcgcctgctgaaaaagtttgatgggctggtctccacgatggacaagcagattgccaagttcgaggaagaactgagccagccgcttgagtcacgcgcttctgtgggtatcgcgggcgaggtgcgcaagttcgtcaaagacatgccgactgaagagcgccacaagtttcttcaagaagccatcgacgcgggagacatgaccacatgcagcagcgtgctcggcgctccgccttacctgtccggcctcaccgctgactttcagaaaacctatacccgcatgtggcacgagcggatgaacccgcaggcatcggcacgcctcaaggtgattcgcggtgccaagtctcacatcgagaaggctggtgcgctggtggttgagcagattgagaaggcgatgggcgctaagtgggcaacggtgaatgaacttcgccaaggcaatgacaaagcgctcgcagcgctcaagttcggcgagtaa

SEQ ID NO: 511238 - DNA, 462 bp, Stenotrophomonas maltophilia
atgactgaaacagttcagcctgactggttgcaggggttcaccccgcagccaaacaagccgcccaagggctggcaacccggccagtccgggaacccgctcggcagacccaagggcagcaagaaccgcaagactcagcttgccgaggaactgcaaaaggatggttcagagctggcgcgcgtcatcaaagaggctgcgattgctggtgataccagcgccatgaacctgtgggcgcagcgacttgaaccgccattgcgtgcgcgtgctgccgctgtggagtttgagcttgatcctgacaagcccctgcacgagcaggccaatcaggtactcgtggcggtatccgaggggcgagtagatcccgaaaccggacggatgcttatcgactgtatccattcggttgcgggcatccgtgccgttgatgaactggaggcgcggctgcaagcgctggaggaaaagaaccaatga

SEQ ID NO: 511239 - DNA, 198 bp, Stenotrophomonas maltophilia
atgagctacacgaccccttatgcgtggctaaagccccgcagcgcagcacagatcgcacagcaaaagctggagctggaaggcgataagcgtctgatcgtcaccacatgctacgagacgattcttaacagcgacgaaccatctgtccgctggcaagccgcgcgactgcttcaacaaattggcccactggaggatcactga

SEQ ID NO: 511240 - DNA, 183 bp, Stenotrophomonas maltophilia
atgcgcaacatgcacaccgacccgcgcgagaacgcgcccgtcagcacgcccgcaacacccgacgaggtgaagctcattcaccagcaccgcattgaggcacaagcagaccggcaaaccatgtccgacttgaacctgctgcgcgcggtcaagctgggtgcggcgttgcgcgagctgaaggagtaa

SEQ ID NO: 511241 - DNA, 222 bp, Stenotrophomonas maltophilia
atggccgacacgcggggcatgctggcacggttgcgcaagctggagcgctcgcacggtgccaccgacgaaatgcgcggctgggtcagtgacagtttcggcgctgcgattgctgacggtcgcatgtgccccgccgatggccccgtggtgctgcactgcctgctgaactggattgacgacggcaccgcacgcgccggaactgctggctggggcttgctgcgatga

SEQ ID NO: 511242 - DNA, 681 bp, Stenotrophomonas maltophilia
atgattcgagctttaaagctcgaacgcatacccatggccaacaagacttacagcaccgacaacacgaaatatacgcagaaaactgtaagccagagaattgaagctctgttcttgaacaatcttggcaaggttgtaacgcgcgagcagattattgctgccgccactgacccgataacgaacaaagagccggaaaactggcatcagcggctctccgagctgcgcacggacaagggctatacgatcctctcttggcgagacagcaaaagtcttgccaatcaagaatatttaatgccagacgcaaatcggcgagcaacggcagcaaagcgagtgctccccactgctggatgctggggcgccgtcttgcagcgggcaaaccatcgctgcgagtggactgaggatggtcaaaagtgcgggcttgccgagggtgagcaagaccccatcggaggcggcaccgtcaaactcactcctgaccacgtaacgccgcattccatcaacccaaacaccgacacaactgatccgatgcaatggcaagccctttgcggcaggcatcaggttatgaagaaaaactactggtgttcgagtagtggaaaaatcaatctcgtgggtatcttgcagtcagccggcaagccacagaaacaggaagccctgaaatttctcaagacttatttcggcgaggattga

SEQ ID NO: 511243 - DNA, 1281 bp, Stenotrophomonas maltophilia
atgcttgcgaacgtacaaaaacatcactcaatcagctctctagcggaagccagcagactggcgcgtctgctgcatctggctgatacgcacccttcgctctccttcagatcgccccccgacacaaattttgaagacgtggattgctgtctcctcaagggcgacaatctggatgccctgagcttcttgactagcaagtatctcggtgcattcaatttttgctatatcgaccctccgtacaacactggcacaaagttcgtgtacgacgatagacgtacttctccagaggctggcatctgggggaagcatgcggcttggatgagctttatgctgcctaggctggtgctgatgcacgctctgctagatgaatcgggggtggccgctatcagcattgatgactatgagtatgctcatctgaaaattcttctcgaccatgttttcggcgctgaaaatcatttgggcactttgattgttcataggagcaagaacggcaagggaagcaaggcgaatatcgctgtaagtcatgagcaagtgttgctttacggaaaaacagcaaaagcaaagattcacggactgccagagttagaccttgattcctactctaagcaggatgaacacggccgatataaggtcgatgggctgtttagaaaaaaaggcgaagcgagcaggcgggaggatcgtcccaatatgtttttccctctgtattacgacgcctctggaaatgttttcactgaaaacgtgggaggtaagttaaaggaggcactcccagtcgacagcaagggagtggagcgacgctggttatgggggccagagaaaacagcacaggagtcttggaagctatacgccagccccaagggcgttatctacgtgaagaactacctcacgaaagagaagcgggtcaagattcgcagcttgtgggattctccgcgttacctgacggagcgtgctaccaatgagatcactgaaatctatggcgataaggtgtttgaaacgccaaagccgctgggcttgatcgaggatttaatcaagtgctgcgctagcaaggacgccttaattctggactatttttgcgggacggcgaccacagcacatgcagcctacaatgtgaatcgtctcgatggtgggacacgcaaagtagtcctagtcgagcagaatgccgtgattagcaaagaccacattgcagcgctgaagggatttcagcgcattgccgatatttctgagcggcggttagaagtcattgcgtcaagagatagcgactacacgtatcgggctcaagaggtctaa

SEQ ID NO: 511244 - DNA, 486 bp, Stenotrophomonas maltophilia
atgaatctgaaagtattgttgctgtcagcgtcaattggtctcgtggttgctacggcgccggtgtcagtcagcgcccagacgaagccgggtgtggtcaccatcaattccaagagcaactacgcgcccggttccactgaggcccaggcagtgttggagtgggtggcacgccagtctcctgaatacgggccagtattgaacggcgtcagtgtcgaggtggtcaagaagacgacctccaaaagcgctcgggtgagcggcgcaatcacagctgcatccgctcctggtcctccggtgcctctgccttccaatggcaacgcaggtgatgaattcacagtcacgactcgtgatcgacagggcaacacggaaacgtggggctacacgtttgtcggcggcgcaaacggcggtgccggtggctgggtgctcgtggagtatcacttcaagtcggtcgatttcgagaaccaagacagccccgagacgatcggcggctga

SEQ ID NO: 511245 - DNA, 582 bp, Stenotrophomonas maltophilia
atgggacgctttgccagtgtcattttgctagcgttgctttccgctgctccgtcatctgcggcagccaacgcctctttgaaaccactcgattactatttcgttaaattcaaaggcgagcacgatgtcatgcgggacgcaattaagaatgaccccgacatcccatccagtcagaaaccagtagcttataaggagcgcttcgaggaactgcagggaagattcaaggctgagcgaagcaccgagtacgccagccagagagcaatcgtcgtacaggaccatagctgcactaagggatcttcgggcggcacgaagaagtgcggaacgaaatgtgcctccgctccgtcaccagagtggttcaccgaagcgagcatggttgaatcactgcaagagaacaacgcgcctaacaagcgcaaagcaactataaagccagatggatcggcagcctgcatctatcttcagaaaagtggcaagggccgactattcgtacgggtaaaggccaccttcaagtatcgacccgatttcattctgcgtgctgtagacgcggacaatactgcagtcttcaagaagatcgtaactgacatctaa

SEQ ID NO: 511246 - DNA, 354 bp, Stenotrophomonas maltophilia
atggacaagaaggacttacaagttgtggccattggagagggaaagcaggagaacgaccagcccagggacagtggtgctggtcttctttcccctgcaacaagcttggacgtgagtcccaaggcatccagggggcggcactcccgccgccagacgctggagaagggcatggaagatgagcgccatagggctcaggtggtctcgatggaggccttcaaggcaggccgggcagggcaggtccccgcggaggtactggagatgtatgacgagctgacccgcgaccagcacgcgctggtacggacctcgagcgtgcttcttgcagctctgcggaggcgattgggcctgccggatctttag

SEQ ID NO: 511247 - DNA, 384 bp, Stenotrophomonas maltophilia
gtgtgcttctcgaaggcccaacgtacccataccgccaccgccggcgagttcgtcttccacaatcccaggacgaatgcgcggtgggggtcggatcagagcatccgcgccggcgaatggcagcgcgcgctgcgcaaggccggggtccggtatcggtacccgtatcagatgcgccacaccttcgcttcccaggcgctcagcgccggcgagaacgtcatgtgggtggcgaggcagatgggccaccgcgactggacgatcaccgccaagaagtacggccggtggatcccttcgatggtccccgatgccggcgccaaggccgcggcggtctggaaccccctccccgccgccctgcccggcagcctgctgctggacggcagcgggcactga

SEQ ID NO: 511248 - DNA, 1527 bp, Stenotrophomonas maltophilia
atgggaagtctgtttggaggtgtgagcgcctctgactttgagaagtacaaggcctgggtggcatcgcgtttcgaatcagttgaaaaactggcgaatgatacgatttctggaaggattccagcattggaagcccgtatcactcaaaccgcaagcgagtccgcagatgcagcattcgaagctttgacagctgtcacccttcgtcgcgaccagctcgagaagatcgccgcggatatggacgaagctcacgccgagatcgaacaggccaagtccgcgctcgttgccacgatagaagacgtatcaaatcaacaggcagccttcttggcaaacgcggcaagtttgctgtcgacgtcaactgaagcgctatctctgcatcagtccttggtgagtacggatgcacagacacagtcggcggcagccgacatacagagccgcctgggtgaagtacagctactcctggaacaagcacgcgcaattcccagtgaacttgaagctctcaagaagacggcacaagatgccagcgctgagagcgagaacatcaagagcttgctcacgcactcgatgaaaagaaaggctgagttcgacgaactgcacaaggctctgtttgggcatgagattttagacgctgaagggaactcccagagagttgacggcttacgagatgaactgagcaagacgtacaattcgctcaagggggatctcgaaaatctcgacaagaccgctgcagaagcgattgagcgcgtggaaggagctcagagattcacgagaagcgctcagaatgatgaattcaattcagtccttgagaaggggaaggctgatttgaaagatgtttccgatcaactcacagcactaatgcccggcgcactggcggcgggactcagtgctgcttatgacagcaaaaagattgaggaagcaagctctctcgcgactcacgagggcaacttcatgaaggccgtttttggcctggttcttatttcactaatcccattcggagtcgatgttcatctccttgctcgcggcgacgagttgactaaagttctgcaaggaactccgcagctaattcttgccattcttccgctgtactttcccgtactctggatggcatattcatcaaataaaaggcttaacctttccaagcgacttatcgaggaatatacccataaatctgtgctcggcaagacgttctccggactctcgaatcagattgagtccctttctcaggaaggcggagtgaaggctgagctccgtacccgtttgctattcaatgttttgcaggtcagcgccgaaaaccctggaaagctgatcacagactacaacaagtccgatcacccattgatggacgtgcttgagaagagcactcgtctttccgagtccattgattctctgtcgaagattccgggtctatccgccgtcgcaaaagctctctcagaacgacgggatagtctgcttcgggagcaggcacagaaagtcgaagagggtgtagcagtgagcggacaaatggaagagaagccagccagcacgtcaagctga

SEQ ID NO: 511249 - DNA, 1788 bp, Stenotrophomonas maltophilia
atggcctgtgtcgaatttttctccgatcaactgcgccgcgtagggagcaagcgcattgcccacaatttggctggcgccctgaccagacgcgccgccaataagagccgtagtgacggcgaccaaagcccggctgtagtccccgccgatcccccactggagctgggatctatagaagttgcggtagtctgcactgtggctgaggacgtaattttgctttccctccgcgtcaagtgcctggaagtcggtaagatcctgtccctcaagtgtttccacaaagccgtcataggcgttcgtagcaccggtctgagcacgcgaggcaaggtctccggaaatctgctggctcgtagaaagcaccgtccccgccgcagctgccatcgcctgctggtcagccagcaacttgttcgcatccggcaatgcatccaacgcacgatgcgctccactggcgtcggtgttgatgcccagctcggccgccgacgtctgcttgccaccgatggtgatgttgccctcggtcaaggtggcaagggtggagctgctgtcgctgcccttttccatcatcggcaggcccggaccacctcgcggtgcggccgttcccggcttgggcgcccagccatccatcttcccgcccgcaccaccactgatgctgccggagctggccgtgtagtccatgtggttctgcaggtcagtgaacgtcagcgagcccgcagtcagttcactgttgcccgcatgagtgctggcaatcgcgccgcccaccaggttcacgtggccggcatcgacgtggtagccgccattgccggcaaacaggccactctgctggccgacaccctgatagctgccgctggccttgcctgcgctggcatacccgtcggcattccacgcggtaccgaacgacacctgcacgcgaccgcccacctggctgttcctggacatgctctcggcgatgtcctgcaacgactcgatcgtcagcgtgccgcctgtcttgacgtcgatgcgatcagcggtcgccgtggcaccacgcagcgtggtatcgccctcggccttcatcgagatgttcttgccggtcagcgtggtgttctgccacgtgctgctctcggcattggccttgctgctgccaacactcgcttcggcgtacacatatacgccggtctgcgcccctaccgagacgcccacgccgacttcggcaccggcattgctgctcttgctgcggtcggccacatgcgccttgcctgcttccagcaggacgtcgccggccgaatccaggctgagcgtgttgcctgcactcagattgccctgcaccacgtggatgtcgcccgtcgtgctggtcaggttgatgttgccgccgccctggatggtggagccacgcgacaccctgctgctgccatctgcactgctgttggcggtcttgaagccgatgcctgcttcagcacggaacagttcgccactgccgccacggccggacagtgccgagatcgcactggctgcctggtatgcgttggcgcccgccgccatgccctgcatcttctgcaggcggtcatcggactgacgggccgcgtccacgttgttgatcaggtcgatcaacggcgacttcacccgcgcgaacacgccgatcttcaggtccttgtcgctctgcgagtagtggccgctctcgtcggcggtcaacagctcgatctcggcggcggtgatgttcacgtccttggcggccaccacgttgctggccgtctgcgtgtacttgccaccggcggtcaggctcatgctaccgcccaggctgccgatgctgctggccacctgtga

SEQ ID NO: 511250 - DNA, 681 bp, Stenotrophomonas maltophilia
atgcagcagcgctacatggacccacagttaggagcgttcctatctgttgatcccgtgaccgcccaaggcaagggcgatatgcgcctgttcaatcgctatgcgtatgcattcaacaacccctacactttcgatgaccctgatggaagatgcccatcctgtgatcgatttggtgatgcatttgccaaggagccgcaggcctttgatcatccgggctttacggttccagccgcaattgtggcggcggccatggcggcgccagtggtatgggaaatggggatggccgcaatggccaatcctgcgaccacgaccgctatagtgggtgaggtgggggcggcggcaggagtgactggcgttggtgccaatcaagcagtgggaaaagctgcagaaagacttgccgcaaaagagcttgttgcggaaggaaataaaattctgggtagccaagtaggagcaaggacgtcctcagggttgcgagttatcgatcatttggttgaaacgccttccgggaaagtgatgggcgtcgaggtcaaggcagggaatggcgttcgcaattcggctcagctaacaaaggacgcaaagatggctacggaaggcgcagtactgaccggcaagaatgcgccagaagcactgcggggtcagcgaatgatcattgaaacggttgaacggaggtatcccaataaatga

SEQ ID NO: 511251 - DNA, 231 bp, Stenotrophomonas maltophilia
atgactgtggcgcgacagcgctcgatgtgggtggccggcctgtccacggtggtggagtggtacgacttcaccctgtacctgtacttcgccacggtgctgtcgcgggtgttcttcggcggtggcgaacaggcgctgctggtcaccttggccggattcgccgtgtcctaccttatgcgtccgctgggcgcgctgtgctttggtcacctgggtgaccggctcggccggcgatga

SEQ ID NO: 511252 - DNA, 627 bp, Stenotrophomonas maltophilia; identical to SEQ ID NO: 347426

SEQ ID NO: 511253 - DNA, 264 bp, Stenotrophomonas maltophilia; identical to SEQ ID NO: 347427

SEQ ID NO: 511254 - DNA, 1332 bp, Stenotrophomonas maltophilia
atgctcgcaatcctccagaacataaccttccgccggctgtttctcgcacaagtttcatcgcttgtgggaaccggcctggcgactgtggcactcgcgctgctggcctacgagctggctggccccggtgctggcgcagtcctgggcacggcgttggcgatcaagatgaccgtctatatcctgctggccccggtggcgggcgctgttgtatcgcccgaaaagagaaagaccgtcctaatctcactcgatgcgatccgggcttgcgtcgtgctgatgctgcccttcgtcaccgagatttggcagatttacttgctgattgccgtattgcagtcggcctcggctggatttacgccgttgttccaatctttgattcccgaggtgcttcccgaggaacatgactacacccgtgctttgtccctgtcgcggatggcctatgacttagaaagcctgctaagtccagtgctcgcagcagccctattggctttggtcagctttcacgtcttgtttgttggtacggctttcggctttctgttctcggccggactgattatggcggcggcatttccggcagtcgtggtcgctagtaggcgcaacggtggattcggcgaaagactcctttgcggaacacgcatctatctccacacgccacggttgcgcggtttgctggcattgcacctttgcgcggcagccggtggcgcgatggtgttcgtcaacaccatcgtgatcgtgcggaacttcttggatggcagcgaacagcaggttgcgctggcgcttgcgaccttcggtggcggctccatgctggccgcgctgctattgcccaaggtgcttgaccgaatctccgatcgccgcgtgatgttgtcctccgcgacgatgatggtgcttgcgctgctgaccactactgcggcctggatcgcattgccatcttggcgagattgggcgttgctgctgccggcatggggcatgttgggtgttgcctatgccggattggtgacgccaggggggcgcttggtacggcggtcggcaaatgaggaggatctcccggcggtgttcgccgcgcaattctccttctcgcatatctgttggctgctggcgtacccgttggcaggctgggttggcctcaagttcggtcttggcattgccttggctgccctgagttgccttgcggtcgttgggatgcttgccgcagttcggtgctggccgcgagacgagcaatcagttcttgtgcatgagcatagcgatcttccagatgaccacgcgcaccttaggtcgcatggcgtagcgccgcacgcacattcgtttgtcattgacgcgctgcatcggcgctggcctggatga

SEQ ID NO: 511255 - DNA, 318 bp, Stenotrophomonas maltophilia
atgcgatgcgtcctcgccctttgcgtcgtgctgctggccgcttgcagcgagcagccggccgacaacctcgccgatgccttggccgccgatcccgtgcggctcaaggcattgcgcgcgcaatgcgcggccaaccggcaggccacgggcgaggacgcctgccgtgccgccgccgaagccctccggcggcgcttcttctccggccagaccgggccagatgaataccagacgctggccgatctgccgccgatcccaccgagcttcgatgaacccgacgaaggcgagacggcggccatgcctgcccaagaggacgcgccatga

SEQ ID NO: 511256 - DNA, 594 bp, Stenotrophomonas maltophilia
atgtccgacggctggtccggccgcctggactacacctggtcgcgtagcttcggcaacaccgaagggcaggtgagatcggatatcggccagagcgatgtgtccaagacccaagactgggatgcggcggcgttgatggagtacgccggcggctacctcgccaatgatcgccggcaccagttcaaggcgttcggtgcctaccagatcgatgacgaatggacagcctctgccacggttcgggtgatgtcgggcatgccgaaaagctgtctgggctactacggcagtgatcagaccgatccactcaatggctacggctcggcctaccactactgcaatggcaagccttcgcgtcccggcgacgcgggccggcagccgtggacggcgcagctggacatgggcgtgatgtatcgccccgggtttgctgacaaccggcttggcctgggactgaacatcttcaacgtgctcaaccagcggcgccagctgcagtccactgccaagtaccagaccggaccggacacggtctccaacatctacggtatgggcagctacttcacaccaccgcggacagtgagcctgagtgcctcatacgacttctga

SEQ ID NO: 511257 - DNA, 1161 bp, Stenotrophomonas maltophilia
gtgcgagatcccgaatccaatgtccttgagttcatcgctggctgcgcggtcgactcggatatctactatctggccgccgcccttggcccagggcatgaatactacgacccggatcccggcccacccagccggatgttcgtctttgcccgtgcaccccaggaaggatggttccatcacgaccttctggacttccaggtcatgtccacactgttcatgccaccagaaaacagcggtggcccgcagcgcttactcgcgctggactactggggacagctggaatactacggccgcgctggcgccgcgattgagcgcgtgaaggcggatacgggcggcctcacacgtattcggaagctgggtgaagatctgttctgctgcggtgtgcacggaatgatctatcaccgcaacgaggcggggtggaagcaacttcccacgcgtttccccacaccagagcgcaggaatctcgaggacgagcttgattcgatggacttcgaaacttggcttctgtattgcggacacatattcgaacttgacggcgctacccctctacccaccgacccggcgaagcgtgaggctgagctccgccgaaagttcgaggaaacgcgcagccagatagttgagggccgcaaagaccgtgagtacagggagtggctggtcagtgttgacgtgcccagtgtgaacgacctctgcggaaccggtccagcagacctctacgcaatcggctctgacggcctgattgcgcactggaatggcttgaactggacgctgcccgaacaagtcaccactgcggagctgtttcatgcctgcagaactgaccaaggtcgcctcgtcgttgtcggcaaggaaggcaccatcattacaggcgacatttccactggatttgagcgcctgcgccacgacgccagcgaggacatcaacttcaactcggcctgccaacatgggcaacagatcttcatcggcactgaatatggaggcctgtacgtctatagcctcgaaaccggcgtagttgaacccctgctggaaggcatccccgaagagctgagagaagcgacgatcgtcgacatcagttccgtgggtggcgtgctgtgggtgctgacaccctgggacctgacgcgatttgatggcaccgagtggcaggtgatcgttcatccggacaacggatga

SEQ ID NO: 511258 - DNA, 189 bp, Stenotrophomonas maltophilia
atgcgcatcaatcgagtaatggccagcgccgtggcctctgtgctggcgttcggcgcggtggccccggcctttgccgacaacgaccaccgtcgcggccatgaccgccgcgagtggcgcgaggaccgccgcgaatggcgacaggaccgccgtgactgggaacgcgaccgccgcgaggcacgccgcgactga

SEQ ID NO: 511259 - DNA, 435 bp, Stenotrophomonas maltophilia
atgcaatcctggcgccgccgacaaggcctctacctgcttgtccacagccttcttttttccattccctgcgcgttggccggcctgttgggttcgctgctgctgctgctaggggtatgggcgcaaggcggtgacaacagcgcagttcttggattgcttgcgatgtggggtgtcctgtccgtgacggcgatcccaccggtttatcagcttgtaaacacgtggcagatgcgcggaccggatggattgaagcccgcctcgccagtgctggagacgctgtttctagtgtcaggtgctcaggctgtgtccgcgttggtgataacagtttcaagtcttggagtgcatccgatactgctgatattggcaatcggttggggggctccctggatcagccttgcctgccacttccgatggctgtcgaaggccagcgggcgccagtga

SEQ ID NO: 511260 - DNA, 1152 bp, Stenotrophomonas maltophilia
atgcttgtaacgaaggtaaagctcaagaactggcggaacttcagagaggcagatgttgcactggagccaagaacctttctgattggcgccaatgctgcgggaaaatccaactttctggatgttttccgatttctccgaacaatcgctcagatggagggtggcggtctccagaaggcactgaaggatcgcggctttatgccaaagctgcgaagcctgcatgcccgacgagatcccgaagtcggaattgaagttgaagttgtggagtcagccgctgctgatgcaaagcgctggacctatgaacttgccttcaagtcagaagggaaaggcgcacaacgagttctcatcacgcgcgagcgcgtttcatgcgatgggaagatcgtaatcaatcgtccccagaaggaggatcttgctgatccgatgcgactgacgcagacccatctggaacaaatcaacaacaatgcctcattcagagatttggcagatttctttgggtcggtaatttatcttcatttggttccccagctcctgaaattcgccgatgaaattagtgggcgagttgtagagagtgatcctttcggtcaggggcttctgcagagaatcgccagaactccccaaagaactagggacgcaagacttaaacgaattgcgggtgcactcaaagtagctgtcccacaattttcggagttgcagttcgaaaaggatgccatcacaggtgcgccgcacctacaggcacgtttcgatcactggagaactaacggggcatggcagcgagaagagcagttttcagatggcactcttaggcttataggactgctttgggctctacaagagggggacggtattctcctgctcgaggagcctgagttgtcgctaaatgatgcgatcgttgaatatattccgcttatgatcgatcgtgcgcttccgggtaagaagagggggcggcaaattttggtgacaactcacagcgacaatttgatcgccgcagtgagtgatcccgagtccgttttgctgctcatgccaggcgtaaacgggacagttgtaagaggggcggataattcggagaaggaggctatggagcatggccttaatccggcagaagtcctcctgcccaagacgcgacctgatcgcataaagcagatggggatgttctga

SEQ ID NO: 511261 - DNA, 984 bp, Stenotrophomonas maltophilia
atggcaggcgacctggtcagtgccggcggtccccattacggcaaggtcgagatgtatgcgctgcccagggaactggagatcctgcgcaacgccgagcacggccagcgcatcgcctcgatcggaacacccgggatgaagagcggccatgtcatgtccgccgcggtggcggtccagttgggcgattcccatcgattggttcatttccttgatcgcatgaccgacaagggtccggtgcaatctgtactggacaacccacaggcgcgggtcacggatcctgaggacctgcgccggattgccgactaccgcagtgatgttcatcaactgcgtgcgggtgcgaccgtgcttgtcggcggcgggcccggtctgctgcgcgacggtatcaatttcctgcgcggtgtcgaggaagccggtgcatacgcccgccgcgaggctgaagcggagcagcgggcccagaacgcgctcaagccgggggagcagctgatccaggatgcaaccggcaagggctcgccctctctcagcaatcccgctttctctcccaagaaccctttacaggagagcattgagtcaaccttggacaaggcaggcctggatcccaggaaggaaggccatccagaccatgcgctctaccggcagattcgcgatggtgtatccaccgtggatgccaggcacgggcgcagcttcgatgaaaccagtgagcgcgtgacggccggcctgcttgcggcggccaagggcagcggcctggaacacgtcgatcatgttgtactgggcaattcacccagcgatggctcagcctctcgcatgttcgttgtgcagggagcgctcgacaatccagcacacctgcgggcgtcggttccaatcagtgaggccgtcaatacgcccgtagaacagtcgctcgccaaggccgagcagatttcgcaggcacagcaggtcgcccagcaggacctcgcccaggagcaggccctcaccgcgaggcggatgggctag

SEQ ID NO: 511262 - DNA, 1074 bp, Stenotrophomonas maltophilia
atgaccttcaccggcaacgccccctgccgggtcctgatcgtcgacgactccgccgtcgtgcggcagatgctcacggaaatcctgtccagcgacccggccatcgacgtggtcggcaccgcggctgacccgctgttggcgcgcgagaagatcaagcgcctgctcccggacgtgatcaccctcgacgtggaaatgccgcgcatggacgggctggcgttcctggaaaacctgatgcgcctgcatccgctgccggtggtgatgatttcctcgttgaccgagcgaggcgccgacaccaccctgcaggcactggcgctgggcgccgtggatttcgtctccaagcccaagctggacgtggcccgtggcctgcagggctatgccgaggagatcatcgccaaggtcaagatggcggcgcgctcgcgcgtgcgcccgctggtgcgtgccagcgcccccaagctcacgctggacgctacgccggcgatgcgtgctgcctcgccgcagttccgcaccaccgaccgcctgatcgcgatcggctcgtcagccggtggcaccgaagcgctgcgcgtggtgctggaaggcatgcctgccgatgcacccgccgtggtgatgacccagcacctgccggccagcttcagcagcgccttcgccgagcgactggaccgccactcggcaatggccgtgcgcgaggccagcgacggcgaagcagtactgcccggccacgcctacctgccacccggcggcaagcacctgcgcatcatccgcgacggtgcgcgctggcgctgccgcatcgacgacggcccggcggtgaaccggcacaagcccgcggtggacgtgctgttccgctcggtcgcgcagagcgccggtggcaatgccatcggtgccatcctcaccggcatgggtgacgacggcgcgcgcggcctgctggagatgcgccaggccggcgcgcccacactggtgcaggacgaggccaccagcgtggtctggggcatgcccggcgccgcgttcaagctgggcgctgccgaggaacaggtgccgctggagcgggtcgccgagcggttgctcgccctcgcccgcggctga

SEQ ID NO: 511263 - DNA, 249 bp, Stenotrophomonas maltophilia
atgcataacgagagcccactgcagacctgtagagccgagccatgcccggctgacgaaaagcagccgagcatggctcggctctacaactacgaagagcagccgaccagcggtcggctctaccagagcgacagccggagcaatggcatcgaacagcagcgccagcgtgcccggcgcacggcgatgtgggtcggcgccatcgcggtgctggtctacgtcggcttcatcctcagcggggtgatcggccgatga

SEQ ID NO: 511264 - DNA, 162 bp, Stenotrophomonas maltophilia
atgaaagagatttctgcagatcagatcgatagcatctcaggaggatggctgccttgggccgctgtggccgcgtttgtctactacgaacgaaatgaaatcgcggactttgtaggcggcgtcttggacgggttcaatggaaccaactatatggagccaaagtaa

SEQ ID NO: 511265 - DNA, 2121 bp, Stenotrophomonas maltophilia
atggacgcccctatacagtctgaggtggctgagtgtggtcttgcatgcttggccatggtcgcggcgcaccatggcaacaaggccgggcttcgggaacttcgtcgccggtatccgctctcgctcaaaggcgctacgctggctcacatcattgacgttggggcaaagcttggctttcgttgtcgcccgttgagcttggacatggagcatctgagccagctgcaactgccctgcatcgcgcattgggaccttaatcacttcgtggtgattgagaagctccatcgaagcagcgtcactgtcctggacccggcatttggcaagcgcaagctatccttcgaagaggtctcgcggcactttacgggcatcgctcttgagctccatccaaccgcagagttccaggtcacgccgcctccagccgcagtctcgctgaagcaattgaccggaaagatcgaagggctatggcgatccctcggcttgctgctgatgttgtcagttgctcttcaaatattcgtgctgatagcgccattcttcatgcaatggacagttgatcaggcactagtcgcttccgatagagaccttctgactgtacttggcctcggctttggtctggcacttgtactgcaggtatgcatcggacagattcgcggcagagcggtgatttatctatcgaatcggttgagcctgcagtggaccggcaacgtctttcgacatctcatgcacttgcccttggattactttgagaagcgccatctgggtgacgtcacctcgcgcatggggagtgttcaggccattcagcgaacgctgacgacaagttttgttgaagcgctgatcgacggtctcatgatgacagtgacgcttggcatgatgttgctgtacagctggaagctcgctctcgtcaccctaatcgccgtcgccctgtatgccgtcgcgcgcgcgttagcatttaatcctcttcggcgcggaaccgaggcgcagttgatcgcgggggcaaaacagcagagtcatctgcttgagtcaatccgcggagttcagtcagtgaaggtcgcgggccgcgagtcgattcgccaagctggctacttcaaccttttgaacgatgccatcaaccgagacatttggctttcgaagtttggcctgggtttcagtggcgcaagccaatttgtgtttggtctggaacgcatcgcggtcatctggattggagcgcttctcgcaatggagagcgtgttctcagtgggtatgctgatcgcttaccttgcctacaaggatcagttctcacagcgcgtgggcgccttgatcgacaagtgggtggaactccgcatgcttcgcttacatggtgagcggctttctgacattgttctcacggagccggagagcccttctttaaggtcaggtggtctgccccctgatgatctgcgtatcgaggccgatggacttggctttcgctatgctcctggtgagccgtgggtactcaggaactgtagcctggtgattgagcccggcgaatcggtggccatcatcggtccctcgggttgcggaaagacaacattactgaagattctgcttggccttctgcaaccctccgaaggcgaggttcgagtcgggggcgtgccgctttccaagctcgacatggatgcctatcgccgagtgatcggagctgtaatgcaggatgatcagctcttcgcgggaagtgtgagtgaaaatattgccttcgaggatcaggactgggacgaagatcgagtgcgtgaggcagctcgcctagctgcagtccacgacgatatctctgcgatgccaatggggtataacagcctgatcggagacatgggaacctccttgtcgggaggccaaaggcagagggtaatccttgctagagccttgtatcggaagcctcgttttctctttcttgacgaggcaaccagccatctggacgtggatcgagagaggcttgtcagcaacgcggtgcggaagcttgacctcacccgagtgatcattgctcatcgtcccgagacgatcgctagtgccgaccgagtcctcgttatgcatgcggggacgattgctccggaactgaagcgaagcccttcgggtcctttggcgaacggagaacagcgtgaaaaggtcactgtttcatga

SEQ ID NO: 511266 - DNA, 1245 bp, Stenotrophomonas maltophilia
atgagcgatttgttccgaaaggaggcagtggacgcacagcggcgcagctggctcggggcgatatctctcgcgcaacctgttcgattctggattctggggctcttcgcagcgatagctgcctcgacaattgtcagcttcctgtacctgggcgagtactcgcgcagatcgcgggtactgggtgaacttgtgccagatctcgggctgtccacagtcgtcgctccctctgcaggtgtcgtgtcaaggttgaatgtggaagagggcgaccatgttcgtgttcaagatggactgctgacagtgaatgttccaagagtcacgtcctccggtcgcgattctgtgtctaccttgctcgatgcccagaggagccgaattgcaagcgtaagcgcgatcagcgagtttcaggacagacagtttgcagcccagcaggacggcgccaaagcgcagcgcagcgcgatgttgcaagagctagcccagattgagtctgagatccagacacgcggcgagcaggtaaggatcgggcgcgaaaccgtagctcgctatagaagcgtggaggatcagcgttatgtgagtctcgttcagatcaaccagcaagagcaatcgacacttgagatggtgaacgcacagcaggcgctccaacgccaagcgacgtcaattcgtaggagtctggctgaactggagcagcgccttgcggagattcctcagcagaggctgtcgactaaggccgcgtctgagcgggacttggcggcactgagccaggaaactattcggatggaggccgatggcgaactccttcttcgggctcccgtagccggacttgtcgcgaaccggttggtcgaggccggacaggccgtacagccaggtcaggcgattcttagcttgctacccgaagggtccgagctaagagcgcagttgcttgtcccgagttccgcgataggcttcgtaaaagtgggtgatcgagttttgctgaggtaccaagcatatccctaccaaaagttcggtactcatgagggcaccgtaattcgcatctccagaagcgcaatgatgaaaagtaaggagagcaacgatccaaatcagtccctgtatcgtgtcttcgtttcgctggaccaccaggatgttctggcatatgggaaccgcgagccactgcgtccaggtatgcagcttgaagcagatattatgggagagcgccgaaagctctatgagtggttgctcgagccgctctactctgtcacgggaaaatttacgagatag

SEQ ID NO: 511267 - DNA, 1485 bp, Stenotrophomonas maltophilia
atgggccgcatggaggccgacctgggcacgggcctcgattgggtggccgtcaaccactggaacaccgataacccgcacacgcacatcgtcgtgcgcgggcgcgacgacaccggcaaagacctcatcatcgcgggcgactacattgccgatggcttccgtcatcgggccgccgagctggcgaccgaatggctggggccgcgcaccgagctggagatccagcagaccttgcagcgcgaggtggagcaggagcggtggacgagcctggatcgcacgctcaagcgcgagctgggcgacgatggcctgttgcatgtcgaacgcctcaacgagccgagattgcaacgccagcgcctgctactgatcggccgcctgcaacgcttgcagcgccttggcctggccgacgagctgcggccgggcacctgggccgtccatgccgacgccgagaagaccttgcgtgccctgggcgagcgtggcgacatcatccgcaccatgcagcgggccatgcgcggcgagccgcgcgagctggcgatgttcgagccgggggacgatggccgaaccatcgtcggtcgcgtggctgccaaggggctggccgacgagctgagcgaccggggctatctggtcatcgacggcgtggacggcaaggcccactacgtcgcgctcaacgctcgcgacgagctggcgaactatccgaccggcgccgtggtggaggtgaagggttcagccgacgtgcgggcggccgaccggaacatcgccgcgctggcgagcgatggcctgtaccgcaccgaccatcacctggccgtggcgcagggtcaggccgtaccgggccgcgacccgcaggaagtcgtggcggcccatgtccgccgactggaagccctgcgccgggccggcatcgtggagcgcatggccgaggggctatggaaagtgccggacgacttgcccgagcgcggccgtcagtacgatgcgcagcgcctgggcggcgtggccgtggagctgaaatcgcacctgcccattgagcggcaggcccgcgtgatcggggccacctggctcgaccagcaactgatcggcggcggccgagggctgggcgacctgggctttggcagcgagaccaaacaggcgatgcagcagcgcaccaacttcctggccgaacaggggctggccgaacggcgtgggcagcgtgtgatcctggcgcgcaacctgctgggcacgctgcgcaaccgggagctggcacaggccgccaaggagattgccgccgacaccggtctggagcatcggccagtggccgacgggcagcgtgtagccggcatctaccggcgctccgtcatgctcgccagcgggcgttacgcgatgctcgatgacggcatgggattcagtctggtgccgtggaaaccggtgattgaaaagcggctggggcaaagcgtggccgctcatgttagcgacaagggagtcaattggattctcggacaccaacgtgggcagggcatcgcatag

SEQ ID NO: 511268 - DNA, 1386 bp, Stenotrophomonas maltophilia
atgcgctccgtgaagacgattcggctcagtagcctgggactgaaggttctggcggcctatgtcgtcggcgccctccttagcatcgcgctggccgtcgccgctgcggtctggatggtggagcacgacgttctggccgatctggagctgcgggagcgcgttgggacgctcgcgagcaagatcaagttcgacaccagtggcaagcctgtcggactcgatgccagtgaagccgacttggactggctgtacgaaagcctaccccatgagaccgcttatcgggtgctggatgcggagggagccgtggcgctcgtttcagaggctggggaagcattctggccatctggcagcagtgagcctcgattagagcgggacacctttatcttcgagcacaacggcatgacactgcatggtgccaccgaacctttcgagcatcagggacggcaatggcacgtgcagttcgccaccagcgagcgcctcatgaagctcatccagcacaagttcgcgctgccgtacatgggaatcggcattggcatcttcagtgccgtgctgatcgtcgccttcggcctgtgcgcatacatcacgctgcgctatgcgctcaagccgctgcgcggcatctccgaagctgcggcggccatctcgccgcgctcgcttcatgctcggctgcaaaccgaggtggtgcccgcggaaatcagcccgctggttgatagcttcaaccgaacgctggagcgtctcgatcagggctaccgcgtgcagaaagagtttcttggcaacgcagcccacgagttgaagacacccctcacgctgattcgcgcccagatcgagctgatggaaggtgacgatagcgatcggggtgcgttgctgagcgacgtcgaatacatgacgcgccaggtgcagcaacttctgctcttggctgaagccagtgaagctcataactacgacttcaccaccgtccgagtacaagaggtggcagaacaagctgtctcctatttgcagcgcatggccgaagcggccgatgtgcgcttgacggtatccgcgacagccgacaacgtggagtggaaggctgatcgcggcgcattgttcacgctgctgaagaatctattggagaacgccatccagcatgcgcccgcgaagacgacggtcgaagtggcgatccaaagcgatgcggtgtccgtgcgggactgggggacgggactcgatgctgcccaactcccgctgttgttcgagcgattctggcgcgcggcgcatcgacgcgaccagggggcaggattgggcttgtccatttgccacgaaattgcgttggcgcatggatggcgtctgacagccgaacgggctgagccaggactgcgcttccggctgacgaaagcacagggaagccatgtatcacgatag

SEQ ID NO: 511269 - DNA, 213 bp, Stenotrophomonas maltophilia
atgttgctgctcttgcgtaaacacgaggaggtcgtgcgtcgcaatgcacttgaggcggcagcatgggggttgagcgaggcggtcacaccgaacgcgctggatgtggccctccaccgcatacgccgcaaactggtcgctatcggttcgcggcagcggatcgtcaatgtcagaggtctcggctatgcgctccgtgaagacgattcggctcagtag

SEQ ID NO: 511270 - DNA, 426 bp, Stenotrophomonas maltophilia
atgcagtgtcaaatcaccgtgactgggatcgagcgagcggaattccacgggccgacgcagcaatgcccggactcgcgccaccatctcgtccatcgcgaacggcttgggaaggtaatcgtcggctccagcgtcgagaccttccacgcggtcatgcagggcatctcgcgccgtcaacacgaggcaaggaacacgaatgccggcatttcgcaacctttgcaacaggacgagcccgtccccgtctggcaaccctcgatcaagaaccaaggcctggtaggacatctgctgaacagccgtccacgcggcgtcgatgcggtcggccacatcgacgccgattcctgcggctaccaagcctttgtgtataagccgggccatccgctcatggtcttcgatcaggagtattcggctcatcagaaactgtatttgtag

SEQ ID NO: 511271 - DNA, 831 bp, Stenotrophomonas maltophilia
atgcctccctccccagctttcacctcccgcttcaaggcaagcgctgccaacatggcccgcgtctccgctctcgcggcggtattcgcctgcgccgctccggcgttcgcccagcagcctcccggcgaaggcgagcccgagggctcctcctgggggctggggttggccgtcatgagcgtacagaatgcctacaagggtacggatcgcgagaccagagtcttgcccatgatttcctatgagaaccgctacgtgaagctgggcggcccgaacctggaactgaaactgccaggaatcgagttgagtgactcgcagcgcctcaatttcggcgtcatgacccaactgttcgacggtgcaggttacgaggccaaggactcgccggccctggctggcatgtccgagcgcaagtccagcatctgggtcggcgccaagatggagtgggaaaatgacctggccgacgtcaagctggagtggctgggcgatgcctcgggcaagagtaagggccagcgcttggccctgggcctggagcgcaagatcatgctgagcccacgcctgatgctgataccgcaagtgggcgtcgaatgggtggacaagaaatatgtggactattactacggcgtgcgcgacagcgaagcaacggcggggcgtgcggcctataccggcaaggccacgctcaaccccgagatcagcctgagtggcatttaccgttttgacaggcaccattcgatgatgctcaatgtcggcgtgagatcctttggtaaggagatcaaaaacagtcccatcgtgggtcgctcgaccgagaaccgcgtgatgctgggctacaaatacagtttctga

SEQ ID NO: 511272 - DNA, 1485 bp, Stenotrophomonas maltophilia
atgctgtgcattgccattggcatgccacttgtgctcgcgggttgtgcatcgaccgcacccgccttgatgccagacagcgccagcgcgcaagtcgccacgcaatggcacgcaccgcttccgcacggtgggcgagtcgatgatctgaggcagtggtggtcgcagttcgacgacccgctcgtgcccgatctgatcgaggcggctcagcgcgccagtccgaccctggcgcaagccgccgcgaacatggccgacgccagggcgtcgagtgtgaccagcggcgcggcattgctgccttccctggatatcgccgcaagcgccacgagggggcgctcggagctggcggcccccgtaggtaaggtctcgtcgctgggcctacagaccgcgtgggaactggacctctttggagccaatcgcgccggcctcgctgctgccgaagcaaggttctcgtccagccaggctggctggcatgacgctcgggtttcggtcgccgccgacgtggcgaggaactacgtcgagctgcgggcctgtgaggcgcacgttgagcaatcccggatcgacgcagcctcccgcgcgcaaacatctcgcctcaccgagttggctgctgcgggcggtattcggtcgcctgcgacagcggatctggcgcgagccagtgcggcccagggtgaagtagcgttggaggaacgcaaggcgcaatgcaatctactggtcaaggcgctcgtggccttgaccgcccaggacgagcctaccctgcggcgcgaactcgccgagaagacggcccaactgcccctgccaaccgagttcagtgtgaacacggtaccggccgaagtgcttgcacaacgccctgacattcatgcggccgcgcggaacgtcgtcgccgccagcgctgactcgacgcaagccgacgcccaacgctggccccgcatcacgctggccggcagcatcggctccacgcgcgtctccagtctcggcgtcagcaccgacggaacggtctggagcgtcggccccatcgccatcacctttccgctgttcgacgggggcatacggcgggcgaacgcacaggcggcaaaagtccgctacgaatccgtcaccacggtctatgcggcgcgtttgcgcacggcgatccaggaggtggaaggtgcgctggtcacgctggagagcacgacgcggcgcagcgagagcgccagcgttgccgtggacgggttcgaacgctcgtaccgggctacggcaacgagttatgacgtgggtgcggccagcctgttcgatctggaagatgcacgccgtagcttggtctccgcgcagagcaccttgattgacttgcgccgcgagcgcctgctggcctgggtttccctgtatcgcgcgatgggaggtggctggacaccccaagcgaatgaacatctggccggccgctctgaccgggccggcacgctcatgccgggcagcactcccagtgctcgcgaattggccgggccgcagtccgcgaggcgctga

SEQ ID NO: 511273 - DNA, 642 bp, Stenotrophomonas maltophilia
atgggcacgccacacaaatgggcgctcgctgcctttcaggttctcgccgtgctgggcattttggcgtgcggtgtggacgctgctgtgatccggttcgtccaccgcagcctgacaccgacattggatgacttcttcgacgcggtcagcgaactcgccaacgccacgattttgtccattgccacgttatgcacctatggcgccagccgagttgcgcaggcatggccggcagcgcgtcgctggctcccttggtgggagcatgtcaagcagggcagcctgctcatgctgctcactctgctgatgggcgggctcatcacgctggcgctcaagcatgtcgtggcgcgagcccgtccgagcgtgctcatcgagcttggtcactacgggtttgccacgccctttgccgggcaccccttcaactcattcccatccagtcacgcctttacggcattcgctgcggcgtgtgtgctggcctacctcctaccagcatggcgcacaccgctgctcgtgctggcggtcatcgcaagtttctgccgtgtcctgacgctggagcacttcccgagcgacgtgctggcctctgcattcattgccgcggggtgcgtgcgcttcttggcgccacgtcttcaagactccctatcccggaactga

SEQ ID NO: 511274 - DNA, 1188 bp, Stenotrophomonas maltophilia
atgaaagtacctgacaagctcttgctcgccgcgatgggcatcgcagtcgccgccgccgccatcaccatcgtgctcgcatgggaggtgccagacgccaacgcacaggaagccaagacgcctgttgcggggcaggcttccttgaccgtgacggttgcaagcctgcagcccgccacatttcccattcgggtctcggccaacggcaacatcatggcgtggcaggaggccagcatcggcaccgaggccaacggcttgcgcctgaccgacgtcaaggtcaacgtgggcgacacggtgcgccgtggccagtcgctggcgatcttcgccgccgatacggtggaagccgagctggcgcaaacccgcgcggcggtcgccgaggccgacgtggcgctggccgaagccgccgccaatgccgaacgcgctcgtttgttgcaggaaagcggcgcattgtccgcgcagcaaattcaccagtacctcagcgcggagcgcacggcgcgggcgcggctcgatgcagccagggccgtcgagaagacgcagtggcttcgtgttgcccaaacccggatagccgcgccggatgatggcgtcatttccgcgcgtgcggccacggtcggcgccgtgttgcccgcaggccaagagttgtttcgcctgatccgaggcggcaggctcgaatggcgcgcagaggtggcagccacggacctcgccaggctcaagcccggtcagaaggtcaggatcacgcccaacggaggggatgccatcgaaggccggctgcggatgctggcgcctgtgatcgacattcagacccgcaacggcatggtctatgtggacctgcctccaagcgacaccgcgcgtgccggaatgtttgcacgtggcgagttcgagatcggcgccagtgaggtcatgacgctgcctcaaagcgcggtgcagttgcgcgagggcttcagctacgtgatgcgcgtcgggccggattcccgcgtcatccagaccaaggtcacgccgggccgccgctcgggtgatcgcgtccagatcaccagcggcctcgacaaggacgatcgcgtcgtcgtctcgggcgcggccttcctgggcgatggcgacctcgtgctcgtggccgatgggccgaagaaggccgcacggccggcggcttcgccatcggcatcacagcgactgacgctgatcagcagcgggggcacgcgatga

SEQ ID NO: 511275 - DNA, 3132 bp, Stenotrophomonas maltophilia
atgaacatgaacgtctcttcgtgggccatccgcaacccggttcccgtcatcctggccttcattctcatgacgatcggggggctgatgggcttctcaggcatgaaagtccagaacttccccgacatggacgtgcccacggtcaccgtgatggcagccctgcccggcgcgtcaccatcgcaattggagaccgaggtcgcacgcaagatcgagaacgcacttaccacggtgcagggcatcaagcacatcaagagcaccctgacggacggtgtggccaacatcacggtcgagttccggctcgaaaagccgacccaggaggcggtggacgacgtgcgcgatgcggtcgcccgcgtgcgctcggacctgcccgccaacctgcgcgatccagtgatccagaaggatgcgctgtcaggctccccgatcctgacctacaccgtcgcctcgaaccgcatggacgacgaggccctgtcctggttcgtggacaacaaggtccgcaaggccctgctggccgtacctggcgtgggtgcggtcacccgcgttggcggcgtcagccgcgaggtgcgcgtggatctcgacccggatcgcttgtacgccctgcatacgacggcagccgacatttcccgccggttgggcgaggtacagcaagaggcttcgggcggccgtgtgggcttcggcggtgcggagcagtcggtgcgcgtgatcgccacggtgcagacggcggaggaaatgggcgccatcgaattgacgctcagcgatggccgccatatccggctcgaccaggttgcaacggtcagcgactccgttgccgagccacgttcggccgccttcctggacggggtgccggtggtcggcttcgagatcgtgcgggccagaggcttcggcgagatcgacgtcgctgagggtgttcgccgggcgctggccgagctgaaggccggtcaccccgaaatcacggtcacagaagccttcaacctcatcgacccggtggtcgagaactacgacgggtccatgcgcctgttcttcgaaggcgcggcgctggcgatactggtggtcttcctgttcctgcgcgattggcgcgccaccttcgtctcggccgtggctttgccgctgtcggtgatcccggcgttcgcgctgatgtacgcgatgggcttcacgctcaacaccgtgaccttgttgtcgctgtcgttggtggtcggggtgctggtggacgatgccatcgtcgaggtcgagaacatcgagcgccatctgctgatgggcaagacgcccttgcaagccgctacggacgcggcggccgagatcgggcttgcggtcgtggcgacgacctttacgttgatcgcggtgttcttgccgacggccttcatgagcggcatggctggcaagttcttcatccaattcggctggacggccgcaggcgcggtgttcttctcgctcgtcgtggcccgtctgttgacgcccatgatggcggcttacctgttgcgggcaccagcgcagcgcgaccggcccgagccgacgtggatacccccttacctgcgcctggctggttggtgcctgcgccatcgcgccgcgacgcttgccgccaccttcgctttgttcgtcggcggcctgtggttggcaacactactgccaaccgcgttcgtgccatccgatgatgacgcgcaaacgcaggtgacgctcacactggcgccgggcagcgaactgcaggagacggtggcactggccgaacacgcccgcctgctgctggcgcagaacccgcatgtgcttcaggtttacacggccattggcggtggcagtacgggcggcaacccggccgaggggtctgccaccgctgccgcagacgtgcgcaccgcagtgctcacactcggcctgacaccacgtgccgagcgcaatggcctgcgcaagcaggagatcgagcagcgattgcgcgtggcgctggcgcctctgcccggcgcgcgggtggcagtcgggatgggcggatcgggagagaagtacgtcctggtgctgacgggtgaggacagccacgccctcgaacggcacgcgcatcaggtccagcgcgagctgcgcagcattcccggaatcggcgcggtgacgtccagcgccagcctggtacgccctgagctgacggtcaggcccgacttccctcgcgccgccgatcttggcgtcacagcgtcagccattgccgagacgctgcgtgtggccaccatcggcgactacgagcaggatctggcgaagctcaacctgggcgagcggcaggtgcctgtcatggtgcggctcgatgacgccgcccggcgagacctggagacgctcaaacgcctgccagtgcctggcgcacgtgggccggtggcgctggagaacgtcgccgcactcgacatcggcagtggcccggcggagatcacacgccacaaccgcgtgcgcaacatcaacatcgaggtcgaactgggtggccgcccgctgggtgacatcgagaaagcagccctggcgctaccgagcctgcggctgatgcccgctggtgtacagcgcagtgcgctcggcgaagccgaggagatgaaggagctggcaaccagcttcggcatggccatgctgaccggcgtgctgtgcatctacatggtcctggtgctcctgttcaaggacttcgtgcaacccggcaccatcctggccgcgctcgtgctctcggtgcccggcgccatgctggcgctgttcctgaccggattgacgctgtcgatgccctcgatgatcggcctgatcatgctgatgggtatcgcgacgaagaactcgatcctgctggtggactacatcgtcatcgcgcgccgcgatcacggcttgggccgcgccgatgccattctcgatgcctgccgcaagcgggcgcggcccatcatcatgaccaccatcgctatgggcggcggcatgatcccggtggccctgggcctgggcggcgatccgagctttcgcgtgccgatggcggtggtcgtgatcggcgggctgatcacctcgaccttcctgagcctgctggtcattccggctctctacagctatgtggacgacggcgtgcaatgggccaaggctcgcttcaccgctaaacatcaggcgcgacggccgctggccgcccatgtcctcgcccatacgccggaacggggagcatga

SEQ ID NO: 511276 - DNA, 1185 bp, Stenotrophomonas maltophilia
atgacggaccccggcgattccccgttgccgctggtcgattccggcaaggcgaccgctgcgcagaacacgctgccgacgaagccgttgtggcgctcgccaagccgtaccgccgtgctgaccgtggcggcattggtcttgggcaccgtgctgggcgcctaccttggccccgaccttctgcgtggcatatcgcatttctccgaacccacctgctcggcgaccacgccagcaggcgccgtcgcggcacaggcggctgccgccaacacggtgggcgctctaggcaggctgatgccagagggtgacacgatcacgctggctctaccttttggcgcgggcgatgcgcgggtggcaagctggctggtcagagagggccagcacgtgagcgccggacaagtcatcgccgagctggacaaccttccgcagcgccgggcgctacaggccaccgcagcggcgcagcgcacggccatgcgggctgcgctcgatcaggcgcgcagcgaagcccgtcttggctgggccgaggcgcaggccgcagccaagcgcgcgcacgcggtgcgcctggtggccgaccagaacctggcacggcttcagtcgctggtgccggtcggcgtgaccacgcaggcacagttggagcaggcgcgcgcagtggccgatcaggctgcggcggatcaggcgcaagccgcggctgccatccagcgctacgcacatcgtgacgccgacgaccagcccgacgtgcggctcgccctcggcaatctgcacgtcgcccaagccgcattggcccaggccgagcaggacctggccggtgcccgcgtcacggccatcctggatggcacggtgctcaccgtgcatgtccgcgtcggcgagaagcccggcgatcaaggcatcgctaccctgggcaacgtcgatcgcatggcagcggaactggaggtctaccagaccgacatcaggcgggtggccctggaccaaagggttgtgctgaactcgacatcgctagcagcgccactgaccggcgtcgtcgtgcagattggcatggaagtacagcggcaagccgtcttgtcgtccgatccggtatccaacaccgacgcccgcgtggtgaaggtgaaggtggaactcgacgcagcatcgtccgagcacgcccgcgcgctgactggcctgcaggtcgtcggaaagatcgcggtgggcacgccatga

SEQ ID NO: 511277 - DNA, 1176 bp, Stenotrophomonas maltophilia
atgaattggatcacccggcggctgttcggccgcctgccggtcggctggctgcagcttcgccatcaccgcatgcgcttggccgccgccgtggctggcgtggccttcgcgaacatgcttgtcttcgtgcagcttggcatcctcagcgcgatgaacgacgtggtgcgcacgagctacagcccgttccgcgccgacatcgtgatttccccgtccaacgccaacacgctgacggatggcgcgacgctggcgcggcgtgtcgtgtaccaggccatcgcgcagccgggcgtggccgccgccgcgccgctgtacgtcggacaggtcgcctgggagcggccgaatgtgccggcgacctcgctcatcgtctacgcgctgccacccgagtccaagcgctttgcgggagcagcaatcgctgagcaactcgatgccgtctccgccccgatgcgcgcgatactggatgcgctttcgcgcgacgtcgatccggcgtgggcggcgcgcgcgtcacccgacacgcctctggagttcgaggtggacggcaaggcgatcgcagccatcggcagctactcgatgggcgccggcttcggttgggacggttcgctggtggtttcggacttgaccttcatgcggctgatccggcagcgctcgatgggtacgccaagccacgtactcgtcgatctggaatccggcatggaggtggcgcccgcgctcgcgcagttgcgcgccgcgctgtccatggaggcggtcaaggtgcgcagcttcacgcaggctgtcgaggacaacgtgagcttccaggccacagaagtgccaatgggcagcatcgtaggcgccggcgtgctgctgggcctgctggtcggtgtggtgatcgtctaccaggtcctggccaccgatgttgccgcacatctgcgcgactacgccaccttcaaggccatcggctactcgcacccctacatcctcagcgtcatcttcgagcaggccctgatcctcgcagtgctgggcttcctgccgggtctggcctccgccagcgccatctacgcgctgctggcgcatgccaccgacctgccgttcggcatggacgtggggcgctcgctgacggtgttcgtgggcacgctgatggcctgcatgctgtcgggggcactggctgcacggcgtctgcgcacgatcgatccggccgaactcttttga

SEQ ID NO: 511278 - DNA, 687 bp, Stenotrophomonas maltophilia
gtgacgacatccatcgtgatgcaaggggtgaaccactggttcggggacggcgaggcgcgacggcaggccatcttcgatgtgtcgctcgaagtcacgcgcggcagcctgaccgtgctcgccggcccgtcgggctgcggcaagaccacgctgctcacgctggtgggttgcctgcgcagtgtgcaggacgggtcggttcgattgctgggcacggaactacatggagccagcgcgatgaagcagcaggccatgcggcgccgactgggcgtgatcttccaagcgcacaacctgcacgaaagcctgacggccctgcagaacgtgttggtgggtcttcaggtccatggccggggcggcgatgccgatgcccaggaagcggcggccacccatctgttgaacatcctcggcctgggtgagcgcatcacctatctccctgccaggctctccggcggcgagaagcaaagggtcgcgattgcccgcgcactggtgtccaccccggccgtggtgctggccgacgaaccgaccgccgcattggacgggcattccagcctgctcgtcgtgaggatgctcaaagcccttggccgcgagcgtggcgtgaccacgctgatggtcactcacgacgaccgcatccaccagcttgcggacaaggttctattcctccgggacggacggatgacagcgggagcgaactga

SEQ ID NO: 511279 - DNA, 903 bp, Stenotrophomonas maltophilia
atgagagccttccgaacccttatgttcgcagcgatggtgctggccaccaccgcctgcgccagcaatgccatcaaagatcaggccgcgtcccctgcggtcgagatgccgccggcgtcggcaacagtggctgtctcccagcccaacgtcccgccagcatctgcgatgccaccttaccaggatgcggcgagcactaccgggattgctgccgaggccggtgacgcagccgcagccgaagaccccaaccaagccgaactggatgccgaagacatctatgcacagaaactcgttcccgacccctgggagggcttcaaccgcaagatgcacggcttcaacaacgctgccgacaagtttgttctgcgccctctggcggtcgggtacaagaagatcacgcctgagcctgtccaggcaggtgtatcccgcttctttgccaacctgagcatgccggtaacggtggtgaaccaggccttgcaggggcggcccggcgatgcagccagatcgctggggcgattcgccgtcaacacgacggttggtgttgtcggcgtgttcgacccggcgtcccactttggcatgctcagccgcgacgatgaagacttcggccagacgctggcgacctggggctggcgcgactcacgctacttggtgctcccgctgcttggtccgcgcacggtgcgcgacgcgctcggcatcgtgggtgatcaaccgctgtcgcccatcgcccagattcaggacagcggtgtagccagcggattgcaagcactggagatagtcgatgtgcgaacgcagttgctgcccatggacaactttcgccgcgacgcgctcgacgactaccttcttgtgcgcgatgcctggattcagcgccgtagtcaccagattcaacaggatctgcgaagcaaccgtgactga

SEQ ID NO: 511280 - DNA, 945 bp, Stenotrophomonas maltophilia
atggagttaagacatctgcgatgcttcattgccgtagccgaagaacttcacttcgctcgtgctgctgagcggctgcacatcgagcagtcgccattgtcgcgggccatcaaggagttggaggaagaactgggcgtagtgctgtttgcccgcaccacgcgcagcactcggctgacccgtgccggaaagctgttcttggagcacgtgcgccgcgtgttctccgccttggagcaggcgcgcgacagtgtgaaagcagcggcgaatggttttcacgggcagttgcgcgttgctttgtcagacggcattacaccgtcgcgccttcctgctttgcttgcactctgccggcaggaagaacccgaagtcgaaatccgcttcttcgaagtgccgctgtcgcagcagatcaaggggttgcatgacgacctatacgacgtggggtttgcgcaatccgaagatgtgggcgacggcatcgtcaccatgcctgcatggagcgatgcgctcatggtggcggtgcccgcacgacatcccctgctggcccacaagcgcatccccttggatgaactgctgcgctatccgctggtgctttgcgacccacaggcctgcgaaggccatgccaagcacgtcgaacgagtgcttcgccgcgccgacatagagccgctgattgcggagcgggtcgcctcctgcgacctgatgatggcattggtatcggccggattcgcactcggactgacgggcgaggcgcatattgccgcgagtcgtgaatcaggcgtggtggctcgaccactggcatcgcgcgtgccgccgctgacgacctatctgctgcgtctcgaaggcgagccgtccgatgagctggcgcacttcattgagcgcgtgcaggccatcgaattgccggacttccataggcccaagctgggcgacgatcctgatccgccggagaaacttacgccatga

SEQ ID NO: 511281 - DNA, 279 bp, Stenotrophomonas maltophilia
atgaagaagatcatcccgttcttgttagtggcaatcttggctgcctgcggccaatccgaggcacctcaaagacccaccgtttcagaggcgagcattccgacggtggaggagctggcatccaaccccgaacggctcaaagaactgcgccagcaatgcaagaccgaccgttcccagctcggcgacgtgctgtgcaacagggtggcagaagccacgcgcaagcggttctatggtgacggcgaaacaccttacacgccgccgaaagaatcgccgaagttctga

SEQ ID NO: 511282 - DNA, 1269 bp, Stenotrophomonas maltophilia
atgagccaggacgattcccctgaatttgccacgtcttcggcgggcaaggtcgcgcctgaggcggtggcgctgcgcgcgcagccgcgctcggtcacgcgcctgaaccggcgcacgctggccatcctcgtcggcggcctgtcggtcgccgtgctcggggccaccatctggtcattgcagccgcaccgtcgcggcgcgggcgatcagactgagctttacaacgtcgatcgcgtctcgaagtccgaagggctggacggcctgccttcggactactccaagctaccgaaagtgccggaactgggaccgccgctgccgggcgatcttgggccggccatcgtgaagtcgcagcagcccgtgacgcccacctatgcgccgccgggccacgacccggaggatgcacgtcgcaaggaggctgaggcagcggcggcatcgtcggttttcttccgctctggcacgcccggcaagaccgcagcgccagcggctgcgcaagtcgctgcggctggctcggcatcggcgttagcggacttcgatccattggccgccgggcctgcctccacggcggcccagccgtccgacccaactgctgtgcagaaccggcaggagcagaaggaagcattcctgaagggcggttccacggaaacccgtaattccggccatctccagatgcctgtctcaccataccaagtgatggccgggacggtgattgcggcggcgctggtgacaggcatcaagtccgatcttccgggcgacgtgatcgccacggtgacggagccggtctacgacacggccacgggcaagttcctgctgatcccgcagggctcacgcatcctcgggcgctacaacagccaggtcagctttggacagagccgggtgcagatggtgtggaaccggatcatcctgcccgatacgtcctcactgacgctggacaacctcgtgggcaccgatccggcgggctatgccggcgtggaagacgagatcaaccggcactggggccgcattgtggctggggcggcgctgacgacgttgctgggcatcggggccgagctggccgcgccggagaaccggcaggatggcaaccgcatcgtcatcgccgggcgcgatggcctgcaggacagcgtgaaccaggtgggccaggagatgacccggcgcaacatgaacatccagccgacgctgacggcgcggccggggttgccggtgcgtgtcatcgtcaaccgtgacctccagcttcgtccttaccagcccttgttctatcagcgcggaggtgcccgatga

SEQ ID NO: 511283 - DNA, 366 bp, Stenotrophomonas maltophilia
atgcacgttcgcatggaacacgtcgctgaacacgaggagccgcaggcgcacgcaccgtatcccggcacggatggctatgacaacctgccccagtttcctgcaaagtttcctttgcctttccgccgcaccatccgccgtcacgagttgcaccagatcgtgcctctggcagagacgacgatctacgaaatggaacagcgcggcgaattcccacgccgcttccgcctcaccgcccgctgcgtcgtctgggacctggaagagatcgaggcctggatcgaaggccgcaagcaagcctctcgatcagcgaagaccggcacgtcgagcggaccggacgtgaggctgcgccggcaccgccctgttcgaggatga

SEQ ID NO: 511284 - DNA, 243 bp, Stenotrophomonas maltophilia
atggttcacgatttcacgctggtctatgcactggactcgggcatggggtcgcaggaggatgtccttcgccggctggcggacagcgactgcgccgatgccacggtcggctgggggcggccgggtcatgtcggcctggctttcagcagggaggcgagtgaccgcgatgctgcggtcacacttgccacggcgcagatggcacaggcgctgccgggagcggtactggtccgggtggatgccgcgtag

SEQ ID NO: 511285 - DNA, 948 bp, Stenotrophomonas maltophilia
atgagcacctggcttgaccactgggaccgacggtacacggaccgcgtacggctgctggtcgagatcctgccggtgatggcctcggagccgaactttgcgctcaagggcggcaccgccatcaacctgttcgagcacgatctgccgcgcctatcggtggacatcgatctggcctggttgccggtgcacgactatgccgaagatgcgaagctgatcgctgaagcgcttgggcggttggccgatgcgttgcgcgcccggcctctgaaattgcaggtgcagacctcggcgggtgagggcggggcggtcaatcgcttggtggccagtcgcggccgtgcgcgcgtgcagatcgaaacgacgccggtcatgcgtggcacggtgcatccggtgcgaaccatggtcgtgcggccacgggtggaggaggccttcggctttgccgaggtgcaggtgctggcgttcgccgacctctatgccggcaagctggcggctgcgctgtcgcggcagcacccgcgtgatctcttcgacgtgggcctgctgctggaggatgaacgcgcggatgcgggtctctggcgaacctttctcgtgtacctgacgtgcagtcccaagccggcctgggagatgctggcgccacgtgtgcccacggatttcgaggctaccttcgaggcccatttcaagggcatgacatccgagcctatcagcgtggctgccttgctggaaagccgcgagcgcctgttggcgcgcgtagcgcattggctggatgggccgtcgcgagcctttctgcaatccgtcgaggatgagaagccggatttcaatctgatcggacttgcccatgcggccgagttgccgggtgtgcgacgcaagcttcacaacctggcgcagcgcacggccgccaagcgtgcggcagatcgccagcagcttgacgaaacgctggcgcggatcgctggtgccagatga

SEQ ID NO: 511286 - DNA, 789 bp, Stenotrophomonas maltophilia
ttgctggccgaactgggcgatacgcgcctggtgtccagtcgctggctgcgcgcgcacggctactccaacagcctcgttgcgcgctatgtgggcagtggctggctggtgtcgccggcgcgcggtgtctacatgcgcacgggcgggcgtctgcaatgggagggcgtggtccgcagcctgcagatcggggaggggatgccgctgcatgtcggggggcgcttcgcgctggccctgcaggggcacgagcattacctgcgcctgggcgatgctgggacgatcacgctgtatgggccgcagcggccaccgggctggctgggcaaactgccgctggagcaacgtttcgagttcctgggcaaggggccgttcgatctgccggccgtgcccgtcacggcggaagtctccgagaaggcgttgtcggaagcgggccttgcttggcattcagcggcgcctgggaccgatgcgctggtttgctcgacacccgagcgggccatgctggaactttgcgacagcgtatcggatgcggcaggggtctacgaggccgatgcgctgatgcaggccatgaccacgctgcggccgcagcgcgtcggcctattgctgcggcattgccgcagcatcaaggccaagcgactgttcctggctctggccgagcgccatcggcatgcgtggctgccgcacgtgtccctggagggcgtcgatctgggccgtggcaagcgcgcgttggtgcccggcggacgcctgcatccgacctaccagatcaccttgccgggagacctcgatgagcacctggcttga

SEQ ID NO: 511287 - DNA, 666 bp, Stenotrophomonas maltophilia
atggtgtggcgttcgagctggcgctgcgtttccctggccagcaggcgacgggtgcgagtgggttgttctacaactaccagcgtgaatacgacccggctgtggggcggtattcgcagagtgatccgattgggttgttggggggggggtagttacgtgtacgcgaactccaatgttgcatcgttcctggacccatttgggttgcagtcttcgattgcccgtgccgtccgctcgcccccaggaggctactacgggggcggagacggtcagctccagcagcaaaacccggaccttcccaattacggtcgcaacgaaccgcctgggttatatatctatccagagaaaattgcagaatcgatagtggccaatgcactcattgcgttgtcgaaatccaaggaccttgtcttctctgggttgatgatgaacaagagtgaggatggctcagcttgtccaattccgggccagcgcggcttgccggcgagtggtgagccgaatacatggtcagatcacccgacaggcaagcagtctcgttactatggggacgatggaagtcccaagttcgacgtggacagagggcacgatcatggccaaggaaatccgcatgttcacgaatgggaaagtggggtcagaaaatcgggggttccggtaagtgattggccgaagaggtga

SEQ ID NO: 511288 - DNA, 777 bp, Stenotrophomonas maltophilia
atggtcgatcctcaccatctcgcgcattggtatcccaccgccgcctacctctacgtcttgtggctggatgcgctcgcgctggcctgggagtacctgcgccgccatcccgactaccggctcgactggctgcgccagcatcgccggccacaagccgcgcagcaggctgcgcatcgctggggcttgcgcctgctggaagacccggccctggatgcgcgcgacgcgcatccagcctggctgcctggccatgccggcgtggtgcagctctatccggatgccgatccaccaccggacgccaccgcctttgcgttctggcgcatccctggccgcaagcaattgctccatgacggcaaggggctggcgctgatcgcgcgcagccccggccattgcctgcgcttcgcgctggcttctggcctggaagacggcatggccgtggcctatgcacatcgcggcggcgctgccgcgcctgcgcgcggtcatgcgcctggcgcagccctggccgatgccaagcccaggccaacgcctgccgcgctgctggaactgcataccttgcaggcgctcgacgcgaccctggcgggcgcgtccttgcgccaggtggccgaaggactgttcggtgcagatgccgtggccgctgactggcacgccgatggcgacctgcgcgcccgcgtgcggcgtctggcacggcgcggcgatgcgttgatgcgcggcggctaccgccgattagcacagcttccgccgcttgagaagggacgttttgaaggggacgcaaaacgtccctga

SEQ ID NO: 511289 - DNA, 351 bp, Stenotrophomonas maltophilia
atgaacgctccccttgtcaccgatgaacagcgcgccgcgctgctggcgaacgggcggcttgccgccgccggtgaatcgcacgacccgttgccggtcgtgcggctgttcacgcccgacgcgcacgccacctggctgctgacctcgctcgatcccactgacggcgatacggcctacggcctgatcgacctgggaatcagcatgcccgagctgggccgcgtgaagctgtccgacctcgcgtccatcgtcgggccgaacaagctgcctgtgatgcgggatcggtatttccaggcggtgcgcccgttgtcggaatatctgcggctggcgcaagagaacggttccatcgtcgattga

SEQ ID NO: 511290 - DNA, 315 bp, Stenotrophomonas maltophilia
atggcaaacatcggcaccttcaccgcggacaaagacggcttcaccggcacgcttcgcaccctgacgctcaatgtcaaggtcaagctggtgcccaacgacaagggggacaacgaacacgctcccgattaccgcgtgcaggcggcgggcttcgacatcggcgcggcgtggaagaaagtcagcaaggccgagcggccctacgtgtccgtgaccctcgacgatccttcgttcccggcaacggtttacgcccgcctcatcgagggcgaggacggcacgcacgacctgatctggtcgcgcagcaagccccaggcggcctga

SEQ ID NO: 511291 - DNA, 1434 bp, Stenotrophomonas maltophilia
atggttccccttccagaccccacagtaacaagtaaatttttgggcatatggcggcgcgcgttggcgttgccgaccctaagcgacctccatgctgaattagttgcaagctgggcgcaacaagcaggattcaccgtactggatgtcatcgaacgtgatgtcggaatatttcaacacacgcgagcaatagttctatcaaccaacctgggtacagcttgcttccccaaatctctacccgcggagtcctcccaatggcaggcgaatcgagctattgccgatcatcacgccagcctctggcaaaagatggagtggttctcccctctttggattacccgaggcgctgccaataaattgctaatggatgttgagcaccgctccaaagacgaggcaataagcctatttaactaccatacttccaccctatatactctgccatttcaagccgtctgcatcgcccaactgatacccagtgcccgcagcctttctgactttgcacctattgcacgagaggcctatttggctttctatgccgggcatagagcctcaagcattgccgccctgattcctgtcatcgaaggcgcattcaggcgaatatccaatgccgcatcaaatctatcggtgccagatcaaattgatcgcattattgatgaggcatgtatgcgtgcagctcatttgcactttgatggaatgtgggtgcctcgcgaatatctcacaacagaatacctatatggccaggacgagcgtgtattcacgtttgagacgttccgaaaatggctaaaggacgcttttttccgcaacacaggagattatgacggcacgacatggttaaaccgtcacctgtttgcacatggtgcctcgacggagtggcagaactctgccaatttttgtcgcttggtcgttgcattagcaacactcggcgttattgaatcttggcatgacagttctgaccgcgtgtcgctccttttccctgagatgagcgacgacagcaaattgctttggcaacaggcgattcttcaagggcaagctcagatggctgtcaagctccttgaggaaaaaatctatcagtcaaatggacgcactgttcctctcatgcctacagacgacggggtgacgctgcggaaggctcgtctgaaagatgaatgcatcaaggatcttgtccgtcccctcagggacgcggggtggggcatcacggttgacgagcccgatgatcaagcactctctattcagatcgtcgcaaccagtggagatagcaagctgcgcgtagcgctcctatacagctgcgcgaccgacaacaagctatatcaggaacttgcacaaaactgcgatgcgattctctatgttggtgctccatatcaccaagatcagtatgcttacggtatcgacgtacatgtagggccagttgctgcttggcagccacccaaggccccaccgccctaa

SEQ ID NO: 511292 - DNA, 210 bp, Stenotrophomonas maltophilia
atgacccgaaccaccatcgaccgcccgcgcatggcggcggtctacgcccccggcacggtacgcgcccgccgctggcacggcgaaggcgacgtgcgcggctaccgcccgcccccgggctgggcggcccgtgccgacctcaccgacattcatcccatcacgggccgcgccttgcagcgcgccgtgtggtggatcatcgagacaaaggaataa

SEQ ID NO: 511293 - DNA, 2043 bp, Stenotrophomonas maltophilia
atgaacgccgttactcaaaccgaagcccgcgctatccaagcccccgcgctggaagccgccgacccgaccaagaacctgattctggttccgctgtcgcggctggtgctgcgccccacgggccgcaacgtgcgcaagaccccgcgcatgtcgattcccgaactggctgcgtccattcagcgcgtgggcctgctgcaaaacctgatcgtgattgcatccgccgatggcgagcattacgaagtcgtcgccggtggccgtcgcctcgctgcgttgaagctgctggcgaagaaacaccgcatcagcaaggaatgggaggtgccctgcctgctggtggccgatggcaccgcccgcaccgccagcctcaccgagaacgtgcagcgcgaagccatgcacccggcagaccagtttgaagccttcgcggcattggtggccgaaggccggcccatcgaggacattgcggcggatttcagcgtcacgccgctggtggtgcaacgccgcctgaaactcgccaatgtctcgccgcgcctgatggccgactatcgcgccgatgccgtgacgctcgatcagttgatggcccttgccatcaccgacaaccatgccgcgcaggaaagcgccttctacgatgcgccgacgtggcagcgcggcccgtccgcgctgcgcgaacgcctgaccgagcgtgaaatcgacgcttaccggtatccgctggcgcgcttcgtcgggctggacacctacgaggccgcaggcggtggcgtgcgccgtgacctgttcgcggaaggtgacgcgggcgtgtatctgaccgatgccgcgctgctggaacggctggcgcaagacaagctggcaggcatcgccgccacggtccgcgccgagggttgggcatgggtggatgccacgccgggcgtaacccatgccgacctgcacgccttccagcgcgccccgagggaacgccgcgagccgaacaagcgcgaggcgcagcgcatcgagaagctgcaagccaagatgcaggaggtcgccgaagcggtagatgccgcgatggatgccgacgacgaggaaaaggccgacgctttgcaggaggaaggcgaagccctgggcgagcagttgcaggcgctggaggatggcttgcaggggtacggcgcgaacgtgaaggccgcagccggggtcatcgtcaccatcgaccgcaacggcgaggctgtgattcatcgcgggctgctgcgcgaggccgaggccaaggcgctgcgcatgttggagcggctgcgccaaggattcggcagcgaggacgctgagaacgatggcgaaggcgaggaagacgaggcacccaagaccaccgccatgtccgaccggctggcccagcgcctgagcgcccaccgcaccgccgcgctgcaaatcggggtggcctgccgcccgcaggtggcactggccgcgctggtgcatggcatggtgcaaaccgttttgtttgatcgtcgctacgggcatgacctgccgctgggcgtacgcctcacggtgcaagaccggctggaaggcatggccccggatttgctcgaatcacccgccgccgtggccctgcgcgagatgcaggaggcatgggccgaaaggctgccgcaggatgatgctgaattgttccccgcgttgctggcgatgggccaagccgaactgatggcgctgctggctgtgtgcgtggcatccacagtggacgtggtgacgccgcgtgccacgccgcaccagcccggcgcggagttggcgcaggccgtgggcctcgacatggccgcatggtggaagccgaccgccgaaggctacttcaagcatgtttccaaggccgtgattctggaggccgtgggcgcgtttgcaccggaatccgtcacccggctgggcaagctcaagaaggccgacattgccagcgaggccgaacggctggtgaacggaacgggctggatgcccgccatcttcaaggcagaaggcgcagaggctgcacctgaggaaacgcaggcgcagaacgccccggagagtgccgaggcaatggcggatgaatccgccgaggcattggccgcttga

SEQ ID NO: 511294 - DNA, 135 bp, Stenotrophomonas maltophilia
atgagcgcaaccccatccgataacccgaagcagatctgcgaaaacattctcatcgaggggaagcgctacaacatcgagcaccgcatcctgcccagcgagaatgccgttgccatcggctgcttgcacgtggcatag

SEQ ID NO: 511295 - DNA, 417 bp, Stenotrophomonas maltophilia
gtgtgcgatgtgatcgaggcggcagccaagagcaattaccttttcacgtcgtacgtcctggagcgcctcgatgcccttcacgggcagttcgatctgaaatattggccgtcgctgagcgacttcctgcgggagctggcctccgatgctgaggacgcagtcgcggaagccaccgacaccttgaccgaggctgccaccatggcctcgcggccgtcccgggccgacttcatcaaggcgctgctcgccgccatcgacgagaacattgggcgcaactacggccaactgcccaacgacttcaaagtcaccgacagcagtctcgcttccttggcgagctgcgtgctggacctaggcgccgactacctggtcgatggtccgtacgtgaagcggctccgtcagcgtgagcgcgatggagcgaaatag

SEQ ID NO: 511296 - DNA, 1749 bp, Stenotrophomonas maltophilia
gtgtatctggctcagttgatcatctcgaacttcaggaagctgcaaaacgctgaactgagtttccaacctggtttgaatatcctggtcggcgcaaacaacgtgggaaaaaccgcggttgtcgatgcgctgcgcgccttactagcgggccacgacgagccgtacccacgactcgatattgacgatgtccaccacccgaagggcggcaagcccgccggggatatcgttttccagtacatcttccgagggctcgacgaggacgatgagggcgatttcctcgcagcgctgaaacccgacgcggcaggcaagctggaagcgcacatcacgattcgctacaccgaggcggacaagactggccgcttgcgcgccaagcgctggtgcggcgaccatgaggacgtgggccttaccgccgacatgatggagaatttgcgcggggtctatctaccgccgctacgtgatgcctctctgagcctgagaccgagccgcaccagccaactgtccaggctttttcagcttctcgctgacgatgcggggcgtgatggaatcaacgcggcgctgaagacgctcgacgatgagctgaagaagcatcagcccatcgtcaacactcatactgagatcaagacacgccacggcagcatgctcggcccgcaattggctcaggcgctggagatgggcctgagcggaagtgatttccagcgcttggcgtcgcgcttgtcattgctggtggacaccttcgagatcgaacagaacggattgggtttcaacaatctgatcttcatggcagtggtactcagtgagctcgccaagaacccggaagcaagttatcgcggcctgatcgtcgaagagccagaggcgcacctgcatccccagctccaggcgattcttctcagctatttagggacgattaaggccgtcgagggtgaaaatccggttcagcttttcgtgaccagccactcccccaacttcgccagcattgccgatctcaaaagcttgacctgcttggtagatactggtgcgacggtagagaccttctttccgcgaacaattaccttcgaaaagggtaagcgcgaaaagctggaacgctatctggacgttactcgcgcggaactgttcttcgcgcgtcgagtaatttttgtagagggtgcagccgagctgatgctggtgagcgtgctggccgagaaagccggattcaagctacgcgaacatggcgtcagcttgatcagcgtcgaaggtttgaacttcgactcgttcctgccgttgttcggagagaaagcgctgaagattccggtggcggtgatcacggatgccgaccccgtagacgaacccatcgatgacagtgagccgaaggcgttgtatccggcgcttggcgatgtggtcaaagtctccgacaacaccgccaagatgaagggcaaggaagataccttcgtgagcgtctttcatggactgaagacccttgaatatgacctggcactgcatgccgacaatcgcaccgcgatgctgaaggccctcagggaactccatccgaagatcgccgacacagtcgaagcagcggtcaatgtcgccgcagatgatgcagcgaaagcgcgtgccctgttcagcggcatgttcgagcgcaaacagaacaacgtgcagaaggggcgcttcggtcaggcgctggcgcaggtgctatcggacggcgctgcttgcaaggtgcctgactacattcgagatgccatcgtgcatgcttgtcaaacggcgccggcgcatccatga

SEQ ID NO: 511297 - DNA, 1764 bp, Stenotrophomonas maltophilia
atgacggagttgtcgaccgaacagttggccatcatcaatgcgccccttgagccgatgtcagtcgtcgcatgcgcaggcagcgggaagacacgcaccgcagtgcgccggcttgcagaaatccgcaagcgactcggcgatcaccgcggccgagtcgtgttgctgtcattctccaatgtggcggtagacacgttccgccagagctaccaatccttggtacaggaactctccgcaggcgctggtcgcgatagggtggagatcgacacgctggacgggttcatcaccagcaatgtgctacgccctcatggccaccggaccatgggttgtgaccggacgccattccttgttgctggaacagaaccttttcttcggaaccaggatttaaggttctgggtgcagtcgtcggccacggaggtctttcccgtacagcccgtcgacatgcgaaaggtggtggtgaacctccaggccggggctgctctgtttcattatcagcagcacaatgccttgctgccgatcaacaatggcccgacggttgccgctcgcctggcggaggtgggggcgtatacccataacctcgggcgatactggtgctatcgcgcattgttggggcaacccggcctactgcgggcgctggttcgacgctacccacacatactgattgatgaagcacaagacatcggcacgctccatcaagcaatccttgagcagctcatcaaggctggcgcccagatctcgttgatcggagatccgaaccaaggtatctatgaatttgctggcgccaacgggaagttcctgacgcaatacgggcagcgtccgggggtgagtggttatgggttgacacggaactatcggtccgttcctgcgattctggcgctggccaacaagctgtcgatccgtactgacattgcggaccgacacgcgcctgacatccctcacggggcgtacttcattgcttacaaaaacgccgaacgcgaacaagtcatcaccgcgtttcatgcggctgtcgtctcagccagcttagagacggagcgggcagcggtgctctgtcgaggtcgcgacctggccgacaagctggccggaaacgatgcccctgcaggccagggaatagtgaagatctttgcgctggcagccatccttagggacaagcggcaagactacctaggtgcattcaagtcagttgcagcgggcatcgttggcctgcttgtcgatccgccgcaagcgctggtggcgcggattacccagcccgcgcgttacccggagatgaagcccctacgccgcctcatctggagattcacccgtaacccggacactggtttgcctgccgctggattgacggcggatacgcagtggcatccgctgttgctggtgagaacgaaggctctcttggccgttctcgatcaggactttgggctgaaagtggccgacaacctgggaaacaaactggcgaagaaggcgcttcccagtgctccgttgatgactggaggcgatcttgctgccgaaaaggacgtgcgtatccgcgtggacactgtgcaccaagcgaaaggcgaaagcctggacgcggtgctctaccttgcaaccaaggagcatgtctccgcgttgctggctggtgtggactccgaactcggccgtattggctacgtcgctgccacgcgtgcccggaatctcctatggctgggtgtgcccgccaacgcgctcgcggaactacggcccggcttgctcgcatgcggttttcgggaagcagacgttccggtcggcaagccggcttga

SEQ ID NO: 511298 - DNA, 3045 bp, Stenotrophomonas maltophilia
gtggaaataaaactggcgaaaaagtcgggggtacccaaagccgaagtgcttgcccaccagacgattcagaaagaatttagcatttcgccttttagcaagttgtggcgcggctacgcggcgttcgcgttggccaggggcggtcgtggcagtggcgatgatgatctggacctggtgctcatcacacacacgggcattgcgctgatcgagctgaagaactggcacggcaagctgctcgaatcggatggtcagaagtggtacttggacggtgaagaccgcggtcattccccggtccaggtcgtgcgaaggaaggtgccaaagctcgtcagcgtcatgacgcaaaagctgggcaaggatctgacccctttcatcagttcgtatgtcgtgcttcacggccgcattggagagctccgcttgccggaagatgagcaacggtcggtgatagatatgaccgaatttctcactctacggttcgcctcaagctaccggcagtacatgggggggcgccactttttcaatccgctcgaccatgtagccaaatacgactccttctttctcggctcggcgtttcgccccaaggtctactacatcgaaggctttcggtccgaagaaaatccaatcttcgagcatccaagcaagctttatgttgagtaccgcgcggccgctaaggacgatccgaccgcactggcgttgctgcgccaatgggattttgaaaagcttgggctcaagttgatcggggagaccgatcgggcattcatagggttgcgcgaacagaaggtattccagtacgttgcggaccgtaacgaagaactttcgctgggcctgcttcgcccgatcgcctggaagggccccaaggacgtcacgatcgaccatgctgagttgttctcgttgcccggacgagtgacgcggatggcagagtttgtgcacagcacgctgcccaaattggagactcaagaccgtctgctgttggccaaggccgtgatctcacgatttgccgaactgcacgacatccgcgttgcgcaccgcgacatcggtgaacacagcctatggttggatcgaccttcacgagtgatcatgtcgggcttcccggcagcctactacccggaccccgatctcaagacagtgggcacgtttcgcgaacgtgtacaggtccaacaggtgcgcctgcctgaggatgcagggcccaacgctcaagcgacaccataccgacgggacgtattcatgctcggcgccgtcgcgcacatgatcctactgggcgtccatcctcccaaggccgacggtatctatcagtggcaggtgccagccaacgatccgtttagcggttgtctcaatgacttcttcgcgcttgcgctgaacgtagatccggccgctcggttcaagaatgcacgcgtgatgctggaggccttcaacgccgcgacggaaactgattatcacagcctcatcgatctggctgctttcgatgctttcaaagcgcagaccaaggaacgtgattacgacgaggcggaagccttgtcggaagatgaagatcattcattctttgtcagcggtgccggcgctgaagccaaagttgtgaaggtctggtacggcgtcgaacctgacctgcgtcggcccgatctgtcgctgcgtctcttgtcttttctcggccgggccaggacgctcaagggctgcgagttgcgtggcgtcccgcgcatcctggactttggtctgagccggcgcagcctgatgctggtgatgggctgggccgaagggtcgacattgccggtctggttgcaatcgaatccaggaaccgccgagcggcttgcagtcgccacctcgttgattgcgacgctgcagcgcttgcatgccattgaccttgcgcacggcgacgtacatccgggcaacgtcgtggtgacgtcatcaggcgagcctttgctcatcgacctgctggacttccgccgcgacgctgcggacgtctacatgaccgcctacttgcccgagaactacaagtccttgacgcccttcgaacgtgatcgctacagcgcagcagcggtactagtcgacgtgttgcaaacgcagcgcgaggcacctatgcagggcgagttgccgtatccgcgggtctatgaagaacttgcgcatctactgtcgtccgaaaccctttcaacactgctcccgctggaacgtgcgctgatggccgcggttaagccggaagacgatcctctccagagcttcgcggtcacgatcaagaacttggcctatgaaggcgtccccgctggcgagcttcgtagcgacaacggggtattccatgttgatgtgaggcctgatcggcaatcctcgcaggcattgaggatctgggtgaccgggatcggccgccaagtttcgtttgtctggaatctggcccaggaacgagcagagaacgtgcgcgcatccagcatcgcgcagagccaactcttgcgctcgcagatgatgcgcgatgctggcattcgaatgcaactggtgttgcgcgatgggccggtcgcagatgttgatgatctcgctcgatacctgatcggccataagctccttgcgcgcaagcttgctgccccgagccttgcaccggacggaaagcgggagacacatgcgtcggagaaattcagctctggagaggagatatcaaaccaagacgaggctagcggcgatccgacgcaaaggatgccggcacgcgagttgtggaaggcattgatcgacatagaagaggaagccttcaccacggtgacgattgctggccctcaccgaaaaagtccatttcggtcgtcccaagtcttgattcccttccacatcgatggcaacgctttcgaatttgatgctgcggacaaggtggacatcgagagcttgctgcacgacgggacttggcgcgtttgtggggaactcgatatgcggcaggcgctgggacgcagtggccgccgacggcccggtcagctcgctcaggctgcctcccgcacggggggcgatgtgcgccagcatgagcgagaatgcgtagggtcaccggcaacaggaatctcctggcatggacgagcacaacgccacccctga

SEQ ID NO: 511299 - DNA, 279 bp, Stenotrophomonas maltophilia; identical to SEQ ID NO: 332577

SEQ ID NO: 511300 - DNA, 519 bp, Stenotrophomonas maltophilia; identical to SEQ ID NO: 291769

SEQ ID NO: 511301 - DNA, 564 bp, Stenotrophomonas maltophilia; identical to SEQ ID NO: 291774

SEQ ID NO: 511302 - DNA, 576 bp, Stenotrophomonas maltophilia; identical to SEQ ID NO: 444876

SEQ ID NO: 511303 - DNA, 405 bp, Stenotrophomonas maltophilia
atggcttcgcccgcgcccactgccacgttgtgccggctcgctcgccaggggtggccgctggccgtggccgtgctgctgacgctgctgctgggctggtcggcgctgcacgaaggacgcggcagcgacccgactgcccaagggtggcaggcacatgccgaaggcttgcgccaggtcatgccattgccggcgccgtcggcggacgagtgcccgcaacatgctgcacctgcaccggagccgccgcttgagggtgagggcaacacgccctgcgccggactggcacgcctgcgcgcgcccctggtcgcacagatcccgctatggcgctccgacgccctgcgccggcaactgcacgatcccgcactgcgattgaaccccggccacgcaccgcccgcaccgcacgccagctga

SEQ ID NO: 511304 - DNA, 564 bp, Stenotrophomonas maltophilia
atgaaacgctcactcgcgattgccctgttggcaggcgccctggcggcgggcggcgccagcgcggctccgcgcaccgtgaccgacccggaagctccccgcgcattgcaggccgatggcccggtcagcgtgaagtgggacgatccggccaagttcaccgagatccggcagagtaccaaccgcttcgaagccgagcgtggcgactgggtgcagcagctggcacgctacctgcagaccgctgccgccaaaccgctgcaaccgggacagacgcttgatgtgaccctggtcgacatcaagcgcgccggtgactacgagccgtggcacggcccgcgcggccgcgacatccggatcatgcgcgacatctacccaccgcggatcagcctgcagtacacgctgaaggacgccagcggccgcatcgtcagcgagggcgacgcgcgcctgagcgataccggctacctgcacaacatcggcctgaagagcgacagcgatccactgcgctacgagaagcgcctgatcgacgactgggtgaagcggcagctgacaacgcaggctaccgccgcacggtag

SEQ ID NO: 511305 - DNA, 1308 bp, Stenotrophomonas maltophilia
gtgttgctggttggctcgcccggcacgggcaagaccctgctggccaaggccgcggcgggcgaggccggggtaccgttcttttccatctcaggctcggagttcgtcgagatgttcgtcggcgtgggtgcagcgcgcgtgcgcgacctgttcgagcaggcccgcgggcaggcgccggccatcatcttcatcgacgagctcgatgcgctgggccgcgcgcgcggtgtcggcggccccatcggcggccacgacgagcgcgagcagaccctcaaccagctgctcacggagatggacggcttcgacagctcggtcgggctgatcatcctcgccgccaccaaccgccccgaaatcctcgaccaggcgctgctgcgcgccggtcgcttcgaccgtcaggtgctggtggaccggcccgacaagaagggacggctggacatcctgaaagtccacgtcaagaaggtgacgctggctcaggatatcgatctcgaacaggtggctgcgctgaccacgggcttttcgggtgcagacctcgcgaacctggtcaacgaggccgcgctggccgcgacccggcgcaaagcgtccgccgtggagttgcaggatttcaccgccgccatcgagcgcatcgtggcgggcctggagaagaaaaaccgagtgctcaatcccaaggagcgggaaaccgtggcctatcacgagatggggcatgcgctggtggcgctggcgctgcccggcaccgatccggtacacaagatttcaatcgttccgcgtggcatcggtgcactcggctacaccctgcagcggcccaccgaagaccgatttctgatgacacgtgccgacctggagcacaagatcgccgtgctcctgggagggcgcgcggctgagaagctcgtgtttggcgagctgtccacaggggcttcagacgatctcgcgcgggccaccgacatcgcccgcgacatgattacgcgcttcggcatggatgagggcttggggtacgttgcttttgaggcacagaggccgcgttttcttgatgcgcctgaactggtacagggtggctgccgggtagccgaatcgactcagacacgcatcgaccaagccatccgtgacatcgtgatgggtgtgtttgatcgtgcataccgaattctcgaaattaaccgagaagtgctggagcggtgcgcgcgcgaactgctcgcacgggaaacgctggatgaatacagcatccggcaactgacgcaagggctacagctcgaatccccatgtcacagcggcccaactgccggagccattacttcctctgtgtcccaaggagccacctcatga

SEQ ID NO: 511306 - DNA, 441 bp, Stenotrophomonas maltophilia
atgagtgacagcattcatatcgtctgcccacactgccaatccatcaatcgcgtgccagccaacaagttggcagagaagcccaattgcgggcggtgccagcacccgctgttcaccggagaacccattgatctgaccacagcgaccttcgcccgtcatctggagcgcagtgacctgccgctgctggttgacttttgggcgccgtggtgcggaccgtgcaagatgatggcgccgcagttcgagcaggcagcctccctgcttgaacccaaggtgaggttggccaaggtaaataccgaggccgagcctcacctggccgcccagttcggtattcgcagcattccaaccctgattttgttccgagggggacatgaggttgcacgtcaggcgggcgccacgggcgcgcaggacattatgcgctgggtggcttcgcaattgccccgatga

SEQ ID NO: 511307 - DNA, 1716 bp, Stenotrophomonas maltophilia
atgcgtggtgtactggctgttgccgtttcccttgccctgttcgccggccaggccgtggccacgccgcgcccggactacgtcggcaccaccgaaccgttcgccagcgatgcggtgtacttcgtggtcactgaccgcttcgtcaacggtgatccatccaacgatcatcgcggccagggtggcgcgcaccgcaccttcgacatcccggtgccatgcccggacaaggtggacggcaacatcggctacctcggcggcgacttccgtggcgtgctcgacaatgcgcagtacatccgcaacctggggttcggcgcggtgtggatcacgccgatcatcgacaaccccgaccaagctttcaccggcagcaagccgatcagctgcaccagcacgctgaccgaccgcggcaagaccggctaccacggctactggggcatcaacttctacagactcgatgagcacctgcccagcagggacctggacttcgccggactgaccaagggcctgcacggtgccggcctgaaggtggtgctggacatcgtcggcaaccacggttcgccggcctggaccatgccgacacggcaaccgcagttcggtcagatcttcgacaaggatggaaagttgatcgccgaccaccagaaccttccgccgcagaagctggacccgaagcacaacccgctgcacgcgttctacaacaacatcggtccggtcgacagcaaggacggctcgatcttcgacggcaacctggccgagctgtccgacttcaaccaggacaatccggcggtgatggattacctggtcggcgcttacctgcagtggaccgcgcagggcgtggacgcattgcgcatcgacaccatcggctggctgccgcacccgtggtggcatgaattcgtcaagcgcatccgcgccgagcacccgggcatgttcatgttcggcgaagccttcgactacaacgcggcgaccattgccgagcacacctggccggccaacgccaatgtcagcgtgctcgacttcccgttgcgcggtgctctggagcagaccttcggcactgccggcaagggcttcgagaccctggccgagccgctgcacctgagcggcggcccgtatgccaatccgtacgagctgatgagcttctacgacaaccacgacatgccgcgcctgcaggccagcgacaacggcttcatcgacgcgcacaactggctgttcaccgcacgcggcattccggtggtctattacggctcggagaccggcttcatgcgtggccgcgccgagcacgcaggcaaccgtgcctacttcggccagccgcgtgtggacgctgcgccgcagagcccgatcttcgcgccgctgcagcgtatcgccaaactgcgtgaagcgaccccggcactgcagcgtggcttgcaggtgaacgagcggctgcagggcgatgaggccgtgttcttccgcgtgctgcagcacggtgacgtgacgcagacggcgctggtgctgctgaacaagggcgatgtggcgcgcaccttcgaggtggatcgctacctgcaggccggcacgtggcgtgacgcgctggatggcggcacggtgaaggtcgagcggcagctgaagaccgacgtgccggcgcatggggtgaaggtttacgtgctggatgcgcccgtgcagcagccggcactgcaggccgaactggacaaggcgatggccgaccagaaagcgcgggacgtgcgtctggggcgttga

SEQ ID NO: 511308 - DNA, 669 bp, Stenotrophomonas maltophilia
gtggccgccgcgatcttctacaaggacctgaagagctacgtctacacccaatcggtcgacaactacgacttcaccgcgctgctgggcagctacgtgccgccgccgggcatgacggcaccggtgctgaccaccggcaccttctccgccccgcagaacggcaagggcggcacgctgaagggcctggaactgaccgcatcgttcccgctggagatgctgaccgacagcctgcgtggcttcggcgtgcaggccagcgcgaccttcaacaagagcgacatcaccatcctggacccggagagcgcctccagcgtgggcagtgatccgatcagcctgccgggcctgtccaagcgcgtgtacaacttcaccgcgtattacgagcgcagcggctttgaagcacgcgtcagccagcgccggcgttcggacttcatcggcgagatcggcaacttcaacggcaaccgcagcctgcgctacgtggtcggcgagaacgtgaccgacgcgcagatcagctacaccttcagcgacagcagtgccctgcgtggcctgaccctgcttctgcagggcagcaacctgaccaacgagccgtaccgcacctacgccggcagcaaggaccgcccgctggagtacatcgagtggggccgcacctacatgctgggcgtgaactacaagttctga

SEQ ID NO: 511309 - DNA, 573 bp, Stenotrophomonas maltophilia
atgaagaactacaacagtcgaaagcgggttctggtaaccggaggagcaggctttctgggctcccacctgattgagcgcctgctggatcgcggcaatgaagtaatctgtgccgacaacctgttcaccggcagcaagcggaacatcgagcacctactgcagaacccgcattttgaattcatgcggcacgatgtgacgttccccatctacgtcgaagtcgacgagatctggaacctggcctgcccggcttccccgatccattacagccacgatccagtgcagaccaccaagacatcggtgcatggagcaatcaacctgcttggcctagccaaacgactcgactgccggatcttccaggcatcgaccagcgaagtttatggcgatcccaatatccatccgcagcgcgaggaatactgggggaacgtcaatccgatcggccctcgctcgtgctatgacgagggtaaacgctgcgcggaaaccctgttcttcgattaccaccgtcagcacggtctggacatcaaggttgcacgcatcttcaacacgtacggcccgcgcatgcaccccaatgtgaagtga

SEQ ID NO: 511310 - DNA, 1359 bp, Stenotrophomonas maltophilia
atgaaagtagctatttttggtgcgggctatgtcggcttggtaacggccgcttgtttggccgaggtgggccatgacgtgatctgcgtcgataccgatgcgcgcaaggtcgagcggctggagcaagggatcataccaatctacgagcctggcctagattcgctgattacagccaacgtcgccggaggtcgcctgtccttcacgacgaacgcggaagctgcagtgacacatggcaacatcatcttcatcgccgtgggaacacctccaggcgaagacgggagtgccgatctcacgcatgtcctggccgttgcgggaaccattggccgccacctggaccatgatgcagtcatcgtggacaaatcaaccgttcctgtgggcaccgcccgcaaggtggagcagcagatcgcgcaagagctttccgggaacggaagggatatcgccttccacgtggtatccaaccctgagtttctgaaggaaggcgatgcgatccgcgacttcatgcgccccgaccgaatcatcgtcggcactgcagtgacggcggcagctgaccagatgcgcgagctctatcttccgttcaatcgcaaccacgaccgtctgatcgtgatggacgtagcgtcggcggaactgaccaagtatgcggcaaacgccatgcttgccaccaagatcagtttcatgaatgaaatctccaacatcgccgaacgtgttggcgctgacatcgaacaggttcgcaagggaatcggctctgacagccggattggctactccttcatctatcccggtgccggctatggtggatcgtgcttcccgaaggatgtgcaggccttggccaggacatcggattcggtcggctaccaggccgacctgctcaacgcagtggaagcggtgaactaccgccagaagcagaaactttcgcagctgattgcccaccactatgccggcgacatcaatggcaaaatatttgcagtgtggggcttgtccttcaagccgaacacggacgacatgcgcgaggcaccggcgctcgttctcattgcagacctcattgcccgtggtgcgaaggtgcgatgctacgacccccaggccatgaccgaggcaagccacctgctctcctcctttggcgatgatgtttctttcgccagttctgcggaccaggcactgatcaccgcagatgcgctggtgatcgtgacggagtggaaacagttcctgctttcaagcttcgaaccattgctgcagctgcatgaccgcgtcatcttcgacggccgcaacatgtatgaccctgccaaagtggaatccaccggaatcgcgtactacggcattggccgtggccgctccattacctgcgacagcaccgggaacgtaaaatga

SEQ ID NO: 511311 - DNA, 426 bp, Stenotrophomonas maltophilia
atgggtgggggtgatgccgatctggaccatggcccggtcgaagcgctcatcgcggctggctacggcggcctgcgactggatgccgtacttggtggcatcgacgaagttctgcacgtcgccgcgcgtcggcggattgccggcctggacggtgccgccctgcagcttttccgcattgccggccagatagctgatgaactgcgggcccatgctgccgaactggttgtcatagtccgccatggccagctgcaactccgggttggcggcgatggcatcggccgcggccggattggttgcacgcaccttggcgatggcctgatcgacacgctcgatggcgctgtccagcttggcgttggtgagctcgtccatcttggcctgcggaatggcctgcaacttggcgtcgagcgccgccagctgctgggtgcttaa

SEQ ID NO: 511312 - DNA, 189 bp, Stenotrophomonas maltophilia
atgaagcacgcccgtgcctgcctcgccattgccgctgccttgaccctggccgccccgttcaccgccagtgcgcaggaaaacgaatcgccgtacagctggaacgtcaccgccgtttccgattacctgttccgtggtgtctcgcagaccgacgaaaagccgaccctgcaggccggtttcacctacacctag

SEQ ID NO: 511313 - DNA, 1848 bp, Stenotrophomonas maltophilia
atgtcgatcaacagctacttcaacccgttcggccgccagcacggttacgccaacccgaccgccgtggcctggaaccgccgcacctgggaagtgccgcgcgtgaccaccagcgagctgaagacctaccgcgcggtggcgtcgttcgacggttcgttcgagatcggcagccgctacttcgactgggaagtgggctaccagtacaaccgcaatgaactggaatcggtggccaccggcaacctgcacaagggtcgcgtcgccggcggcgtcggcccgtcgttctacaacgccgctaccggcaaggtgcagtgcggtaccgccgctgcaccgatctcctatgacgtgtgcaagccgtggaacccgttggttccgtatggcacgacggctgccgatggcctgtacggcaacgaagagctgcaggcgtggctgttcccggaagagatcaccaagggccgcaccacctccaagaacttctttgccaacatcgctggcagcatcgtgaccctgccggctggcgatctcggcttcgccttcggcgtggaaagccgcaaggaagaaggcaagtacaccccggatgccctggcccagaccggcgctaccaccaacctggccgcaggcccgaccggcggtgactacaccgtcaacgaggcctacctggaagtgaacgttccggtgctggccgacctgccgggcgcgaaggaactgaccttcaatggcgcaacccgcttctcggactacaacaccttcggcaacacgctcaacagcaagttcggcttcaagtggaagccgatcgactcgctgatggtgcgtggcacctgggccgagggcttccgtgcaccgaccatcagcgacctgttcggtggtggctcggagaccttcgcgcagttcagcgatccgtgcgacacccgtttcggttcctcggcctccagcgccgaagtccgtgcacgttgcgcacgcgacatcgccaatgcgaataccttccgccagctgcgccagggcggcaccccggtgaacacgtcgacggacgcgacgccggtgccgttcacctccgggtccaacccgctgctgacgccggaaacctcgaccagcaagaccctgggcctggtctggagcccgagcttcatccagggcttcaacgcctcgctggactggtggaagatccgcatcgacaacacgatcatcgccgacacgccgacccagatcctgcaggactgctacgagtcgggcatcgaagcgcgctgctcgcgcttccagcgtgacccggtgaccggcatcgtgaccaacctgaagttcggcaaccgcaacgcgggcttcatggaaaccgaaggctacgacctggacgtgagctaccgtctggacacccggttcggcaagttcaacgtgaactcggccaccacctacgtgtccagtgcgacctaccgcacctccaacgacaactcgatcgttccgatcgtcaccaacggcatcggcagcgccttccgcgtccgttccaacctggtgctgggctacgagcggggcaacttcggcgcgagctggaccgcgcgttactactcgggcgtgaaggaaacctgctcgaacatcgcgctgtacccggacgaatgctcggatccgggtgtgtatgcaccgtggtacaagggcgcccgcaactacaacgagcgtggtgcggtcaccttccacgacgtgcaggtgcgttactcgctgccgtgggatgccaccgtgtcggtcggtgccaacaacgtgttcgaaaagaccggcccgatcatgtacagcaagccgaactcggccttctcgtactacggtggctacgacatcggccgcttcgtctacatgaagtaccagcagcgcttctga

SEQ ID NO: 511314 - DNA, 375 bp, Stenotrophomonas maltophilia
gtgcaggcccttcgcggcgaagacatcacgatctatggcgaaggcaagcagacacgttcgttctgctatgtggatgacctgatcgaaggcttcctgcgactgatggacagcgagaagggcttcaccgggccctgcaaccttggcaatccgggcgagttcaccatccgggagcttgccgagaaggtgatcgcgctgaccaactccggttccaaacttgtgttcaagccgttgccggttgacgaccccatgcagcgccaaccggacatcacactggccaagaagaaactggacaactgggaaccccaggtccagctggaagagggccttcgccggacgattgcctacttcgacaatctgctcagcgagagcaactga

SEQ ID NO: 511315 - DNA, 597 bp, Stenotrophomonas maltophilia
atgaacaggtttctcaaggcggctggtctgaccgccgtatacgttgttgtgctgcttgccgtctacgtgatccacatgcgtaatttcgctgtcgacgtcgtgttctacgcggcgatcggggatgcgttcattgcgctcgtcatcaccggacttctgctgctgctgccttgtttcagagccctgtcggggctcgagaagtctcttctctgcatcatctggctgcttgggggctattcgtttgcaatctcggttcccacggtgattgaccggtccctttcgttctacatcctggagaagctggagcagcgtggtggtgggattcgccagagtgctttccaggacgtcttcacaaaggagtacatggttgaacatcgtctcgtcgatgtgcgcctgaccgagcaggagagctccggcaccgtggagatcgtcaatggctgcgtccgcctgacgaaaaagggtgaacgcatcgccgcgctgagcaggttctatcgcaagaacctgctgcccaagcgcaggctcctgcttggcgtgtattccgatgacctcaccgacccgttccgacacagccttcagaacgtggactatcgctgcaggtga

SEQ ID NO: 511316 - DNA, 393 bp, Stenotrophomonas maltophilia
gtgctgcgcgcccctgatcttcgccagttcgcccgcttcgtactgaacgggttggctgcgactgcggttcacttcggcacgctgaccttcctggttgagattgtgcacgttggatccaaggggctggcaaattccatagctgcaatctttggaatcctcgcctcatttgtgggtaatcgttttttcgtattcgcgacaaggaagggcagcgtgcgcaaggagctggtcaggttttcggtgttgtacgcggcgttggcgcttctgagtggtgcgctcatggcgctgtgggctgacgtatttgctctcgattaccggattggcttcgttgccatcagcggtattcaacttttcctctctttcctgggtaatcgcatgttggtattcaaggtatga

SEQ ID NO: 511317 - DNA, 960 bp, Stenotrophomonas maltophilia
atgcagcctgagttcgagttcgtagtcgttacacccgtctacgaggatcgcgccgcgtcaggtcgcctcttcagcgagctggcttcctgctacggcagtagcgtctatgtggtggctgtagatgacggctcattgcgcgagcctgtgcttgccgagcaccttgaggcggcagggatcaatggcgtggtgctgacattgcgtcggaatgtggggcatcagaaggccattgccattgggctcagttatgtggaaagcgcattgccggatgcgcagcgtgtggtggtgatggattcggacggcgaggatctgccagctaccattgccgaactgctacgcgcacttgatgccgaaagcgtggatgtcgcggtggcgcagcgcaagagccgggtcgaaactcttcgattcaaagccttctatattgtctacaagttcattttccagttgctgaccggccgatccatcagctttggaaacttcatggcgttgaagcgtccggccctttgccgggccaatgcgatgcatgaggtttggactcatgtcgctggcggcatcattgccagcaagctgcgcttggccgtatgcccgatcgaccgtgggccgcgttatgcgggccaaagcaaaatgaactttgtcggcctgacgctgcacggcttccgtgcgctcatggtgtttgcagaggatgtgctggtcagagttggtctgatgtgtgtagtggtttcctcggtatccatcgtgttcgccgtcgtggcgacgctcctgaagcttgcgggctacgctacgcctggttggttctcaatggcgctgggcgttctgttcctcgtattcctgcagacgggaacgctcacgctcatgacgctgatgctcagcggcattgtccgtggtggaatccagaagcggggggcgttcatcgactacgtcaacttctccagtgaggcgcgtggcagtgctgcgcgcccctga

SEQ ID NO: 511318 - DNA, 1086 bp, Stenotrophomonas maltophilia
atgttgctcacggtgctcctgctggcgtgtgcgggcatattcgtggccgtagcgtcgtcgcagctgttgtgccggcagaacgtgctggcagtcatttttgttctcgcactgtgcattgttgcgctggccactccatcgccggcatgggatgcgcgttcaatatggttgttccacggaaagcggatcttctacgacgcttcgctttacgcacagttggacaactatgcggcctggagccacaacgattatccatcattggttccagcactgatggcgtcaatcgcgcatgtgatcggtcattggaatgacgtctttcccaaagtcgttgttccattggcgatgcttccccctttgctggtcattctgcccagaattccccgactggaatggcgcatggtgtttctgacggtcctcgtcgctcttggtgggaatcatcttgtcgacggctacgttgacgctctgctttccttggcattcgttgcggtgttccttctggtcaatgagatcacggccaccgacgaacctgatttcgggcagtacgtgcagctgaccgtcatggcagcgctgttggcactggtgaagaatgaggggggcgcgctgcttctgtgtgcagcgttggcggggcttgccggcacgctgctccgcggacgcagaatgaagctggcgctggtggtctcccttgctgtggcgatcctgcctttgctggcctggaagctgagcgtcgcccatgctggcctgtccaatgatctcgccggttccgacctgatgggccagctcactggcaggctcgccgacgtcaggtcttactggctgctgatcgattcgttgctgttcagcctgccgacgctgctgttgctgccgcccctgttgctgatcgcctttgtcgctcgcaggaacagcatttcgctctacgtgctgcctgcgtgtgcgagttatgtcgcagttctcgttgtggtctacatgagtactccaaacgatcttccgtggcatcttgccaccagcgcggaccgcactatgctccctgtatggcttctggcgacctgctctctgctcgtcgacctggctgccacgcgtgagcgggtgtag

SEQ ID NO: 511319 - DNA, 1875 bp, Stenotrophomonas maltophilia
atggatatctacgacaacgctttctcagaaagtaatccgtacgggcacgtggtccagttggtggctcgttttgaacctcgtcccggtgattacgtcgtcgacatcggttgcggttacggacggatcgcggagatccttcgcgaccggttcggcgtcgagtatcttgggttggacgcggatcttgaatcccttgaatcgctgcgctcgcggggcttcaatgcggtgcagttcattgcaggccagcaggatctggcggcgcagatcctgggtgcgctgcctgcaggcgcgagggtcgtggcgatcacggcgctggatttcatcgagcacatcaaccagccaggacaattcctgtccgatctggcggagattgctgcaccttggaatgcgccattgatcctttcggttccaaatgtctcccatcgagatgttggtgccaagctcgccctcggtcgcttcgactggacaaatgcgggcctgctggatcgcacgcatatccgttttttcaccaacgacgtgctgtcaagactgacgcgcgatcatggatggcacgaggcctatcagcatgacttcagtctgaggaaaagtgatcaacactttcccggcacattgccgggcctatctgctgacacgcccttggggcagtttcttgcccagttgagagaaggcgctgatcagtacgcctatgtgaatcagttcatccgtgcatacctgcctggacctgcacgtaaggcaggcgcggatttcaatggcgtaacccagaatacagcgaacccctttctcagcgttgtaatccgtaccacggggaccaggatcggtacgcttcgcgagggcctgctctgcctgtctgcgcagagtgatcaggattttgaagtcctgatcgttgggcacaatctggagatccctgctcagattgaggtcgagcgtctcatcgagcatctgcacccggctttccgcagtcgggtccgtctcgtgcgtgtcgacggcggtggacgctcggtgccactcaatacgggcttccgcgctgcaagcggagactatgtcgtcgcgtttgacgacgacgatctgctgtttggtggctgggtggagaccttcaggaaactggcgaaaagagcacctggcgcacttctgcggcagtgcaccgttgcacaggactgggaccgggtcgaggttgcgggcggtgatgctgcttccagatcaatgagcagcatgaagtccatctatcccgccaacttcgacctgctggcgcacatcgtggagaaccggacgccacttcactccatcgcattcccgaggacactgttcagccatctcggtttccagttcgatcccggccacagcactgctgaggactgggacctgatcatccgcactgcgccattgtgtggtgtgagcacctccaccgatgtcggctgtatctaccggcactggaccaccggtacttcctatacggcccattcgcagttcgagtggaccggcaactatctgaatactctcaagaagctgaacgatcagccattcctgcttcccaaggggaccgtgcaaagactgcgcaacatgtatgcggagttgcagcgcctgaagggcgacgtcgacgtcgccgccgagactggtatcgagtcgctggccaacggtgtgttgcttgacgacgatcagcgactggccgagctgagagagcgctactacgagctgaccacctccaagtcctggcagatcactgcgcctctgcgcgtgttgctcagcgccttgaagcgcaggccgtggacgcgtccgcctcgcatctggctgatgagcgaggctgacctcgatttccatatcaggctggttcttcagtcgtcctcgtggaagtggacccgaatcctgcgggggctgagatga

SEQ ID NO: 511320 - DNA, 912 bp, Stenotrophomonas maltophilia
atggaaatgaataagcttccgaaacttggacgcctgcgcgtgcaggctgtcctttacggaaacgatccggactcgatcctgcgaactgtccagcacctggatcgcgccgcggagcttgcaatccaggcaggtgcattcggtcgggtgacgcttgcatatggtgattcatcaccgaccgactccctgcgctcggtggttgaagatgccaaggcagcctgcggtaccttggctgatatcgaatacgtccattttggtcgcaacatgggttcggcgggcgggcacaatgcgctgctggaacttgatcagaccgacttcactattctcatgaacccggacatcatgtttgcgccggacgccctgatcgagctcgcacgtccattctcagacccttctgtggcgatgagcgagcctaagcaactgccttttgagcatcccaaggaatacaacacatcttcaggggaaaccccttgggcgtccggagcctgcaccctagtccgacgtacggtcctgagcgagctggaaggctatgatgcgcagaccttcttcctttactgcgacgacgttgatctttcctggcgcgcgcggctgaagggctacaagctcatctactgcccgcgtgccgcggttttccatgacaagcggatgcagtttggcggtgatcgcccggttggctgggctgagaagttctattcggccgaggcggggttgctcattgcatacaagtattgccgggatgatcgagtaaagcagatatctgccttcttcgcggaaagtggcgatcaagtatggcttgatgcgctggcgtccttcgagaagcgccgggaagatggaacgttgcctgctcgtcttgatcccggccacaaggtcgcgtatttccgcgatggcctctacgctcgccacaggttcgtttga

SEQ ID NO: 511321 - DNA, 1341 bp, Stenotrophomonas maltophilia
atgtcctgtgatcagttgatcgttgatgtagcccatgtcgacaagagcttcctcttgtacgaccggccgtcccatcgcctgtggcagatgctggtgggcaatcggagggcgttctaccgtgaacataaggttctcaaggacatcacgttccaagttccgcgcggccagaccctcggccttgttggacgtaacggcgcaggcaagtcgactctgttgagcatcctgtgcggcacgctgactcccagcgatggcgaggctcgcatccacgggaaagtggccgcactgcttgaactgggggctggcttcaatccggagctgactggtcgcgaaaacatcgatctctgcgcacagatctatgggcttaccgaggagcagatacatgctcgtcgggattccataatcgcattcgcggatatcggcgattacattgaccgccccgtgaaaacgtactccagtggcatgttcacccgcttgggattctcggtcgttgctcacgtcgatgcagacgtgctcatcgtggatgaggccttggcggtgggggatgcgttcttcgtgcagaagtgcatgcgcttcctgcacgggttccgcgacaacggcgggactctggtattcgtcagtcatgacatgggggcagtcacagcactgtgtgaccgtgtcatctggctgaaggacggtcgagtgttcatggacgcgccgccgaaagaggtggcgggggcgtatctggcggatctgtatgaccaggtcggcgcaccggataccgttgattcggccccgggacgccccgcttcgatcacggaattcaccgccgacgaggttgatgcacgtctggcctggatcaataccacttccctgcgcaacgacatcgaagtgtttccattcgctgtccagcacgacttcgggtcgggcggcgttgtctttgagggcggtgggctgtttgatgaaggtggtcgcaggctcagctgggtcgttggaggcgagctggtgacgctccggcttcagttgagagcccatgtcgccattcagtcgatgctggtcggtttcgttgtcaaggacaagcaggggcagccgttgtttggcgagaatacccaactgacctacctggacaatcctctggcactcgctgcacaggagatctgtacagcgagcttcaccttccgcatgcccgtgttgccttccggggactatgccatcagtgtcgctgtcagtgatggaacccagaaacagcatgtcatgcaccagtggattcatgacgcgcttatcctttcaagtcgatcaaccagcgtgtcaaccggtcttatcgggataccgatgcttgatatcagaatggatgtcgccagttaa

SEQ ID NO: 511322 - DNA, 741 bp, Stenotrophomonas maltophilia
atggtcaagcgcgatatccgtggccgataccaaggctccatcttcggtacgctgtggtcgtttgccacgccgctgctgctgctttgcgcctactggttcttcctgggggtggtgctgcaggcacgattcggctcggccccgcaggcagcattcccggtgattcttttttccggcctcattacccacctcttctttgcagaagtgatcgggcgatcttcgggcttgatattcgagcacgccacctatgtaaaaaaggtggtgttcccgctgacggtactgccttggatgacactggcaacggcgggatttcatctctgcgtcaacctctcgatccttctggtggggcagctgctcatcgtcggcagtgttccgccgacttggcccttgattttcatcgtacttctgcctgcgttgcccctgttgctgggggtgtcctggatgttgtccgccttctcggtttttctccgtgatatccagcaggtagtcccgctgatactcactctcatgatgttcgccagccccattttcttcccgatggagatggtccctgagcagtaccgtgcgtttctttacctgaatccgacaacggtcattatccagcaggttcgggacgtggccatccatggccagatgcctgacttccttgctctcgccatttactccgtggtgtcgctgtctgtaatgagcctcgggtactgggtgttcatgcgtacgcgcaaaggttttgccgatgtcctgtga

SEQ ID NO: 511323 - DNA, 399 bp, Stenotrophomonas maltophilia
atgtcgatgaacagtactgattttcccctggtctggatggacctcacgcaaggcccgggacatgagcatcgagatgacttcgaagcgttcgaggagaatttgcgccggggggagccctttgtgcttcttacagatactgcgccatcggaggaacatgaccactctccagccgagaaaaaacgcatgggactgtggatgaagcagcacaaagctgagcttcgaaggctggttctggcaatggtcctggtcgagccgaatccgagcaaacgccttgcgtacaaggcgttttcggtgcccttttcgaagttctggggctaccctcttcatattgccacttcgcgtgagaaggcagtagaggttgcgaggaacctgctgtctcaatctgtccaaacgccctga

SEQ ID NO: 511324 - DNA, 2181 bp, Stenotrophomonas maltophilia
gtggcgattgcactggccctggtgatcacgccgactgcattggcaggcgaacccgctccgtcggagcgcgccgaccaagaggcagttccggaagagatcgcgttgcccacggttacagtgcttggcggcaaggataaagcagccacagaaggcaccggctcttatacgacgcaggagtcctctgccgccacgcgcatgccgctgtcgttcaagggaacgccacaggcactgactgtgataacgcgccagcgtctggatgaccagcaacttgattcggtacaggctgccctggagaacacttcaggcatcgccacgtatcagtccgatagtgagcgcaccagcttctattcgcgcggtttcctggtcaacaacatccagtacaacggcatacccacggtggtcggcagcaccgtcaatggaagcggcatcagctcagttgatacagccttctacgatcgcttggaagttgtgcgtggcgcgtcgggcctactgacaggtaccggcaacccttcagccgcaatcaaccttgtccgcaagcgaccatcccgtgatttttcggcggccgcgtcgttggggggcggaagctgggaaacctatcgcggcgtcggcgatatctccacaccgttgaccgccgacggtcggattcgggcccgcctggtgggaacgtaccagcgtggggacagctatcttgacggctacaggccgcagaggaagtcactgtacggcgtgattgaggtagatctgaccgcagacacgatatttcgtgcgggatacgaataccaggacatcacgccgaaaggatcgacctggggaggtctgccgctttggttcagcgatggcacgcaagcggagtatgcacgctccaagaactacgcgcaggactggagctactggaacaataggttcaaaaccgccttcgccgagattgagcatctgttcggcaatggatggaagtttcaggccaccgcgaatcagtatcgagcggaacacgctgccgaactccttggcctgatcggccgccctgatcgtgccacaggcttgggtttcttccccaacggggcctatccggtagcactggcatccgagggacgcagccggcagaacaccttcgatgcaatggccagtggccccttccaactgtttggccgacagcacgacttggtcgtcggcgcgaccggctctcggcgcaaggcagatcaggaggacgtcccaccattctatgcaggcgtctcgccggtgaacgtctatgagctgagccctgaattccgcaggcccgacttcgatgcgatgcccaggacgccgacgcgcacccgaatcaagcaaagtggcatctacagtgcgacgcgactctcgctgactgagcccctgaaactgattgtcggaggtcgcctcagcaactatgaagtggacgacgcggccggttcagtgccgttgcactacaagaaaagtggtgagttcactccgtacgccggcctgatctacgacatcaacacgacgtactcggtctacgccagctacacaggagttttcaatccacagaccgagtaccggaacagcaacggcaacgtgctggccccgtccaggggaagaacaagcgaagtgggcctgaagggggcgcttctcgacgggcgcttgagtgcctcgattgccctcttccagaccgacctggacaacgccgcacaatcggtcgccggcgcatacacacccagtggagcacaggcctaccgcggcgccgacggcaccaagtctcgcggcgtcgagctggatcttcagggagaactgtccgctggatggaacatctacgcgggtatcgcgcatttcactgcgaaggacggtgccggcgatcgcttgaattcgcagctgcctcgaacgacggcgcagtttttcacgacatatcggttgcccggtcaatgggaccgattgaccctgggtggcgggttcagatggcaaagccgcttctacaacgcgcccaacacaggaaccagttcgctgggtggagaacagggatcctatgcacttctctcggtgatgggccgctactccatcacggaaaaatccagtgtggctatcaacatcaacaacatcctggacaggaaatacgcgcttcagaagggggatttcgacaccgtcggctatggcgcgccgcgcaacgtaatggtgacgctgaactacaagtactga

SEQ ID NO: 511325 - DNA, 852 bp, Stenotrophomonas maltophilia
atgtcaagaacattcacttacgatctcgcatcgcacgcgaacatcgacagccttccccaggcagttgtagccgttgctgctacctcactggcgcgggactgggagaacgggcgccaccagcaccacaaggcgcaactgatttactcggttcggggtgtcttgacctgcgaggtggaagacggcgtctggatcgttccgccgcagtgcgcagtctggatacctggcgatcttccccattcggcaaggggggctgggcagacagaatgctattgcctgtttgtcgaacccgacgccgcacgaggcctccccaaagtctgttgtaccgttgccgtatcgccattgctacgcgaactgctgctgaaggcggctgactttccggagcagtatgaagttggaggtaaggaggagcggctcattgctacactcctcgaccaattggtggaggccccagttgaagatctgcatctgccgatgcctcgtgatgcaagactccgtcgattggccgaactgctgctgatcgacccgactgacaagaccacgaaaggcgtatgggctgcccgcgtcggcatgagcgagcgcagcatgagccgcctcctgcagaatgaagttggaatgggctttgggcgttggcgcaggcagttgcacgttatcctcgcgctccagcgtttggctaaaggtgaaagcgtccaaacggtcgcactggatctaggatacggtagtgcgagcggctttgtgaccatgttccgcaaggcgatggggaagccgcctggtcgatatcttttggaacgttccatgattgcgccgcaaatagcgccgctgggaatccgcttggacggccgattaccgaactga

SEQ ID NO: 511326 - DNA, 726 bp, Stenotrophomonas maltophilia
atggaaattgaaaggctaacagaggaggatgttcttgttgtgcggcgacgcatggcgcagctggccattgccacccaagatgctttcggtgcgacagaacccactaaccctgtagtattcgcttctgcggtttttagacagtacacaggggcaggcggcgtctttaagtacaccaccatccctgcaattgccgccaatctgttctatggcgtggcgaaagggcattcgtttgagaacggcaataagagaacggcactgctcgcgatgctcgccctgatcgagagaaatcgctgcttcttgataaatacttcggaggacgaactctatgagatggcccgtggagttgccgcagatgagaggcgagatgctgacttggcaacccaagagcttgccgcttggctttcgccgagaattcgtcgcaaggtgttaggcgacaccaatatgacgtatcgcgatctcaaggacgttctcgagaaggcgggctgccagtttgaagccccatcacagaattacgtaaagattagaaatcgtaactgggtagtaaaaaccggctaccctcgtgccaccttcgacgttccggtcaaagaggttaagcgaattcgtagggcgctacgtctcagtgaggcacagggggtcgattcggctgctctctatgacctggaatccactgtagacaagtttgtcaacgagtatcgggatttgatgcgcagactggcggacttgtaa

SEQ ID NO: 511327 - DNA, 450 bp, Stenotrophomonas maltophilia
atggaccgcgaacgacacgaaccgactttcagcgccccggatctgcaggacgtgcgattccggagcagccgcaaccgacctgttcgtcagaacgaaccgacctcaccatgggtgtacatcggcgtgagcgctgcgctactcatcgccatcgcgatgggattgattgaatggaatgccaggcgtcaggcggcggcgatgacccgcgagttaatgcgtccggctacgcctgaagagcaggcgcacctagaccgacaaaccgctgagtgggagcgcaagctaaaggcggaatcggcggcagagctggccgaggtgcagcgtgcattgtgggcagatggcgcaacggccaggccagctccgcgcccgttagatgccaatgagcgctgtatcgatggccgacgattccagcgaatcgaaggcggttggcgcgaccgccccaacgatccctgctga

SEQ ID NO: 511328 - DNA, 483 bp, Stenotrophomonas maltophilia
atggcctacaacctcgcccagcccggcgccgacatggtcaagtcggtccgcagactcggcatgtggggcctgatcgcgcagccggtacatgccttggcattcgggtactggttgccgttcaacatcctgctcacgttcgccctgtgcgccgtggcggtctatgcggcagttcagcgcagatgggttgtcctggcattcgccgcggcggtgcttccgctgttcgtcgactaccaatgggcaggggtagggttcgtgttgctggcgtggttcgccttcaagtggtgccggttctggctgctggtgccggcattcggggcgatttgctggttcaacggcaacctgtgggcgctggtggcgatcccagtggcggtgagcctgtcgggtttggcgtggccggtcccgcgtggccggtgggccttctatggctattacgtcgcgcaccttgcgtgcattgggctgctggcgcctatactgcgaccatga

SEQ ID NO: 511329 - DNA, 1515 bp, Stenotrophomonas maltophilia
atggtgctggcgttgtcgcaggcggtgggtgcactggcgagcgggttgtcagggcaggatctggctgggattgcgctgaatgcggggattgccaagaattcggttgagaacaactggctcagcaggcaggaaatcgcgctcatggagtccgagcgggccgcgtgcggtggcaaggggggagatatccaagcctgtaaggactctgttactcgtgcgtatgacgagctgaacgcagagcgcgatcgcgaattgcttgcgcatggtgctgctgttgagctgagcatgcgctcatatccagcgacttcagaagacgactggaaacgcgagtttgcagcgcggatcgacgcccactggcagctgcgctatccaggtgtttccgtagaagaccgcatagcgggaccaactccgggtgccgacgcttcctatgcgttccgtgagttgcgtggtcaggcgcttgcgagcagcttgaccgccatctcatctattgccgagaaggggattagttcgtggtacatggatatggtggccgcagacgcggcaaagatgcgtgatggggtcgctgcacagtttgatctgattagtggtttggttacgtctaggtacccctcgatcgacattcaggcgatggtggaccaaggggctgttcttgccgaggtcgagaaggcgcaggcatatctggcattgatcgcaagatctggaaatcaattctctaatgttctgcgagtaaagggggttgctgccggagatagagtggttatcgatgagaggcgaattggccacatgtttagagatgatagaggtcacctgcccgatactcctgcaaacagagagcttctccttcgtgttgccaatgatccggcggcaatcaatggggtggacaagttcggtgtgaggtggtcttcttcaactcagtcagacggaacccaggtatgggttcaggttagaaaggggggggcggttaatggcggggtaaataaaaatccgctgccttaccatcaggattatggatttgcgtcgcccgtaaagccagttaaaaaaggttacgaaatgaatgttactgatgcgaaagattctggtgaagtttccgctcaggctgcatatgtgctgatgtgcgttttcttgcggaagtacatggagagaggggatgggcaggacactctcgttgatctattatcttcggcgagctcatttttgtgggcgaatggcttgcctaatgacccggcaatgtgggatgactggcgcgacgcatttgcagaggttgccgtcgctggaaatgcacttagttctgaattctgtagcgcgcaaatgaattcgtcaggcgggcgtttaacgttgctcgatgcattctcagtgatgctggtattccttgagggtattcttgatcgatctggtgaggatcttccgctgctcgaagttattgggcgtctaatgtcacctctaagtgattccagttgtctgagtgattcctctgtatgggttgagtggacggattcggttcgaaaggttggggcgtag

SEQ ID NO: 511330 - DNA, 684 bp, Stenotrophomonas maltophilia
atggatctggactggagcgcgctggggttgtcgctgaaggtggccggctgggccaccgcgatcaatctggtgctgggtgtggcgctgggcgcgttgctggcccgccgtcgcttccccggccgtgagctgctggattcgctgctgaccctgccgatggtgctgccaccgacggtattgggttattacctgctggtgctgatcggtcgcaatggcccggtcggcgcgtggctgcagtcgtggttcggtatcaacctggtgttcacctggcaggcggccgtgattgctgcggcggtggcttcgcttccgctggtgttcaagccggcacgcgcggcgttcgaggaagtggacaggcagttggagcaggccgcacgcacgctgggtgtgtccgaagtggcggtgtttttccgcatcacgctgccactggcgtggcgtggcatcctcgccggcctgttgctggcgtttgcacgcgcgatgggcgaattcggcgcgacgctgatggtggccggcagcattccgggccggacgcagacgttgtcgatcgccatctacgaggcggtacaggccggccaggacggcaaggccaatgcgctggtgatcctgacctcggtggtctgcatcgtgatcctgttgctggccgcgcggctggtgggcgggcgtcgccgggagctgcgcgatgtggcttga

SEQ ID NO: 511331 - DNA, 915 bp, Stenotrophomonas maltophilia
atgaacgggatcgggatcgatgtgagcaagcgccgactggatatcggcacgacagacggcgagactgtgcaggtcagcaatagcccctctggctatgctgaattgagcacttggttgagcacgcggccggccattcagatcgttctggaagccactggcggctatgagcagactgtcctggacttccttcacaaggccggccatccggtgatccgcgccaacgccctgcgggcgcgtagactggctcaggggctgggtaaagtggccaagacggaccgcttggacgctcttgtattggcgcagatggcggcactggtggaactgccttcctatcagccgctggagccctggcagcggaaactgcgcgagtttgtgcgggcgcgtcgacaaacgatgcaggcactgaccgtagcccgccaacagcaggaaatggtgactgaccgcgagctacgccggcagatgcaaggcaacatcattcgcctgcagacactggtcgagcgactggggaagcagatctctgaacaggtcgcgcaacagccccaactggcagtgctgaagtcgatgaaaggggttggcccggcattgcaggcggtgctggccagctacctgcctgagctgggtcagatcagcggaaaagccattgccagcctggtcggcgtggcgccgatctcccacgacagcggggccatgcgagggaggcgaagcatccacggtggcagggccgagatccgccaggtgctctacatggcggccatgtcggccatgcgacatgagccacgattgcgggacttttaccggtcgctgcgggcccgcggcaaggaagggaaagtggccatcgtggcggtgatgcggaagatgctggtgattctcaacgcccgcgtgcgtgatgctcaaggcggatcgatccccgcctga

SEQ ID NO: 511332 - DNA, 963 bp, Stenotrophomonas maltophilia
atgtctgattctctcgatattggcgtggacgtagactccaaggagttcgtgccagcggtggccgaccgcaaggccggtgacagggtcgccaacacccgggccggcatagccaagtggctcaaaaccttgccccagcgatgccagatcggcatggaagcgacggggcggtactacgagttgttggctcggatggctggccaggcaggccacgttgtctatgtaatcgatccacggctgatcaagaactatgcccgggcgacgggctcgcgtggcaagacagacgccatggacgcccaagcgatcgcccgctatgtgaagaaggagagcgaccgcctgcgtgaatacgtaccgcgtaccgacgagcagcagcagatgcacgatttgctgcgtaagcggcgagcgctggtggagacacgcgcccgcctggagcaatcctttggggtaagcaaaagtgaccctggggagctgtctgatctgttctgcgctctggctgggacgctgttggagctggaaagcgagctgcagcgcttgggccgcgatggagagcatggtgcgctctacaaacgcctgctgaccatcccgggtatcggccctgccgtggcctctcacctgatttactacatgacgcgctggccattggccaacgccaacgcatggatcgcctgcaccggtctggatccccggcccaacgaatctggcggcagaaccggacggcgtcggctgtccaaacagggcgcgccgatgctgcgccagatgctctacatggccgcgatgggcctcaagcggtgtcgccgggggcaaccgctctacgacgagctgtcaaaacgcggtcaccccagcactgccgtcttcaatattctggcaaggaaactggccaggatcgcttggggcgtgttcaagagtggccgggacttcgatccggccatgctgaaggtgggtcaagcctgcttccagcaggcttga

SEQ ID NO: 511333 - DNA, 1110 bp, Stenotrophomonas maltophilia
gtgtccgcacaggcgctgctgtgcggcaccttcaaggacgccgacagcggtacccgcctgcaggtggaaagccctgtgcagggccgcctgctcgcgcctggcgtggcgccggaaccgtacaacctggagcgactgggcgagtcgctggtgatggccagcctggtcaccggcaacgtcagcgcactgaaaatcgccagcgccggccgcgtcctggccggcgatgaccaccgctacagcttggagagcgcgaccgagtgccgcgcagcaccggcgtttgcggccgggagttgccgcgcggacatcgcgcagtgcatcgatgacatggcactcgccggtcccgaacgctggcgacaatggtgccgcgaggatgttcccgtcgcctgcaatctgctgatcgaggactaccgcagcgatgcccgcaacgacctgctggtggaaatggcccttgccagcgatcgcgaagagccggccacgccagcgtcctgtgaacagggcaccgcgagctacgaccgggacgcgtgcgagcaagccgagacagccagccgtgcacgcgatatcggttgggcgttctcactggcgggcagcacaccgcaccaggtgtcactgcctgctgagcagctggacgaggtcagcacgctgtgccgcgaacatcccagcgccagcttctgccatgcgaccgccgttgcgttgtgggcttccaagcgcctgctgcctgcacgcgatgcgctgcagctggcgtgcagggtcggcgaggatccacaggcctgcagcacggccacgccgctggcgtcgctgtcaccggcggatctggccatagcgcctctggacgcactgccctgtggccgctaccaggcgcaggccggcgacctggtgttcggcgaggatggccaggtccggatggcagggctggaggcgcaacctgccgtgctgcgcgagggagccgtccacgtgcgcagcgggagaggcgaggaccgggtgttctggcagctggccaatggcgacctggtggcgaacgaccgcgacaaccgcttcacccgctaccagcgcgatgggtcggccccccgctgcgtcgcgcgcgcgggtaccggcacaggccctgcggtaaagtag

SEQ ID NO: 511334 - DNA, 942 bp, Stenotrophomonas maltophilia
atgcgcttgctgacccttctccccgcactgctgctgtcggccgcgttgcctgctgccgccgacgcgctgcagtgtggcgaataccgcagcaccgatggcggcatggcgctggtgttcgaatcatccaccaccggctatcgggctctggacggtcaggaacgcgcacctctgcgcatcgatcgcagcgccggcgatctgcacctggtgtttctcgacgacggtgcatccaccgccatcagcgtggctgctgacggggcgcatatcaacgacggtatgaacgacttcgagctgcatcgaccccaggcttgccagcgcgcccccgcgcccggcgcctgcctgggccaacctgcgctgtgcattgcgcggctcgcggatgcgccaccgcaacaggcgcaacgcgcgtgcgaggaaggcgtcggcgctggatgctcggcgctgctgcgccactttctcgctgcaccggccgccgcggccggtcagcaggacgcaccattgcctgccgcgcagcgcaccacgctgcagcggctctgcctgcaccagcgcggtgggcgcttctgcaccgaggtggccgaacagcagttgatcgcgctggaacctgcgctggcggtgcaggcgctgcaggtggtctgtgatgctggacgcgtcagtgcctgcgaacgcaccgcgccgttgcgcggactcggcgccgatctgcgcctggtgccattgcagaaggtgccatgtggtcgttaccaggccgatgctgacgtgatcgacttcggtgcgggcacgcaggcccgcctgcacgagggtgctgtccacctgcagcagaacggtgaaacgcttgtgctgcgacaactgggcaacggcgatctgctcggcatggacacgcagaccggctaccagcgatatcggccccttcccaacgcacgctgccgggccgcgctcggccatgatcactga

SEQ ID NO: 511335 - DNA, 645 bp, Stenotrophomonas maltophilia
atgagcctgctgggggaagcgctggctgcactgcgggggcggcggcgcaatgtccccgtggaggagccctctgcgtggtcggacgaccgcgccctggtgggcgcgatcatcgacggctcgcaagcggccttcgcgcagttggtggaaacacatcagcgcacctgcgcgcatgtgatcgggcgcatggtcggcgaccgcgaccaggtggccgacctgctgcaggaaaccttcctggccgtgttccgccagctgcaccggttccgttttgaatcttcgttgcggacctggatttcgcgcgtggcctacaccaccgcgctgcagtacctgcggcggcggcgactggaagcgcagtggatggtggcggtggaagcgccggagaagttgggggccggtgacgagggtccgggcccttccgaactcagcgaggcattgcaggctggcagccacctgagagcagcgctggagcggttgagcgcgccgcagcgcctgatcgtcggcctgcactacctggaggatttcgatctggccgagatcgagcaggtgaccgggctggcccggggtaccatcaagagccacctgcaccgtgcgcgccaggtcctgaaacaggagctggtgaagcacgccaccgccggagaactgttgtga

SEQ ID NO: 511336 - DNA, 216 bp, Stenotrophomonas maltophilia
gtgagccgaccaaccgattcccgcgaacccgacgagcgtgcgctctcgcaggccttgcatgaacagataaggcaggacgaggtgccggatgtgagcgaggcgctgcagaagcggattgcgtccgagtcgcgcgacagcagcgtgggctatgcggtggtgcaggtggtgctgctgggggcgttgctggcgatgggcgtctggtatttctggcggtga

SEQ ID NO: 511337 - DNA, 741 bp, Stenotrophomonas maltophilia
atgattgaattctccgtcgtcgactgggccgcctgggcgcctggcctgaccgagcgcagccaatggctgcgctgggccgatgcgccgttcctgcccgtgggcgagggcgcgccagcgctcaccgaaatcccggcgatgcagcgtcggcgtatcgaacggctgggccggatggcgatccaggccgcatgctggtgcgaggacgcgcagggtgccgacagccaggtgcccttggttttcgccagccgacatggcgatgtgccccgctcgatggatctgctggcatcgctggcagccgaagaacccctgtcgcccacgaccttcgggctgtcggtgcacaacgccattgccgccctgtactcgattgcccgtggtcatcgcggcaactacctggcgctggccgcgggccgggccacggcggaagccgcctgcctggaagcggtcggtctgctggccgacggcgcccgtgaggtgcgtgtggtggtgtacgaatcgcccctgccgggcatatacgcgccgttcgccgacgaacccgacgtgttcttcgcatggtgctggcgtctcacccagccccgcgagggctgcccgaccctgtcactgcgctgggaaccggcgggtgctgccgagggcgtgccgggccatctgccgcacgcactggacctgcaccgtttcctgttgtcgaagatgccggcgcttgagcatgtaacgcagggacaacgctggtcctggggccgccgtggctga

SEQ ID NO: 511338 - DNA, 798 bp, Stenotrophomonas maltophilia
gtggctgaggggctgcgccgcctcgatcatgcctggcgtgtgttcggcacggcgctgtgctttcttgcttttgggctgggcgggctggtgctgggaacggtggtaatgccgctgctgctgctgatgcgcgacccactcgcgcgccgccgccgtgcccgccgcctggtccagctcgcctttgccggccagctgcgactgatgcgcagcctgggtgtgatgacctgcgagatcgaagggcgcgaacgcctgcagcgcgacggcctgctggtgctggccaaccatccaacgctcatcgatgtggtctgccttgtgtcactgctgcccaacgcggactgcgtggtcaaacgcgcggtagccagcagcccgttcatgcgcggtgcggtgcgggccgccggctacattgccaacgacgatgggccgggcctggtcgatgactgcgtgaaggcggtccgcgcgggtggcagcctggtcatttttccggagggcacccgcagcgtgcccgggcagccactgcggctgcagcgcggcgccgccaacatcgccgtccgcggccgtctggacatcacgccggtgcggatcacctgtacgccgccgaccctggccaaagggcagaagtggtatcgtattccctcacgttgctttcacgttcggctgcagatcggcgaagatatcccgatctcgacatttctggtcgaagacgactcgccaggagggaatgccctggcggcacgtcgcgtcaccgagcacctttcccgttacttcgacctgtctggagaccccacccgtgcaagcacttga

SEQ ID NO: 511339 - DNA, 552 bp, Stenotrophomonas maltophilia
atggcacgcgcacgcacggtggcggtggctgcgatctcgttggcctatccgctgctggtctatctggcgatgggccgtttcgagccgcgctggtcgtcgctgctgttgttcgcgctggccctgctgcgggcactgggcacgcggcaaccggtgtggtggggcgcggcagcgggtgccggcctgctcgcagtgctggcgacggtactcaaccaggcgctgccattgaagctgtacccggcgctggtcaatgccgtaatgctggtcgtgtttgccggcagccttcgattcggtcctcccgtggtcgagcgcctggcccgcttgcaggagccgaacctgcctgcgtcggcggtgccctatacccgtcgcgtcacccaggtgtggtgcggcttctttgtcttcaacggcagcctggccctgctgaccgcgctgtatgcgtcggaccgggtctggatgctctacaacggtttgctggcgtacgtgttgatgggaatcctgtttgcgggtgagtggctggtgcggcaacgggtcagggcggtgcatacgcatggctga

SEQ ID NO: 511340 - DNA, 942 bp, Stenotrophomonas maltophilia
atggcgacccctcagggtgccccgcactgggccgatatcggtgaatccacctcggtggccggcgtgctggtcctgtactgggtgcaccgctggttcgggcgctggccgttccgcatgtgcgtgtggccggtggtggcctgccactggctgggcaatcgcgttggccgcgaggcctcgatgcagtatctgcagcggctgcaggcctacagcggcgtgctgggtcgcgcgccgacccggcgcgacagcctgcgccacttctttgcatttgccgacacgatgctggacaagatcctcggcatcggtgggcgctatccgcccgaacgcatccacctgcatcgcaccccggtgctggagaggatcgcgcagcgcgaaggcgggctgatccttaccgcgcacatcggctgcctggaactgtgccaggtgctggccgagcgggtccccggcctgtgcattaccgtgctggtgcataccgcgcatgcgcaacgcttcaatcgcctgctgcgtcggctggatccgcttgcagcagtggaacttgtgcaggtcaccgaaatggggcctgccacggcgatgatgctggccgacaaggtggccgctggcggtttcgtggccattgtcggcgatcgaacgccggtcggtggtgggcgctgcctcagcgccgatttcctcgggcaacgtgcgccgttccccatcggtgggtatgtacttgccgccgcactgggctgcccggtctacaccatggcctgcctgcatgagggcgagggctatcgggtcgtgttcgagccgttcgccgatcacatcgtgctgccacgcgggtcgcgtgatgcggcattgtccgcgcaggtgcagcgctatgcgggctggctggagcagcaggtcatccagtcgccgttggactggttcaatttcttccccttctgggatcaggctccgcatgacgactga

SEQ ID NO: 511341 - DNA, 1185 bp, Stenotrophomonas maltophilia
atggacactgccgttttcctcaacgacctgggcattgtctgcgcgctgggcgagggccgcgcggcggtggcggaggcgatgttcgccgaggtgccgggtgggttgagcaacaacgacaacctgttgccggggcggaccctggcgttgggggaggtgtgcacgccgctgccgacgctggacgaactcccgctggccctgcgtgggcgcaacaacgcgctgctggcggttgcgctggcgcagatcgcgccagcggtggccgcggccatcgcccgctatggcgccgagcgcgtggctgtggtgatggggaccagcacttcgggtattggcgaaggcgagcgggccatgtgctcccacgccagcaacggtcattggccggcggactacgattacgcgcagcaggaaatgggaacgaccgcgcagttcgtgcggctgcgcagtggtgcgcagggcccggcatggacgctgtccacggcatgttcatccagtgccaaggccctggtgtcggctgcgcgcctgttacgcgccggggtggtcgatgcggtcatcgccggtggcgccgattctctgtgccgctttaccgttgcgggtttcagcgcgcttgagtcggtgtccgcgctgcgctgcaatccgttctcgcaacatcgatccggcatcaacatcggggaaggcgccgcgctgttcctgctcacccgcgacatcggcccggtggcgctggcaggatggggtgagtcctccgacgcccaccacatgtccgcacccgacccgcaaggccaaggcgccatcgatgcgctgcggcaggcactgaagcgcgctgtctggtcgcccgccgatgtcgattacgtgaacctgcatggcaccgccaccgaccacaacgatgccatggaaagcctggcggtttcggaggtgctcggtaccgatgtaccggccagctcgaccaagccgctcaccgggcatacgctcggcgcctccggcgcgatcgaggcggcattgtgctggatgatgctggccgagaacccgctgcagcggctgccaccacactggtgggatggcgccgtggatgaggcgctgccggaactgtcactggtggcaccaggcacccgcctggcacgcccgctgcgacggatactgagcaactcgtttgccttcggcggcagcaatgcggtgttggcactggaacgccgatga

SEQ ID NO: 511342 - DNA, 456 bp, Stenotrophomonas maltophilia
atgaaccctctctacgcgatcgaggaagtggtgccgcatcgccaggacatgtgcctgctgcagcggatactgcgatgggaccaggacagcatcgaggccgaactggtggtacccgggacgggtctgttcatcgagaacggtgaaatgccggcctggatcggcatcgagtacatggcgcaggcgattgccgcctggtcggggtgtcgcgcgcgtgcggctggcgcagcgccgcagctgggcttcctgctcggcagtcggcgctacagcagcctgcgcagtggtttcccgagcggaacccgcctgcgtgtgcaggcgcgtcgcgaactgctgggcgacaatgggctggggatgttcgcctgccggatcctggcgggcgaggaagaatgggcggttgccaacgtgtcggtgtacgagccgctcgacgcgaaggcctatctggagagtggacaggcatga

SEQ ID NO: 511343 - DNA, 321 bp, Stenotrophomonas maltophilia
atgctcgactgctgcacagccagtcgagcacggctcgactctacagaaggcagcgacacggacgcggccatggcagacccccgcaacagcggcaatccgacgacctcgctggcacgtttcgacgattcactggtcaccaccaccttcgagctgcccggcttccgcatcacgcgcaacctgggcgtggtgcgcggcatcaccgtgcgctcgcgctcgatcgtcggcaacttcctcggggcatccagacgattttcggtggcaacatcaccctctacaccgagctgtgcgaacaggcccgcgaggaaacctgccgcgacctga

SEQ ID NO: 511344 - DNA, 900 bp, Stenotrophomonas maltophilia
gtgagcatcccgttgcaggccagcgcgctgcctacgcgggtgctgatcctcggtatgggctggagcggatgcgtgctggccacgcagctgcaggcacggggagtgcacgtcgtcggcacggtgcgtgacccctcatcggcgccggacgatggcctgctgcggcatcagctgcacgctgacactccaccgtcgccagccctgctcgatgagatcacgcagaccgaggccgtgctgtgcagcgtgccacccgatgccgagggcgacccggcactgcgtccgctgcttccggctctgcacgaaagtccggcgctgcgctgggtgggctatctgtcgtccacgtcggtatatgccgatcgggccggcggctggatcaacgaaaccagcgtggccgatgccactgaaacgacgggcgtacggcgcctgctcgcggaagcacagtggcttgcactggctgaacaacgcggcatcgcctcggcggtgctccgcctgccagggctgtatggtcctggccgcaatgccctgctgcagttggcggagggccgtgcccgccatgtgattcggccgggcctggcgttcaaccgcctgcacgtagaggatcttgcggcagtgatcatcgcgtcgatgcagcgaccggcgcaccggggcctgtacctgcccagcgacgacgaaccggcaccaccacaggatgtgctggccttcgccgcgaagctgggcgggtttgcgatgccgcctgccgtggcctgggacgacccggcactgagcccgacgctgcggcgcttctatgagagcaacaagcgcatcgacagccgtggcacgcgccaagccctgggctggaagccgaggttcccgacgtaccgggaaggactgcgggctgctggaatcactctgacccgcttgtag

SEQ ID NO: 511345 - DNA, 894 bp, Stenotrophomonas maltophilia
atggccttcgtgaaatccaatgatctccaggctttcctggttgtcgcgcaggaacagagctttaccaaggcagctgcgcgcctcggcgtcactccttcggcgttgagccattcgatgcgcctgctggaagagcggctgggcatccgcctgttggcccgcaccacccgcaatgtgtcgcccacccaggccggcgagcgtctgatgcactccatcggccctcacttcgcggccatcggcgccagcatcgaggcactgggcgaactgcgcgacaccccgaccggaacactgcggatttcctgtaccgacgattcgatcgagatgatcatccgcccgcgtctcgctggcttcctggccgcgtacccggacatcacgctggagttctacgtggactacgggttcaccaacgtggtcgagcagcgtttcgacgccggcatccgcctgggtgaggcgctgagcaaggacatgatcgcagttcgtgtcggtccggactggaggctggtcgtagtggcctcacctgcatacttcgacgcgcacccgaagccgaagaagccggccgacatcacccgccaccgctgcatcaacatccgccaccgtcccaacggatcgatctacgcctgggaattcgaggacaagggcaaggagttcagcgtgcgcggggagggaccgctggtgttcaacagcatgactcacgtcatcaacgccgcgcttgacggtctggggctggcctatgttcccgaaccactggtcaccgagcatctggcggctgggcgcctggtggccgtgctggacaaatggtgcgtgcccttcgccggttaccacctgtactacccgaaccgacgccagccatcacccgcgttctcggcactggtggcctggctgcggcagggcacatga

SEQ ID NO: 511346 - DNA, 1059 bp, Stenotrophomonas maltophilia
atgaagcgcacctccctgctgctggcgctgatcaccagtgcattcgcccctttgaccgtgatggccgccgatgttcctgttgcggaaaagccggcgggcgcggacaacttctacagaagcgccgatgtatcccgcgagcgtgtgacgttccgcaaccagtaccagatgagcgtagtgggtacgttgtaccgcccgaaaacccggcgcgggaatgagcacgccccggcgatcatcgtcggccacccgatgggcgcggtgaaagagcagagcgcgcagctgtacgcgcagaagctggccgagcagggctttgtgacgctggcgatcgacctgccgttctggggcgaaagccagggtgagccgcgcaatctggtggccccggagatctatgtggaagccttcagcgcttcggccgactacctggggacgcgcgagttcatcgatcgggagcgcatcggcgtgctcggtatctgcggcagtggcagcttttccatcgccgccgccaagctggacccacgcctgaaggccatcgccaccgtcagcatgtacgatatgggcgcggttacacgcaatggcctgaagcattcgcagagcgcagaccagcgcaaggcactgctggaaaaagccgccgagcagcgctacaccgagttcgatagtggcaagggcgtcttcctcgattatctgccggccacgctgccgcccgatgcagacccggtcacccgtgaattctgggatttctaccgcaccacgcgcggcgccgcccttcccaagggctatacgctggaacagacccagaaccgcatgctgaccagcgaagtgcgcttcatgaatttctatccgttcaacgacatcgaaacgatctcgccacgtcccatgttgttcatcgccggcagcgaagcgcactctcgtgaattcagcgaagacgcctaccgactggcgggtcaacccaaggagttgtatatcgtgccgggagccggccacgtggatctgtacgaccgcaccgatctgattccgtttgcgaagctgggcagcttcttcaggcagaacctggcagaacgttga

SEQ ID NO: 511347 - DNA, 1200 bp, Stenotrophomonas maltophilia
atgagtgcttcgatcgcatccaacgcaacggcggaaggcactcctgcgcgtgcgcattggggcggtgtgctggcgatgacgctatgcgtgttcgctctcatcgcttcggagttcatgccggtcagcctgctcacgctcatggccgccgatctgcgcgtaagcgaaggcatggccggctacggcatcgccatctcaggtgtgttcgcggtgctgaccagcctgtcgatcagccgcgtggcggctcgcatggaccgcaggacactactgctgtcgttgacctcgctgatggcagtctccggcgcggtggtggcatgggccaacggctatgcgatgtacatggcgggccgcgcgctgatcggcatcgtcatcggtggcttctggtcgatgtccgccgccaccgccatgcgactggtacctgcggcacaggtgccacgcgcactggcgatcttcaacgggggcaatgcattggcaactgtgattgccgcgccgctggggagctggctgggcggtgtgatcggttggcggggtgccttcctgtgcctgttgcccatagcggccgtcgcattggtgtggcaatggctgagcctgccccgcctgccggcatcgcccgtcgccgcgaccgacagtgtgctgggcttgctcaggcaccgcgtcgtgctcctcgggatgggggcctgcggcgcattcttcatggggcagttcgcactgttcacttatatccggccgttcctggaagccgtgacccatgctggcagcaccgcgttgccattgatgctgcttgccattggcgcgagcggcgttgtcgggacgctcgtcattggtgtctttcttgcgcgtggtctgtacaggaccctgatcgcaatccccgtactgatggcagctgtggctgtagcgctggtgccactgggcgcatacgcatggccggtggtgacgctcctcgccatctggggcttcctcgccaccgcggcgccagtgggctggtggagctgggtcgcgcggaccttcaccggcaatgccgaagccggtggcggattgatggtggcggtagtgcagtgctcgatcgcgctgggctccaccctggggggactgttgttcgacagtctcggctatgccagcaacttcatggccagcgccggcgtcctgctggtcgccgcactgttggcttggcggacggcaaaacgggctgctctgctcctgtag

SEQ ID NO: 511348 - DNA, 471 bp, Stenotrophomonas maltophilia
atgagggcggcctatcctctgttgttggcaacggtgcttggcctgaccggatgcctgtcaggcaccacgtctggtgcgaaggccggagcggaccatccgccgcttgccggtgtggacgttcggctgagcgcggttgatgtggccgggaaggacacaggggtgcagtggcaggacgagtggttgacgcttcgggaacccccgatcgcgagcagcgcagacatcgccgatgtgcgcccggtaccggatgattacggcatgacggcgttgcagatccgctatcggcccgaagcgcaccagcgcatacacgatggcacggcggccctggtaggtcagcgcatcgcgatcagtgtggatggtcgtgtggtgacggtggcgacggtacagggaccgttttctgaatcgatgagtctgagcgggttgccgggcaaggacgaagcgcaggagctggccaggcacatcacgggcgaatga

SEQ ID NO: 511349 - DNA, 645 bp, Stenotrophomonas maltophilia
atgaaggcaggcccggtacagactctgaacttggatcctcctatgccatctcatttcacaccatggaacaagggaaagctggtcggcccaaaggcacctctcaaactcagtgaaatctggtcgattagggtgcgcctacaacttaccggtcgcgttcgtgatctggcgatgttcaacctagcgatcgactcaaaactgagagggtgtgatctggtcagcctacggctgcgagatgtatctcatggcttgaccattgccacgagggccaccgtgctgcagcgtaagacaggcagaccagttcaattcgagatgacggagttgaacaggtccgccctcgccgaatggtctcatctagctcagctagggctagcatcctacctgttccctggacagggtgatggtcacctctccacacgccagtacgcgcgcattgtcgcgacatgggtcgcagctatcggactcaatcgccacagctacggaactcacagcatgcgtaggaccaaggcgtcactgatctatcgccgaacaaagaacctgcgcgcagttcagatactccttggccacaccaagcttgagagcacagtgagatatctagggatcgaggtggaggatgcattagagatggcggagcagaccgaagcctga

SEQ ID NO: 511350 - DNA, 1263 bp, Stenotrophomonas maltophilia
atgagttcacgttccgaagcacaaagctgggtgctggatatcgccctggcccaaggcgggttcgacgccctgcatcccgaagcgaaggcaaccctggtccagctgggccacgaccctgccgacttcgaccgggtgttttccctggtgaagagcggcgccatgctgcccaaggcctgggccacggtggccggcgagatcgagcgcaaggcagcgcattacgaccgtgatggccacgcgcagacggcggccgacctgtacgtgcgtgccgcggtcatgtggggtcgcgcgcagtactccatcttcgacgccgcagatccgcgcaaacacgctttccgcgagcatgcaaaccatgccgtcgcccgcatcggcgcgctgcgccagggtcgcgtgcgccgcgtcgagattccgttcgagggcaagacgctgtacgccctgctgcacctgcccgtcggcccggtccaaggcgcgtctgcagtcatccttggcccggggatggacatgatcaaagaggactacatctacgccgccgatcgctactacacctcccgtggcgtggtcgcgctgtccatcgaaggaccgggccaaggtgagacccgcgccaatggcctggtggtgacgctggacaactatgagcgcgccatcagtgcctacatcgactacctggcctcgctgccggaagtggacgcagacagcatcgcgatgtttggcatcagcatgagcggctactggggtcatcgcgccgccacctgcgagcctcgcttgaaggcattggccagcttcgagggtgttaccggcgacttcgccacgatcttcgagcgggcccagcccaccttcaagaccaactacatgtacatgtccggccataccgacgcggccacgttcgaccgcgaactggccgaacgcatgccgctggccaaccaggtcgccgggatccactgcccggtgctggtgggcatcggcgagttcgacgaactgaccccgctggtcgacgcgatcgccaacttcgagcgcatccgcgcaccgaaggagctgcgcgtatacgaaaacgagtttcatccgctgggtggcgtcgccgctgaaatcttccgctatggcgcggaatggctggagcgcgtgctggcaggtgagctgagcgaagccggtcgcgatgtacgtcactatgtgcagcgtgacggcaccatcagcgatggaagcgccgacccacgctggtggctggggcaggtgcctccggccattgctcaggtccgcaagtcggaagactga

SEQ ID NO: 511351 - DNA, 456 bp, Stenotrophomonas maltophilia
atggttcatgctgtcccgcctgccgaacgcccggcgtttgccgccctggcccgtgcggcctaccagctcagcgcggccgacgcgcgcctgcgcggccgtgctacgcgagaggccggtgcgctgtcgatgacgcacgcccgggttctgaaactgctggacgagcgcgggcccttgtcggtgacggcgttggcggagggcactgaaacctccaccgcggccgtgacccagctgctgaagggactggtggcggccgggtacgtggacaagcaggaggcggccgacgaccgccgcaaggtgcgggtgaagctgacgcccgccggtcgagcgcggcaccggcagcgtgaagcgagcatccagcagtggatgcagcaggcgctggcgcagtactccgacgccgatctgtcggcggccacgcagatcctgggccagctgggcgcgctctacgacgcgctgtag

SEQ ID NO: 511352 - DNA, 987 bp, Stenotrophomonas maltophilia
atgagttcttccaccctcttcctgaccggaggaagcggctacgtgggccgcaatctgattcgccgcctgtgtgcagacggccaccacgtacgtgcgctggtgcgcagcccccacgccgcggcagttgtagaggcgctgggcgcccaaccagtacagggtgatctgctcgacccgggcatcgcggtggcgatgcaaggctgcacggcgctgatccacgcagccgccgacaccgaccaccgcaatgcctcgcccagccagtggcagaccaatgtggagggcacccgcaacgtgctgaccgctgcccgtgctgcgggtgtgccggtagcggtcgtgctgagcagcgaatcggcgctgacccgcggtgcgcccctgcatcaggcgcgcgaagaccatccgtacccggcgcgcgccgccggcgtctatggcgccagcaaggccgaagcggaacgggtggcgctggcgctgtccacgccacagttcgcggtgaaggtgctgcggccgcgcttcgtctggggccgcgacaacaccaccgcgatgccgtacctgctgcaggccgtgcgcagtgggcgctttgcgtggattgatggcgggcattacctcacctcggccacgcacgtggacaatctggccgaagcggtcagctgcgcgctgagccgtggcgctggcgcacgcatctaccacgtgtgcgatggtgcgccggtgccattccggcgcctgatcggtgcccagctgcaggcctacggcgtacagccgcccgacaaacaggtgccccgcgcgttgctgcgcgtgttcatcggattggacgacctgttccgcaggctgcgactgcctctgcgtgcgccgatgacccgccaggaatttgcgtcctctgccgtggaagtgacactggacgacagccgtgcccgcagcgaactgggctaccggccggtgatcacgctggacgccgggatcgcgatgctcaagcgccacgtggccgagcaaggctga

SEQ ID NO: 511353 - DNA, 972 bp, Stenotrophomonas maltophilia
atgctgcgcccacggttccgcctgcacttgcccaatcgcgtacgatccttgcccgatttccctgccatcgaagatcaccaggccacgttgcgtgcattggcactgcaggcacaggcggtgctgcacgaacgcagtgcagatgcatcgccgctgctggaacttctgccgggtgcctggctggcgcgtacagggtcgacgcgcgtgccggccccggctctgtaccgccccgcggtgggagcggtgctgcagggggtcaagcaggtatgggtggatgatgcggtactggagtaccgcgccggcaatgcactgcttacccgccagccggttcccgcgcgcgggacggtgtcccgtggcgaccaccgcacgccgttcctggggctggtggtcgagctggataccggcgtcctgcggcagttgcttggccagttgggcagcccacctgcaggcgaggccccgcatcccgcgccgttcagtgtggttgcactggattggccggtactgaactgtctgcagcgtctactgtcgctggccctggatacgcccgacgcccagcggctgctgtggcccggcctgcagcacgagctgctgttccgtctgttgcagggagaagcagggccggcgctgctggcgatggcccagccctcccccttggcacgccgcatggcgcgcgccattggccacctgcaacgcagcttcaggcaaccacttgatgcagcggcgctggccagccgtgcaggcatgggcagcgcgctgttctatcgtcatttccgtgcagcaacgggtctgtcaccgctgcagtaccagaagcagctgcgcctgatcgaggcacgccgcctgctgcagcggggcggtaccagcatctccgccaccgcgttcgccgtgggctatgagagcccttcccagttcagccgcgagttcagccggctgttcggccacgcaccgcgcgatgctctgccgcctaccgcccggtga

SEQ ID NO: 511354 - DNA, 771 bp, Stenotrophomonas maltophilia
atggacaacgtacacacaccccgcacgatcgccctggttaccggcggcagccgtggcattggccgcagcattgccctccagttggccaggcagggcagcgatgtgatgatcacttaccagcatcagcaggtgcaggccgccgagaccctgcgccagattgaagcctgtggcgtgcgcgccgcgatgttgccgctggatctggatgccatcggatcgctggagaccttcgcggaggcggtgcgtgcacagctgcagcgctgggatgtctcccactttcaccagttggtgaacaatgcagggctgcacgcaccctcagcgtttggtgagatccgaggcgatgacattgatctgctgtaccgcgtgcacttcaaggcgccactgctgctgacccagctattggcgccgcagctggccgatggcggcgccatcatcaacatttccaccagcctgacccggcacgtggctgcgggcagcctggcgtacgcggccatgaagagcgcgctggaaacggcgacccgctatctcgcgctggagctgggaacgaggggcatcgcggtgaactccgtagcccctggcgccaccgagaccgacttctttggtggtgctgtgcgcgacgatgccgctgtgaaccagtacgtggcacagcacacggcgatggggcgtaccggtcgccccgacgacatcggcaaggctgtggcaatggtgctggcgggaagtggtcgttggattactggccagcgcattgaggcatcggggggaatgctcctgtag

SEQ ID NO: 511355 - DNA, 186 bp, Stenotrophomonas maltophilia
atgctcggcttgatttatcgcaacctgtccgaagagcagccgaccatggctcggctctacagaaagcagaaaacccgcgctgtcgccagcgcgggtttttgcttttgcattggcacgccttacttcaatgccgcctgcacgaacggcggggtcaccagcacgccggtgtgcagcgcggcggtgtag

SEQ ID NO: 511356 - DNA, 540 bp, Stenotrophomonas maltophilia
atgcaaccgcgcaagaccgacctcgcccgaaccgcgctgcaggcccaccgcgcgccgctggacatgcgccagcgccggctgctgatcctgtgcgacggccagcgcagcatcgccgaactgaccggcctgctcggcccggaggcgccggcgatggtcatccagctggtgcaggccggctacctgagcaccggcccggcagcggcggccccctcccctccagccgttgccgggccggccggggccgcattggcgcaggcgccggcagcgcctgccgccacgccggtcgaacgccgccgctcgctggtggccgcgcgaatctacatgctggggatcctggagatgcaacgtcacccgcaggcggcggcattgttccgcgacctgcagcaggcacgcgccgaggaagacgtgctgcagcggctgcaatcggcgatgcagatgctgcccgggctgacctcggagggctattgccagcgcgtgcggcaacgcctgctggaggcgctgccgctggagcattgcgacgcgttcgttgaggtcgcttga

SEQ ID NO: 511357 - DNA, 720 bp, Stenotrophomonas maltophilia
atgggcggcttgccacggactggcacgccgctgccctgcactgcactgacgaacgcacaggcgcgttccattgccgaggcgttccgcccggtacgggtctggggcaaccgcagcgattacttctatacccgcagcaagctcggcagcgatcccctgtacggcggcgcgctgcagcagcttcccgatgacgggcatccggtattggacctgggctgcgggctggggttgtttgcccacgtgctgcgccagcgcggcgacacccggcgctacctcggtgtggacctggatgccgccaagatcgcacgcgcccggcgtgctgccacccagcttgacgatgtgcacttcgattgtctggacctgcaggcgccgctgccggcccgggccgggcacgtattgctgctggatgtgctgcaatacctggaagcgggtgcgcagcaggcgctgctgcgcgccgccagtgcgcgtgttgcccgcggtgggcgcctgctgctgcgtacgcccctcgccaccggcgatggccgcgaccgcaccacgcgggtggccgaccggctggcctggctggtcggctggatggacacgcgaccctgccactaccccgatccgaacgtgctgcaggcgacgctgagcgaagccggattgcaggtgacggcaccgcgccctctgcatggacgcacgccgttcaacagctggttgctggtggccgaacgccccgcgttgtag

SEQ ID NO: 511358 - DNA, 699 bp, Stenotrophomonas maltophilia
atgcgtgcacttctgaccctgctggcgatgctgctggcgttgcctgccgcggcattggacctgttgccgaccacactgcagctgcccgccgaaggggggcatggcgagctgtggctgtacaaccccggccccggccactggcagggagaagtacggatcctgacctgggaacagcaggccgacgcggaggcgctgcggcccagcgaccagatcttggccagccccacccggctcgacatcccgcccggcatccgacagcgcatctggttgctgccgcgccagcctgcccccgttgccaccgaacgggcttaccgggtcgtgctcgcccccggcgcccccggcctggcgcgctactcgctgccactgttccgggggaattccgggccactggcacagccacgactgcatgccggaatcgagccccatccgtcgcatccatcgttgcgattgagcaataccggtaccctgcacgcccgcctgaacgatctcgcctacatcaccagcgacggccagcgcaccctgctgctgccgggtctggccgggtatctgctggccggccatgagcgccgctgggccctgcccgcccgcgctgatggctacgccggcggccatttccaggcccggctgcaggacggccgcgtggtcgatctgaccgcaccggacccggccattgcagcgagcgctcccagcgggctataa

SEQ ID NO: 511359 - DNA, 219 bp, Stenotrophomonas maltophilia
atgctggtcgccagtacgcccgcgtgggccgatcccagcagcaatgccctgcagatccggctgattgtggtcgagggctgcagcggtgatgccggcagcaaccactgccccgcaccccaccagcgcagcgacacaccgcaacttccgccccaggtccgcgagctcgcgcctcccgttgacaacgaagacacgacggccgccgtgaccgtcatctactga

SEQ ID NO: 511360 - DNA, 498 bp, Stenotrophomonas maltophilia
atgcttatccggcaactcagcgctgacgacgccgacattctctggcaggcacggttgcaggcgcttcacgagtcgcccgctgcgttcctgtccacgctggccgaggcgcagaatgactcggcggacgtgatgcgcgcccagcttgcggatcctggtacgcgctacttcggcacgttcgttgacggcatgttggtgggtttcctgcgttacgtgcgcccggtgcggatgtcgcgacggcatacggcggaagtgcacagtgtccacgtggatgctggccatcgtggccagggtatcgcccgcaagctttttctcgccgcgttcgcggctgcgcgcgcggaaggcattgaatcgctcaccctcacggtgctggcggacaacgctgccgcgcgcgggctgtacgaatcgctgggcttcagtgcattcggcacggagccgcgggcagtcaaacgcgcgggctgctacacggatatcgtctcgtactcgatcgccctgcagtga

SEQ ID NO: 511361 - DNA, 549 bp, Stenotrophomonas maltophilia
atgggcctggacatatattcattcgacgaagacagggcaatgcgcgttcaggtatgccgctggcaaggcgtagcgccggatcaccgtcagcaggcggtggatctgctccgccaggcgttcccggacatgcagggcgagggttacgccattccggtgccggtcgccctggtcctggcgttgcaaggcgatcacgtggtcgctcaccttgcactgtacgaacgcaacgtattgctggacggcgagccggaacgcataggcttgatcggcggggtggtggtgcgtgctgatgttcgcaggaggggggtcgcgtcacgcttgatcgcggctgcgcacgccgaactgcgccagcgcgggatcgatttcgccgtcttgttcgccctggatcagcggcactacgcctcggccggatattcaccgatgcagaacgcgacctgcttcatcgaagacggtcacgcgcgccgtttcgtctatcgaggcggcatggtggccgcgctgggagagcgcggctggaccaccgccgtgctcgatctgcagggcgaaacggtctag

SEQ ID NO: 511362 - DNA, 330 bp, Stenotrophomonas maltophilia
atgaatacgacctcatcagcgcgtggctggccgtggggtctggtcgcgctggggctgtccgtgcttgcctgggcatcggtgctgatgggtgtgctggcctttgctgcaagcttcggctcgccgggtgacggcaaccatggcatacaggccacgcagtactggattctggccgcactggttacgctgggtctgtctttcgtcggcagcctgatggcaatggtgctggcctggcgacgcagccgtggtcccgtcgcggcggcgttggccggtgtgttgctggtgatgctggtgtcgctggccctgatcgtgatcgggtccagctggggctga

SEQ ID NO: 511363 - DNA, 1218 bp, Stenotrophomonas maltophilia
atggacagcgacaacagcctcgaccgggatgcccgcctcggcagggatcacgtcgccacggtggcactgacgctgctgctggggggcagcgtgatcgctctggtcggccagcacaccgccgcgcaggcgggaccggccatcgtgctgagcctgttgttggccgcgctgggcaccttgcccctgctgtgctgtctgcacgtcctgaacccgctactgcccgttgatggcctgctgggtctgctgcgcgccggatcgggcagggcatctgccggcctgctgggtggcatgttgctgctggagctggtggcgaccagtgccggcgcggcgcaatccctggccagtcatctgcgcgtgttcctgctccgctgcggcatcgatgccggcaacgccatgccggatcagctggcggcggtcttcggcctgcttctgcttggcgtggtcgggttgctgccgccacgtcgtgtggtattggctgcctgtgcgttgctcacgatgaagatcggcatcggcctgctcctgctggccctggcggcgcgttacgtgcactacgcatattggattccatggttgccggaagcaacggcgccttatcgtttcggactgggtggagtgctggcggcgagcgtaccgctgctcggtgtgttcgccagcgttggccttgcgctgggatttcccggcatgggccggcaggagagggcacggaccatgccgctgctggcagggatgctgctgctggccatgctgctgcttatcgtgctggccgcgttgcaggcaggactggtggagttccctgcattggccagtacgcgaccgttgtcggtggcgctgcagcagcacccgcagctgcactggatgatgccgttgctgccactggccggtgcagcagggttggcggcgctgctgctggtagtgatgagggttgccgcgcgcctggcggcgcagctgtggcctgcggccagccatgcagtggcaggattgcgggcgcgactggcgtggtgcgtggtggtggtgtcggcggcggtgctggcgctgctgctgcccgtcggtacgctgccggtgctgcctggcccggcaaccttgctggtgatggcggccttgtgcctgaccgtgcttcgcgtgcaggcgccaccctcacgcgtcttgccggtgcttgcgcccgtggctgcggcactgtgcgtgttggccgcagtggggcgcatgcgcgtctggccgggatga

SEQ ID NO: 511364 - DNA, 1137 bp, Stenotrophomonas maltophilia
atgaaaaacatgcgttggttgggcgtaggcgtactggtcgtggtgttggcagcgtgcggcaagcaggccgccgagccggcggtggccatcccggtgctggtggtgcatcccaccacgcaggatggacaggccgcggccgcctaccccggcgaggtgcgtgcccgccaggaaagcccactgtcgttccgggttggcggcaacctggtcaggcgcctcgtcgacgctggcgagcgggtgaagaagggccagctgctggccgagctggatgcggccgactacgcctcgcaggcggcggcgtcgcaggcgcagctggcagcggcggaagcagacctggtgcgcgcgcgcgatgaccagaagcgctatgccaagctggcggaagaccagctggtgagccgctcggcactggaccagcagacggcggcattcaaggctgcacagggccaggccaacgccgcccgggccaacctcgccgtggcccgcaaccaggccgagtacgcgcaactgcgcgcacccgccgatggcgtgatcgccagccgccaggccgaagccgggcaggtcgtgagcgcggggcagacggtgttcaccctggccgccgatggtggccgtgaggtgctgatcgcgctgccggaaagcagcatccgcgactacaaggtcggccagtcggtgcaggtggaactgtggaaccgtccgggccagctgctgccgggcaccctgcgcgaaatcgccccggccgccgatgcacaggcgcgcacctatgccacgcgcgtgagcctggcgccggaagcactgagcgaagtggaactgggccagagtgcgcgggtgtttgccaccgccgggcgcagtggtgcgttgcagctgccgctggcggccgtgctgcgcggcagtgatggcaaggccagcgtgtgggtggtcaatccgtccaacggtgcattgaaggcaacgccggtgcaggtgggtgcctacggcgcgcaggccgtgccggtcgtgtccggcgtgggcgcgacggactgggtggtcgctgccggcggccatctgctgcgcgaaggccaggtggtgacgccggtcgatcgccagaaccgcccggtgctggcaccgtcggccgccaagccggcgccggccgcaggcaaggggcactga

SEQ ID NO: 511365 - DNA, 288 bp, Stenotrophomonas maltophilia
atgctcgactcactccatcatcgtgcgaagagcagccgagcatggctcggctctacagaaagcagatcctgcgagcagatcagtccacgccacgcgtggatgcatgcttcagtgccgaccaaggtcggcacctgccaggggccgaagccgcagaacccggggcatcacgccccggattcatccggcttgacccggaaccacgccgcgtacagcgccggcaggaacaccagggtcaacaccgtgcccacgatcaggccgcccatgatcgagatcgccatcgagccatag

SEQ ID NO: 511366 - DNA, 1008 bp, Stenotrophomonas maltophilia
atgtttttccgcacgacctgcgctttggcgctgctgctgactgcctgcagcgggagcgcccgtgcgcagaccgcagagacagatgcagtgctgttccagaatgatctgcgcgaggtgcttgaatgcagcgcaggcccggatcttcagcagcgcgtcgtcagccgcctgcgcgcggcacgctataccgacgtcgccgaacgcactgcggaactgcgcgactggcgtttcgaggagaaaggggcggatgacgatcaccggatgactgtcatcacactgccacagccgatgacggtccacggtattgatgcgcggcaggtcgttgccgaccccttcggcttctcgattgcgcttgacggtgcacagcgcgagcgcgtcatcgctgcctatggcctgcacctgcagtcgagcacgctgcgtgagccgctcgagctatggtcggcacccactgcgtcggtcattgtgcgcagtgcgggtgatggccatcgactggggtgttcaccccagggaacgggcaaggacgccgcggcacgtccggcaatggctgtccaggacctgcaggaggccagcgagtgccacgccgacgaggctacgatgggccggctgcaggccttctggcagggcatttccgagcgctcgcagctggaatggccacaggaggtacgatcagtcagcgaagtgagctacaccgtgggtgatgccgagctgcctctgctggtgattgggttgcagtcgcccatccagatgcatggcgtggcgacgcgtacgatcacgctggccttcggcggcttctttggtgccgacctcggtgacgttgcggtggcgcccgtgcttgcccaggccggcatgggcacctcgcaccaggtaggcaaagctacctggcagcgcgcattgccgccgatggcgttcaaggggggcgactggatcccgcagcacattgtcatgcttaccgacgaaaatcacgtcatcgccggttgcgccagcgactacgtgcgcagccgtccgcgctga

SEQ ID NO: 511367 - DNA, 1587 bp, Stenotrophomonas maltophilia
gtgaccaccatcgaacgaattaccaccccgcgcatccgcatcttcgacaccaccctgcgtgacggcgagcagtcccccggctgcagcatgagcccgccgcagaagctggtgatggcgcgtgcgctggacgaactgggcgtggacatcatcgagaccggcttcccggccagctcgcagtccgaccgcgaggcgatggcactgatcggccgcgaactgcgccgcccgagcctgagcctggcggtgctgtcgcgctgcctgcaggccgatatcgaaacctcggcacgtgcattggaagcggccgccaacccgcgcctgcacgtgttcctgtccaccagcccgctgcaccgtgagcacaagctgcggatgacccgcgagcaggtgctggaatcggtacgcaagcatgtatcgctggcacgctcgtacatcgacgatgtcgaattctcggccgaggatgccacccgcaccgagctggactacctgatcgaagtctcgcgcgtggccattgccgccggcgccaccaccatcaacctgcccgacaccgtcggcttcaccacgccggaagaaatccgcgcgatgttccagcaggtcatcgccggcgtcgccgacgttccgaacgccgccaatgtgatcttcagcgcgcactgccacaacgacctgggcctggccgtggccaattcgctggccgccatcgaaggcggcgcgcgccaggtcgagtgcaccgtcaacggcatcggcgagcgcgccggcaactgttcgctggaagagatcgcgatggtgctgaaggtgcgccaggccttctacgagcaggacagttcgatcaacaccccgcgcatcgtcggtacctcgcagctgctgcagcgcctggtcggcatgccggtacagcgcaacaaggccatcgtcggcgccaatgcgttcgcccacgaatcgggcatccaccagcacggcatgctgcgccaccgtggcacctacgagatcatgcgtccggaagacgtgggctgggaagactcgcagatggtgctgggccgccacagtggccgcgctgccgtcgaagcacgcctgcgtgcactgggcttctggctggacgaagacgaactgaagctggtgttcgagcagttcaagggcctgtgcgaacagcagcgcgtggtcaccgatgccgacctgcagacgctgatgcagggcggctccaatgcgcagggttatcgactggcctcgatgaccatcagcgatgtcggcagccgcgccaacgcgctggtggaactgtccgacccggacggcaaccgcgtggccgagaccgcgcagggtgatggcccggtcgatgcgctgttcggcgcgctgtcggccgccaccggcgtgcagctgatgctggacagctaccacgtgcacagcgtcggcatcggtgccgatgcgcgcggcgaagccaacctgagcgtgcgccatgaaggggtggagtacgacggcaccggcaccagcaaggacatcatcgaagcctccgcactggcctggctggatgttgccaaccgcctgctgcgccagcgccaggctaccgcccacagcagcaccgacgttcccacccctgccaccgcctga

SEQ ID NO: 511368 - DNA, 774 bp, Stenotrophomonas maltophilia
atgcgcaattcgctgcttgaaccctacgaagacctgccacgcgatgtcgtggtcacctcgaacgactacgcagccgagttcacgtttccccgccatgcccatcggcgtgggcagttcgcgttcgctgcgcgcggcaccatcagtgtggccacgccgcaggggcggtggctggttcccccacggcgcgcctgctgggtgcctgcaggcctgacgcatgagatgaccatgcgcgggccagtgacgatgctcaacgcctttctctccgccgaggtggccgacgcagtggcgctgccgccgcactgccgggtgtacgcggtctctgcgctattgcagcagctgctggaggcggcggtggacctgcccccgctgtacgacgaagacgggcgcgcaggcaaactgatgcagctgctggtggcggaaatcgcatcgatgccgacactttccctgcatgcaccgctgcccgccgatgcacgtctcgcacgtgtctgccgcgcattgctcgacagtccttcactggcagtccgcctcgatgacgttgctgccgaagcaggcatgagccggcgcacgttcacgcgcctgttccgcgccgataccggggtgggttttgccgagtggcggcagcaggtgtgcctgctggtagccattgagcggctgggagagggccaggcggtgacgcgtgtggcattggaactgggctatgcaagcccgagcgcgttttctgctgccttccggcgtgtactgggatgttcgccgagccggtacgcagaggcgtag

SEQ ID NO: 511369 - DNA, 768 bp, Stenotrophomonas maltophilia
atgaccaatactttccatcgcgtgggacacggaccccatgctgtcctggtgctgcacggctggttcggcgacgcgcatgcgttcgagcccatcgagccatggctgtcgcgcgaggacttcagctacatcttcatggactgtcgtggctacggcggcatgcgcgatgcacggggggcctataccatcggcgagattgcatccgatgcattggatctgatggccgccctgggccacgagcgcttcagcgtggcgggtcattcgatgggcggcatggccattgaacttatggcggtgcttgcgccggaccgggtacacggcatggtggccattgcgccggtgccatgcggcggcattgcctacgacgccgcgacgcgaagcctgcttgaaacggcagccggggacgtaggcgtgcgtcggaccatcatcgatcgcagtaccggcgggcggctgccagcgcaatggctcgactggaaggccgcgtactcggcggcacacgcttcacctgcagcatttgctgcctatcttccagcatgggcggataccgatttcagcaatgagatcgtcggcaagcatcggttgaaggtgctggtgggtgcgcacgatcccaccttcaaccgcgcactgatggagcgcacctatctgcaccgctatcggcaggtcacgatggaggtcctgaaggatgccgggcattacccgatgaacgaaacgccgctggccctggtggcggccatggaatcgttcctgaaagaggcgtcggttccgggatga

SEQ ID NO: 511370 - DNA, 507 bp, Stenotrophomonas maltophilia
atgaactccatcctgaagaaggccgcgctcgctgcagcgctggccaccgtttcgctgtcggcgaatgctgccgaatcccacatcaaggtctacaccaacgtcgacctgtcgctggccctgctgaaggctgatggcagcccgctgcccgacatgatggaaatgacgcatatcccgggtgatggcctggccgctgtcagagagcgcgttcgtgtgttcaccaacgacgagaccaaggacattgaagtcaatgtgatgcatgacccgatgctcgtcatcaagaccggtactgcaccagcggtcccgttgaccgtcagcctcaacaagacaccgttgactgtggcgccaaaggatttcctggcctcggatatcttcgacggtgcgctgccgggcgcctcgttcatcatggacctggatatcgcccaggccaccaaggcgccgctgaccgtcgccggtgcctacgagggcatcgtcagcatcgccatgaagcagaagaccgcttcgccgtaa

SEQ ID NO: 511371 - DNA, 2724 bp, Stenotrophomonas maltophilia
atgaaagttcctgtaccggccgtcactcggctggcggtcgcgctcgccttgtcgttggccatgcccctggtcgcggcacgcggcgttccgcccggcttcgaggatctggttgaaggccagatcgaacaactcgatgtgcgcctgttcgctcgctcggccgggctttcgccggtgcgcgtgactttggaatacgtgcagctggaagaccccgcgcgcgtgctgcaggcgctggatctttcccccgaggcgcaggccgcgttgctgcccgcgctgtcgcagcccttgccgcgcaacagccatcttgcctgccgctatggcggcggcagtgccggctgcggctatctcgatccccccgaggaccctcattccgtgcgtgccctgtacgacgaaggcgaaggcgcggtgcgcctgttcgtcgcccgccagtggatcgcggccgagcccgccgccgaccgcttccatcaggtcagcagcaatgccgagaacgcattcctgcaccagcagaccctcaatttcagcggtggccgcggctaccaggcgctgaccgcccaaggcgcaggcgcgctgggcgtgttgcagcgcggccacatcgccgtggactggaacttcaacagccagcagtaccgtggtggccgccgccgcgatgagttccagttcgacaacgcctattaccgccatgacctgggccagcagcattatctgcaggccgggcgcatggaccgccgcaacctgtccagcccgcagggcggcaccttcagtttcagcatgctgccgatggatcgcttcgccggcctgcgcataggcaccacccaagcctacgtggatgccgatgccgccgtgcaggcactgccactgacggtgctgctggcgcgcgatgcacgggtggacgccttcgatggcgagcgcctgctgcagaccttctacctgccggccggcatcaaccagctcgacacccgccggttcccgttcggcaactacaccgtcaccctgcgcgtctacgaagatggccagctggtgcgcagcgaggacgcgccgttcgacaagggcggcgactggaccaacagcagcgtgcagtggttcctgcagggtggccgccgcaacgagcgccgcagcgaccgcttcgacggcgagatggccgccatggccggcctgcgcgtgccactgggccgcaccacggcggtcaccgccggcgtcgccgacctcggcggcttcagctatggcgagctgcgtgtggacctgcgccatgccttcgccacccaggacatccgtgccaccttcagtggcctgcagggcagcgacggcagcagcggccagcagcaccagctctcctatcgccgccacgcctcgtggaatctctatcagcagcgggtacgcggcaaggcctgtgtgttcgaggatgatgcgcgcgaccgcttgggctgcgccgattcgctgagcgcctctgtcgcgctgccggttgccggtggcaacgcctacatggcctatacccgccgccagacctggagccgtggctcgctgctgccgggcgacatcgacgatccgatggccgggctcgacccgctgctgcccccgtggcagcagcgctacacgcgcgagccgcagctcagccgcacctggcaggccagctacagccgcgtgcagcgctggcagcagttcagtgtctccacccggctcggcctgtggcagcaggatacgcgcagcagcctgcgcgacggccgcgaccgcggtatctacctcaacgtgagcctgacccgcctgcaacgcggcgagcgcggcagttcgcaacgccgctatggcatcgacttccggcagccgcagcacctgcggccggacgtcaactacagcgccggccagaccgtccgccaggaaatggatacgcagtaccgcgaggcctcgctggacctgcgcggcaacaacaacgaccgctacagtgccgcgctcagtgcccagctgcagaacagcatcggccacaccggcgccaccctggcgcactaccagcagcgcggtggcaacgagatggcctacagcgccacgcacagctccgggctggccctgggccgccgcggcttctactggggcggcggcctgggcgccgacgccggcctggccgtacaggtggatgacaccgacgacctggaactgaccggggtggccgccgagctgcaggtgggcggattgcgccggcagcggctggcgctgggcgagcgccgcctgctgccgctgccggcctaccagacccaccgcgccgaagtgcaggacgccagtgcgctgaccagcgatgccgccatccgcgtgaccggggtgggcggcgcacggccattgttcctctctcccggccgactggtgcagatgccggtaccgatcgaggtgacctacaccttcatcggcagcgcccgcgacattgccggcgcgccactgcgtggcgcccgcatcctcaacgcgccggtgcccggtaccggcgccaacggcggcttcgtcgccgatttcccgcgccgcgaacgcaccctgtacctgctgcaggacgacaacctgctgcagtgcccgctggaggttcgcgagcgccgcaatgtcgtgatgttggtgggccaggtggagtgcgcgccattgagcgtggcccagctgcccgccgatatccgccagcaggcccgggtcacccgcctgttgcaggaacaggcgctgatcgccgccgtgccgcagaccgccgccgctggaggtacgccatga

SEQ ID NO: 511372 - DNA, 1131 bp, Stenotrophomonas maltophilia
atgaaccagcgtggcgtatgggcggtgatgctggtgctggcgttgctgctggtgatgccgaaggcgtgggggcagcggccgccggaaacccacccggtgagtgccacgcagaacatcgtgatgacgtgggatcgttcggcgatgcctggggacgtgtcgctctggctgcccgaattcgttctcggttacagcgtggataggtcacttaaatacggacaacttcatctgacatgcgcgtcgtccagcgactccgccacgggtgcgtgccctacaagcggaataaccgccattggcgatggcgcagggctcatctctgttcaagcgcgggaacggcgctcgggcatgaccacgaacataagcgtgcgcgggtggattaatcgcgcgatggacacgcgcgtatgtggagcgtactggctttcacccattcgtccgccttggatagcagtgggagatgcctgcgggggcgaccccacagttggaacacgcgctggtttggtattgccggagaacgagctttctcggctggtggctggtcactgggacgccgttttggtgatgaccttgcatgacgaacctgatggaggttcactcgcgacctatcgctttaacttcgacttcaccatcactgatcgaaacgccgtctcgatctacttccccgcatttcacaacgttacgccgctggtacagctcaacgctgcctacgaccccatcgggcagaccgtgggtggacgcacggtgctggagatgtgcctgtacgacggcctcggttcgcaggcgcagtatctcggcgtgacggtccgcgatcgtggcgggcatccgcccggtcccagcggctattcgctctggcacaccgatggcggtaccgacgacacacggcgcctggactacgccgtcagcctcgcccatagcggcgcgacggtgcggatgcccaacggcgtggaacagcaactgcacgccatcgacagcgcccagctgcgcctggtgatcctgccgggcatgagccagccggtgttctgtgtgcccacgccgatcaccttcgatattccccgcgttcccatttccacccagcaggccggcacttacttcggcgagctgcaggtggagctgcgtgtgcccaccaccaccccctga

SEQ ID NO: 511373 - DNA, 696 bp, Stenotrophomonas maltophilia
atgaaacgactcgccgcctgcctcattccgttgacgctgctgctggcgttgccagcccaggccaatctcaccgtgcatccgatgcgcgcctcggtggatggcaagcgcagcacccagatgcgcatctattcacagtccacccaaccgcagtacatccaggcctcgctgcggcggatcgtagatcctgccagcgaccaggagcacgaggtggaggtcgagccgggcgaggcggccatcgccatcacacccgggaaattcgccctcgcgggcggcggcaaccggttgatccggttgattccgctgcagcccgtcgaggccgagacagcctaccgcgtctacttcgaaggggtgcgtgggcccgaggaaaccagcatcgagggcggtgacggtgcgcaggccagtatcggtgtgaatctggtctggggtgcgctggtcaatgtgctgccggccgaaggcaccgtgcagccgcgggtgcagggcgatgcgctgtacaacgacggcaccctgcgcctgggcatcaccagcatcgccgattgcgagggcagccgctgcaccgctcatgacgtatcgcacagcctgtaccccggcagttcccttgcgctgcccttcacggtggtgcccggccacaccgtgcagctgcgctatcggctcacgcgcgatggctatcgcgaacacgtgaccaccctcacgccctga

SEQ ID NO: 511374 - DNA, 5061 bp, Stenotrophomonas maltophilia
atgaacaagatctaccgtcgcctatggtccaccgcacggcaatgctgggtggtggccagtgaactgacttcgccacgcggtaagccggcctcatcggtcggagcggccgtgttgatcgtgactgcgtcgctcgtacccggtgcgggtgtgggaaccgccggggcggtcacctatcacgcgtgccagaaccccgagcagatcatcctcaactgcgtgccgttcatggcccatgttccgagcatggcccaaaacacgcttggtccaaacaccagttcatacatgatgctgggtgctggaagccatatgcagggcaggtactcctcgttgttcgggaactggtcgagttcggtaggtgacaacaatgccgtgttcggattcgatgctcgcgccaggcaggggggaagcgccgtatttggtgcgcgatcggtagccgacggatttggcgcggtggcggtcgggacctatgcgcatgcatccggccaattcggaattgccatgggctatgcggccagaacagtggacaacggtggcggtatttcccggatcgccatcggcaatgattcttacgctggtacaccgggttggacgggcgccatcgcgttcggtggtcttgctcgtgcggagtacgacggtgtggcgcttggctatgaggcgcaggcaaagggcgccggctcggtggcattggggcgcggtgcagtagctacggagagctatgtggtctccgtaggcaatgccgctgcgccacgcagggtcgtttatgtcgctgacggcaatgtcagtcagcacagcatggacgccgtgaatgggcgccagctcctgggcgtgaaggagacggcggagcgcgcattggacaacagcaagctggtcacgcaggcatctgccagcgggcagatacgcgttggcgctgagaattccggcaccgtcctggacgtgcgcaaccggtcgaacgccaatcgaaagatcagcggcgtagccgacgcagcattgagcaccaccagcaccgaggccgtcaccggcaagcagctgcacgccaccaaccagcgtgtgagcactgccaccagcaccgccaatgccgcgaaagcatcggcggatgctgccgtaggccgtatcggcgctgcagctgtcgctctgggtcaagcggcggtggctgaaggcagtggaagcacggccagcgccgcattgggatcggcggcaaaggcgtacaacggcaatggtgtggcgatgggtgcagacgcacgtgccggtgtgaatgacaagggcgagaaaagcaccgccgccactggcgcagtcgctattggcgcactcagccgcagtggcaatggcgcggtcgccgccggcttgcgtgcgagcgccattggcgatcgcgcagtggcgctgggcaacgatgctaacgcagcggccacccacgcaaccgcagcgggctacaaagctaccgccagcgcgaaccaagcgacggctgttggtcgtgaagcatcggcatccggcacgttctccaccgcgctgggcaatctggccagcgcccgcgcggagagcgccgtggcgctgggcgaccgcgccgtagcggcccacaccgacagcgtggcgctgggcaatggctcccagaccaccgcagggaaccagatctcggtgggcaacgacacgctcaagcggaaaatcgtcaacgtcgccgatggcgcgctcaacacgagcagcgccgaggccgtgaccggcaagcagctcaatgcgaccaacgtcgaggtagcctcggtccgtaccaccgccgccagcgcccagacgacagcgggcgcagcaaagaccgccgccgacgatgcgttggccaaggccaatgctctgggcgggctggtcggtcaaacctcagtgaccggcaacgtacgcctgggtagcgaaaacaccggtaccgtgctggatgtacgcaacaagtccaatgccagccgcaaggtgacaggcgtggctgacgcaacgctcagcaccagcagcaccgaggcggtgagcggcaagcagctcaatgcgacgaacacggaagtggcctcggttcgaagtgccgccgccaacgcccagactaccgcaaacgttgcgcagactaccgcggacagcgccttcgccaaagcacgcgccactggtaacgcagtggccactgccgctgatgtcaacgacgcgaacaaggccaccgcgacggggcacctggccatggccatgggcaatgtcgccaaggccagcggcgtggcgaccgttgccgtgggcaacaacgccaatgccgttggcaccaatgcgatctcgatcggtagcgcctccggtgcgacgagccagttcgcgcttgcactgggtggaaacgcgaaggcgacgcacgaaaatgcggtggcattgggcgaaaagtcggtgaccggtggcaccaatcaggtctctattggcaacgcaacactcaagcgcaagctggtgaacgtggctgatgccacgttgagcagcaccagcaccgatgcggtaacgggcaaacaagtattcgccgtcgatcagaaggtcactgcgaatcagtctctgctggccagccacgccaccgagctgactggacacgaggcccgtatcgcaggcaaccggcgggagctggatgacctgcgtaccgagtttgacaacttcgatcccgacctggaaggcgtggtccgctacgcagccgacggttctgtcgatatggacggcggcaaggtacggggcgtggcggcgggcgatatcagttcggcggggagtaccgatgctgtgaacggtggacagttgttcgtcaccaatcagcgtctgtcacaggttgaagagacggctgggtacatagctatcgggcacgatgacgaaagtattgacgccaaggcaggagagttctcagtagccattggtgatggtgctgaggctggtgaaggcactgatggagcaactgccataggagctttctccagagctcgaggaaagggatcggtcgccttagggcgcgcgtcgttcgtcgatagctccgcggaaaatgggtttgctctgggtaccgggtcatcggttcatagcaatgaaggcgtggcgctcggcggatttgccagaattgagtcgggtgcagagtattcagttgcattgggggcatcatcgacggcgaccgaagagaatgtggtttctgttggaaacctgactaggaaacgacgaatcgtcaatctggctcgggggcgcggggctgaagacgccgtcactgttgggcagctcggggactcattggctgcactgggagggggtgcgggcattgacccgggcggaaacattatccttcctacgtacaaaatacagggcggaagccagaacaacgttgaagacgccctcaatgttctcgatggtgctgtcgtagctggaaagaatcgggccgatcggttcgaaaaccaactacgctcggtcctccaggacagccccgccacccgcagcgatggtctgggccagctcaacctcgccggcgccaacggcatggtgctgggcaacgtggccaacggcctgattgcaccgggcagccgcgatgcggtcaacggcggtcagctctacgctgccgaacagaagatcgagcgcaatcgaaatgatctcgatggactgagagagaagttagttgggggcgctgaaatgcaagtcagcgatgccgctggcctgatcgattttgctggcgcacgcttgaccggagtcgccgacggagagctgaatcccggtagtagtgacgtcgtcactggcaggcagctgtacgatacgaatcgaagtgttgagcgtttggctgaaaacagcaacttcctgaagttcggcgattcaattgatagagtgcccgcaagggcggggagattcgccatcgccatgggtgactctgcagaggcctccctggatacagagggagccgtggcgttaggcgcgtatgcagtcgcttccggcacaaattcagtggcgctggggcgagctgcgcacgttcatgaaggcgcggccagaggctttgcgctcggcactgaatctcaagttgctgaatccggtgcaatcgcgattggcgctgcgagtgccgtactaaagggggctgtggagtctgtagcaattggcgcgcagtctgtggcaagagaatcacatactgtttcctttggtaatgacggaatgcagcgccgtttggtgaatgttgcccgcggccgcaacgccaacgacgcggccaccgtcggtcagctccgcggcgcactagcaaccctgggtagtgatgtcgatgccaacggcaacatcgtcggccccaccttcaacgtgcagggcggctcgcagcacaccctgggtgatgccctcaatgcgctcgacggcgcagtgatcaccgctggcacccgggttgatcgggtcgaaaaccaactgcgctcggtcttccaggacagccccgccacccgcagcgatggtctgggccagctcaacctcgccggcgccaacggcatggtgctgggcaacgtggccaacggcctgattgcaccgggcagccgcgatgcgatcaacggtggtcagctgcatgccatggagcagcgcctggacggtcgcatcgatgggctggaacagcgcgttgatgccacgccggaggccgagggccctgccggcgcatcgggtgaaccggcggcggcttctgcaggccgtgccggtgggggcatcgccagtgctgacggcggtggcacgcctgcgccggccgacgcgccggcgccgaccccgcaggtgaacaccgccgatctggagaagatgctggcccgcgccaacgagtacaccgatggggcgatcagcaatttcgaacgccgcctggacaagatggacaagcgcttcaaccgcatggcggcaatgagcagcgcgcagacggccatggccatgaacaccgccggcctggccacctacaaccgccttggcgcgggcgtgggctacgccgagggcgagtcggccatggcggtgggttaccagcgcgtgctcaacgacaagggctcagccaccttcagcctcaatggtgccttcaccaacagcggtgaacgcagcatgggcgtgggtgtgggcatcggctggtaa

SEQ ID NO: 511375 - DNA, 750 bp, Stenotrophomonas maltophilia
atgtaccgatgggtgagtcgattcatcagctaccgcacgttctacgtttggcgggcacggttttactaccacacccggcatctggacgtctggatgcttgccagcgtgctgtgcttcctgggggtagtggcgttgctctggtactactggcggttcaccaatgtgccgcttccgcgcatgcatccgcaggtagctgcgctacgggtggagggcatcaccaacgaggcgatccacaggattgttctggtgcgccatggtggtactccccccggcaagccgttctccacgccggaggagatccgggccagcacggtgcgtacgatgcgggtgcggcaagtgctggatggcgaggtggcatggcggctgaaggcgaacctgctggcggatatcgccgattacatcgaggcgaccgcgggctgcgtgccgtatcaatgcacacgggtgcaggcgcacgtcagccagctgcgtgaggccgcgacggagaacgcgggcatcaacagggcgttgcaacccattctggatggcccgcgtgatctggtgcccggtctcacgagcgtcgatcgccaacgggtgaagagcggctggtcggattcgttcagtgacatctttcaccaggtatggctgttgaacgatctgcagaccatgcacgcgcggatgatggcggagtaccccaagcgcgcacccgcaccgtggttgccggagtggttgattggcccggagccgacgaccggtaatggcatgccactgtag

SEQ ID NO: 511376 - DNA, 1212 bp, Stenotrophomonas maltophilia
atgcagacagagccacgcagcacggtgttgatgggctcgcctgcagtactgccatcactgtggccagccttcgccctgtgcctgtcgatggcggttgccaacggcctgggaagatttgcctacgcactgttgcttcccgccatgcgcgaggatctgcaatggacctatgcgcaggcgggttggctcaacacggcaaatgcgctcggctatgtgcttggagcaggcaccgcctatgcgcttctgcaccgggtcagcgcacgccgcttgttccaggcaggcctggggctgtgcgtgttcactctcgccgtgaccggcgccagcggtgccctgccctggctgagcacccaacgcgtgctcaacggcgtcggcgctgcctgggtctcggcctgcggcagcacgctcgtgctgctgcactaccggcatgcacccaaccgtcgcggagcggcaaccggtctgttcttcggaggcgccggcatcgggatcattgccgcgggcctggccgtggcgccgctgctggccatccatggggccgcaacctggccaacggcgtggctggtgctgggagccgttgggcttctcgcctcgatatggccaatgacactggccggccggatacaggaatcaaccgccgtcactgaaggccacgaccctgcgccgctgccacttcggcacctgggcgcctgcctggcagcctacttctgctgggccggtggctacatcatctatctcactttcatttttgcgtggctgcgcgaccacggactgtcctggcagcagggcatcgccgtgtggacggtgctgggcatcgcaatcctgtgttcgggaatgctctggcggcgcgcgctgggtgcatggcctggcgcgcacgtgctgtcagcgtgctgcgcggtgtcactgctgggcacgctggcaccgttgctgggcggcacgacgggcctgtttgtttccgctgcggtgttcggctcaagcgtcttcatcgctgcagccgccatcgcggtccttgtccggcagaacctgcctgcggcgcgcatcggccgcgcgatggccctgttcaaccttgccttcgccgccggccaggccatcggtcctgtggccgccggcgcagtggccgatcgtaccggtctggatggagcgctatggctcagtgccgcgctgcatgtcgccgccgtcgccctgccgtgggcggcacgcgccccgcgcggcgccggatga

SEQ ID NO: 511377 - DNA, 819 bp, Stenotrophomonas maltophilia
atgcggtggtggccgcagactaccaagggcctcggcaatccaggtgaccatgcctatctgcatgtgcgcactgccgcgcgcaacgccatcgacctgatcaaagccagccgccagtacctgggcaccgcaacgctgtcgccgcggtgggtctcggtcggccattcgcagggcggcgccgccgcgctcacggcaagccacatcgcccccacctatggtgggccggcgttgcactaccgcggcagcttcaccactggtacgcccaccgcagtcgagctgaccgcgctggtgatgaaaccggacaaccgcaccgccaatcttggcgcgctcaatgcgtatcacgcgtatctgctcgatggcctgctgcaggtcgcgccgcagatcgaccgcgtcctcagcgacaccggccgcgcccgcgtggcagtggcacgtgagcagtgcctgggcgaactggccgccacgctggacggtgcggataccggcagcatgttcactgcaccgctgaccagcgtgccgggcatctgggcggtgttgtacgactatctcggcgtaccgcgtcgcggtttcagccaaccactgatgctgggccatggcagcgcggaccgcgatgtgccctatctgaccacgctgctgtacgccgcaggcctggccctgcgaggcgagccggtcgcgttccgtcgctatccggtcgaccaccgcggcacgctggacgcggccgctgcggatggcctggcgttcgtgcgcgcacggctgggggatgcgcacttcaatgaagcggccgagaccgcccatctggaacaggtactggacgagtccccgtaa

SEQ ID NO: 511378 - DNA, 768 bp, Stenotrophomonas maltophilia
gtgaacgcggccgactccccgggcacgccgggccaggtgcgcgtcggctgcgcaggctggtcgctgtcacaggcagcgcagacggcgttcggcgcaggcgaaagcgtgctgcagcgctatgccactcggctgcccatggttgagatcaattcctcgttctaccgcccccaccaggcaggtacctacgcccggtgggcggccagcgtgcccgaggacttccgcttcgcggtgaaactcccgcgtgcgatcagccatgagcgccggctgcgcgatgcgatgcaaccgctggatcagttcctcggtggcgtgatggccctgggtgacaggatgggcccgctactgcttcagctgccgcccagtcttgcgtacgatccggcgaccgtagcggaatttctgcacggcctgcgcgcgcgcaccccgcttgatgtcgcctgcgaaccgcgccatccctcctggttcactgcggacgtggatgccctgctgagcgaccacggcatcgcacgggttgccgctgacccggcccgggtacccgccgccgcgcttccgggcggtgaccgcacgtggagctactggcgctggcacgggcagccgcagatctatcgcagcgcctacagcgagcaggcgctggcggggctggcccagcacctgcagcatgaagccgccgcgcaatgccgtgcctggtgcgtactggacaataccgcgctgggtcacgcgaccggcaacgcgctgcacctgcaggcactgctgcaggagaacgtgcatgcctga

SEQ ID NO: 511379 - DNA, 507 bp, Stenotrophomonas maltophilia
atgagcgcgattgtcatgtccggggtgtacgcactgtggttggtggccggttcgctggacttccattttcaccgacggaccaacctgccgcacacctcggggatggatgaaagcgcattgcacggggtccagcttgtcctgatcggtagcggcgtactggcctggctcctgctggaaaacacgtggtcgctcgccacgttgctggccgcgctggtcatcgcgcacgcaatcgccggctacttcgataccgtcagcgcggatgggcgacgccggatcagcccggcagagcagcacgtgcacagcgtgctcgacgctgccccgtgggttctgctggcttgggtcgcctggcacgcccagccgcgttggtcgctcaccgtagcgccggcagtgccggaggtctggtggctcatcctgctgccggcgctgggcgcggtcgtactgccatggttgtgggagctgctgcagtgcgtccgcgcaggacggcagcgccggcaggcgagcgcgtga

SEQ ID NO: 511380 - DNA, 630 bp, Stenotrophomonas maltophilia
atgatcgccttgtcagagccttattcagcgctgcttcgcctgcagttgtgccccgaagatctctccagatggctggccgcgcccgtgcccgcagcatcccgatggtccgactggcgacgcctcgccgggcagtggtgcctgggtaacggtcaatatctggcctcatcaagcgacgaggcgttggatcagctgcttgcggactgccaggcactgctggcccgctaccccgacaatcgcgccgcattgaaggccttcctttcctccgcacaggcggagaacatccgggttgccgcctatgaccgcagcggcaggcactttgttgcaggatcgctgacatattcggaaagtctctacgatctcatcgcgtttcttgctgtggcacggagcgccgccgacttcctgaaggccggcgaccagggtgtggcgctcatccacgactatctctgggccgaggacggtgagcgggagaccgttgccgcgattgcgctggtcggccaaggggaatccagctttctgtctgccgcggacctgggtactgccaccgcgccgttcgcaacattggtggaggccatgctggaagcccatgacgacccggagtttcatccgcgcaaccagcttgatcgactttga

SEQ ID NO: 511381 - DNA, 957 bp, Stenotrophomonas maltophilia
atgaacgccggcgccgtcaccatcaccctcaacccggcgatcgaccagaccgtgcgcctggcgcgcctgcacccgggccaggtgcaccgcgcccgcagcagccacgacgatgcgggtggcaagggcatcaacgttgccgcctgcctgtccgactggggggtgccgacaacggctctgggcgtgctcggcgacggcaacgacggcgtgttccgtgcgctgttctcggcgcgtggcatcgccgacggttgcttgcgtgttccgggccgcacccgcaccaacatcaagctggtcgaagaggatggcggcgagaccaccgacatcaacctgcccgggctggcactcggcaacgccgacctggacgcggtgtcgcgccggctcgccgccctgctgcagccgaacctgccggtggtgctgtccggcagcctgccgtccgggctaccggccgacgcatgggcgcgcttgcaggcacaggccggcgccgccggtgcgcgcgtgctgctggacaccagcggcgacgcacttggggctgcattgagcggcgcacaaggcgcacttccctacgcggtcaagcccaatcgccacgaactggaggcctggaccggcacgccgttgccggatcgaaacgccctgcaggcggcgggcgtggccctggtcgaacgcggggtcgcgctcgtagcgatctcgatgggcatcgacggcgcgctgttcattgatcgcggcggcgcgctggtcgcgcgaccagcgcatttggcgcagggcagtacggtcggtgcgggcgacgccatggtggccggcatcgccgccgcactgctggagccctccttcgatctggccggctgtgcacgattggccacggcgttctcgatgagccgcctggaaagcggtgacgcgcgacggctggatccggcgcaggtgcgccagtggaccggcgacgtattgatcgagcggttggattga

SEQ ID NO: 511382 - DNA, 1287 bp, Stenotrophomonas maltophilia
atgtccgatgagttgttccgcagggaagtactccaggcaaagcaggacgaaaggcttggaaagatagggtttcgcgcccctcgcgtcggctggatattctttgccattggcgccgcttccaccatagccatcctcggcttgctgattgcaggccgatatacgcggcatgagcgtgtgcacggcaccctggtccctgacagcggattgattgctgtaagcgtcgccgggcccggtgttgtttcccggatcctggcgcatgaaggggatatcgttgtcgccggccagccgctcgtcgaagtctccatgccgcaggacagcgtcgcgctgggcgaaacccaggccctcgtcgccgaacagctccgcgtcaagcagcagggcctgcagtcagaccttgtactgcatcgtagtctgggcgacatgcagcgccacgagatacaggagcgcctgcgtaaccttcacttacgggccgaggagaaggcacggcaggccgggttgcagaaacagcgtgcggacagtgctgatgagctgtatcaggaatggctgcgggtcgagagtgccgaggtgatcagcagataccagatgctccagcagcgtgacagcgttctgcagcaccgtgcgaaccagattgaactggaggctcagcggcggcttcttgtacagcaggccgacgaggcaacgtctgcgcttgcgcagctcgagccaaccctgcgcggtcaggaaaaccggacgcgtagagatgtggcagatgtcgagcaatcattggccgagaacgccgcaagggccgcagtcacgcttcgagcacgggtaagcggaaccgtgaccagtgtgcttatcaaaccggggcaggcagtgtctgcgggtcaaacggcactcagcctcctgcctcacgactcggagctcgtggccgagctatgggtgccatccagtgccatcggctttgtcgatgcaggaaagcccgttgcccttcgctatgaggcctacccgtatcagaaattcggtcagcagcgtgggcgggtgctttcggtttcgcgaagcgcagccccccctgatgcgcagtcccgcctgctgggcacggcagtggatgcgccacgataccgcgttgaagtggcgctggagcgccaggtgatggcggtgtacggacggaatgaatcattgaagcccggcatggggctggaagcggacatcagcgttgagacccggcggctggttgagtgggtcttcgacccgctctatcgactggctcaagatcgtccagcagtgggctcagcggacaccgacaggcgatga

SEQ ID NO: 511383 - DNA, 2151 bp, Stenotrophomonas maltophilia
atgacttcgttttcagaatggatggcgtcgcgtcgattgccgatgattcatcagtccgaagccgcggaatgcggcttggcatgcttggcaatggttgccaatttccatgggcatgagctggacctgtccagcctccgccgaagattcgactcttcgctgaagggcatgcatctggcagatgtcatgcggatcgcggacgagctcggattcgagtcaaggcccatcaaggtggatcttgaagatatccccaacgcccaacttccctgcatcctgcactgggacatgacccacttcgtggtactgcgccgtgtaagcggcaaagggcttgaaattcatgacccctcgcgtggcattcgacgtctgacgctggcggagactgggcggcactttaccggcgtcctgcttgaactgagcccgcgggccaccttcaaccccatcaaggagcgtcattcaatcagcttgcaacggctggccggagatgtcagcggcttgcccggggcggcattgcagttgcttggccttgcattggcgatcgaggtcctggcattgacgctgccgttccaggttcaatgggtgattgatcatgtcatcctctcgaccgacagaggcctgcttgtgctgatggcactggggttctctgtcatcctgcttgtgtcggcagcactgcagcttgtgcgcgcgtggatcatcagttggctgggggcggcgctgaacacagaatggatcagtaatctattcagccatctgctccggcttcccctgtccttcttccagaagcggcacatgggtgatgtgctatcgcgcttctcatccgtgcatgcgatccagaacacactgacgggaaatttcatcgaagccgtgctcgatggagtgatgggcactctggcgctgttcgtcatctgcctttacagcgcgaagctcgcgctactggtctgcgccgttgtggcggtttatacgctgacgcgctggattctctacaggcggctctggcatctgaacgaagagcagctggtttactgggcgcgccagcaaagtgagctgatggaatcggtgcgcggaatccaggccatcaaacttggaaacaagcagggcctgcggcgcgctcggctcgccagcgcgaccatggaggccaacaagcgtgcgatgcaggtgcagcgatacacgttgggcttcggcgtcatgggcagcacgatttccgggctgcagcgcgtgctcatcgtggctcttggcgcacatctggtgatgtcgggcagcttctctgccggcatgctggttgcgttcgtggcgtatgccgaccagttcgcacagaaggccggagggttggtcgacaagatcgtcgagttccgcatgctgagactgcatgcggaacgtattgctgacgtggcgctggcagaggaagaacagaatgtcagcagtacgcacagcggccgatcaccgaaggcacgaatccgcctcaacaatatcggatttcgctactcccagtcggatccgtgggttttccgcaatgtcactatcgagttcaaggacggcgaatccgtggcgatcatcggtcccagcggatacggcaagagcacgctttcacgattgatggtgggcttgctggagcctaccgagggctcggtggagattgacggggtggatatccgctcattcggccttgcgtcctaccgggatctggtcggtgtggtcatgcaggacgacaccctctttgctggaaccatcgcagacaacatttcgttcttcgattcagatgggaccatcgaggccatcgtggaggcagcgacgatggccgggatccacgcggacatcgtcgcattgcctatgggctatgaatcactggtcggagacatgggggcagcgctgtccgggggacaacagcagcgacttctgcttgcgcgcgcattctataagcgcccgaagatcctcatccttgatgaagcgaccagtcatctcgatgtccgcaccgagcgtgaaatcaaccacaacgtatcgaatctcagggcgacccgcatcatcttcgcgcaccgccaggaaaccatctccagcgccgaccgcgtggttgaccttacttcttttatgaaggtggatgagcgctctggaagtactcatccgcaccaacaccttgaagaaggagcccgcagtcttgcctga

SEQ ID NO: 511384 - DNA, 762 bp, Stenotrophomonas maltophilia
atggccgagcgatcgcatcccgaggctttctctcaagcattctgggtgaatcctcacgccgcttcactgctctgcgagtccaaggtgcggcaactccgttatgcgctggaattgggaatcgacattcctcgcacccttatcagcaatgatcccggagatatccgccagttcctgtcggagggcatcgcctgcatctacaagccgctgggtgggtgtatctggaaagaagatggcgtggttcgtaaaacgtacaccgctgaggtagctttggcggacctgccctgcgaccgtatccttagaacaacacccggaatattccaggacaaggtcgacaagcactacgaagtccgtgcacagttcttcggtaagagttgctttgcggtccggatagaatcatcggctctggagagtggtgatgttgactggcggctggaccagaactcgattacgcgttgcgaaccagcgatcctgcctgatgatgtccacgcacgctgcattgcgttgatggccaagttgggaattgtcagtggcggatttgatttcatcatcacgcccgaaggcaggtggtgcttcatggaggtcaatgaggccggacaattcttcttcatcgagacgtggtgcgccgacctgcctgttctcgacgcgttttgccagttccttgagtatggcaaggcggatttccgctacacgccacacagcgatgcattgactttgaatggcatcacggcctctgctttcgaacacggcgtgatttcgaaatga

SEQ ID NO: 511385 - DNA, 192 bp, Stenotrophomonas maltophilia
atgttcaagaagtcaaacgtagcgggtgttgaggcatccgagaatcgtgtgctcggacgtattctttctcgtgaagaggtgctccgggtgagtggtggcaatggtacgagccagccaaccgactcctggaaggacggcggcaattgcacaccaaagagcgacccgccgacgacccaccccgtaattgagtaa

SEQ ID NO: 511386 - DNA, 705 bp, Stenotrophomonas maltophilia
atgttcagggtttgctttttgattttgccagcctttctctggggaggcggagttgcggaagccgctcctttgccaacacgggacgcgtacatagaattcctatggacaaagaccccagaaggtgcgcttgcccggcaggaaacacgctcgttcgcactggatggacagtttgaccaccaagtctgcttcgctattctgaacgccgacatcgaggtcaaaagtattgagctacgcgcgatggatgctgacggcaaacagctcgtgagcacgcgcttcaacgatgcagatggacgcaagcgatgtgtcccggccgagttcccggccggcgcaccggccgggaagtggacctatcaggtcagggtgaacggacaggaccatgtcgtgggatctcaaaccgttgatgtgtttccgacggtcgatgcactcatttcagacattgcacctgacatgccctatgtcctcggtcggcccaactacgattcgtcaatagcgcctgatcagttcaatggcgaattggagtggatcatgcacatacgacgggatggaactgtaagcgctgtagatatagatcgggcggagggcgcagggatagcgatgcgtccccgtgctgtggaagctggacttatttccttgtttcctcctgatgaaggacgcgagccgagtgccaccttcaagcggcacctgtctttccggcctgacaaataa

SEQ ID NO: 511387 - DNA, 876 bp, Stenotrophomonas maltophilia
atgcctgcacctggatcactgcggacggaagccttcatcaacaccttttcactggaggtcagcgcgaaggccatgcccgcgctgcgcgcggaggccgcccgcataccgcatggcacgacgatctccattccctacctggccagtgaggatgacgacgcacgcctggctgccgcgcgcatggtgcgcgcgctcggctttgagccgatgctacatctgtctgcgcgccgcatcggctcgcgtgcggcactcgagcgcttcctggagcgtgctgccagcgaggccggtgtcgagcagtgcctggtgatcgccggcgacctggccacacccgccggaccgtttgctgacagtgcttcgatcatcgagaccggacttcttgagcgtttcggcgtcagagtcgtgggtatcggcgggcacccggaaggccatccggtgatgagcagtgacgatcgctggcaggcgcttgaacgcaagtgccgggccatcgaatcgcgcggcatggcacccttgatcattacccagttcgccttcgatgccgatatcgtgctggcgtggttgaatgtactgcgcgcgcgtggcatcaacgttccggtgctggtcggtgtgccggggccggccagcatcaccaggttgctgcgctatgccgcgatgtgcggcgtgggtgccagtgcatcgatgctggccaggtacggcgtctcgatcggccggttgcttggcacagcggggccggaggtgtttgtagaccgtctcgtgcaggggctgaccgacgcccatggcatgatcagcccgcacctgttcccgttcggcggcatcgcgccgtcactggattggattgagcggtaccggcgccggggcccgtttccccgggttcgtcgttga

SEQ ID NO: 511388 - DNA, 1161 bp, Stenotrophomonas maltophilia
atgacccgcagcatctgcctcgccctgctgctgttgctgcttccttcactggcattgccgacgccgacccctgcgccggtcgaagcaaggatacctttcgcaccgactctctttgtcggcagcgacggcctgcgccatctggcctacgagctgcacatcaccaactactacggcgataccggtgcgctgcagccgcaatggctgcaggtgctgggcgacgatgccggcacgccgctgctgagcctggacgcctctgccctgagccgctgggtgcggccgaccccagcggaggatggcgtggtctccattgcgccgggcaagcgtctggtggtgttcctgtggctgtcactgcccgccgcagcccacgttccgcattcgctccggcaccgcatgctgctggagaccgcggaccacggcagcgtggcgcttgatggcgcccgcgttgcgatcaacgcatcgccagccattgcgctcggtccgcccctgcgaggaggccggtggctcgcccacgaaggacccggcgacgcgcagtcacaccattggggcagcctggtagcggtgaatggtgagctgaccattccgcagcgcttcgcactcgatctggtcggtgtcgacgaacacggccacgcactgcgttcgaccgccaaggatctgcagcacacgcgtcattcggactggataggatacgcagcacccgtactggtggtcgccgatggcatcgtgcgcgcggtgcgagatgggcaatccgagcatccggccctcatcccacagccggagcctgcctcactgacagcagacggtctgttcgggaactacgtggtcctggaaatcgcgccgggagcctttgccagctacgcccatctgcgcaccggcagcatcagggtgaaagctgggcaacgtgtccagcgcggacagccgctggccgaacttgggcagtcaggcaactccgccgctccgcatctgcacttccagctttccaacaaggcaagcttcgaaggatccgaaggcattccctatgtcttccaggccttcgaggatctcggccctgaaggcgaagcgcagttgttcggccagggtgatgcctggaagccagccgtggccgcgccacggcagaaccagctgccgctgaatgacatcgtcatcgcctttccgccgcactga

SEQ ID NO: 511389 - DNA, 609 bp, Stenotrophomonas maltophilia
atggaggctagcctcggcgcccttgtcgactgcctgcgcgccgtgacccgaccctatccagatatgccctcgatcgacgtgcgtcgcgcctatctggcctactgcgcgccttcgccgtggctgctcgtgctggtgctggcctcaaccagcgtctggacgctggccagccagcacgcgctgccgtccctgctggcaggcttcggcgccgccgcactggtgtggttccacagcgatggccccggccgattgaaccacctcgggtcgcccgctgcgttggccctgatcggcttggcggcatggtgggcgacccacccggcaagcggtactgcgctgcatctgccgatcaccgctgccgccgtactggtcatcgccctggcggccctccgtctgcgcaccgtcctgcacatggcaatgcgcctgcaggcgcgggtggatgcaaccacgatggcggcgcgctggatcaagctgcccgccgccgtatccgcacttgctgtacagcagctgctcagcaaggacccgatgcaaccgtcattgcatcgcaccctggtgctggcaacgctggcgtgggccgccaatgaggaagcacaggccatggagcgccgacgatga

SEQ ID NO: 511390 - DNA, 534 bp, Stenotrophomonas maltophilia
atgaagcttcccgccgctcttttcctgctgctggctgccagcgccgcgcaggcccatgacgtgcgtcagctgggcgcacatgtgcacggccaggccaccgtcgatgttgcgcttgaccagcagaccctggaattcgcacttcaggcccccggcatagggatcctcgattacgagcgaccgccggccaatgcagccgagcagaccgcgctggcacgtgccaccgccgtgctgaagagcggcagctgggtcaccttgcccacggcggcccattgtcgtctggtcagtggtgatgccaaggccgaaggcttcgatgcgacggctgccgcacccatggccgggcagcatcgtcatgccggcttcagtgcgaacctgcaataccgctgtgcgaatacggcggcgcttcgcgccctggtgattcgcctgcccgtgctgttcccgggtctgcacgaagtcatcgtcaacagcgcaaccaccaatggccaggatcgcagcgtgctgacgcccgataatctgcgcgtggtgctggtaccgtga

SEQ ID NO: 511391 - DNA, 1563 bp, Stenotrophomonas maltophilia
atggacaccctgcgcctgctcgacctggacatcgatcgcccggcgcggcgcgtcagtcgcaacggcgaggcattgccggtcagcggcctcagctggaccctgctcgatgtgcttctcgcgcacggcaccgacgtcgtggatttcgacacgcttgccgcgcaggtctgggcgccggcggtggtcggtgaagatgcgatcagccagcgggtcaaactgctgcgccaggccctgggtgacgacagccgacgcccgcgctacatccgttcggtgcgcggtcgcggctaccagctgtgtgtgccgccgctgcctgcggccgtaccgcccgagcgatcacgctggcgtcgccgattcggttggggcgtagccgccgtggcggtactgtgcggggtggccgcactgttgccgtggtcgcggtcggcatcgcaaagcggcgcacaggcgttgctgcagcgcgccgactactacgccggcatcggccaggccagcaacaacgagcgggccatcagcctgtatcggcaggcattgcaggccgacccagagtccgcgggggcgcggcgtggcctgtctcgcgccctgtcggcgcaggggtgcctgttcaacggtacgcccgcgcagctgagcgaagcgctgtccctggccgaactggagcgccagcgtgcgccgcgcgacgcggccacccatgcgctgtggggctacgcgcaggactgccagggcaacatgcgcaaggcaatccagggatatgcgcgtgccattgaactggacccgggagacgagcgcagccgcgcatcgctggcctacctgcagcaggagcgcggccagctcgccacagcgctgcaggccaacctgaccttgaaggctcccgagcgcatccgcttccgtgatgtgcaggtcgcgcgcgagctggaactgctgggcttcacccaggcggccgcggttcgccacgcgcgcaatttccagctgtacccggacaacgtcttttccaacatcgcctggccgcgcagcctgtacctggccggcgcgccgcagcaggcccggcaggcgctggacgaggcgctggcgcgcggcacgccgcatccgcagctgctgcgcctgcagggcgaactggcgttgctggccggtgaccgcacggccgctgccgaagccttcgagcatggccgccagctgcgcccccaacagtcgctggggcaggccctggcggcgttgcatggaccgcagccggcggatcaggggtggatcgatcagcgtctgcggaggctcggcgacagcgacggcgacggctggcccgatgcagccctggagcgcgcgttgttgctgcaggccgctgggcgcagcaatgacgcggtggcaacactgcaccgggccgttgatgacggattccgcgatgtggcgtggctgcgtgctacgccactgttcgccccactgcgcgacaccccgggctgggcggcactgctggatcgcctcgataccgatatcggccggcagcgcgcccaggtgctggcctcagcctggcgccccgacgacctggcctcgctcagtgcagcgccggcaacaggaactcggtga

SEQ ID NO: 511392 - DNA, 615 bp, Stenotrophomonas maltophilia
atgattgggcttgtcactttcttttcgcgaaaagaaagtaaccaaagaaacgctccgccatccgcgagccggtgcttctcggtgaatcaggggacggcgcggagagccagccgactagcagtcggctctacaggatggagccgcctcttcgcccctgattcccctgcggtgctcggcgcgctacaaggcggactcaacagccgcgagcgcacgcatgaccgctcctgtcggcctgagccgagcgtgggctcggctctacatcggccgcgcacgcaggaaaccgtcgagcgcctgcgggtgggtccgggcaggaccatccgcggcatggatgccgcggccgagcttacagggatgtacttgcagcgtgtcctgcccggacccacccgcaggctccctccgatacgcggaaggtgctgctctacacaaccaactcgaacccaacaaaaaacccggccgaagccgggttttctgcatgaccagacaacgatcaggaatcagtcgccctgctgcttctgcaggtgctcccaacgctcctgggcgtcgatggtgcgttcggcggtgaggcgcgcttccaggcgctccaggccgatttcttcgccggtgtcgacgcagtaa

SEQ ID NO: 511393 - DNA, 336 bp, Stenotrophomonas maltophilia
atgcgcctgcatcgatccctcccggccgtgttcctgctggtcctggctggctgcagcacaacgtcgtcctacgaaggtgcggatttctccgcctcctcgcagtgccgcatgcagtgccaggccagctaccgcagctgcatggcgaaggggagcatcggcagcaatgacttcagctgtgaacaacaggtggtgccggcgccggacaagcgctgcaaggacgtttccaaccccgaactgcgccgttcctgtgaactgaaggcgcatgactgcacgatgcgcgcgccgatgatgtcctgtggcgaacgccgcgatacctgcatgagcagttgcggctga

SEQ ID NO: 511394 - DNA, 657 bp, Stenotrophomonas maltophilia
atggtggaagagcgcgtcccgctgacggtgcatggcatgtcggtctcgggcaattgccacaaggtccgcctgctgctggagcagctcggcagccgttaccgctgggtggaggtggacagtgcccacggccagacccatacccccgaattcctggcgctcaacccgaatgccaaggtgccgctgatcgtccgcgacgatggccgcgtgctgaccgaatccaacgcgatcctgttctggctggccgaaggcacgccgtacctgcccaccgatggctgggagcgcgcgcaggcgttgagctggatgttcttcgagcagtacacgcacgagccgtgcgtggcagtggcgcgcttcatccgcggctggaccgcacccgattcgccgcgccgcgccgaactgccgcgcctgcatgaacgcgccgccaccgcgctggcggtgatggagcagcacctgcgccaggcgcagtggttcaccggcagcggatacggcattgccgatatcgccctgtttgcctataccgatgtggcgggcgagggcggcatcagcctggagccgttcccggaagttcgcgcctggctgcagcgcgtgcgtgagcagccgcgcttcctgccgatgccggcagtgaccgccgaagtgcgctcgcgtttcgaggccgcgtga

SEQ ID NO: 511395 - DNA, 249 bp, Stenotrophomonas maltophilia
atgagggtcatgctgttgaccgctctggcactgatcgctgcgcccgtcgtggcttcacctccagcaccgccatcggtgtggctggagcgccagcagaccgctgcggctgacgaggcgaatgctgcagcggtttctgtgccgaaagccaaggagcgctgcaaggtggtgaaggaatggaagattggtgaggccgtagtgcaacaccgcatctgcgacgatccgccgaagaagccggctgccaaggtgtag

SEQ ID NO: 511396 - DNA, 639 bp, Stenotrophomonas maltophilia
atggacgattccataattggaaacattcgtcctcacgacatcgaccgccccactgccggtcgtcgtacgcgtagttgtctggtagaagacaagcggctggccagggactgcctgtctgccgtcgggatccgtaaacttgtacggattcccgttcgcataccgataccgattgaactgcccaacaggctgctcatacgccgtcaccggatccaccgacaggaacacacccaactgcggatccatgtaccgctgctgcatgtaactcagccctgtggccgaatcgctcacatgcccggtgtaccccggcccgtccttgaccagcccgcccaactcggcaccatacggctcaaaccggcgtcgctcaacaacacttcctgtgccatccgtgacagcgaccgggctgcccagtgcatccacatgcacccaggtaacacccgtcgggctgcgggtggccagcagtcgaccacctacatggatgtactccgaggcgcccttgcctcgtcgctcttcatgcaccacctgcccggccaacgaatacatcgcgcgcaggcgttgcccctgggcgtcgtaggccaccgcacgccgcccatagccgagacaaatagccccgacctaggcaggagcatttcatgcaactga

SEQ ID NO: 511397 - DNA, 2658 bp, Stenotrophomonas maltophilia
ttgaaggcgcgtgttcgcaactggatcctcctggtctcaggtacctgtggcctgaccgcttttcatgcacaagggcaggaggttcccagttatgccgagtcgatcaaggttggaagtacggtcgcccctcttgaccagaatgccttcggcgagcgcctggacaaatacaagggggacctgtcctttcaccagaccgatctggttctgaaaggcacggggccggatatcgtcatcggcagaacgtatgagctgggacgctatcgaaagggcgatggccccctgggttttgcagactggtcgccgtccataccccacatgctcacaaggggaagcgcggaaaagccctggcgtgtggtccagcaggacgctttgaagcgctgcaccttcttctccgcaagtgggccggtcattcccatccctgtgagggagtggtgggagggctacgagctcgttgacgagctggggcgaacgcagatgccgatgcgccgggatcccaacaatccggtggcgccctcaaacaatccggcaggctatcccgttgtgacccaggcgggctggcaggcgagctgcctgccgcagacatccaatgggcaggagggtgagggcttcagcttcctgtctccagcaggcaaccgctaccggttggatcgtctgctggtctcccgccgatcgcaggtccacatcctcgagagggacccggcaccgcctgtacgcgcacgcgtaagcacgctcgccatggttgccagtcgaatcgaagatcgcttcgggaattttgtcgactacaactatgacggcgacagactgatctcgataagcggcagcgatggtcgtctggtcacgttcgaatggaacgacgatgtcatcactgcgatgaatgccaatggtcgtgtgtggacctacagctacgccatcgaggggacatctgccatctcccagttcaagagcctgaaatcggtgacccagccggatggaagccgttacaccttcgatctgggcgcgttctattcactggttgcgccgccgccgcccacggaatgcgcgcctcctgatacttcagccatcaatcggcccgtacaggcttcgatggccggaccctcgggcttgtccgcaacctatctgctgaatgttgccagacgtgggcgatccaacgtgccctacgaatgtgttcccgcaaatgcgatgagcgaagaacacgtggtgaccccttccgcctatgacgtgtatgcgctgagttcaagaacgtacaccggtccaggtgtaaaccagacgtggcaatacgcctatggagcacccaatcccagctggactcatcagtgcgctggggggtgtatccgaactgtgcagacgaccgaaacgctgcccggcggccgctgggtgcgcagtaccttcagcaacgaatggggcgcatacgagggcaagcttgtggtggtcgaggacggaggcacaggagctacgcttccaaccagaacgactcggtaccattacgctccatccagcgggaatgcctatcctgcggtgctgggcgctgtgcccgccagttcaccatgggcgtcaaatttcgctccgctgagcagccttacgccagttcaccaggtggacatcgagctggatggtgattggtaccgttccaccttcgggggctacaacgcatttgcgcaaccctcgtcccggtccgatctggattccacaggcggaggtcgcactctggatttcgcgcccgtgaacaacgtgcagcattgggtgctggatctgcccggaacaacatcactggccgggaatgcggttgcttccgagcaggtgacctacgacgacaaggcccgacccatatcggtgagcatctttgggcgcattgaccgcaccgccgagtactggcccgacggaaatctgcgcagtgtcgtggacggcaggggcaatgcgacactcctttcagagtggtaccgggggacgccacgccaaaccgtcttcgccgacggtacctcccagcgtgtcgacgtcgatgctaatggctggatcacctccgtggtcgatgaggccaacaacaagacctgctacgcatttgatcgtatgggccggataagtggcatcacttttccggctgccacggctggggtttgcgacggcagcatcagcaatccggtggcagttgcattcggacccgttggcagcgcggagcatggacttgctgcagggcattggcgaaggacggagacgcgaggcaatgcggtcaacgaacagttcttcgatgccctgtggcagccggtgctttctgccaggcgtgacaacggacgtgccgatgctgttgcctggattcggcgcagctatgacgaagcggggagaactactttcgagtcctatcccacacggacaccggaaggcgcgacgtcaggtgtatggaccgaatatgacgctttgggacgagtgagttcgacatcccaagacagtgaagttggattgctgaccacagtcacgacctaccaggccggcaactcggcgctgacccgactccctgaagggcaggtcacggcctatcgattcgatggctatggtgctccggtgaaagagcttcctgcggtcattgatcgtcccgaatcggcccggacgtccatccagcgcgacgcgtggggcaagcccttgagcattgaaaggagcaagcgatga

SEQ ID NO: 511398 - DNA, 237 bp, Stenotrophomonas maltophilia
ttgaagaagaatctgctgatcattgccggcgttgctgcggtgattgcgttgctgatggccatgcgccaaagatgggtattcaccctgctgcccctggtgctgatcggcctgattccggccgcagttgcctgctggaagggctacgccgaccgctttggtacctggtggctctatggttcgacgctgggcatcgtggccatcattcatgtgaccgtgctgccctggcgtagacgctag

SEQ ID NO: 511399 - DNA, 1983 bp, Stenotrophomonas maltophilia
atgcgcaggattgtgctggctgcactgttgggagcggctgtgggtggggcatcggccgcaacgctggacctggatcgctatctgcggcaggagtcgtttaccgacatcaagatttcaccggggggcgagtacatcgccgcgacggttccgctggaggcgggaaccgcgctggcgatctatcgcattgccgacatgaagatggtcggcagcttccgtccgccccgcaacgatcacgcccacaccttcgactgggtcagcaacgagcggctgctggtgggcatggcacagaaattcggcgtgctggaccggccgacgccgaccggcgaactgttcggtatcaatgccaacggcaagggcggcgagctgctggtggggtaccgggttgccgaccagagcctgggcaccaacatcaaggtcaggccggcaggactggtggccgcgtacctcagtgatgaactcaaggacgatgatcgcaatgcactggtgaccgtgatcccgctggtcggcaattcgcacgcacaggtcgagcgcatggatgtggtcaccggtcgccgcaacgcggtggcccgggctcccattcccgatgcggactttacgatcgatgagcagggcgaagtgcgtttcgcacgtgctgtcgttaccgatgggacgcagaagctctactaccgcacaggcagcaacagcgactggatcctgctcaacgatgaatccttgagcaagcacatcgagctgcccctgggcttctcggccgacggtcgcctggcgtacctgcaggtcgagcaggcagacggacctgatgccattgtcagctgggacccccagagcaatgaacgacgcaccctgctgcgcgatgagagcgccgaccccgcgcgcatcatccggcgccccggcagccgcgtgccggtcggggcactgttccttggcggtgcgccgcgaacggcattcttcgatgacgcctcggacgaagctcgcctttaccgcagcctcgaagcgggcctgggcggcgcggcctacgtcacctccagtacacgcgatggcaagacggtgctggtggaaacctggtcaggcagcaatccgggcgatttctatctctatgacacggttggcaagcgtgcacggcacctgatcagccgcagcgactggatcgaccccgcgctggcggcggaggtgcgtccgatcagcctgaaggcgcgtgatgggcgtccgctgcatggcttccttaccgtcccgcatggccgcgaggcccgtgcgctgccgatggtggtggtgccgcacggaggtccgatcggtgtcgccgacgatggcgcctatgacagcgaggcgcagatgctggccgcggcaggttacgcggtattgcaggtgaatttccgcggctcttccggctatggccgggcccacgtgcaggctgcgcgcaagcaatggggactgtcgatgcaggatgacgtcaccgatgccacgcgctgggcgatcgaacagggcgtggccgacaggaaccgcatctgcatctacggggccagttacggtgcctatgcggcgatgatgggggcggtgcgcgaaccgggcctgtaccagtgcgcggccggctacgtcggcatctacgacctgccgttgatgtacgcgcgcggagacatccagagcgatgagtcaggcctggcctacctgcgcaactggctgggatcgcccaaggatctggcagagcgttccccggtgaatctggccgcgcaggtgcgggtgccggtattcctggccgcgggtggccaggaccagcgtgcgccgatcatgcacagcgaacgcatggaagctgcgttgaagaaggccggttcgccggtggaaaccctgtacgtcaagaacgaaggacatggtttctattctcccgccaatcaacgaacgtactacagcaggttgctggccttcctctcgcgcagcctggggggacaggtggctgggcaggcgacgcctgcggagaagagcagcgcgccctga

SEQ ID NO: 511400 - DNA, 741 bp, Stenotrophomonas maltophilia
atgaaccacgtaccgcatatcctggtcgtcgacgatgacagcgagatccgccagatgctggctgactacctgcaacgcaacggcctgcgcgtgagccaggccgacggtggccgggcgatgcgcgcgctgatggatacccatgccgtggatctggtggtgctggacgtgatgatgccgggcgaggatggactgagcctgtgccgcaacctgcgcgccggcaagcatcgtgcggtgccggtggtgctgctgactgcccgcgacgacgagaccgatcgcatcatcggcctggaaatgggtgctgacgactacgtgaccaaacccttctcttcgcgcgaactgctggcacgcatcaatgcagtgatccgccgcacccggatgctgccgccgaacctgcaggtgagcgaagcaggtcgccagctggccttcggcgagtggcgcctggacaccaccgcacgccatctgctggatgcgcaggacaccgcgtatccactcagtggcgccgagttccgcctgttgcgcgtgttcctcgatcacgccaatcgggtgctcagccgcgaccagctgctcagcctcacccagggccgcgatgccgaactgttcgatcgctcgatcgacctgctggtcagccgcgtgcgccagcgcctgggtgacgacgcacgcgagccgacctacatcaagaccgtgcgcagcgaaggctatgtgttcagcgtgccggtgcagttgctggggccggacgaatga

SEQ ID NO: 511401 - DNA, 690 bp, Stenotrophomonas maltophilia
gtgcacggcgccttcgccgatggctccagctggagcaaggtcatcagcaccctgcacgactggaagctgccggcggtggccgtacagaatccgctcacctcgttggccgacgacgtcgccgccacccgccgcgcgattgccgccgcgcccggcaaggtggtgctggtcggccatagctggggtggcacggtcatcaccgaagcgggcaatgacccgaaagtacaggcgctggtgtacgtggccgccttcgcgccggatgccgggcaatcttcggcgcaacagggcgaaggtttcccggttggtccgggcctggcccgactgcaggaaagggatggctacctgaccttgccggcggatgccatcgcccaggacttcgcgccggacgtgatgaaaaagtcggccgcactgctgtacagcacgcaggtcccgttgaaggccagcgcgctgggcgaggtggtgaacgttgcggcgtggcgcagcaagccgagctggtacgtactcagccgcgatgaccgcatgctgtcgccgcagctgcaggccgcgaccgcacgtcgcattggtgcacaactgcaatcggtcggcagcagccatgtgtcgctgctttcgcatccagcgcaggtggccgacagcatcctggaagcagcgggggtgaagccggcggaactgccgctggccgagcagggtggctga

SEQ ID NO: 511402 - DNA, 2715 bp, Stenotrophomonas maltophilia
atgtacctcaagtccaatgccctggctgcggccatcggcagcctgttgtgtttctccgtcattcactccgccgccgcgcaggacgcgcaacccaccgatggaagcgcacgcacgctcgataccgtgcaggtgaccggcagccacatcaagcgcgctcagttgtcaggtgtcggcccggtgagcgtggtcgatgccgaggccatcgagcgctccggcgccacctcggtggagaccctgctgcagcgcctgccggcatcggccgggttcgccggcagccagagcaatgcctactgggccgagaacggttacggcaccacccaggtcaatctgcgcggcctgggtatcaaccggactctggtcctgctcaatggccggcgcatggtcaacggtggtaccggcgccaacagctcggtcgatctcaacgtcatcccggtgtcgttgatcgagcgggtggaagtactcaaggatggagcctcggcaatctatggcgccgatgcggtggccggtgtggtcaacatcatcaccaagcagggcttcgacggtgccgaagcggcggtgcgttatggccagaccagccagggcgacggcgaggaaacctcggtcgacatcagttggggcatccgcggagagcacggctccctgatggccgcggtcagctatttcgacagtggtgccgtcaacatggcctcgcgcgcaccctgcggcctgatcgaatccgatggccggttggtctgttccggcagctcgagcacgatcggcggccgtgcattgctggccgacgggcagcgcgtcaacttcaaccaggtggctggcggcgacggcgatttctacgagccgtactcggcagccaagcacaactacaacggcaatcccacgctcaatgcggtcaatcccatcgagcggctcagcctgagcgtgttcggcgacagccaactcaatgacagcacgcgcgttttcatcgaggcgatgtacaccaatcgccaatccaggcagctggctacgtcgggcgggctgggcgtgtaccggccgatcaacatcgccgccgatcatccaaccaatcccaccgggcaggatctgctgctgcagcgccggcgcctggaagaagccggcccacggcacttcttccaggagaccgatacctaccgcgtggtggcgggcctgaaaggccagctcggcaccagctgggactggtcggtggccctcaactggggacgcaacacaggcgtggatggctcggacaacgttgccaatcttgatcgcgtcgaccagaccctggaccgcgcgctgtgcagcactgcgcctggtgccgccattccttgcggcgactatctgggctatggcgacctgagccgcgaggtgctcgactacatcctgtacacctcacgcgataccggcggcaacgagcagaagagcttcactgccaacctcagcgggcagatcttcgagctgcctgcgggctgggtgggtttcgccgctggcgtcgaggtgcgcagggagcgcggttggcgcgatcctgacccgctgaccgtgctcggaatcggcaacaccaaccagcaggatccgatcgccgggcgatacacggccaaggaggcttacgtggagctggcagtgccgttgctgcaggacgcggccattgccgattccctgtacctgaacctggccggccgcgtgtccgactatgatctgttcggccgcgacttcaactacaaggtcggcctggactggcaggtcagcccttcattgaagctgcgcagtacctatgccaccgcattccgcatccccaacattcccgaactgttcggtggcgtggccgaaggcaatctcaccaccaccgatccctgcagtggctggagcagcctctcggccgactcggtggtacgtgcgaactgccaggcgcatggcgtaccggcgggctatgtgcagcctggcaacaccatcctcaccacctctggtggcaacgcggatctcgaacccgaagacgctacctcctttaccgcaggcgtggtgtggacgcccacgttcgcgccagggctgaccctgaccctggactactaccgcatccgcatcgagaacgcgatccagcgcatcgccggatccaccaagctggccatctgctacaacacgccggcattggcgcacccgttctgcaatgccagcaacttcacccgcaatgcgcgtaccggcgaagtggactacctgtcgtcgcagccggtgaacacggccgatgaggaagtcagtggcatcgacctgggagccctgtacgagttcaagccgtggggcatggatgccagcgtcagcgctgacgtctcctacctccagcgctatgacgtgcgtccatacgcaggggcggaagtgatcacctatgcgggccggatcaccggcggtcgtggcagctatgcccgctggcgcggtctgctgtcgctgaacgccgcacgcgggcaatggtcaggcacctggaccacccagtacatcggccgggccgacgacatcaatgctgcacacggtgatattggtgatcatgcgccttcggtgttctatcacaacctccagctcaggtatgcggtcagcaaggcactggatgtggcgatcggcgtggacaacgtattcgatcgttccgcgcctttcatccagagctacaccgacgccaacaccgacaccatgacgtacgacctgctgggtcgtcgctggtacgcacgcattggctatcgctggtga

SEQ ID NO: 511403 - DNA, 693 bp, Stenotrophomonas maltophilia
atgaaacccgcattctgggcgcgtcgcgcccacaagtggatcggcctggtgatcggtgtgcaggcattgctgtggatgctcagtggtgtctacatgaccgtggtgccgctggaggtgatccatggcgatcacctcgctcatgtgcgtggcgaatcgttgacacctcagcgtgagcgtgtcggcgccgatgtgctggtcacgcgctatccggggctgcagtcgttccgcctcaaaaaggtgctggagcgtgaggtctatgacgtcaggcgcggaaaggagcgcttcctggtcgatgccgtcagtggagagcgcctgccgcggctggaccgcgcggcggccgtcgcgctggcgcagtcgctgtaccagggcacgggcaaggtcgcgcgggtcgactggctgatcgatgcaccttccgaggtgaagacccggccagtaccgatgtgggcgatccatttcgctgatcgtggaagcaccacgctgtacctgtcaccggacagtggcgaactgctggcgcgccggcacagcctatggcgctggttcgatttcctgtggatgttccacatcatggactacgagcatcgcaccgacgtcaacaacaccctgctgcgtgccgcatcagtgatcgggctcgggttcgggctcagtggcctgtggttgctgttctacagctttggccagaggaggcgcgcatga

SEQ ID NO: 511404 - DNA, 1812 bp, Stenotrophomonas maltophilia
atgacgccctggttgcgccgaatgcacaaatggatcggagtgctggtcgggctgcagttcctggtctggcttggcagcgggctgggcatgagcctgctcgacccggatcggatcgctggcacgtcgcaacgggcggggccgttggaagcaccggcctggccggcgggcaccgtgtcgccggtcgatgcgcttcgtgctgcagggcggtcgacggcgaccctggacagtggttggctgctgcagcagccggtgtatcgcttgcagtcgccgcaaggaaccgaagtgatcgacgcgcgtgatggccggcgcatcatcatcgatccggcaatcgccctgcgtgtggcgcaggccgcctatcgcggcgaaggagcagcggctgcgccggtacatctgccgcacagcctggaaacccgggcccaccccgatccagtctggcgggtggacttcgccgatgcacaggacaccacgatctacgtctccgccgacagtggccaggtgctggagcaccgtactgcaacgtggcggttgttcgacgtgttctggatgctgcacatcatggactacgccgcacgggtgaacttcaacaatccgttggtagtcggcatgggagtaggggggctatggatggccttgagcggggtctggctcctgctggcgagcttccgcctgcacgagttcgttccgcggcggtggcgcggtcatcggcagttgagggtatttgcgcagggcggtgtccatctgcgcactgtcgccgcggcccgtggtgacagtgtctatctggcgctggcacgcgagggcgtgaacctgccttccaactgtggcggcggccagagctgtggcttgtgcgaagtgcgggttcgaggggatgcgggtgtacctactgctgcggatcgtgcacatctggccggatcgcgcttgaaggtgggatgccggttggcctgcaatctgccggtggactcggatctggagatcgaagtcgccggcggtccgagcctgtggaccgaacattgggcaaccgtggaacgggtcgaggcggtgacgccgttcctgcgcgaggtccacctgcgccctgataatgcagccgacacgctgtaccaaccgggttgctatctgcaggtgcacgtacccgaatatgacgtaccgcgcagcgcactctggcacccggacgagcatcgcctggattgggggccgctgccgttgccggcgaccctgcacaacaaggccgccgttcggcgctcgtactcgctggcgatgccggttgccgctgcggatgggcagttggtgctgctggcccggttcagtccaggttggcaggatgcaaagcggcatcctccgggcaagggctccacgtatctatacaccctgcggcccggagaccgcgtccgctacagcggaccattcggcgatttcgcgctcagcggtgtggcccgggagaagatcttcatcggcgccggtgccggcatggcaccgctgcgggcgatgatcgaacagcgcctggccgagggcggcgatgaacgcattcattactggtacggcgcccgcagtcctcgcgactgtccctatggggcacggatgcaggccttggcggcagcgcacgcgaacttcagctggcacccggtgtgctcgcaggaaggggagggcaggcgggtgcatgacgccatccacgaggacctgctgcggcagcacccggacctgtccgcgtgcgagttctatctgtgtggtccaccgccgatgctggcagcgacccggcagctgctgcgccggctgggtgtgacggaggagcggatcgcgtacgacgacttcaagatctga

SEQ ID NO: 511405 - DNA, 327 bp, Stenotrophomonas maltophilia
atgaacatacgttccgtccgtcgccctgcagctgaacgcgtcagcgtcgaacgtgcccacccgcacctgctgcgcaccgtgcagcagctggccctggccggtgtggcgctggtcctggtctggccagccgcgcgcggcagcaacgcctggctcggttggttgccgatgtggctggtgggcatgccgctggtggcctggtgggcgctgctgcgcttcccgttgccgcgcctgtcgtggctgcgactggcgcgtcgtaccggtggacaggcccgccgccgcagcggtggggcggtgcgtggccgtcgcggctcgcccaccacggcctga

SEQ ID NO: 511406 - DNA, 993 bp, Stenotrophomonas maltophilia
atgaacaaatcgaattcgctcgcccatgtgctggcctgcgcgctgctgggtgccggtctggtggccgtcagtgccccggcgtcggcgggtctgcgcgacagcttcgccaacagccgcacctcggcccaggaacagagcaagaagggccaggccgagattccggtctgcaccaagccgctgggttccatctcggtgatcgagccggaagacgtggtgaactggtggaccggccagcagttgccggcgccttcgaagctcatcaaggtcttcgtcaacaaatccaagtgcttcacgctggtggaccgtggcgtcggcatggccgcagcccaggccgagcgcgcgctggccagcgaaggccagctgcgtggtcgttccaacatcggcaagggccagatccgcgccgccgactacgtgctggtgccggacctgatctcgcagaacagcaatgccagcggcaacgccattggtggcctgctgggtggcctgatcggcggcaaggccggcgccgtggtcggcggcctgaacttccgcagcaagaccgcggatgtgaccctgaccctgaccgacgtacgctcttccgagcaggtggccatcgttgagggcaactccaagaagaccgatctgggctggggcgccggtggtggcctgttcggcggtggcggcatcggcgcaatgggcgtcggtggctatgccaataccgaaatcggccaggtgatcaccctggcctatctgcaggcctacaccaacatggtggccgagctgggtggtctgccggccaatgcctcggcggccaatgccggccaggctgtgaccatgctcaaggccggccgcctgctggccaatgccaagggcaccggcgctccggtgcgctcgctggagccgggcatgctgctgtaccccaccggcgtcaaggaaggcaccatgtgggaagtggaagacgaaatgggcaacaagggctgggtcaattccaccctgatggaaacggccaagtaa

SEQ ID NO: 511407 - DNA, 1188 bp, Stenotrophomonas maltophilia
gtgttcaatcgacaggccccgcgttgggcccataccctgccatcggccattgcgctgatggcgccgttcgacctcctggcctcgctggccatggatatctatctccccgtagtgcccttgatgcccaatgcgttgggtgcatcgcctacgctggtgcaattgacgctgagcatctacatgctgttgctcggcatcggccaactgctgttcggcccgttgtccgaccgcatcgggcggcggccggtgctgctgctgggggcgttgctgttcaccgttgcgtcgtttgcgttggcgctgtccagcagtggcggcgcattcctggcttggcgcaccgtgcaggcggtgggggcgtcggcggcattggtggcgacctttgccacggtgcgtgatgtatacgcggatacagcggaaggcgcgtcgctgtacgggctgttcgcttcaatgctggccttcgtaccggcgctggggccgatgctgggggcactggtggcaacggcagcggggtggcgcgtgatcttcgtgcttctgggcgtgcttggcgcggttgccggcctgcgcgcgcaacgccagtggcaggaaagccgcccagcatctggtgcagaagcgggaccggcactacagagggtgcttcgcagtggcgccttctgggcatacacgctgggattcagtgcggcgatgggtacgttcttcgtgttcttctcgattgcaccgcgcgtgctggtcgagcgcatgcagtattcgcagatcacgttcagcctggcgttcgcgaccgtggcactggtgatgatcctcacttcgcgcgtggcgaagcggttcattgcacgctgggcggtacgtggcactttcctgcgcgggctctgcgtgatgatggtgggtgtgctgctgatggcgctcgctgcggtgtttccactgtcatttgccagtgtcgtgctgccgatgtggggcattgcggtggggctggtgatggtcgtttcggtggccgcccatggcgcgttgcgtgatttcgccgacgcgtcgggtacggcggtggcgctttactacgccgtacagagcgtgatcgtggccggcttcgggacactggctaccgtcttgttgccaggggacacggtgtggccgctggtggcctatggcctgctgttgcccctggccagcctgatcgctgtggcggcgttgcggtgccgcacgtag

SEQ ID NO: 511408 - DNA, 1719 bp, Stenotrophomonas maltophilia
atgcctggtacgctcagtcgtcgcaccttcctggccagtgccgctgccgttccagcggccgcgctcatgccggcgggcattgctaccgggaagacatatgcagtccttactgagagcttgatcgagacggaacgggatgcaatccgctccgccatgaaaggcagcgacatcggtgccgctgccgtatgcctggtcgaagacgggcaggtgcgctgggccgagggcttcgggtacgcatcgggcgacggtagtgcagcagtagacgccagtacgatgttcagcatccagtccacctcgaagaatttcgcggcggtggcggtgctgttggccgtgcaggacggcatccttgatctggacgcgcccattacccaccatctgccgtcgttcacggtgcgcagccgctttgagcattcaccgcaggagcacatcacgctgcgcctgctgctcgccaaccgtgctggattcacgcacgaggcgccgctgggcaataactacgaaccggcgtcaccgggctttgatgcgcacgtccgcagcatctcccagacatggctgcgctttccggtaggtacgcgctaccgctattccaacctgggcttcgaccttgcaggccatatccttgagcaggctgcgggtgtcgattacccgcagtggctgcggcgtcggatcttcgagccgctgggaatggacgacagtacggcggatgcgtcggtctatctggcaagcaagggccgcgcattgggaacccaggaaggcttcgtgcaggtaccgccggtgacgccactggtggtgtccggtggcgtctggaccagtgctgccgacatggcgaagtatcttggcttcatgcttgctggcggtaaggcaggcacgcagcaactgctcgcacctcatctctgggacgagatgcatggcttcggcctgggtggcgactacgggctaggtgtgatgcgcagcgagcgccgctacggcagcacaccggtacggctgctgcaccaccgcggtggcggcttcggattcggttgcgttttcacgtactgcccgcaggcgcaggtgggtttcgctgcaatgttcaaccgtgcgacgtccgcagggtacggcttcggcgagcgtctgctcgatcgactgttgtcggcgcgtttcggaccacggcagccccgcgtgccggtatcgtcgctggcgccgatccgattgaaccagagccagctgcagcggatggcgggaaactggattggtcgcagcgccaaagcgaagattgtggctgccgaaaatggtgaattgctgctgcgtcgagaggccagtgaagcgggtacccggcttgcggccatcgacggcgatcaactgtttaccgaaggcgccgatggagaggttgcgacgtaccgttaccatgcggcaacggacatgctgcctgcgcatctggaatgtacgaacggggaagatggcctggaccagaacgacaccatggagatgcctgccgggccgaataccctccattggcacccctggttgggtcgctatcgcatcgaccaatggggcaagccgtcaatgtccgttgtgctggagcaacgacagggctggctgtacatcgatggcatccgcctggttgctgaagtggagcctggcctgttgttcaccagcgatggcgaagccgtggacttccgtggcccccagccgacgtggcgcaacctgcgcttgcagcgcgtccgcaatgcggacgctggctga

SEQ ID NO: 511409 - DNA, 669 bp, Stenotrophomonas maltophilia
atgaaactgctgatcttgctgctctcgctgtcaccgctggttgcctgggcggatattccacaaccaccggcatgcaatgccgagagtttcttcagcagccagttcgactatgccgtgggtcgcgtggtcgacgccgggcaggtgctgctgctgggcgaggcagaaggctgcctggacgaggaacgggaggggtgccgcagtggcgaggagatggaaccggggaccggcctggtgatcggcgacagctggaacaactactactgcgtgaaagcacgttcgccgagcaaggaagtggtgggctgggcgccggagtcgcgcgtgatgaaaacgagtaactactacgagaccagcttgaccagctgggtcgcccattgggaacgcagtgacggaaatgccatcgacatcgcggccaagggggacgcattcgagctgagcacgcaggagggcggcgagggggcggcaccgcgggtcttgggccgcgctgcaccggaggaggacgaagacgtactgcatctgcgccagggtgactgcactacacgcgtactgctgcgcggcgccgacctggtggtggctgacaacggacagtgtggcgagcacgagcgccgcctgcgcggtgagtaccacaaccgtgcgccgttggatcggttgatgcagcgcctggggcagtag

SEQ ID NO: 511410 - DNA, 2574 bp, Stenotrophomonas maltophilia
atgaccgggttgcgtgccactgcccgcctgcagttgcaggcaggcttcaacttcgaggctgcctcggcgcagcttccgtactacgccgcgctgggcgtcagtcacctctacctgtcaccgatcgctgctgcgatgccggggtccacgcatggctacgatggcattgatccggccagcatcaatccggacctgggcggcgaagcgggcttcctgcagctggcgacaagggcgcgctcgcatggcatgggcctgatcctggacatcgtgcccaaccacctggcggcgtccccgcatacgccgtggtggagcgatgtgctgctgcacgggcgtcgaagcccccacgcagggtggttcgacatcgaatgggaggcgccggactgcgagggtcggctctggctgcccgtactggaccggccattgcacgacgccgtgcgcgatggggtggtgcacgtggtggtggacaacgcgcggcccgtgctgcgccaccatgggctggcattgcccttgtcgccgcgcagccatccgctggcacccgcgcagtggccagcctgggccgagcgctgcaaccgcagcgtggagcggttgcacgcgctgctgcagcggcagcattaccggctggcctggtggcgcacggcgggtgaccgggtgaactaccggcgcttcttcgacatcaacgagctggccgcgttgcgggtggagcgcgacgatgtgttcgaggcggtgcatgcactgcccctgcggctggtacgcgagggctgggtggacggcctgcgcattgaccacgtggatggcctgtcgtcacccggtgcctatctgcaacgcctgcgggcgtcgctcgacgcggcctgcgcggccggcggtcgtgacgcacaggcagtgagcgtgcatgtggagaagatactggcggaggacgaacagctgcccgatggctgggcctgcgacggcacgaccggctatgacttcatggaccaggtcggcgcgtggctgcatgatccggcagctgcccccgtgctctcccgcgccgggcaagcggcgagtggcgacgcgcgcagctttgacgacctgcagcaggatgcccgcggcatgctgctgcgcacgtcgcttcacgccgacttccagcgactgctgcgcagcgcgcagcaggtgctgcagccccggctggccgaagccgatatcggagccgctgcgctggcccgtgcattggctgcgctgctgcggcactaccgtacctaccgcccctattcgctgcagggtgcgggtgaacgaaaggcgctggtggacgccgccgcgtcggcacgcgaggcactggacggtgcggcacgtgtggcgctggatctgctgctgcgggcacttccgggcgacgcgctggccgatagcgcgctgcgcgtgcgcttcggtcaactggccgcgccgttgaatgccaagtcggtggaagataccgggttctatcgctatttcaggctgctgtcgcgcaacgaagtcggaagtgatccgcagcggttgggcatggagggacgagagctgctggaacacgcagtgggacgcctgcagcgccatccgcgggcattgcttgcgctggcgacccacgatcacaagcgcggggccgacagccgcgcgcggctggcggtgctcagcacctgcacgacggactggcgtgccgcggtacagcgctggggccggatgacggccaaggccgggatgccgatgccgttgccgggcgcggaggcatatgcgctgtggcaggcgctcgttgcggcgtggccgatgcacggcgccccgggcgctgacttcgcatcgaggatggagcagtggctgatcaaggcgttgcgtgagggcaaacgggtcagcagctggtccgatccgaacgtggcggtggaggaggccgccgcgcagtggctgcacgcgcttctggatgcagcaccattgcagccggtgcggcaggcgctggcgaccttcgtggcgcgcatcgcgccggcaggcgcctgcaacggattggcacagctgtgcctgcagcactgcctgcccggtgtgcccgacctctaccagggcggcgagggctgggacctgagcctggtggacccggacaatcggcatgccgtggattacccggcgcggcaggcgtggctgcgcgacgcgcgcacgtggcccacgctgctggaagactggtgggacggtggtatcaaggcatttctgctccggcagttgctggattgccgccgcaggcacccgcagctgttcctgcgcggccaactgcagtcactgtccctgcctgcgcgctcgccctggctggcgttcacgcgcaggcatgaggcgcaggtgctgctggtgatcatgcggcgtggttcgcccaccgccatgcgcggtcccggcctgcacacggcgcacgacgtcggtaccggcgtgacgctgcgcgggctgccagcaggccccatgcgcaacctgctggacgggcgcatcgagcatttcaacgcgaccgcggatgtgggcaggcttctggctgacagcccgctggcgatatggatcaacgaggagacaggtagggatggacagcagggaacgacggcagcggattga

SEQ ID NO: 511411 - DNA, 1527 bp, Stenotrophomonas maltophilia
atggccagcgctgtccagtccgcttcatctgttgcgacctcttccggttcgctcgtgccgatcggcacccgccgtggccactcgcaaccactgcagctgcctgaactggtacagcgcgtgttgttcgtcgccaccgagatggccgacttcatcaaggccggaggcctgggcgacgtggccgcagccctgccgcgtgcggtacgcggcgcctgtgattcgcgcgtgctgctgcccggctacccggaggtactgcagcgcctgccacagctgcagcgggtggggcaggtcagctcgcgggccggcttgccagcgtgcacgatcggcatggcggtgcaggcagacggtcttccgatctatgtgctgctctcgcctgagctgtacgagcgtgaaggatcgccctacgtcgacgggcagggccaggagtggaaggacaacgcggttcgcttcgccacgctctcacacgcggccgcggagatcgcggccgggcgtgccgggctggactggtcgccgcagctgctgcacctgaacgactggcccgtggcgctggctgcggcatacgtgcgctgggaccggacagccgtgccgaccctgctgacgatccacaacctggcttaccaggggctgtttccgtacgcgcttgcccctgcgctgggcataccggccgaacacctggatgagcttcacttccacgggcagatgtcgttcctgcagggcgggatcaccaatgccacgcgcctgaacacggtcagcctgcgctacgcgcagcagatcactgccccggacgatggttgcgggttgcacgacctgttggcgcgccgagcggctggtggccacctcagcggcatcgtcaacggcatcgacgccagctgggacccgcgtcgtgacatccacctcaaggcccacttcggcattggtgagtggaccggtcgtgccaccaatgcgcacgcggtgcgcagtgcattcggcctggcgccctccgctggcccgctgttcgcggtggtctcccgcctggtgcaccagaagggcctggacatcacctgcgacgtggcgccacagatcgtggcggccggcggccagctggtcatcatcggaggcggcgagccgcaggtggaagcgcaggtgcaggcgctggcccggcgctacccgggtcgcgtgggcgcattcatcggcttcgaagaggcgctggcccgccagatgtttgccggcgccgacttcctgctgatgccttcgcgtttcgaaccctgcgggctgagccagatgtacgcgcagcgctttggctgcctgcccatcgcgcacgcgaccggcggcttggtggataccgtcgaggatggcgtgaccggattcctgttccacggcgccaatgctgatggcctgcgccgttgcgtggaacgggcgatgcgcaccttccgcctgccgggcctgctgcaggccatgcgccgcgccgccatgctccggccaggtggctgggatgcggcggggcgtgcgtatctggcgctgtaccagcagacttgccaggtggccgcatga

SEQ ID NO: 511412 - DNA, 705 bp, Stenotrophomonas maltophilia
atgccaagggcgaatggctgcgctgccgcgagcaatgaatcggggtgtaggggcagcgcccctacggaagcgcctcacacgcgctggcggcgtttcggccccggtactggcaggacggctgcgggaggttcggcgtcggggccagcgatcaccctggacaaccgctcttggcggcgggccatcaaggtggccacctcgatcacgtcagccggcactgcaggaaagctgtttctggcagccttagtgctgcaacggtttcgagggtgtcccgatcgaggatcgccgcgaagttggcccatcatccggcgccattcctgtgcctgtgcggccagcagggacagccatgcaaggtcctgcggttccaactcgcggccttcaggtgtaaccagtcggccacgcttaaacgaaaaaccggcccaagggccggttaggttgcgatcacgcacaatcaggctccatgccacagcagggccaagggtcgaggcaagctctgtgccagtctggcccacaccctgcgaacataatatacattatgcgaaatgctgtatcgggcgtgatccggttcgtgggctcggcttggcaatggctccggctctggctctggtgactgccacaacggaaacgccccagatcccacagctgtccgcccgtatttccccacaaggacgcccgcgatttccagatctcccccaaagatgcccttga

SEQ ID NO: 511413 - DNA, 993 bp, Stenotrophomonas maltophilia
atgaggttccgtacccttggacaaggccttgaagtttccgccctcggcctgggctgcatgggcatgagttcggcatatggcccggccgccgacaagcaggaaatgatcgcgctgatccgcacagcggtggagcgcggcatcacccacttcgacaccgccgaagcctacggcccctttgccaacgaagaactggtgggcgcggcactggcgcccgttcgagaccaggtggtgatcgccaccaagttcggcttcgacatcgacccggtcaccggtgcccgcggggcaggcaccaacagccagcctgcacacatccgggcagctgtcgaagccagcctgaagcggctgcgcaccgagcgcatcgacctgctgtaccagcaccgtgttgacccggcggtacccatcgaagaggttgccgataccgtgaaggcgctcattgcagagggcaaggtcgcgcatttcggcctgtccgaagcgggtgcgcagacaatccgcagggcgcatgcagtgcagccgctgacggctgtgcagagcgagtactcactgttctggcgcgagcccgaagcagagctgcttcccctgcttgaggagctgggcattggcttcgtacccttcagcccgctgggcgctggcttcctgactggaaagatcgacgagcacacgcagttcgatgcaacggatttccgcaatgcggttccgcgcttctccgccgaatcacgccgggccaacatggcgttggtggaggtggtgaaggcgatggctgcagggaagggtgtgacgccggcgcaggtcgccctggcctggctgcttgcccagcacccgtggatctcgccgatcccgggtacgaccaagcttcatcggttggatgaaaatctgggtgcagtggatctggtgttggacgaggccgacttggcacgcatcagcaaggacgttgcacagatccgggtcagtggcgctcggctgccggaggctgcgttgaagatgaccggcaagtag

SEQ ID NO: 511414 - DNA, 471 bp, Stenotrophomonas maltophilia
gtggttgcctgcttctcacgttcgggcaacacccgggtggttgccgggctcattcatcgcagcatgcccagcgacctgttccaggtagagcctgccatcgactacccggcggactatcttgaaacggtagccaaggcgcgacaggagcgcgacgacggggtagagccagcactgcgcacccgcattgccgacattgattgctacgacaccgtgtacctgggctttccaatctggggcgagaccgcgccgccgatcattcgatcgctgttgtcgcagcacgacatgagtggcaagaccatcgtgccgttcatcacccatggcggctacggcgtgggcagcagcctgcgcgtgctcgcccaccatgcgcccaacgcacgcatcctggaggcattcgtgatgcaggccgaccaggagcgcagaaccatggagagcgtcaacgcctggttggccactccgcacactgcccgatga

SEQ ID NO: 511415 - DNA, 864 bp, Stenotrophomonas maltophilia
atgttcgcgctggtggcgcgggaacgcagttttacccgggctgctgcccagctgggtatgtcccaacccgccctcagccgatcgatgcgtcagctggaagaacgcctgggcgtacgcttgcttgcgcggaccacccgcagcgtttcgccgaccgaggccggagagcagttgctgcgggtgattgcaccgcgcttcgaggagatcgatagtgagcttgcccagctcaacgcgtaccgcgacaaaccggccggccgccttcgcatcaccgcaggtgaacacgctgcgctgaccgtgatgcagccggtactgggcaagctgctgccggccaatcctgacctgaacatagaggtgattgtcgactacgggctgaccgacatcgtggccgagggcttcgacgccggtatccgcatgggtgagcaggtggccaaggacatgattgccgtgcgtgttgggcccgacctgcgcatggccgtggtcggatcgcccgcctatttccagcgccatccgaagccgaaatcaccgcacgacctgacccggcacaactgcatcaccatccgcctgccgacccacggtggcattttcgcgtgggagttcgagaagaaaggccaggagctgaaagtacgcgtggaaggccagttggtgttcaacaacatcgccctgcggctgggcgctgcgctggaaggcctggggctggcgtacatgcccgaggatctggtgcggccccatgtgcaggcaggcaccctggtccacgtgctgcaggactggtgcccctccttccccggctaccacctgtattaccccagccgcaggcagtcatcgcctgcgttcaccgtgctgcgtgatgcgttgcgctatcgggattga

SEQ ID NO: 511416 - DNA, 1155 bp, Stenotrophomonas maltophilia
atgaccacgcctcgtaaatcaccggcgcagacggcgctgctgggcgctgcatttagcgtggtggcaccgttcgccggcgccggcgaaatgcccatgcagcagatcaccaggtcgggaacacaatcgtccgttgccggtccagcagagaccttcgttggcaacgtgcgcgtggatccgctgttcccagcggacaaggacgtgcaggtctcatccgcatacgtcagcttcgagccgggcgcgcgttcggcctggcacacccatcccgccgggcagcgattggtggttacctccggggttgggctgacccaggaatggggcaagccggtgcagcagatacacgccggggatgtggtggtgtgtccggccggggtcaagcattggcacggcgccgcgccgcacagcgcgatgacccatctcgcggtaaccggtgtggcagagggaaaatcggtggcctggctggagcaggtgagtgatgaccagtaccgccaagcgtcagcaggcatcgaggcgcccgttgccgggccgctttcgcccaggcagcaggcgatcccgctgattgcggccgccgcagccagcagtgacatgccccagctcaacaccgcgttggtccgggggcttgatgccggcctgaccgtgagcgaggcaaaggaagtgctcgtgcagctgtatgcctatgcgggattcccaaagagcctcaacgccctgggcgaactgatgaacgtggtgcgcaaacgcgaggagcagggtatcgccaccgcacccgggaagccgcccgccgggaaggccccggtaggcgatgcactgcgcgccgtgggtaccgcaaaccagacgcggatctccggtgccccggtggctggcccggtcatggacttcgcgcccatcatcaaccagttcctgcagacacatctgttcggcgacatcttcgagcgcgacaacctggactggcagagccgtgaacttgcaacggttggcgcgctggcggccatgcctggcgtggaggcgcagttgcgctcgcacatggcggccagccagcgcgtgggcctcagccgcgcacagttgcagcatctggcccagctgctggcacatagcggatatgcggccgcatctgcccgcgcggtgcaggcactggaacagaccccggcaccgtcgccatga

SEQ ID NO: 511417 - DNA, 1059 bp, Stenotrophomonas maltophilia
atgaagcacatcgtgcgcgccacgctgttggcgatgtctctcggattggcagcaggcaacgcgtccgctgccgactacacgctcaaccccttcaaactggcctacgaaggtgcgatcacgcgcaatgtgcccagtgaggtcaacattcactcggtgtcctacccgctgaatggaatcgagatcgcggcaaacttctacacgcccgccaattttgatgcctcgcggaagtacccgaccatcgtggttgcccaccccaatggcggggtcaaagagcaggtggccggcctgtacgcgcaacgcctggcccagcagggctacatcgccattaccgccgatgcggcctatcagggggcaagtggtggccagccgcgcagcgtggacatgccttcccaccgcatcgaagacatccacggcatggcggatttcatcagtcgattcccctgggtagacacctcgcgcctgggcttgctcggtatctgtggtggcggcggctactcgctggcggccgcgcagaccgacaagcgcttcaaggccgtcgccacgatcagcatgttcaactctggccgagtgcgccgcaacggttatgccgactcgcagctggacaccgtccagcagcgcctgcagcaggcttcgcaggcgcgcgcacagcaggccgccggcggcgaagtgctgtactccggcgatgccaacctcagcgacgagcagatcgccaagctccccttcgatctgtatcggcagggctatgagtactactggaagacccatgcccatcccaattccaccttccgctacacgaccagcagcctgctggacctgatgcgctgggatgccaccaaccagatcgagctgatcaaccaaccgctgctgatgattgccggcagcaaggcggacagcctttacatgacccaggatgccttcgccaaagcaaccggtaccatcgacaagcagttggtgctgctggagggggccacgcacatcgagacctactgggtgccgaagtacgtggatgctgccgtcgcctcgctcaccacgttctacgcccggacgcttgcaccatga

SEQ ID NO: 511418 - DNA, 1095 bp, Stenotrophomonas maltophilia
atgcagactcgtacgcgccttcgcactctggtgcccagcttcccctccacactgctctggatagcggtttccctctgcgccacgaccgccatggccaacgagccactgcagatcgattcgcaaggcagcttcctcgctgggggcacgaccaagaaggagtctggcacgttcgatccgttgaagccctccaatccggatggccagagctatcacggcgatcacgtctatgccttctaccagaagccggtgaacgcgcgcacgttgcccatcgtgatgtggcacggtgcgggccagtcttcgaagagctgggagacgacggccgatgggcgtgagggcttccagaacctgttcctgcgtcgtcgtttcgctacctacctgatcgatcagccacggcgcggcaaggccggccgaagcatggtcgaggcgacgctgaagcccgtggcagacgatcagatgtggttcaaccagttccggatcggcctctggccgaactacttcgctggcggccagtttccgaaaggggaggccgcgcttgaccagttcttccgctcggtcacgcccaacaccggccccttcgacctcggcatagtctcggacggggtagccgccgtgctgcagaagacagggcctgcgatcctgtttacccattcgcaggcgggtggtcctggctggatgacggccataaaaagccccaacgtccgcgcaatcgtcgcgttcgagcctggcagcagcttcgtgttcgcaaagaacgatgcgccggcacccattcccagcgcgttcgataccgtcgccccggcgctggtttcgcccgcggaattcaaggcgctgacccgaatcccgattctggtgctgtatggcgacaacatccctgacaggcccgttgacctgccggcgcaggacagttggcgggcccggttggaaatggcccacgcctggcgtgatgccgtcaatcggcagggcggtgatgtcagcctgatccatctgccggagatgggaatccgtggcaacagccacttcctgttctcggacctcaacaacgtccagatcgccgatctggtgagtgagttcctgcggaagaagcacctggatcgttga

SEQ ID NO: 511419 - DNA, 126 bp, Stenotrophomonas maltophilia
atgaccgcacaggacatgacggtcgagttccagcagacaggcggcggcaagccgggcagcttattgctgaagcgcggtagcagcacttatgtcgccacgccggcacacgagccgccgcgtcggtag

SEQ ID NO: 511420 - DNA, 435 bp, Stenotrophomonas maltophilia
atgcagagtattccgcagtggctgttctgggctggattgtccgcgatattcgctgcgctgacagcactgtttgccaaaatgggagtaaaaggcgtcgacccggacctggcaatgtccctccgcaccctcgtggttgccgcggtgatcctgcccttggtggtggcaacaggcaaatggtccaatccgctgcttcttccaggccgaacacaactgttccttgtcctctccgccttggccaccggggcctcgtggctcttctattttcgcgcgttgcaggtaggcgagctggccaaggttgcggtggttgacaagctgagtgtggtgttggcggttggcctggcattcctgttgctgggagaacgaccagcgccccgtgaatgggctggaatcggcctggtgctggcaggcgtcattgtcctggccacaaggaagtag

SEQ ID NO: 511421 - DNA, 1263 bp, Stenotrophomonas maltophilia
gtgaccagtcggacgcttgcccttcgccgcgcactgagaaagctgggccctggcctgatcacaggggctgcggacgacgaccccagcggcattgcgacctactcccaggccggtgcccagtttgggttcgggatgttgtggacggttgtgatcaccttgccactgatggtcgccatccagaccgtgagcgcccgcatcggctacgtgagccgacgcggggtcgcagccaacatccgcgaggcttacccacgctgggtgctgctgtgtgtagttgggctgctggtcacggccaacacgctgaatatcgcagccgatatagcagcaatggccggggcgctgcgcatactgctcggcgggtcggcgcatgtctacgcggtgacctttggtacgacctgcctcctgctgcagatcttcgtaccgtaccgcgcgtacgtccgcaccctgaagtggttcaccctggccctgctggcctatgttgccgttgccttctcggtaaagctggactggatatcggtgctgcacgatgcggtgttgccatccatcgccctcaccaaggagacgctgttgatggtggtggcgatctttgggaccaccatcagcccctacctgttcttctggcaagccgcacaggaaatggaggaggcccgcgacgagcgccccaagcgggagcaggaggtgcgccagcacctgcgcaggatcaaggtcgatacgctgatcgggatgacgttctcgaatctggtggcgttcttcatcattctcagcaccggagcgacgttgcacatgtccggcatcaccgatatccagacgtccacccaggctgcccaggcgctgcgtccggtcgccggcgaatttgcctttctgctgttcggtatcggaatcatcggcactggcatgctggcgatcccggtgctggccggttcggccgggtatgcggtggccgaagccgccggatggcgtggaacgctgagcgcgcgcctggatcgtggcgaagggcgtggcttctacggcatcatcgccgccgcaacgcttggaggggtgggcctctgtttcatgccgtgggacccggtcaaggagctgttctggtgcgcggtgctcaatggcgtggtggccgtgccgatcatggtgatcatcatgctgctcgcctcgcgcaccgccaccatgcgcggccacacgatcgggcggcgcctgtgcgtgatgggatggatcgccaccggggccatgggcctcactgtgttggccatgctggcaacgctttggagatga

SEQ ID NO: 511422 - DNA, 1383 bp, Stenotrophomonas maltophilia
atgcgccggacactgctggtcgtgttgctgagcacgctcgcgctcctgatgggagtcgctggattcttcagctatcgggcaggcttacaggaagccggggagatgttcgatgcccggctggtacagtcaacacgggtgctgatcgggctggtcgatgaacccctgagtgacctgaccgcatttccgggcgaccccatcgtcctgcgaggctggcacggccaggcgagaggcgttggtgaggagcttgctttcaaggaggggcatgcttacgagagcaagctggccttccaggtctgggaccgggaccatcggctgctgctgcgttcggacagtgcgccatactctccgctggcggctctgcaaccgggctacgccagcccgataattggtggcgagcaatggcgtacattcaccatgcgtaccaaggaggggcggtggttccagtctggcgaacgctctgacatccgcgaagaactggccgaggacattgccggtggcacactgctgccactgctgcttgcgttgcccttgatggcgctggtgatctggtggagcgtcagccacgtgacccgttccctgcggcaggtctccgaccagatcggccaacgtgacccggaacgcatgtcgccgctggatctgggggacgttccccgtgaagcgcacggtctggtccacgcagtaaatggactgttgacgcgcctgaatgacgccctttcacgtgagcgccgctttgttgccgatgctgcacacgagttgcgtacgccgatcagtgcactgaaggtccacgcaggaaacgtccggcaatcgccggatgaggcgggcagggcacaagcacaggatcttctggatgattccgtaggccgcctggaacggctcgtagcgcaactgctcacgctcagccgcgctgaagcgctgtcgcgcgtatcgccagcacgcttgagtctggacgccatcgttgcgacggaaatagatgcactgcgcacattcttcgacctcaaccggcaatatctggcgcttgaactggagagcgtggaggtcaagggaaacgaggcggccctgagcgccttgatccgcaatgtcctggagaacgcgatccgctacacgccggcaaagggcagcattttcgtctgcgtccgtcgcgagggaaacacggcgacattgatcgtggccgacagtggtccgggcatcgcggtggaggagcgcgagcacgtcttcgacaggttctaccgcacgctcggcagcggcgttccgggcagtggattgggcctgtccattgtcagggaggttgccgacgcgcatggtgcctcggtgaggcttggcacgtctgcccggctcggcggcctggaggtgcgtgtggaatggccagcgtacatcgctcattga

SEQ ID NO: 511423 - DNA, 675 bp, Stenotrophomonas maltophilia
atgcgcatcctcctcgtggaagacgacctgtcactgggcgaaggcatccgcactgcgttgcgccgcggcgcgtttgccgtcgattgggtccaggacggcaacgcagccgtgctcgcagccgaagacggcgagttcgacctgatggtgctggacctcgggttgccgcgcgtggatggcattgaggtgatccgccgcgtgcgtgccgccggcaacacggtgcccattctggtgctgagcgcccgtgaacgggcgaccgaccgcacgctgggactggacgtcggcgccgacgactatctgggcaagcccttcgatacaccggaactactggcgcgcgtgcgcgccctggtcaggcgcagcagtggccgtgcccagcccgccctggatgcaggaggcctgcaccttgatccggccaccctcgaggcccggtggaagggtcgtcctcttgacctgacccgccgcgagttcgcgctgcttcggctgctgatggagcagaacggccgtcccatggcgcgcgatacgatccagaagcacctctatggatgggatgaggacgtcgccagcaacgccgtggacgtgcatgtccatcagttgcggcgcaaagtccacgcaagcatcgtccgtactgtccgcggtatcggctacgccctcggcagtgcttcggagaccagcgagtga

SEQ ID NO: 511424 - DNA, 663 bp, Stenotrophomonas maltophilia
atgaagcgcaagcagggtaaggccatgttctatctcattgtcatcgctgcactggtgctggtcggtgttgccgtggcctcagagccgtctgtccccgtaaaccaggtacgcgaccgatgggcacagatcagctaccagactcccaaggcgcagcgcgaggcggcattggtcgcgctttccaggcaggccgcgcagactcgccaggcagcgccccgggatgctggagcactgatctgggagggtatcgtactttccagccttgccggcgagaagggtggaatgggggccttgagcctggtcaagcaggcgcgcgccgatttcgagacggcactgaagctggatccgcgggcgctcgatggtgcggcttacaccagtctcggcgcgctctactatcaggtgcccgggtggccgctgggttttggtgacgatgacaaggcgcggcagatgctgcagaagggcctggagatcgatcccgatggcatcgatgccaactatttctacggcgacttcctgcgtgaccagaaggaatggccagcggcccgcatcgcgctgcagaaagcgctggcagctcccgcccggccggggcgtgaggtggcggacgccgggcggcggcacgaggcggagtcaaagctgaaggacgtcatgggtcatattgcaaagtag

SEQ ID NO: 511425 - DNA, 858 bp, Stenotrophomonas maltophilia
atggacctgcgcggacgaacggtcatcgtgaccggggccagcggtgggattggccgccagttgtgcgcaggcctggtgggcgagggcgcccagatcgtggcggtggggcgagatgcccggcgccttgccgaactggccgacggtctgccggcaggcagcgttgctcccgttgtctcggatatcggcacagctgacggtcgtcggttcctggtcgagcaggtggccgcgctgcctgtcccgccctctgtgctggtggtgggccatgccagtgcggcgttcggtctgtttgccgagcaatctccccgcacattggaacagctgatgcaggtcaacctggttggctcgatgatgctgatccacgccttgctgccgttgctgcagcgacaaccccaggccacggtcgcggtactgggttcgaccttcgggagcctcgcctaccccggtttcgcggcatacagcgccagcaagttcgggctgcgcgggttggtggaaggccttgctcgcgagtacgccggcagcaacgtccgcttccagtatctatcgccgcgcgccacccgcaccgacttcaatactgcctcggtggatgcgatgaacgccgagctgggcgtggccagcgattctgcccaccacgtcgccaccgccctggtgcaggcgctgcgctctggcaatccgcgcttgcagttgggttggcccgaacgcctgttcgcccgcctgaatggcctgttcccggagctggtcgatcgcagcctgcgcaagcagctcccaatcatcaggcgacacgccgcctgcagctcttccaccccatccccaacgtcaacacgcaacgaggattcctcccatgaagcgcaagcagggtaa

SEQ ID NO: 511426 - DNA, 675 bp, Stenotrophomonas maltophilia
atgaatttccacgacgagctgctcgcgcagaccacgcaggagcgtcaatcgctgttgcagatccccatcattggcgacgcgctgtccggaaacatcgaccgcgccgactacctggccttcctgcagcaggcgtaccaccatgtgcggcataccgtcccgttgctgatggcctgcgggtcgcgtctgcctgccaggcttgagtggctgcgtacggctatcggcgagtacatcgaggaagagatgggccaccaggagtgggtccttgatgacatcgcaggtgccggtggagatcgccaactggccgcatcctccgagccggcgctggccaccgagctgatggtcagctacgcctacgacaccatccagcgcggcaacccggtcggcttcttcggcatggtgctggtactggaaggcaccagcgtggccctggccacccaggctgccaactgcctgcaggcatcactggatctgccccgcaacgccttcagctacctgctgtcgcatggtgatctggatatcgagcacgtgggcttcttcaggtcgctgatggacaagctggacgaccccagcgaccagcaggccgtgatccacgcggcacgccgtttctacgtactgtatggcgatatcttccgtaccctgcgcaggggtggtgcgcgcctggcggaggcagcctga

SEQ ID NO: 511427 - DNA, 1491 bp, Stenotrophomonas maltophilia
atgagcaatagctccgatacgttccaggcgttgctcgattcgcaccggcagccgatcctggcaggccaggcccacattgatgcgccggggctgcgcgcccgggtggatcgactggcaggcagcctggaacagactggacagaagcgcgtcgccagtcgcctggacaacgggttggactggctggtgctggacttggccctgcgcgtggtcggcggcgtccatgttccgctgcccacgttcttctccgaagaacagctgcgccatgcgctgcacaccagcggcgcccagctgttggccacgtcggcggcagcaccgccgccggggcctgcaggcagcccagcgccaccgcttcccggcatcgacgccaagggctggagattggacctcggcactggcgggatgctgccagagggaaccgcgtgcgtgacctacacctctggcagtaccgggcgcccgcgcggtgtgtgtctgtcggcggacacgctgctgactgtcgcctcgtctctcgctggcgcggcgcgggcagtgtcgccgcgccgacacctgtgcctcatgccgttgtcgacactactggagaacgtggcgggcctctacgcgacactgctggcgggtgcggaaatcgcgttgccgtcattgcaggaaatcggctacacgggcgcgtccggactggatgtccccacgctgctgcgctgcctgcacagatatcaaccggagagcatcatcctcgtgccccagctgctgcttgcgctggtgatggcagccgagcagggcgccgctcttcctgcatcgctgcgctatctggccgtgggcggcggaagggtggccacgaccctgcttgcacgtgcgaaggtgctgaacctgccggtgttcgagggctatggcctgaccgaatgtgcgtcggtggtctgcctcaatcgacccgatgcaaggcgcgagggcagtgtcggccagcccttgccgcatgcgcgggtgcagattgtagacggcgagatcctggtggccggcgcacgtgcacttggctatctcgggggtgatccgatgccggaaggtcctgttcgcaccggggacctggggtatatcgacgacgaaggtttcgtccacgtcaccggccgccggaagagccttttcattacggcattcggccgcaatgtctcaccggaatgggtggagagcgaattgatgtcgcatccaagcatcgcccaggccctggtctggggagaggcgcaggcggacaacgttgctgtgctggtgccgcggcgtccggacatggaggccagcgtgctgcagggcgccctcgacgagataaatgccggcctgcctgactacgcgcgcgtcgcccgctacgtccgtgcatcgccattcaccgccctggcagggttgctcaccgccaatggtcgccccaggcgtgaggcgatcctcgcccattaccaggctgagatcgacgcggcgtaccgccggcctgccttcaccgcttcaggagaaaacgcatga

SEQ ID NO: 511428 - DNA, 660 bp, Stenotrophomonas maltophilia
atggacacgatcccacagccgattcccctggcccctcatccgggtcggtttgccgaagcctcgctgatcggccccgaccatcccgatcgaagaacggtcgaagcgttcattgccaggatctacgcagagcgctttggtgccgacgtacgcacgttcatgccgcacttgctggcctatcgggacacccagggcgagctggttgcggcggtgggcatgcggcgagccagcgagggcgcgctgttcgtcgagcactacctggacgcgcccgtcgagacggtgctggcagggcgagttcctgcaccccccgggcgtccgcagatcgcagaggtcggtcatttcgctgcctccacccccggcgttgcccgtgagctcatcgtgcaactggcatgggtgctgggtgctgcccaggtggactgggtcctgttcgttgcaacacaacagctgcgcaacgccttcgtgcgcctgcatctgtcaccgatcgagctggccgtggcgcgcgcagagaggatggggcgaggcgccgctgattgggggcgctattaccagtcgcagccgcgcgtgatgtgcggggacatccgcgaaggcaacgcctttcttcgaggcttggcctgccctgtagcgcttccggcgagtgcctgtggagcgggagatgcacgatga

SEQ ID NO: 511429 - DNA, 696 bp, Stenotrophomonas maltophilia
atgagccacggagaattccatcgtagtcagtgcggcggctggttgcgcgctggcgtcctgggtgcaaatgatggactcatatcgaccagcagcctggtcgttgccatggttggtgccggagcggtcacccagaccattcttgtcactggcctctccggccttatcgccggtgcactgtcgatggcggctggcgaatatgtttcggtcagctcacaggccgatgccgagaatgctgacgaaaagaaggagcgcggtgagctggtgaaccagccggaagcggagctgcttgagctgacgggcatctacgagaaaagaggactgacgcgagcgctggcagagcaggttgcccgcgaactgaccgcacatgacgcgctttcagcccacctgcgcgacgagcttgggattcacgaggtactcaaggcaaggccactgcaggcggcggtcgcttctgcagcttcgttcatcgtgggtgcactgccccccgttcttctggttgcagccttggaacgcagcaacctggcagcagcggtcgtggccaccacgctgtgccttctggccgccctcggcgcggtcgcggcccggcttggtggagcgtcgccattgcgcggcactctgcgggtcgtggtctggggggcaatagcaatggcagccacttacggaataggcgcctggtttggcgtgctcgctgccccctga

SEQ ID NO: 511430 - DNA, 774 bp, Stenotrophomonas maltophilia
atgaaccgactgcagaacaaggtatgtatcgtcaccggggcagcacttggcattggtcaggcgtgcgcccggcgtatggcgcaggagggcggcaccgtcgccttgttcgacctgctggatgtggaaggggaagcgctggccgcggaactgcgcgcagcagggggttctgcgcgctactggcatgtggacgtcgcgcgtgagtcggacatcagcagtgcgatcgacgcagtagctgccgccttcggaagcgttgacgtcctcgtcaataatgccggcattgccggtgcgaacaagccgacccatgaacttaccgaagtagaatgggaccgggtccaggccgtcaacgtcaagggcgtgttctttggcaccaagcacgtcattgcccacatgcgccgggccggtgccggcagcatcatcaacctgtcctcgatctatggcctggtgggtgcagccgacctgcccccctaccatgcctcaaagggggccgtgcgcctgatgagcaagaccgatgccctgttctacgcaactgacaacatccgggtgaactccgtgcatccgggttacatccacaccccactggtggagcatcacctgcgcgacagcggcgccaccgatcttgacgttgccctgtccgaacttggcagattgcatccactgggacacgttggggaggcggatgacatcgcgtggggtgtggtctatctggcttccgatgaggcccgcttcgtcaccggcaccgaactggtcatagacggtggctatacggcgcgctag

SEQ ID NO: 511431 - DNA, 2637 bp, Stenotrophomonas maltophilia
atggcatcgcagcctcctctgccggaagccggtcgggtgcagggcctctcctctgccgaggccttgcgtcgcctggcatcacagggccccaacgtgctgccccagtccgacggtcgcagcggcctgcgcatcattcgcagcgtgctcgccgaaccgatgctgttgctgctcgtcggcgcatcgacaattcatctactgctgggcgatcccgctgacgcagccatactgggcgtatcggtactcctcgtggtcggcttgacgttctaccaggaataccgctccgagcgggcgctgaaagcgctcagggagctggggaatccgatggcccgggtacgacgtgacggccggattcagtcgctgccgagccgggacatcgtgccgggcgatgtcctgcttctgtcagaaggcgaccgggtgcctgccgatgcgcggctgctcaccgacggcgcaacggccggcgaccaggcgctgcagctggacgaatcactgctgaccggtgaatcggtagcggtgcggcgagcttccggaatggccgcgcaggaccgcgtacacgccggtacattggtcgtgagcgggcacgcgactgccgaagtgacggccaccggtgctgacaccgccatcggccgaatcggcacgtcaatgcaacacctgcgtacaccgccgacgccgatgcagcggcagatccggcgcgccgtcctcgtcttctcggcgcttgccctcgcggcgagcacgctggtggccgtccttcacttcctccttcaccgagactggctgcaggccgccttggcgggcgtcaccctggcaatggccaatgttcccgaagagtttccggtcgtactcagcgtctttctggcgctcggtgcatggcgcatggcccggcaccaggcattgatccggcgcccgcctgcgatcgaggcattgggggccgtgacggtcctctgcgtggacaagaccggcacgctcaccgagaaccggatggccgtcgtcgaactggtcacggatggagatcgctcgggcttgccgggccacctctcccccgaccttcgaaatctgctggaatccgctgacgccgcctcagcagatgatgccgtcgacccgatggagagcgcgttgcggacagcactgcgtggcaggccatcggtgatgcgcccgcctggtgcgcaacgggtcgccgagtatcccctgacacgtgcgctgctcgcagtggggcatgcctggcgcctgcctggtcgcgctgacatcggcgttttctgcaagggagcaccggaagctgtcgccctcctgtgcggactgccggaaggacagcgagcagccgtgctcggcgacgtcgccgcgatgggcaggcgcggattgcgcgtgctcgcggtggccaccagtcccgcaggcgctggcctgtgctcgcctccggccagcctgggagattgcccgctgcaatggcgtggccttgtgggattcgccgatccactgcgggctggcgttcccgaggcggttcgcgaagcgaccgccgcaggtatccgcgtcctcatgctgacaggcgatcacccggaaacagctcgcgcgatagccacgcaggcgggtattcccggggacactgtggcagtgggtgaggccatcttcagccacgacagggaggagatcgctcgcaagcttcgtgatacacacgtgttcgcgcggatcaagcccgaactgaaactggcgctggtccaagcgctgcaggcgtctggccaggtggtagcgatgaccggggatggcgtcaacgatgcgccagccctcatggcggcgcatgtcggcgtggcgatgggcgcgcgcggcaccgatgtcgcccgcgaagcgtcgtccatcgtgctgctggatgacaacttcgtaacgatcgtgcacgccatccgacgcgggcgcatcatctacgacaacatcgtccgcgcggtgcgctacatccttgccgtgcatgtgccaatcaccggtttggcactgctgccgctgctgctcggggagccgcttgtactgcttccattgcatgtggtgtgcctggagctgatcatcgatcctgcgtccacgctggtgttcgagcgcgaaggcggcgcaccggacatcatgcagcgcccaccgcgcagcccccagcatcgcatgctcaatgcgccgcttgtgctggagagcttgggacaaggggggctcgcgttcgcggcggtcatcgtcgtctatctactgggacgcagcctggccttgcctgcgcaacagaccggcacactgccgtttgtcgcactggtcatctgcaatctctcgctcatcgtgaccaaccgcatcggcgccgagcgagaggcgtggtggcgccggcgcaatccagtgttctggatcatcgtggcgtccgcgctgttgctgctggcctcggtcactttccttgcggggccgtcacgctggttcggttttgagcgccctcccctctcgttgctggccgtcgcactggtgctaccaccccttcttctgggcagtgccgaatggctgcggcaaaggtggctcccgcgccttgctcaccaatggccgcgtcgtccagtgggcggtgagcccgttgatccaggtcaatctgcgcctgcagataacgtgggatcgtcagttccgccctcccacggagattcgtcgtga

SEQ ID NO: 511432 - DNA, 813 bp, Stenotrophomonas maltophilia
gtgatcaaggatctgtttcttgccatgaccggaacgcctggtgacgagcccacgcttgcggctgccgtccagctggcctcggggttcaacgcgcatcttgccgtgcttgaaatggtgaacctgccgatcacctcggccaatccctgggggttcccacccgaacccagtgtgcttgccgtgcatgaagtgctccgaaaggccggccagcagaacgcgtcgagactacggtcatacctggagacgcaggggatttcctgggaggtccggctggaggaagcattgctggaagacccggcccatgtcgcagcgctgcacgcgcggttcagcgatgtggcatgcgtcgcggccccgccccagggaaatggcgacaggggcctgatgcatgagtacttccacgcgctgcttttcgaatcggggcgaccggtgctggctgtgccggcccgcgccgtcgtgcacgccccacccagtcacatcgtcatcgcctggcatcccgccgaggaggcgagccgcgccctgaacgacgcgcttcccttcatgaccgccgcaaaggaaggaaagcggaaagaacgggagcggatcggcctgaatatcgggatccatctggcccgtcatggcatcgaggtcaacgttgtctccaggccgcccgtgggcgggtccatcgcgcagagtctactggcacatgctcgagcatcgggggcgcagctcatcgtagccggaggttatggacattggcggacgcgcgaatggctgttgggcgaggtcacccgcgaactgctgcatgccacgcatctgccggtgctcttcgctcattga

SEQ ID NO: 511433 - DNA, 546 bp, Stenotrophomonas maltophilia
atgacaagctcgcccgctacccagaccaccactaccgaaaaaccgtggttcgaaacgctgcgcgatggcagcgatgtgctgatccgcgccgtccgcccgcaggatcgggaggccgaacgcgctttcatcgaggggctctccagccaggcgcgccactaccgctttcttggcggtctttgtcatcccagcgaagcacttctgtcgcgcctgactgtgatcgatcctgtcagagaggccgccttcgttgcgctcgacacgggcgaggtcaacggcagcatccttggtgtcagccgtttcagtgccgacagcaagggtgagcgctgtgagtgtgcggtcaccgtatccgaccaatggcagagcaggggcctgggtaccgcactcatgcgccatctcatcaatgtcgcgcgatcacgtggcatgcggacgatgtattccgtggatcttgccagcaacgccgcgatgaacgacctggcacgtcatcttggtttcagttgccggaccgaccccgacgatccccgccaggtggtccacgaactgcaactgtaa

SEQ ID NO: 511434 - DNA, 711 bp, Stenotrophomonas maltophilia
atgttgctcggtcagcttcttcctgattcatccctgcagcttgtggctccagagcttgcccaggaaccgcccggcaccggcccgcagggcatcatggcactgttgcagaacatgccggtgcaacgccgccggctgcagccgagggaattcctttttcgtgccggccaaccctgccatgccttgttcatggtccacgcaggcctgttcaagacctgcgtgctcagcgaggatggccgggaaagggtcaccggctttcatctgcgcggcgagctgctgggcattgattcattcgacatgccaacctatgcctgcgatgcgatagcgctggacacgtgtgaagtctgggaactgccgttgtcgtggctgaggggtgagcggggcgacctgttgccgtgcattaccggcatgctggcagccgagatacgccgggattggcgttggatgcttgcattgggcaccttgagcgccgaacagcgggtggtggcgttcctgctggatctggccgcacgcctgcagaccctcggctacagcgcacagcatctcctgttgcgcatgacccgcgccgatctgggcagtttcctggccctgcagctggagaccgtcacccgagcgctctcccatcttgatgcggctggcgtaattgtcgtgaaccggcgtgagatccaaatccgtgacgaggcccggctgcgatcgattctggcctgttcctga

SEQ ID NO: 511435 - DNA, 747 bp, Stenotrophomonas maltophilia
atgccagagcgcccttcttgccgcgatagtgcgtccgccacggcaccccacgtgctggtggtcgatgatgacccagaggttgcctggctgctttcgcggtatctgggagagcatggattcaaggtcagcatcgctgcagatggcaacgcgctgcgggcggtgatggacaagtctacgatcgatgcgatcctgctggacctggggttgcccggcgaggatggcctaaacctgttgcgcgagctgcgcagtcgctggcaaggctccttgatcatcgtaagtggtcgaggcgagtccgtcgaccaggtggtggggctggaactgggtgcggacgactacgtgagcaagccctttgatctacgggagttgcttgcacgtatccggtccgtgttgaggagagtgccggcgtcgccgcccccatcttctgccgcctctacgggcttcgagttcgccggcctgcgactggaactcttctcgcggcgtctgatcggccgggatggttgtgatatcgagctgaccaccggcgagttcgatctgctggtcgcgctgttgcgcagacccaaccatgtgctgagccgcgatcagttgatgaccgcggtccacggccgccaagcggggccgttcgatcgcgccatcgacatgcaggtcggccgtctgcgtcgcaagatgaacgccgccggtcaaccgcagatcatcaaatccgtccgtggcgcaggctatctgttcgccgcccagacacatcctttctag

SEQ ID NO: 511436 - DNA, 1956 bp, Stenotrophomonas maltophilia
atggtcggcgtgttcccgcaactgttcgagtcggttcccgacgcgctggttgtagtggacgaaaccggaaggatcgcgctggcaaaccaccaggccgaacggctgttcggttacacagcaggtgggctttccggcctgtccatcgaacagctgatccccgaggatgcccgcgcgcgccaccgcaaccatcgcgcgcggtatatgcagtcaccccgtatacggcccatgggaggtgccggcatggcactggtggggcagcgtcgtgacggagcgcagtttccagtcgagatcgcgttgagtcccctgatgatggatgaaggcctccacttccttgcatcaatacgagacatttccgaaacccagcgtgctcgacagtccttggtccgcgcccgctacgacgcgcttgtcgcgcgcattggccaggaagccatcgagcttaccgacgaagatgcactgatcaaccgcgtgcccgaactgctttcgatcacgctgcgcgctgatgcggtcatgatcgccttcctcaaagaagaacccttgatggaggtcagggcatcgatcggtacaccctggccattcgatggacttctcaacaccgatcattggcagtatgtgagcagtagccacccgctggtgctcgacgatctggaaggaagttcgcgtcccctgccgctgctgggaggcacaacgggtagcggtgccatggtccctctgctcgatcgcggccacacgatgggcgtcgtggtagtccactcgccgcagcgcggggcgttcgaccacgacgccatgcatctcctgcaatcggtagccaatcttgttgccgcgatgatccagcgcaggcgtaccgaggagctgctggcccattcacagcggctggaagccatcggtcagttgacgggcggcatcgcccatgatttcaacaatctgctgaccgtgatgtctggaagcctgcaactgctggaggaacgctgttcggaagatcctgacagtgcggaactgatagcaagtgcgctgcgctctgcctgccgcggtgccgaacttacccgaaagctgctggcctttgcgaggcgacagcgcctcagcccgactgcggtgtctccagcgcgtctgctggaggatctggagaagatgttgcgccgcaccctgggcgataccatacagctggtggtcgaatgcccagcggacgcccctgctgtctacgccgacgcgtcccaactcgactcggcccttctgaacctgattctcaatgcacgcgacgccatgccaaacggcggagagatccgtctgagcgccgaagcagtggtatcggaagaggacggcgccagcattgtgttcaccgtaagcgacacaggccacggcatgtcgccggaaacgctggcgctcgcagtcgagcccttcttcaccaccaagcaggccggacgcggcagcggcttgggtctgagcatggcctacggttttgtcgagcagagcggaggccatttccacatcgacagcagacttggctatggcacccgggtgagactgtcgctacccgtcgccatcgccagcacccccgacgcgaagccagcaccggccagcgtggtcaacgcacccagcgagtgcgtagtcgtggtggaagatgagcccgccgtacgcaacatcgccgtcgcattcctcagatccttggggtatcacgctcaggcatttggatctgcacttgaggccatcgagtatctggccgcgcacgatgaagccggtgcgttgttcagcgacgtcatgctcggcagtggcatgaatggggtcgagctcgccctctccgcacgtgcaacccatccacacctcgccatcctgctgacgtcgggctatgaggacagccctgccttcgacgtcgatcagtcccgtcagtttgaactgctgcgcaagccctacacccgcgaggaactggccaccgcactgcgacgcagccttgggcaccagtga

SEQ ID NO: 511437 - DNA, 933 bp, Stenotrophomonas maltophilia
gtggtacccactacccggttcacgtcgctgacagccgttgaagtctgggactcacgcttccgctggcgggacggcggaaagctgcacgacacgacggtcgacctgacctggcgacgcgtggccgaggcgcttgccagtgttgaaggtcccatggccccactgtggatgcagcggttcatcagcgtgttcagtcgctgggaattgctccccgacgagcgcttgctggcattggcaggcaccggccaacccattggaacgctgccaggacttgctgccgtcctcaatctcgcggccttcatccgcccgcaacccgtgggcgcggcgagtctggactgccagcgattggtcgcaaccgctggcctcgcggtccgccttctcgacaacgccctgcttcgctacggggcatgtgccgatcagagcctgcgcatcggcttcatcggaatggcagacgcgctgcaccggttgggcacgccgttcggcactgagcgggcgcgccagtttgccgtagcggcggccagcctgctggctgagggatgctttcgcgtaaacgttgacctggcgcaggaacgcgggcaattgatgggtcgtgaatcgctggaccagcgacctgcatttccgcgcaatggcgtgatgcctggatccgttgtgctcgaagcgatgcgcaacggggttcggcactcgcggatcaccgccctggcgcatcatcccgaactggcccgcttcgccaatgacgtcacggacgcgattgagcctctcgcgatcgatgtgcagagagggtgcgatgccttgggaaacgatatccacgtggcaagggccaggctgggtatcgccatccagccctacttcgatgcgcagatcaatgatgccgtcttaggcctgggatctgctacgccgctgcaggcctctgatcggaacggctgtgcgccgcgttga

SEQ ID NO: 511438 - DNA, 447 bp, Stenotrophomonas maltophilia
atggcactacctacccgctggaacgcgttcggtcagaacagtcgctttgatctgcttcccgacctggaagatcttgcgcggagcatcggcctgcgtggcccattggcgcgccagtatgagcatatgctcgagatgcgcatggacgtgacggaggacagccagggctaccacgtccgtctggacgtgcctggcgtaaagaaagaggacatcgacatctcgatcgatggcaaccaggttaccgtaaccgccgaagccaagcgcgaaaggacacatgaacaggaaaaggagttgtacagtgagcggtatgaggggcaggtgcatcgctccttcaacctgcccgccgatatcgacggcgccaaggcgcaggcccattacgatggaggtgttctgaggcttgacctgcccaggaagtcgggcagcggctcgcgaaagttgccggtgaactga

SEQ ID NO: 511439 - DNA, 828 bp, Stenotrophomonas maltophilia
atgtacaaagatatcctgctccctttcgccctgggtcgcgtacacgagggtgccctggaatatgccgttgtactcgcacggcattcgaacgcgagagtggtggcattcataggggcaagcatcgccgtacccatcgcgactggctggatgtactacccatcggagtatgcagccctgcatgagccggccaagaagacggttcgagcactctccatgcgggtggatgagcgccttgccagagaaacggccgcgtgggaggtccgctccaacgagaacgtctgggagagcgcaacctaccagacattgccacatgcacgcacggcagatctggccatcgtcgggttgcatcgacaggatcacggaacggaagtggcatttgccaactcgctgttgatggaagccgggatcccgatcatcttcgtgcctggagacggcgcgcggatcccacccagacgtgtcctggttgcatggaaaaatacgcgggaggccatccgtgcggtacacgacgcgcttcccatcctgaaactggccgagcacgttgacgttctgtatgtgtcatccaaagcgggagcaggacgcaatgacaacgatgcggctggacctctactggcccatctccaacagcattcggtgaacgcgaatcttgtgcatagagaacacatggatggcggaactgcgccagtgatcctgggctacgcgcaggaatccggcgcggacatgatcgtggccggaggctatggcaggtccagggcgtccgagtacatctttggcggcgtgacgcgaacgctgttgagatcaagcacgcttccggtgctgctttcgcactag

SEQ ID NO: 511440 - DNA, 840 bp, Stenotrophomonas maltophilia
atgttcaaagacatcatcgttccgcggaccggttcaagcagcgacgacgaagcgctggttgccgcagtgaggctggcgcgagcagttcagagtcatctgacggtactggaactgatcagtcttccctatccgatggtcagcgcctggggaccgtctgccgacttcgccatcggggacctgtatctgcagttgcaggcgcagggtgaagccaatgtggcgacgttgaacgcccgtctgcgtggagagcacatttcccacgaggtgcgcctggtacaggcattctacggtgcgcctgcgcaggttgctgcccagcaggccgtgcatgcggacatttcagtgatttccggggttgcaggcgatacggccgagggagatcttggccgctcctatttcgggagcctgctgacggcctccgggcgtccggtgcttgtcattcccgaggactccagcgcagcgctgccaccagccaccgtgctggtggcctggacacccacgcgggaatcatccagggcactgcacgatgcactaccgatgctgcaggcagcccggtcagtgcacctgatcgtggtggtggaagacggtaatggggaagtcgaggaacgtggcatgacagagatcgccgcgcacctggaccgtcacggagtgaaggtgcaggcgaagatccagaaaaaggaaggcgccaggacggcggccctgcttctcgagcatgcagctcgcgtcggcgcagacatcctggtcgtgggcggatttggccattcacggttccgtgaatgggcgttcggtggcgtcacgcgtgagttgttgttcgaagcgacgctgcccgtcctctactctcactga

SEQ ID NO: 511441 - DNA, 1476 bp, Stenotrophomonas maltophilia
atgcacaccagtccttccaaggccacgtcgtcacggttccgcctcacgttcctgggggccgcgggaaccgtgaccgggtcgcgctatctggtcgaggcgggctcctgcagggttctggtcgactgcgggcttttccagggatacaaggcgctacgcctgaggaaccgggccccgtttccggttgaaccgggatcgatcgacgcggtaatacttacgcatgcgcacctggaccacagtggctacctgccccgcctggtcgagtcgggatatcgaggtccggtatggtgtaccccggcaacccgcgacctgtgcggaatactgctgcccgactcggctcagctgcttgaggaagaagcaggctacgccaacctcaaaggcagttccaggcatcatcctgcggaggccttgtacaccgttgaacaagcccaccgctgtcttcgacagttgcgcccggtagcctatcgggagcctttcgagccggttccgggactggtggcgacactgcttccccagggccacattcttggcgccgcctcggtggccctggagttccagggaacccgccttgtcttcagcggcgacgtaggtcgcccgcatgatctggtgatgaatcccccctcccccccacctgagtcggattggctggtggtggagtctacctatggcaatcgcctgcatgctggcgccgcgttggacgaagagatcgaacaggcgctctcacccgtactggcgcgcggcggcgtggtgatcatcccggcctttgcggtggggcgcgcgcagcttctgctccatgcagtcatcagcctccaggcgaagggacgccttccggcggtgcctgtacatctgaacagccccatggccagtgatgtcacagcactgtatgagcgctacaaggccgaacatcgcctgacccaccaggatcttgatctgatccggaaggtcacccgtgtcgtcaacagcgtggacgaatcgaaggcactcaaccgcaggcacggtccaatgatcatcgtttctgcgagcgggatgctgactggggggcgcgttcttcatcaccttattgcctttgcacctgaccatcgcaacgcgatagtgctgtcaggccatcaagcggggggcacacgcggcgccgccctggcggcgggtgccacccacatccgcatctacggccaggaagtccgcgtaaaggcgcaagtcgtcgagatctcctctgcatccgcgcacgcagacgcggatgagctcctcgaatggatgggcgcagttggcaaggccccgcgggcggtgttcgtcacccatggagagcccgacgcagctgatgcgctgcggcggcgaatagagcatgaacttggatggaacgcatgcgtggccgaacagatgcagtcggttgatctgacgatgcctgaggctgatgcccactgcgctgcacgaacacacgacgcaggtccaccgcacggagcggcaaccggcctggacggatag

SEQ ID NO: 511442 - DNA, 1260 bp, Stenotrophomonas maltophilia
atgatggacctcatgcaggcctcgaacctcacgccttggggcgtggctacggccggcgggctggggttgctgattggagtggagcgagagcgcagcagtggcggcaattctgaaggtgccggaatccgcacgttcaccgtgatcgggctgaccggcggcttggcggccggggttggcacaattccgctcctcatctcaggcctgggcgtagtgggcatggcgatcgcaagctatcgtcataccgccgccaatgatcccggttcaaccagcgaatttgcgatgctgctgacttggctgctgggggtcaccgcaatgcactctaccgtgctggctgcggcggccggtatcgttgcggtcctgcttctggcatccaagtcccgcatccaccatttcgctacccgacagctcactcgacgggagctgcatgacgcgctgctgttggtggccgttgccttcgtggtgctgccgcttctccctgctcgggcggtcgatccctggggtgcaatcaatccccagcgcctgggcttcctggtggtggcgatgatggtggtgagctcggccggctatctcgcactgcgcttcctggggccgcgactgggcctggcgcttaccgctctcgccggagggctggtctcaagtacggccaccatcgcggcgatggccagcaaagcccgcgatgatccggccaacgcatcggcctttgcaggggcaggattgctttccaacatcggcaccttggcgcagattggaatcgttgtcgcgctgctctgccccgagttgctgacgcctctggcattgcctttgcttgcatcgggtgtgaccactcttgtggtagcggcaatgtccggctggcgggcaatgcgctcactgcagcacggggcgctgtcgccaggtgctcgccccttccaaccccggcatgttcttgccttcgttggcctcatggcgttgcttatgctgctcggcgcttttgcgcggaactggcttgggcagggcacgctggcgtggatatccgccgtatcggggctggccgacgtgcacgctgccatagcggccgcagcgcaactcactgcgggtcgtcaggtcgacccagaggaagccctgcaagccatggcggccgcccttgccagcaattcagtgctgaagtgcacgcttgccatcgcccgcggcgggcgacgctacgcaagctgggtgattgcaggcatcgtcgcgatggtcgccacctttggcggcagcctgatgctggtgctctcaaccgcatga

SEQ ID NO: 511443 - DNA, 837 bp, Stenotrophomonas maltophilia
atgttgaaggaccttctggtgccgttggctgattcaacagcagatgacgcggccatacgtttcgccattgaacttggcgagtcgcagggcgcacgcgtgcgcatcatcgaaacggtctacctgccgcctcctgcgataggaacgcctgatccaacgcccaggccatcgttcctggcggcgcaggatacgctgcgcaaggaagccgccgacagagccgcaaggatcagggcgagaaccgcagaacaccctggaatctccgtggaagttcatgaagccggaactgaaacgcctgcagagcttgccgcgtgcctggccttctctgcggacatggccattctgggtggctggtcaggctttgcgactcccaacccgataggcctggccctgttcaacgcgctgctctttgaagcgggaaggcctgttgtggtggttccaccacactggcggccaggtggcaacgcatgcgcaatcgtgggctggaaaggcacccccaatgcgtgccgcgccctgcatgctgccattccgttactgcagcaggtccagtctgtgcagctggtggaaatatgcaggtaccgggacgagctggacgaggctgacaaggtgatgccctcccttgtcgagcacctccggtgctggggaatcgccgcatccgccaccaagctgcctggtaaacaccgccgctccagtgaggtccttgtcgaccatgccagcacggccaaggcgtcgctgatcgtgatcggcggctacggccattcccgcctccgcgagtgggccatcggcggaatgacaaaagagctgctgctgggagcgggaatcccggttctctatgcgcactga

SEQ ID NO: 511444 - DNA, 645 bp, Stenotrophomonas maltophilia
ttgcagttggaggctggtcgctttgcgttggtctgccttgtcatctatctggggtgttggctttgggccgcagtggagcccagccaccgccgcgactggctgctggagaatcttctggcattcattgcggttccctacctcgtcttccagcagtggaagcagcctttccggccggggaccaatgcgctgcttctcatctttctatgcctacatgccgtgggcgcccatttcacctatgccgaagttccttatgacgcgtgggcacagaagctggttggcgggacggtttccgatcttttccactggaatcgcaaccatttcgacaggctcgttcactttgcctacggtgcattggtggtgcctgcggtaaaggagctctatgcaaggcacattgcggccagcgagttgacgctgaatctgattgccgttcagttcatcgtcgccacgtccgctgcctatgaactaatggaatgggccgcggtgttggtggtcgaccaggacctgggaatggcgtatctcggcatccagggtgacgtatgggatgctcacaaagatgtgctgttggcttcggctggggccattgccagcacggtgggtatcagcatgcgccgcgccgcctctgctcaacgctggccgccggcctga

SEQ ID NO: 511445 - DNA, 300 bp, Stenotrophomonas maltophilia
atgaaggaacgggtgcctgaagtggccgaattgctgaggttcatggccacaccgtcgcgtttactgctgctctgccagctgtcccaaggggagtcgaccgtgggtgccctcgaggaagccaccggcatccgacagcccgccctttcccagcagctggccgaactgcgtcagcggcacttggttacgacgaggcgagagtcacgttcagtcttctatcgcatcgatgacagccgcgttgaggcgatgctggttgcactgcatgggatcttctgcgcggatcaggccggcggccagcgttga

SEQ ID NO: 511446 - DNA, 942 bp, Stenotrophomonas maltophilia
gtgaatacgcctgtcatcgtcgatgctgcattggaaagagctcaggacatcgtgcgcaaggcgcgcgaaggcgccacgcctttgccgtgcgtgaagacgttcttcgaccccgccacctttacggccagtcatgtggtacgtgacccccagtcttcagcgtgcgccatcatcgacagcgttcttgatttcgacatgccctctggacgcacctcaaccggctccgcctcagcactggtccggtacatccgggatgaaggccttcgggttgaatggctgctggagacgcatgcccacgccgatcatctttccgccgcaccgtggttgcagcaacaggttggcggcaagcttgccattggcgagcacatcactaccgtgcaggacaccttcggcaaggtgttcaacgcgggcgcggagttcaagcgcgacggaagccaattcgaccatctgttcgccgatggcgcggagttcaccgttggaaatctgcaggcaacggcattgcacgtgccggggcacacccctgcgtgcttggcctatgtcatcggggatgcagtgtttcctggcgacactctgttcatgccggactacggcacggctcgctgcgacttcccgggaggctcggcccgccagctctatcgctccatccagcgtctgctggctctgccggatgaatcccgggtgttcctctgccacgactacaaagccacgggccgggatcggttcgcatgggaaaccaccatcggcgcggaacgaaccgccaatatccatgtgcacgagggcgtgacggaggccatgttcgtggagatgcgcgagaaccgcgacgcgacgctcccaatgccgcgcctgatcctgccctctgtgcaggtcaacatgcgcgcgggccatctgcccgaaccagatgacaacggggtgcgctacctgaagctgccggtggacctgctatga

SEQ ID NO: 511447 - DNA, 441 bp, Stenotrophomonas maltophilia
atgaccctgcccttcctggcgtggtactggccactcattggcggcctgatgatcggtacggcagcgggtggatttctggtcctgaccggtcgcattgccggcgtctctggcctgcttgccaacacccttggcctgtcgtcaggtggcgaccgctccttgtcgagcctgttccttgcagggctgctgttaacgtcaggcctggcgctggcgatcaagcccattgcgctgccctcgctttcaatctccgctacgccgttgttggtgttggccgggctgctggtcggctttggaacgcgcctcggatctggctgcacgagcgggcacggcgtttgcggtttggccaggctgtcaccacgttccatggttgccaccggcgttctcatgttcatcggcatggccaccgtggcggttgtgcgcatgattgtcggaggtggagcatga

SEQ ID NO: 511448 - DNA, 432 bp, Stenotrophomonas maltophilia
atgatccggctggcggcattcctgtgcggctccctgttcggcctgggcctggtggtctcggacatggccaacccggcgcgcgtacttgcctttctcgacgtcgcgggcaggtgggatccatcactggcgcttgtcatggccggagccctgattccgtcggccatcgcctatcgttgggtccgcgcacgcaatgcgcctgtactggctgcggcactgcatattcccgatcggcgtcagatcgaccagaacctggtcatcggcgcggctgtatttggaatcgggtgggggctggcaggcgtatgcccgggcccagccatcgcactgttggcgacgggtcaagcgtttgcactcgtttttgcggccgcgatggtcctcggcatgctcctccactggcttctccaccgcttgcgctcaacagagggttcgtcatga

SEQ ID NO: 511449 - DNA, 438 bp, Stenotrophomonas maltophilia
atgaatctccaatctctttcatcgtgcctgcgcgtgaccggccagctggctccgacagacatccccgcgctgaaggaggcgggcgtcgcgagtgtcgtctgcaatagacccgacggcgagcagtcggaccagcccgatcaccttgcgctgcaggcggcctgctccagggcgggcttgaactttgcctatctgcctgtcgtgcctggcagcatcaccgatgagcatgtgcagcagttcggaacgctgctggagcagctgcctgcacccatcgccgcctactgcaggaccggcacccgctcggcgtcgctatgggcgctatcccaggttcgtgccggcagcgcgacgcccgaacaggtgctgtccattgcaggccaggctggttacgacctctcctcgcttgcttcgcgcctgcaagacgccccctccttccctgcctga

SEQ ID NO: 511450 - DNA, 777 bp, Stenotrophomonas maltophilia
atgcaaaccctctccctgctgcagctcgcgctgggtggactctcgggcattctcgttggtttcatactcggactggtcgggggaggcggctccatcctggctgttccactgatgctctacctggtgggtatcgacaaccctcacgtcgccattggcacgagcgcacttgccgttgcggccaatgcactttcaaacctctttgtgcacgcacgcaggggaaacgtgagatggccgtgcgcatcggtcttcgcgtcagcaggtgtcgcgggtgcgtacctcggctcgaccctgggcaaggccatcgacggacagcgactgctgttcctgttcgccctgctcatgatcgtggtcggcatcctcatgctgcgcaagcgcaatgcggaaggtaatgcaggtgtgcggctcagcaaagggaacgcgccggcattgctgggcttgggagcgttctccggcgcactctccggattctttggtattggcgggggctttctcgtcgtccccgggttggtggctgcgaccgggatgcccatgctggcggcggtgggcagctccctcgtggccgtttctgcttttggtctggcgaccgccatcaactatgcatcatccggactggtgaactggcagctcgccgcagtattcatcgttgctggcagtgttggcggcatcatcggagcgcgcacatccacgtcgctggctcagcatcgtggaatgctgaacattgtatttgcatcactcatcttccttacggcagcctacatgctccttcgggtgctctaa

SEQ ID NO: 511451 - DNA, 504 bp, Stenotrophomonas maltophilia
atgacccgcaatgtcctgttcctctgtaccggcaacagcgcccgcagcgtgcttgctgaagccaccctgcgcgcctggggcggcgatcgcttcacggcattcagtgcgggcagtcagcccaccggtcaggtcaatccattcgcgctggcccagttgcaggccgaaggaatgcccattgaagggctgcgcagcaagtcgtgggatgagttcgtggatgcagcgcccatgaatctggtcatcaccgtatgcgactcagccgcagcggaggcctgcccggtggtgttcggtgacttcatccgcagccactggggcctgcccgatccagcggccgtggcgggcagcgatgccgagaaagtcgcggcgttcgcgctggcgcatgccatcgtgaaagcgcgcctgcgtgcattgctcgccctgcccgaatcattgtggtccgaccgcgaggcgctgcagcacacgctggatcggatcggacagctgccgccaactgatcgcatgccgtga

SEQ ID NO: 511452 - DNA, 234 bp, Stenotrophomonas maltophilia
atgggcaggaccgttggcgccatggatggcgccatcgagcccccaaggacgggtttacggcgtgtcctgcccatccacaccgccccgcccgccacggaatccccgctgttgcctttgacgttgtcgttgccgttgcctctgccgttgccgttgattcggcaggtgcagggcgcagccctgccgaacacccctaccgctccgaatgcccgctctggtcgtaatcgcgcggactga

SEQ ID NO: 511453 - DNA, 177 bp, Stenotrophomonas maltophilia
atggggggctttgcaggcggtggccagcgtctgtacacgggccccctgacctacgtgaacgacagtggcgggacatactgcgcgcatgagtatcgcgtgcgtgcctgcaacgcatgtggttgctcaccgtggtcggccgaacggccggtcacccgcggcgtactgagctgggactaa

SEQ ID NO: 511454 - DNA, 288 bp, Stenotrophomonas maltophilia
atgaacggactctcttcgctgttgattcgggcggtactcgcggtggtggtgctggcggcctgtgtggctccggcggtcgcccaggaagtggtcgagtacatccacactgatgcactgggttcgacggtggcgatcaccgatgctggtggaaatgtcatcgagcgtacggtgtatgagccgtgtggggcggtggtcaaccggccgttgaaggatgggccgggttatacggggcatgaagggatcctccttctgcggtggtcgatgggaggggagtctccatcgaggtga

SEQ ID NO: 511455 - DNA, 318 bp, Stenotrophomonas maltophilia
atgaacgagcgcccgattcctaaggcggctttggaggacgagaactctgtcgagatgctgcgagtgtggattgcgaaaagaagactccactgttcaatgaaggtcggcatgtatcgggagtcaaccgatatctcagaagagaaggcgtggggtgtcatcctcgcggatgctgcccgaaacatcgctgacgcgcttcattcggagtatggagttgacgcgaaaactgccttgcatcttatacaagagagttttcatgctgaattgggtgatccgacatctattacaaagggtggattcgtgaatcgcaatgatgcctga

SEQ ID NO: 511456 - DNA, 201 bp, Stenotrophomonas maltophilia
atgtccaagccgatcctgaaaggcatcaccgtctattacgcgaaaactgccgttttcacggtcgccagctatgggttgctgcgtctagtgtacgggcatacagggatttcattcattgaatggacgctcgcacttctggcggcgtttacagtgggttacatacctattttcgttggcttgctacgcgggaagagttcataa

SEQ ID NO: 511457 - DNA, 264 bp, Stenotrophomonas maltophilia
atgcagctgacatttggtgatgccgagcgcctgggcaagctcatgcagacctggcgcgcgatctggaccggcaagatgcgacgacggatgatctacttatcggcgaaatccatgctccgcttgatgcctgatgcggttccccggtccaagtgccgctctttggggaggtggcgctggatgtggaagattgaagtgacagacggcccttggatgaattcgggtggacatgcaatcgtcccgggcgactcatatggttgcaaatga

SEQ ID NO: 511458 - DNA, 1497 bp, Stenotrophomonas maltophilia
atgcaggcgtacatgcggactgttaccggcgtagagggactggacagcattcttggcggcggacttccgcaggcgcggctgtatctgctggaagggccaccgggttccggcaagaccacgttgtcgcttcagttcctgctggaaggcctgcggcgcggcgaacgctgcctgtacatcacgttgtccgagaccgccgaggaactgcgcgaagtcgccgctgcccatggctggtcgctggatggcctgcacctgttcgaactgggatcggctgaaggcgcaatgggcaacggtcgcctgcagtcggtgctgcattcgtgggaaatggagctggacgagacggtcaatctgatcatgtccaaggtggacagcatcgggcccacccgcgtggtgttcgattcgttgtccgaactgcgcctgctggcccaggactctctgcgctaccggcgccagatccttgcgttgaagcagttcttcgcgcccaagagcgctacggtgatcctggtcgatgacctgacctctaccggcgaagagcgcgatgggcagttgcacagcctgtgccacggcgtgctgtcgctggaacgcctgaccctggatttcggcccggcccggcgccgcatgcaggtgcagaagctgcgcggcgtggatttcattgcgggctaccacgatatggtgatccgtcgtggagggctcgagattttcccccgcttgatagcctccgagcaccacgaccggttcgtgggttcgccggtgagcagtggcgtcgacgagatcgatcacctgctgggcgggggccccctgcgcggaacctcgaccctgttgaccggtcccgctggcagcggcaagaccaacgtcgccctgcagtacgtgtgggcggcctgcgaacgtggcgaacgctgctgcatcttcgagttcgacgagcgggttggtaccttgctggcgcgtgcatcggcactggacatcgacctggacaagcatctgcactcggggctgctggagattctgcagatggatccggccgaggtgtcgccgggtgagttttcctggaacctgcgcaaggcggtcgagcagcgcaactgcagcgtgctggtgatcgacagcctgaatggctatgtcacggcaatgccacaggaaaagcagctgatgctgcagctgcacgagatgttgtcctatctcaaccagaagggcgtagcgacgttcctgatcaatccgcagcatggcctggtgggcaccatgtccaccggcagcctcaatgtgtcctacatcgccgatgcggtggtgctgttccgtttcttcgaggccaaggggcgcatccgcaaagccgtttcggtaatcaagaaccgcggcggtgcgcacgaagacaccatccgtgagctgaagattgacgggcgtggcatcaccgtcagtgcgccgttggcagacttccagggcatcctgaccggcacgcccgagttcgtgggtgacagcgcagcgctgctgggccagtccgatgtccgatag

SEQ ID NO: 511459 - DNA, 2070 bp, Stenotrophomonas maltophilia
atgtccgatagggacgaaggctgcacggtcgtccgcatcgtggcgcccttcggacgcgatgccgacagcattgccgcggtactggagggagtagggctggcaacgcacatcgccggcaacctggaggagttggccgagcacctggatgatcgcaccggcctggtcgtggtgacccaggaagcgttggtgcgcggtgccgacggtatgctgcctgcattgcagcagcaaccggcctggtcggatattccattcatcctgctgcgttcggcacggtcgtaccgccgttccacccgcgaggcactgttgccagcttcgatcaacgtggtggagatggaccggccgcttggcagcatgtccctgatcagtgccgtccagggcgcactgcgggcccgtgacaagcagttcctcgtgcgtgatcagatggcggcattggcggacgggcgggccgcactgtcccgcagtgaaaccgagttgcgcctgatcgccgatgcgatgccggtcctgatcgcctttgttgatcgttcgatgtgcttccgattcgccaaccgagcctatgagacctggttcgatctcgccaccggcgaggtgatcggcaggcacgttcgcgaggtgatcggcgaatccgtatggcagcagcgcagggcggcgatggagcgcgcgctggatggccaagcggcgctcttcgagatcacctggccccatccactacgcggccggcgcgactgcgaagtgcgttactcgccacgtaccgataccgagggccgggtcgacggattccacgtcttcgttaccgatatcaccgccgccaagctggccctgagcaacagccagcagcacgcacatgcactggaggccatggtggccgagcgcacgcgtgagctggaagcgcagatggctgcacgcgaggccagcgaggccgccctgcggcagtcgcagaagatggaagcgatcggccagttgaccggtggcatcgcgcacgatttcaacaacatgctgactggcattctgtccgcgctggacatcgtgcgcctgcgcctggacatggggcgggtggatgatctggagcgtttcctggatacggccaccacctcggcgcagcgtgccgccgcattgacccagcgcctgctcgcgttctcgcgcaggcagtcgctggacgcgcggccggtggagatcaacacgttgctggtatcggtgcagcatctgttgcacagcacgatcggggaaacggtgcggctgcgtaccgaaacctgcccggtgccgctgcacgccacgctggatgccaaccagttcgaaagtgcggtgctgaacctggccatcaatgcacgcgacgcgatgcctgatggcggcgagctgatcctgcgcactgcggaagcagatgtgcatgcaggccagtatccggcagtgccggcagggcactatgcggtggtggcagtcgccgacacgggcgccggcatggcgccggaagtggtcgagcgcgcattcgagcctttcttcaccaccaagcccatcggcaagggaaccgggctgggcatgtcgatggtgtatggcttcatgcagcagtccggtggtcacatcgcgatcgaatcgcgcctgggtgagggcaccaccatttccctgttcattccactggtggaggccgcgaccagcgaagcggtggccgctcaggccaaagccatccggctcggcgctggccagtcgatcctggtggtcgaggatgatgagcaggtgcgcatgctggtcacggtggtgctcgaggacctggggtaccaggcccaggtggtgggcgatgcggacgccgcgcttccgatcctgacttcggaccagtgcatcgatctgttgatcactgacgtcggcctgcctgggctcaatggccgccagctcgccgaaatagcccgtcactcgcggccgactttgccagtgctgttcatgaccggctacgcggagaaggcgcaggagcgctcgtccttcctcgatgcgggcatggcgatgatcgccaagccgttcctgcttgacgagttcagcgcagcggttcgcaccgcgatgcctgaaacggcaggtggcaatccgtag

SEQ ID NO: 511460 - DNA, 735 bp, Stenotrophomonas maltophilia
atgtctgagtcgctggctacgctgcaacggcgctgggccgatcatgtgcgggacccgtcgatgcctgcgcccgatggcgtcgaggcacggcggatggcggtctaccgccgcctgtgcatcgacagtctggacagcctgctggcgggcagcctgccgcggttgaagtcgcagctgggcgatgcctgctggcgcgacacagtggagcactactacgccagccacgcctgtcacaccccgctgttcccacggatcgccggcgagttcgcgggctggctggcggtgcaggacacgctggcgctgccggcctgggcagcggaaatggcccactacgagagcacgcagcagtcgctgcatattgaagcgcgtgacgccgggccgccgctgcaccgcgttcccgcgggcagcgatgtgctggcggtttcgccgtgggtgcgggtgcttggctaccagtggccggtacatgaggaagaggtgctggagccggtatcgagcgcaggtcccacgctgctggtgatccagcgcctcgccgattccagcctgcaggtcgaggaactgtcaccgcttgcctacgcgctgctatcggtgttcggcgacgacggcgcgcctgtggatgaggcactgcaggtgctgtccgaaacacatggcgtggcaacggatgcactgcgcatggcctgcgcgcctgttctggacgagctgtgcacggcaggcgtgctggtcgcgtggcctgctttctga

SEQ ID NO: 511461 - DNA, 678 bp, Stenotrophomonas maltophilia
atgttgccggacacggccgatgtcgccgtgctggccaactacggtgcgccgctgctgcaggtgcttgcccaacgcgccgccaggttgccgccggttgcgggcgaaggcctggtggccgcgctggcgcgcatcgcgctggccctgcaggcggcgaatcctgcgcagatccggcgacaggaaggctggtgggggcgcctgcttgggcgcgatgtcgaccgcgaggcgcaagggcatgcgctgcagtcgcagctgggcgtgctggcgctgcaggcgcgcgagcaggcccagcacctgcagcagcaccagcagcagcgggccttggccatcgtcgagcgtgcagaggcggccacggcactggacgcctgggtcgaggtgggtgcatcacggctggcgcactgtgatgcgtccgggcatgccgcgctgtcggagcggctggatcacttgcgccggctggcggccctgcatcgcgtcgaggccggtcaatggcagctgctgcaggaccaggacacgctgctgctgcaacgtttcgcacgcatccatgatgtcctgctgcccgcctggcgacaggccaccctggccgaccagagcgccgcaggcgctgcattggcgggcaaggcggccacgctgcacgcccagatcgatgacgaggttgcggccgctcaggctagactgcgctga

SEQ ID NO: 511462 - DNA, 3060 bp, Stenotrophomonas maltophilia
atgaatctgaacttcaatggacgcagtctgaagcgcaccgctctggccatggtcctgggagccatcgccggcaccagctatgcgcagagcacttccggcgacatcgtcggtaccgctacgtcggctgacaaagtgcaggtcaagagcctgtcttccggcgccacccgcgaggcgaacgtcagcgcggatggccgtttccgcatctcccaattgccgaccggcacttatgaggtcaccacggtcagtggtggaaatccggttgcgaccacccgcgtcaccgtggtcgccggacaacagtcgttcgcgacattcgcctcggcgaacagcagcggtgcaacatcgctggataccgtcaacgtgcgcgccctgggcgcggccaacacgatcgacctgggcagcgttgaatcgcgtaccaccttcactgccgacaagctcaattcattgccggtcgcccgcgatatcaccagcgtctcgctgctgaccccgggcaccgtcgcatcgagcggctatttcggcccagcctcgttcggtggcgcgtcggctgcggaaaacagctactacgtcaacggattcaacgtcaccaatctgtatgacagcctgtccttctcggagatcccgtaccaggccatcgatcagctggacgtgcagaccggcggctatggtgctcagtacggtttctccaccggtggcgtgaccagcgtcaacgtcaagcgcggcaccaacgaatggaagggtggtttcagctggaccggcaccccggactcgctgcgtgaaaaagctccggacacctactacagcgatggctcgctgttccgttcgtacgacaagaacagcagcagctccaacgtgtacagcgtctgggctggcggtccgttgatcgaggacaagctgttcgtgttcgcgatgggccagttcagcaactccaagaccggcaacttcggcaaccgcggctcccagtacaccaccaatggccgtccgccgtcggctgcggcattgtcgaccagcgcctatgactatgagtcgaagacgccttactggctgttgaaggtcgactggtacctcaacgagaacaaccacctggagtacaccggcttcgacaacagccgtcgttactcgtatgactactacactgcggcctatgacagccccaacgctggtggcgaaccggcaaagaccggcgacctgggccagttgatcggcaagagcggcggccagaccgacgtcttcaagtggaccagctatctcaccgagaacctgaccgcatccctgcagtacgggcagatgcgcaatcgttcatcggaacacaccatcagcgccgatggcgtctttgatgcctacaacggtgacatcaacagcccgcagggcgcgtgcccctatgtgctggactaccgctcggccaccggcggcaccggccgccagatcggctgtgcggttgccagcaccgtcggtatcttcggcggccgcaacgaacgcaagggcactcgcctcgacttcgactggcagctgggcgaccacaaggtcggctttggttacagcgatgaaaaatggacgtccgtgcagggcacctcgtactcgggcggagcactttggtacctgttcgacgactacgccaatctcgtgaacttccgcaacggtggttcgatcgagatcaagcagaagtcgtggtatctgcaggacaactggcagatcaccgacaacttcatgctgtacggcggcattcgtaacgattcgttcaacaacaagaactccgacggtgcaacgttcgtcaagcaggacgacatctggcagccgcgttttggcttctcgtgggacctgttgggtgatggtcgcagcaagctgttcgcttcggtgggccggtactcgctgccgatcgcggcaaacgtggcactgcgcgcagccagcgcctcctactacctggaccagtactacacctacgacggcatcggcgccaatggcgctccgaacgtcaccggcagtttcgaggatggtgcgaacgactccgtggtcaatggcgaaagcggcgtcactccggatccgcgcgcagtcgcgtccaagggcctgaagccttacacccaggacgaactgatcatcggttaccagcagcaggtcagctcgtcgatcgatttcttcaacgactggaccgttggcatcaaggcgacctatcgccgcgccaacaaggtgatcgacgacacctgcgactcgcgctcgctgtacaacgccgcagctgccgcaggctatgacctgtccaactggtccgacccgtggaccgtgccggaaggcctgcccggctgctggatctacaacccgggtagcgacctgaaggtcacccttgatgtggatggcaacggtacggcggaagagatcactgttccgggcgccagcctcggcccgaaggccaagcgtacgtacaaggccgtcaccctcagcgccgacaagcagaccgaacgttggtatgccagcttctcttacacctggtccaagctggaaggcaactatgaaggcctggtcaagagcaccaacggccaggatgacaccggcaccacgtcggacttcgacttcgccgagatcatgtatggctcggacggctacctgttcaacgaccatcgccacagcatcaagctgtttggtggttacaagttcaccgacgagtggtcggtcggcgtgaacatcctggcgcagtccggcgcaccgaagagctgcctcggcggcggctatggcagcttcgacaccgagtacggctactccggcgtattccacagctgcgagctcaatggccgggttccggcagacgacatcgccaaggtcggcagcgccggccgcacgccatggcagttcaccgtcagcccgaacatcacctatacgccgaactggttggaaggcctgagcctgcaggtgtccgtgctcaacgccttcaacaacatcaagccggtgcaggtgtacgaaaccaagtacggtcgccccagctccgctccgaccattcgcaactactacaactacaacacgccgaagtacttcaacgatccgcgtgccgtccgcttccaggtccagtacgactggtaa

SEQ ID NO: 511463 - DNA, 123 bp, Stenotrophomonas maltophilia
atgctcggacgggagatcggtaggccgttcaaacggcttttgaacgtagttgtgctgcgcaccaatgtcgccaacttccgctgggctcagagcgtgcctcatgttgccggcagtgccgcctga

SEQ ID NO: 511464 - DNA, 216 bp, Stenotrophomonas maltophilia
atgcagtcactgaagtccagattggccattgcagtcaatgtgcactccgatgaaggacggccggtgtggcagcggggctactacgatcatctgatccggaatgaggcggatgttcggcaacagtcactgtatgtactggccaaccccgtgcgcgcgggcctgacaccgcggctgggagactatccgcttgcgtggtgtcgctggccgctggaatga

SEQ ID NO: 511465 - DNA, 396 bp, Stenotrophomonas maltophilia
atgctgatgagtgagggtgcactgtccgaccaggaggccggcaaggtcatcggttccagcaaggcctatgctcgggccttgctgcagttcgagcgtgatgccgcgggcaatcccgacgcgcaggatctgaccacgctgtaccgcgcggcagtggcacgcacgctggggccggacatggcgctggcctccttcgcttgtggctacagcctgtgcatgggcgaaatccacagcgggaatgccgacggattcagccactggaccagaacgttcggggacgacagtgccgcgccacagtacgcgttcatgagtggcgaattcctgcagggcggggggcagtcgatcggccgtttcgtgttttccaccgacccggcggcgaatggcattacgacgcggtag

SEQ ID NO: 511466 - DNA, 387 bp, Stenotrophomonas maltophilia
atgtcgaatgcgtgttggcgcttgttgtggtgcctgctgctggccacgggggcgcatgctcagaccaacgtctacaaatgcgtggacgggccgcatccggtctatcagcagacgccgtgccaggggcgtgcggaatggcgttgggaggtgccggcggaaccgccctcaacaggtgcgacggcggccaaggcggcgagcccgaccccaagacgtgcgcgcgtggtgcagcaggggcgtgcgcgggctgcgctgatacccatcagcacggatcccaccgcctgtgagcgtgcgcggcagcaacgcgggaaggtcctcgccagggccaaacgcctggacttcgtacagcggcggcagctggatgacgcggtgtacgacgcgtgccgctga

SEQ ID NO: 511467 - DNA, 456 bp, Stenotrophomonas maltophilia
atgaccgcgacgcccctgacccgaggcctgctgcctgtgctggcctgcctgttgattgcaggcgtcgcgcaggcgcagcaacagccgttgaccgggcagatgctcggcggcagcggccccgcaccggcctcacgaccgttgcagtccgagccgctgcccaccgtggatctgtccacgcctgcaccgtcggcacccgccgcggtgccggcggcgatcgccgccactgatgccaccgcaccggcggtccgccctgtacgcagccaggtcggcgataccacccgtggcctgttccgcttgcaggcttcggggcagcaggccgggcagcacctgccgatccttggcgaccaggccacgttgagctatgcccgctacatcaagagtttcgaacacgagatcccggacttctttgaagccgatgtcgccaagtccaagggaacatcctcatccggacgctga

SEQ ID NO: 511468 - DNA, 1095 bp, Stenotrophomonas maltophilia
gtgcaaggcgccgccgaccgcaccaaccgtgttgcctacggtgccatcaagcacgccacccacggcgccacctgccgcgccgacaacgccgcccaccaggccaccgacgcccagcgcgctgttctgcgctgccgcggtcgcttggccggccagcttcagattgcggtcggccacgacttcctggccatccggcgcctgcacgcgcactttgccggcaacaccggtatcgaaggctgcggtgatcgcacgatcgtgggtctcgcccggcagctcctccttggccggcagcgtgaccgctgccgtcgccttgacctgtccctgaccgtcgatctggtggcccgccagcttgagctgcgaatccaccttgccgtcaaccgacgccttgaggccgggcagcgagccagcggacgcgccggcaacagcgacagccgccttggcaccggtatcgatcgaggccacctgggtaccggcgacgccaaccctcgccttcgcctgcgcatccgcagccacaccaagcggcccgtgcgcagacggtgcaacgttggccgccagcgatgcatcaatcttcgccacattggacgctgcatgacccagcccgacattggcccggacatcggccgccagcgccggaacggcgacctgcttcggcgcggtgttcgcatccagcttcacctgcaccgtcgccggcagcacgtcgcgcaccacaggcagcgcgttcgtactcagttgcaggccgacacgcgcatcagcgctgattgccgttgtgctctgcgcctgacgcgaggcggccgccaatgccacttcagcatcaaccttgaccggcatcggctgcgcgtacttggccgcgagcgcctgcaggtcacgcagggactgattggattcggacgctcctgcatgcccgctggccagcgcacacagcagggccagggccaaggcggtgggcatcagcagggcactgcgcggatcacgggcagcgctgccgccgctgtcgccggtggccagttccgaggccacaaccagagcattgagctggcggttccatacacgccggtagatgcggttcatgagcatttcccccgtaggcgaacaacttga

SEQ ID NO: 511469 - DNA, 378 bp, Stenotrophomonas maltophilia
gtgacacccctcgccctgcggttccgaatcggcctgctggtccttgccggaagccacgcaggctgcgcctggctggggtggacgctacgggaccgcagcgcagacctcgccgatgccagcgcccaggccgcacagcaggcatcacgcgctgactcggtgcaggccgcacaccagcagaacctcgccaatctccgtaccagcgcgcaggccgagtcacagcgcctggccacgcaagccgaacgcacccggcaattcaccaacctgcaacaggacatcgagacccatgccaagacgcctggccgtgatcgcggcgacgctgatgctgagttcgtgcgcatctggcgcgaagccaacgccggccgcgccctgcctcgttga

SEQ ID NO: 511470 - DNA, 381 bp, Stenotrophomonas maltophilia
atgaaggttccgcccgaagttgtcaccaccacgctcatggtgatgggcatggtgatcgcggatcactaccttccccaggccacattggaaatgcaggtctaccgcatgctgtcggatgctaagttcaggcttatgcggaaggaggctgaggcgtttgcgaaggcccggggtcgcgaggcggtagtggtgagttcaggggatgagagtgcgcggcactttgagctatgggcaaacgggaagccggtgatgctggtggacaattccgcgatgcaactaatggtgatggttgctggggattggcaggagcgggttccggatttgcaagatctgcaacagcagtgccgggtacggacgcggccggaatgggagcggaggcgctga

SEQ ID NO: 511471 - DNA, 300 bp, Stenotrophomonas maltophilia
gtgaccgggaccagtgatgccagcttcctgattgccagtcacatcaagccgtggtcggagagcgagaacagcgagcgccttgatggtaacaacggcctaatgctcgccccccatatcgatcgtttgttcgatcgggggcacatctcctttgaggatgatggtggtctaattcttagcagccagttgccagatgaggtgcgggtgaaatgggatgtcgtgcaaaaggctccccgaactccgttctctgcggctcaggctctgtacctcaactaccatcgggatgtgctgttgagaaagtag

SEQ ID NO: 511472 - DNA, 1230 bp, Stenotrophomonas maltophilia
atgaagccgctcagcacttacaccaaggaggcgctagcccgagcccatcgagcatcaccacctgcttccgaggatcacgatgatcttgccgactcatcgataataaactctattcttgggcgcgaccttcgcagaattcatggaatattcttttctggagaaaggtgggcaagtaagttgctagcgcatgtggactttagttcagtacaaagagtaattgatccgagctgcggaatcggagacctccttgtcgaggccgcacggctgttcaagcatgccgaaggaaatgcacagctagatcaggatgaactgaagaggagcttcgttgcctttgatttattcgaagactttatcagcattacatgggcgagaattataaggacctatggtttcaagctagacgcccaggatacccatgaacaacaagtcaaaccctacgattcattgactttcgattggggccttcgaacgggcgatctacttgtcatgaatcctccgtttcataaagaaagatctcctacctggtcagaaatttcaaacggcaccacatcttgcgccgcgcttttcctcgagaaagcactgcttgaatctcctcccggcgtgtgtatcgcggccattttgcctgaggtaattcgaagtggcacgcgatacgaaagacttagaagaaacctttcaacgcggtgcgaggttgcactatttaaggccgcgggtgcctttggtggagacgcggatatcgatgttgcactattggtagcgacaacgcgccccctgcctgcacctaccgaacctacgactgagcaatcggagacattagtaattggcgacttgtgcaaagtgagtgtcggctcagtagtaccgcatcgagataaagaagcggggaagttgatgccctacattgacgtaagatcgacacccgcgtggtcaacgtttgagcctgtgacgtttgcgaggtatagctcgcgaacaatctctccaccctttgttgtggttaggcgaacgtcaagtccgagtgatcgagagagagctagagccagcattgtaactggaggtattccagtgctggtagaaaatcatctaatcgttctagagccaaatgtaagaactcttaatgagtgcaagaagattcttggatcattaaaggattgcaggacgagcgattggctcaatgatgcaattagatgcagacatttgacagtatcatccgtgaaaggaattcccgtgtatgactga

SEQ ID NO: 511473 - DNA, 2100 bp, Stenotrophomonas maltophilia
atgactgatgctcgacttcgatttgcaagtgacctattgcgccgccttggagaggagctcacgccctcccccgtgaacggcatcgtggaattggtgaaaaactcttatgacgcgaatgcatcacaagttgaggtcactctgcaacagcctgttagaaacggagatgaccttataccaggctccctcactatttccgacaacggcgacggaatgaccacccgagatttcactgatgggtggctcgttcttggtagatcacggaaggatgcgacaaagccaactcgtttagggcggcgaccggctggtgacaaaggtctaggaagattaactgcgttacgaatggggaaaaaagtatcagtatcgtcagttgctcggtccacgaaagggaaatgttacgagatcgacctcgattggcgatcctttgataagtcagccacaccagaccaagttccgctagtcatcaaagagcgtgacgtaccgaagtctcagccgcaagggaccaaggtaacggtttcaggcatcgaacggcggcttgatgcatatgaggttgagcgactgagccgctccctgctactcatttccaatccgttcaagcgcgatagcgacagcttctccataaatttcaagatatccccggaacctagaactctaatccagggaaacgaagagctctttaaggcggctgtttttcgcatcgatgcggaagtcatgcccgacctaacgatgcgcgcctccatttatgatgggataggctcattgctatcttcgactgagggaggcgatctggcgcaacgctttaaagacagcgatgcgtcgcaacatgcactcgtccctgccaagcttcagatttggatatatatattcaaggaggagcattacgagaagggaaggaaaatgctctccacgctccgggcctggctcaaagattttggaggtattcatatcttccaaaatggaatgcgtgtgggtccatacggagatccaaatgacgactggacgggcatgaacgctctccgcgcgagcagtccagaactaagcccgacgactcgcacttcgattggatatctatcatttgaaaatcagccggctatggtccagaagaccgaccgttccgggttcatcgagtcagcaacattcggcgcgcttcgggagtttgttcgatcaacattaagatggcagcagagttttcgaatttcacagcgtcagaagatcgatgagatcgaagaagttgataggaagcgaagctctgaagtaatcgccgagaaaatttcctccatgttttcatcacttgatcccacgagagaggcccaagctaggagcctcgtttcggagctcaaatcaatttcagaacgccgcgagactgccttgcgacgcgagatcgagctctatcggaccctgggaacagcaggcattgcggcgagtgtttttgcgcatgaggcgtccaacaatcaacttgcgagaattcaggataatgtcgataccatttgccatcgtgtaggtaacagagacaggaccttttccgatacggttattcagcccattgcgaacggaatacgacgcgacattgcaagccttgaaagtatctctggagtaacactctctctgatcaagtcacgaaagagaaagacccagcgaattgacgcaaccaagtccgtgaattcggtaatagcacagttctcagcatattctgaacttcatggaataagcattcccaaggcaaactctcgcgccggaatatttgttcttggatcgttagcttctttcgaatgcgcgctaaccaacctcattacaaatgcaattcaagcgataggccgagatcgacccgacgagccattaattgtcgttggcgttgatgaagccggcccttctattgagatttccgtttccgacaatggacccgggatccaggacatttctattgccgatctctggcttcctggcgaaacgacgagagaggatggcacaggccttggacttgctattgttagggcagcagcaagggacctagggggcagtgtaagtgcagagaagtcaggcaactatggtggcgccacatttactcttagacttccattaatgaaccatggaccggcaaaatga

SEQ ID NO: 511474 - DNA, 675 bp, Stenotrophomonas maltophilia
atgaagttcaattccgttgcaactgtagacgatgattcggcggctcaggaaatgatggcggataagattcaggacttactagaggcgaaaccagtcgtaataacggggccgcgactggatccagacgccctcgttactcgaatgcgagatcaggaaattgatgcggctattattgattacaaactgacgctcaggggatatagtgagttcgacggaattgatttcgtcagcaagcttactctggcaggaattccagccgtacttgcgaccagctatccatatagtgaaaagtacatctggtgtggcagaaatgtacctgccgttattaagaagggttctatcgggagagatctacgcgcggccgtggactcggcggaactcaggtcgcgcgggtacttttctgttgagacaaagcctgaacgcacggtgatcagagttacctctgttgattacgacgaggtggggctggtaattcctgcattctccagcgaacagttcattttagtgagccgctccaagctcgaacatgagctcgcgtgcgacgtaaatgacgattttcgatttttagccgaagtcaatatcggcgccaagaattccgatagtatttttatttcaaatctagagaaaatggaatttcctaacgatgagtggatcgccagcctgtttcattcttga

SEQ ID NO: 511475 - DNA, 936 bp, Stenotrophomonas maltophilia
atgagtggatcgccagcctgtttcattcttgatgtcggacacggcaatgctgctgtagtcacaggatctgaaggtgtcgtgattgttgatggcggtgcgggtggcgggctcctgaacttcctggatagatgcggcattaccaagattagatctgtattggtttcacacgccgacgccgaccacatatctggactaatcgcgattctctctaggtgcctcagcgaccccggctttgaaattgaaacaattcatattaacccagatccgagaaagtccgatctattcactgatttgatcggaattctctacaaactcgataataataagcgctcgaagtggataacctctatcggcacagacagcccagaacctatggacttgggaaattgcttggtcgaagttattgctccaagtaagatcttccgcgccagaggcatcggtggcaagcgcgatgaggatagaaagtccacggcgaactcgctaagcgctgttgtaagggttacacaaaatggaagtccatgggttttgctgcccggcgatttggatcgcacggggatgaaatttctcgtcgaggacggccaggtggcgaaggcagcggtgattgtcttccctcatcacggcgggaatggcggatcggacacagaaacggtggagctcgtcgaagagattcgcagggaatgcgaacatcattcagtcattttttcggccaggaatggtgatcctcgcttccccaacaggcttgtcgctgaatcactgatttcttgctcccccataccaaacgtctattgcatcgggaactcaccgacatttgaagaggtttcgaagtcagtggaaatggtgctacacaacatgactggcacgctggtgattgacggccttgatgaaagcggagtgccgagcatcagtcgcctagcatctaaatcggaagtattgtag

SEQ ID NO: 511476 - DNA, 516 bp, Stenotrophomonas maltophilia
atgttccgttgcctgcgcgttcccgccactgccctgctgctttcggcactggtggtgcccaccgtccatgccggcgccgcgccgcagttgaacagcagccaggccagcgtgatcgtgacgtcgttcgtggtgctgtcgttgccactggcggcctcgatgggcctgtccgaactgtccaaagcgccgttcaaggccagcgagcgcaacggccgggccgcgcgcaccaaggccgtgccactgccaccgatggaagtgaagaaggtggagaccacgcaggcgggcgagcgccaggtgcagctgcaggtgccggacaaggccgaccagaccgccaccctgcactggccggtaacaccgaaggatgaagatccgacggctgcgttcgtggtcggccagcaggtgcgcttcgagccgaccccggccggtgccggctggaacgtaaagggcgcccagggccagacgttggcctatgtgccgaccgcctacgccgccggcgacgtgatgagcgaatcgctgtaa

SEQ ID NO: 511477 - DNA, 411 bp, Stenotrophomonas maltophilia
atgcctgagacggctgtgtggatcctggtggctgctgccgtttacgttctgggcgtagccatctacttcgtcttctactggccatggtcccgttcgcagcgcgcgctgcgccgcctgcgcagggagggggtacccgttcgcagcatgcggcggtccgaggagcgcgtactgcatttgatcgagtttccggcaggggcgccggttctcctgctggaaggggcctgcgcggaattcgttatcaggagcgtcaatgcgcctgcccgccatgtccagaccttggctggcgttccggtgaagtatccggccggcctgcagcatgccgtgcgcgccggtagcaataccgccgaagtcgtgctcgggcgcgagtacgcgatgatcgtacggctcaatggagcaaagctgacccagtag

SEQ ID NO: 511478 - DNA, 303 bp, Stenotrophomonas maltophilia
atggccgatatcaatcgactgtgccggacggtgtgggttctttccgcgttggtggcgctgacggcctgcgcgcctggcagggatccggcgaagaccgtcgagcgcgatgcgggcgtcgatgccgttccggcgcgcccgatcaccggagtcgcgcagccggcgtcgccggtggagggtggggccgctcccgaggctgtggagctgcgtagcaccgacgatggtggcgtggacatccgcaaggtggatgtggcggccgggcagggcgctgacgcacctgcgccccctgccgaagcgaaacactga

SEQ ID NO: 511479 - DNA, 2328 bp, Stenotrophomonas maltophilia
gtgaagcggcgcgatcctcgccgccggcttgcccccttcctcctgctgctggcactgcttctgctgccggccgcttcggccgaggacgcgcagtcgcatcggtggccgcccggtcgcgaagtccgcgtcgccaccgctccatcgctgcgtccattgccagcaggcctggcggatacggcatcgttgcccaccctcgcgcacggctacgccgatctcgtggcacgacactccggattgcagttcaaggagcacccctaccccagtaccgacgcatcactgcacgccgtatgccgtggcgacgccgacctcgtgctggtggtcggggcggccgggcatccgcggccgccctgcaaccacctggcgtcctctgcccccttccgcggcggccggaccctgctggccgggcgcacggatgaccgattgccacacgacatcacgcaattgcacggccgcacactggcggtggtcaacggcgggccgtatgccgaatggctggccgcccatcacccgcgagtcccgctgctgcacctgcctgatcgccatgccaccctgtccgccgtggaggccggcatggccgatgttgcgatcggagtggaaaccacactgcaaccgatgatccggcaacacttcgccagcacgttgcaggtgcagccgttccagatgggattctccaccgacatgcgcctgctggtccgccgggaggaccagcaattgctggcgcgtatcgaccaggccctgcacgacatcacactggaagagcatgccggcctgctgcagctatgggcattgcagatacttccggcccaggccgatgaggtgatcggctggatgcgcatgccgccccaggcctggctgttggccgcgcttgccctgctggccggacttcccgtgctctggctttcgcggcacccgcagcgggaccgtgacccgcgcaagcaggcgcgcgcagcgggtgtgatcagccacgagatacgcaattcggcccaggtcgtgctcgcctcgatcgatctactcggtcaatcgcccacgcccacgcaccagcgcgaactacttgccgccgccaaggcggctggccatgcgttgcgcggcatgttgaatcgctcgttggaattcgcgcgtctggccgagggcggattcataccgctcgcacagccctgcgatgtgcttctgctctgccggcagtcgctggacgccatccgcccacaggcgctgctgaaggggctggagctgcgcttcgaagccatcccagagcgagcacccgcggtcatcctcgatcccgaaggcctgcggcagattgtcgacaacctgctggccaacgcggtgaagttcaccgatatcggcgggattgatctgcgcgtacagctgcggcccgctatcgatccgcaggaactgctgatcgatgtgatcgacagcggcatcggcatcgatgccaggcaggctgcacgcttgttccaaccgttccagcagggcaaggatgggcaagcgcgcggcggcagcggcttgggcctcgctatcgcccgggaactggcgcacgccatgcgcggcacactgaccctgcacagcgtgcccggtcgcggcagccggtttaccctgcgattgccggcacggatcgcgaagaccggcgtgccgccagcggagcggccccccttcggtctgccactttccggcctggaattgttgctggtcgaagatcacgcaatgaaccgccagatcatcgccgagcaactgcgtcgcctcggggccggcgtgcatgccttggccgacgctgccgatgcgctggccgagcaggtccggtacccacgacggatcgtgctggtggacatcggcctgcagggcatggatggctacacgctggcccgtcagctgcgcagacagcccggcacgtcgccgcgactgattgcgctgtctgcccggacaggccgcaggcatcgggcccgctgccgcgatgcaggtttccatgcggtcctggccaagcccttgcagatcgggcaactgctgcaggcactcgagctgccgccagcggccgggggaacgactctggacaccgtggcgccactggatcaggcgtatctggacgacatcaacggcgagctgctgagcatcgcgcgggccaccgaagaatgcgatgcgacggcattgcgccatcatgcgcaccgcctgcagggcacgctgcagttctgcggtgcaaccggtcaggtcggaatcgcggccgatctatgggagctcgggaacgacgccgcacccgactgggccgatgtgcggcgtctgttgcaggtactgcagtgctggcatggctcccgcagtagggaagccatgccgcctgactga

SEQ ID NO: 511480 - DNA, 546 bp, Stenotrophomonas maltophilia
atgcgccggccatggggcaatctgcttggcaaccagctggtctggctctgtgccgtagccggtgccgggcacggcctgcaatggccggcgctgctggcagtgttgctttacatcggcagccagctgctgacctcgccgcaggtgcggctggacgtccggctgatgatgctggcgctggcctgcgcatggctggtcgacgccagtgccgccgccagcggcacggtgcgctacgcggcagccccgttgggttgggtgccgccgccctggatcatggcgttgtgggcggcgttcgcgatgacgctgaccaggtcgatgcgtttcctgcagcggcacctcgccctgccggccctgttcggcctgctgctggcaccgctggcctatctctccgcagcgcggggattcgatgcggtccggttcacagcgccgctgtggcaggggccgttggtgctgggtgtgggctggagcatcgcgctttcactgctgtgccaggtcgcccgtcgtggctcgcgcatcacccctccgcctttggccggagcaccatcatga

SEQ ID NO: 511481 - DNA, 585 bp, Stenotrophomonas maltophilia
atgcctactcccatcttgccagcacagcctgatcacgttgcgctcagcgtcgcgctgaaggaacacacgcgaacggtccatgctcgcctcgaccagcatctattgcaccagcacatcttcgcgtcgcgccagcgctatctcggcttcctgcgcgtgcagtggcacttccaccacaccattgcgccgctgtaccggatgtgggatccgggcacgacccgcttggcgctgatcgaagaggaccttcgtgatctgggcgcgatcgtgccggtaccccacgcgtggcgaccgcagccgcatgcgttctcgaaggcggccgcggtgggctggcgctatgtggcggagggctcaacgctcggtgccgccgtgctgttgaagatggccgcggcgttgcagcttcatgccggctacggagcgcgtcacctgcgcccgtccgaactgggcgtggcggagtgctggagacgcgagcgcgacggattggatgcgctcgttttaagtgccgacgagcgcgcgcaggcctgcgtagccgcgacagacgccttccagttcgttcgccggtgcgtagatgaagaattcaggtttgaatga

SEQ ID NO: 511482 - DNA, 258 bp, Stenotrophomonas maltophilia
atggccgtgtgcgtgtctctgacggctgaggggacgctcgtacccaccggggagcctgcatcgcagtgtggtgggtatgtgcttgtgtcagcggcagagcacgcacaggcctcaattctcatcgatctattccagtggcccgaacctgaggtggccactggctggttctcgggggtgttcacgttggttcttgcactgaacgtgctgggctacatcgtgggcgccgtcgtgaagtcggtcagtacagaacgggattga

SEQ ID NO: 511483 - DNA, 918 bp, Stenotrophomonas maltophilia
atggacggccccgcttgggccggcacccgccggctgcacgccagggagacgcacgtgagtgaagcaatggcaccccgcaagggcaatgtaacgaagcacgctggccgccggcactgggtggcgctgggtctgtgtgcggtactggccgcctgccaggccccttcttcccccgcatcggccgaatccaccgccgctgcgtcagcgccggccgcgctggcgccggcaggcggcgcgcccaccggttaccccgacagctcctacagcgaaggccgcctgcggcccgcttacgggtggtgcgtggatggagtggaagacgcaggcaagctgcaggcctgcggcgaggatgaactggcctaccagcaggcgcgcctgcaggagggcaccgccaaggcggtggccggactcgacgcggctgccacatctgcattccgcgccggcgaggcggcctggcgcagcgataccgaccgtcattgcgtcgcagcggccgatgccggcgtggatgcgctgcagagggcgcaggaatgccgcctgttccgcgttgccaatcgtgccgatgcgttgctggtacagagcgctcctcccgacacctcccatgcgaaggcgccgttgcgcgatgaatacacccgctgcgtgcaggacgcccgcggcatggacgaccagcttgaagcgtgcgacgccgccgagtttgcctatcagaagcagcagctggaggcgcaggtagcgcgtctgatggcgagcccggacagtccggccaaggaccgctggatggacgagcaggccaactgggttgaagacaccgacaagcgctgcgcgcctgccagtgaccatgtgggggcgatgctggatgcacagtcgtgccgcatcaaccggtacgccaaccgcgccatcgaactgcaggggcgcgtgctggcccgctga

SEQ ID NO: 511484 - DNA, 2772 bp, Stenotrophomonas maltophilia
atgcctacccatatcgatacccgcaatcttgatgccaccgccggtgcagtgttctttgccgtcggccgtggcaccgaaggcggtgggtcgtcgtaccatctttccattgccggcatcaccaagggcctgcatgagccgaagtggggcaccgtcggcgcggtggccgagaacagcggctattcgctgggcaccatccaggtcgacttcggccagcgcggtacgtggccgctgggcgcgacagagcgccgcacgctgaagccgggcgagaagacctacgtcgatgccgtgatcgaccaggccagtgcctatgccagcgcacacggcttgccgttcacccacgatcgcgccgatctgcgtgcggacctgctcagccatggggatggacgggagaaacggccgtccatccgtttcatcgatgcgcccacccgcgacagcatcaatgcctgggccggctcgccggaaggcaagcagtggatccacacgcacatcgactacccgcaggttcgcaacgccacgcacattgcgatgaacatgctggaaaagcatggcagcggtattgccgaagacaagcgcttcgaggccatcgcgttgattgccaagacggccaaccagctgccaggccggctggatgatctggaagctgtgctcaagcgcggcggtgattaccaggacctgcgtgaccaggccgccgccatccgccacagcaggaagttctatgccgggctgaccgctgccgacgtcgctgccgggtatgaagacgcctacgccagcaacaaagaggcgatggaccgggcgcatctgaaggtggggcgccgcgatttcgcacctgccaccgaaggcagtgacccggacatccgggtggcgctgcaacaggcgcgaacgcatggacacggtggcggtggtccgcaggtgctgaaggaaggctccagtggccgcgcggtggaaaagctggagcacaacctgcacacgctgggttatggcgggacggcggcgcaggccatccatcccgaccgccagttcgatgccaccacccggcaggccgtcgaggcctttcagcgtgaccatggcctgaccccggtggatggcaaggccgggccggccacattgagcgcgatcgaccgcgaagcacgcgcgctgcaggctgacatggcggcactggggctgaccgatgcgcggggcaagctgattacccccgacggttacctgggggcggggagccagcacgccatcaataccttccagcagcagcaccatctgccggccaccggcatggccgacgcatccacgcgccgcgcgatcgatgccgaagccgcacagcatcgccctgcaacgccatcaccggctgcacccgctgcacccgctgcgcctgccgcacccgcagcggcacctgcgcccgagcgccgcagcggacctgccgccgctgcacccggcggcgagcgcatcacggtggtggagccctacggcaatggcggcagcaaccgcaccctgcgtcacggcatcagtggtgaagaggcgttccgcgaactgaagatccaccaccccaacaccaacgcggccgccgtgcgcgcgggcgacgccagcagggtcgaccgtaccgcagaaaaggtcgagggcgagctggaggcggtgcgcaggcgcgaagaccgcaacggcattccgctggtgcagaaggacctgatcctgaccgatcggtcaggcgggcgcagcctgatggttcccagtccggtggccggctacgtcaagctcaacgacgacgacaccaattccatcagcatctacagccatccggtcggcgatgcgcgtcgcgagctggtgggccaggtgctgcacggcgcgcgcgggtccattccgtacaagaccggggatttcgtcgagtacggcgcacctttggtgcggcagtcggatgttgggtcgccgggcgcgatacacgcgcacatcgaagtcgagccggaccagtatcggcgctatctgggggacattctcaacgaccgcatcactctgggcggcaaggtgcagggacagggccctgaagccgcgcaggccgcacgcgacgcgcagcaggcaccgatggccgatggcatgctggtgaagggcgagcgcggtgacgaggtcaaggccctgcagggcaagctggcggcgctgggctataccgccgccgacggcaccgcgctgggcaccgatggcatcttcggcaaggacacgctggcggcgctgaagcagttccaggccaacaacggcctggacgatgacggcaaggcgggccgtctcaccctggcccgcctggcagatccggccgcgctgaaggccggtgcgcagaccgccgccgtcccggtacacaccgaaccggccgcgccgccagcacctgcagcaccggccagcatgcgcgaccccgggcatgccgaaaacccgcgtttcgcccaggcactggagaagctgcaggggttggaacagcagcgcgtgcaggcggggctgtcccccttgttcgccaacccgcaggaagccgagcgtgcggccggccagctggcctacgagagcaaggtggccggcatgcgccagatcgaccacgtggtggcacgcccggatggcaccggcctgttcgcggtgcagggcacgccgggtgatccggcggcgcagcgcatcttcgtcgatcgccagcaggcggtctcgcagtcggtcgaggccagtacccggcagagcgcggaactggagacccagttcaacgcgcaggcgcaggacgcgcagcaggaacaggtgaaggggcgcgtgcagtag

SEQ ID NO: 511485 - DNA, 303 bp, Stenotrophomonas maltophilia
atggcgatcaggaaggtgatcgagttcgaagcatttgatgtgacggagcaccttcgtacaccgaaggaaatggccgcctatctcgatgcgtgcattgccgagagtggaggcgactctgcattcatcgccaaggcgttgggtgacatcgctcgcgttcaggggatgagcaaggttgcacgagcagcgggtctgtcccgggagagcttgtatcgtgcactgtcgggcgggaggagacctgatttcgccaccattctcaaggtgatccgcgctcttggaatgcgcctccacgccaatacagcgtga

SEQ ID NO: 511486 - DNA, 771 bp, Stenotrophomonas maltophilia
atgatgtctattgcgaccgctgtttacgtcgatggctacaacctctactacggtcgcatccgaaacacctcattcaagtggatcgatctcctgcgactcttcgagattgtcctcagggatcaggatcccaccagcgatcttgagcacctgcactacttcacggccatggcacttgggcgattttctacccacggcggcgcatccgtagccgctcaggaaagtttcctgcgcgcgcatgagcacctccatccacggcgatttctgaagacactcggcaagcacagcatggacagaaagggagtgctcctccctgtcttcaatccaggcactgcctacgatcgaagcaggcgcacccgtgtgtggagaatcgaagagaagcagaccgacgtgaacattgcgctggcaatgtacagagatgcagcatcgggacgctatgcacagatggtcatctgctcgaatgacagtgacgtagaacctgtgcttagagccatcagggaagactttccccaggttcgattgggtgtggtgacgcctcggcacccaccggccagcggcggccccacagggcgagcagtgagtagctcactcgacaatcaagcggactggacccgtgcgcatcttctggatgatgagttgcggcgtgctctgctgcctccacgagttcaaacgggaaggaagccatcaccaagccagctcactggtaacactttcgaagttctggcaaacattttcagccagcaccgtaagcccggatcgacgctggcccagtag

SEQ ID NO: 511487 - DNA, 1929 bp, Stenotrophomonas maltophilia
atggaaaaactcgcagctgccagccccgtggcccagtccgccgacctggtggcgggcaacattgagcaactcaaggcgctgttcccggaattgattaccgagggcgcgaccggcgtggccgtgaacgtggacgtgctgaaagctctggtgggcgatgccagcgtcaccgatgccgacgagaagtacggcctgaattggcatggcaagcgccgcgcgcggcaactggcgctcacgcccagcatcggcaccttgcgcccttgcccggaagacagtgtggactgggatgtgaccaagaatctgatgatcgagggcgacaacctcgaagtgctcaagctgctgcaaaaaagctatgccggcaaggtcaagctgatctatatcgatccgccgtacaacaccggcaaggactttgtgtatccggacaattttcaggataacatcaaaaactatctggaactgaccgggcaaattgaaggcggacagaagattagcagcaataccgaagttagcgggcggtttcacactgattggctgaatatgatgtatccgcgactgaagatcgcgcgcgacttgcttaaagacgaaggcgtcattttcttgtccatcgacgagaaggaagtggccaggcttcgggtgatgctggatgaaatctttggcgaggaaaacttcgtctccaatctggtgtggcggtcaaggacatcaatttcagatgatcaagaggtttctttgaatcacaaccacacgctgatctattcaaagcgcagagaagcgttggagtaccacggcgaacctcttgatgagtcagagtacgacaaccccgatgcggatccccggggcgcatggaagctcgtgccgcttgatgcaaacaagccaggtggtaacacgatgtataaaattcacaaccccaagactggggttgactatttgccgccaacagggcgcagttgggcaatcaacccggacgagtatcagcgattgttcgacgacggccgaatcaagttcggtaagagtgacgacgcggcgcccaagaagaaactctacttgaaagagcgcctaacagcaggcgaaacccgaacaccaagttcagtcttaatcgatgcaggaactacgaaggatggcacagaggaatgctcggccatcatgggtagcaagggcgtctttgattacccaaagccgacttcactgatcagccgacttatccagtatggctcatcggcaaatactgagtccattgttctggattttttcgccggatcgggaactaccggtcatgccacttggctgaggagcgtaattgatgggcgatcacggcgcttcatccttgtgcaactgccagagctactcgatccagaggacgcgaatcaacgtgttgctgccaagttctgcgataagctggggaagccacaaaatattgcggagctgacgaaagagcgacttcgtcgggcaggaacggcggtcaaggccgacaatcctaaatggcaaggcgacgccggctttcgcgttttcaagctagacacctcaaatatccgggcctggaatccaaagccagacgatctggaagccacactgttcgaccaccagaatcacctgctcgaaggccgcagcgaggccgatgtgctttttgagctattgctcaagctcggcctcgacctgtgcgtacccatcgaaaagcgcagcatcgaagggcttgatgtgcatgccatcggcggcggcgtgctgctggcttgcctggccgaaaagatcacccgtgagcaggtggagtcacttgcccaaggcatcatcgcctggcacaaggaactggcgcccgctggcccggctggaaaagaaagcacctgcgtgttccgtgacggcgcgtttgccgacgacgtggccaaaactaatctcgccgccattctggagcagcacggcatccagaacgtgcgcagcttgtaa

SEQ ID NO: 511488 - DNA, 813 bp, Stenotrophomonas maltophilia
gtgatgaactggtcagatgtcgtcagtgtcctgagtctcccggacagcgcgagggtggatcagcgcgtgcccaagaagctgttgctggagaacggtgcgcccactgcgtctgacaagcgcttgatctccgatgcgattgaagacatccagtggctggccgccctgaagcccaacaccatcggcgtgcccgagtaccgcgatgcgcagcgcgagtacctggaggtcgcggtgctggccgccactttgcgcgcagccgccaagccggccagcttttcacgccttgcagaactggtgcatcgggccgtgccttatccggtgctgttgctgctggacaaagaacgggctgaggggtcaacactgaccctctcgctggctcataagcgctgggcgcagaacgaggcgggcaagatcgtgctagatggcgatctggtgtcgacctcgctgtttcaagcagctgacggcagacctggagctgatgcgaaggcagcttcccacatcgagcaggatttcgtgcagtcgcttgcgattacgcgtcagccccaagcttcgctaaatgtcctctatgaaggatggatcgtatgcgtgcaggccctgcacgcagcgcgacggacaggaatctatcaaaccgctgcaacacccgaacagaccgcggcgcggcgacaggcattgattgattgccggtggctggaacgcgagatcagtcgcctgcgggccgaggcggccaaggaaaaacaactggcgcgccaggtggagctgaacctgacgctcaagcgcatccaagccgaactggccgctgcgcaacaacagctttga

SEQ ID NO: 511489 - DNA, 1785 bp, Stenotrophomonas maltophilia
atgagctttcgcaccgccgaaccggcattgaaagatgtcctcgatggaattgcatcgggacaaatccagcttcctgacttccaacgcggttgggtgtgggatgacaatcatattcggtcgttgatcgcaagcctctcgctctcctacccgattggcgcggtcatgtttctggaagcaggcggggtgccattcaaaccccgactgtttgccggtgtgaacctgcagcctgcgcctgcaccaaagaccctcgtgcttgatggtcagcaacgcctgacctctatgtacctggcgctgcgcagcggccagcccgtgctgacacgcacggagaaaggcgcggatattcgtcgtctttatttcctcgacatgagcaaatgcctggatgagtcggcggaccgtgaagatgccgtactctcggtgccagagacgctgcaagtcacgtcggatttcggccgaaaggtcgatctggacgtcagtacgccagaccagcagtacagccagcggctctttcccgtggcattgttgttcgacatccaagggttcatggcctgggaaagcggcttcagcgcacaccatcagttcgcagcggaagccatgcagttcatgcagcggttccgcaacgaaatatggctgcgcttccaacagttcaaggtgcccgccatcgaactgacccaagacacgccacgcgaagccgtgtgccaagtcttcgagaaggtcaataccggcggcgtcacgctgacggtgtttgagttgatgaccgccaccttcgcagcggatgaattcaacctgcgcgatgactgggatgcacggcaggagcgaataaccgccaagcacgatgtactcacggcagtggatggcaccagctttctcaccgcagtcacgctgctggccagttatcaaaggcacaaagcgcttggcacatccgtcagttgcaaacgctccgacgtgctgaagttgccgctggcggacttcaaggcgctggaatccgatttggagaaaggcttcaagcgggctgccgaattgctggctgaggaaaagatcttcgatgaccgaagcctgccgtatgccacacagctcgttccgttgtcggccatctgtgcgcacctggcagaccgcacaacgcaacatggcgtcaagcaaaaactgctgcgctggtactggagtggtgttctgggcgagctgtacggcggcgccaacgaaacccgtttcggcatggacattcaggatgtggtcgcctgggtcgaaggcggcagcgaaccgcgcacggtgcgcgacgccaactttgcaccaacgcgcctgctgtccctgcaaagccgccttgctgccgcttacaaggggctggccgccttgctcatgaaacacggcggtcgggatttcgtcagcggtacgccgatcgacctcaacacgtacttcaacaacgccatcgacatccaccatgtgtttccccgcgcctggtgcgaaaaccagaaattgcccaaggagaaatggaacagcgtggtcaacaaggcacctctggctgctggtactaatcgtttcatcagcggggatgcgcccagcgtgtacctcgcacgcatccagaaagccaagcaggtggcccccgatagcctggacgagtttctgctctcccacgtgatcccggtgcctgcgctgcgatcggacgacttcgatgcgtttgtccgtcaacgcgctacggcactgttgaatctgatcgagcaggccatgggcaaagccatttccgggcgcgacagcgaagaaacggtcaaagcatttggagcggcactctcgtga

SEQ ID NO: 511490 - DNA, 768 bp, Stenotrophomonas maltophilia
atgaaggcaaggatgttggcgctggccatgttgttgatttctcccgtggcaatggcggtccagccacggatgagcgtgcacgtgacgtacgattggtctggctggggttctgtatctgagcgctgggtcatccggcgcgatgcctatgggttgaccacccgtgtacaggtggttgacacgcccgacgtccagccgcgcttgccggagcttctgccgatcggtgcgctgtcagcgttcgaggccgcgctgcaggcagcaccgttgaccagggacgccacggtggatctgatcacttcgcggctggaccggcccgcgatactgaagctggatccggagctgcgcagcatgccggcggccacatgctcgtttgcccagcagcaggcttgggcacggcaagctctggccgggcagggtctgcaggagcgcgttgcaaaacacttcaacggtctctggaccgatgactatcccatcatgaccgtggtcgtatcccggccgggccgcccggataccgtcctggtctccacctcccagtacacgatgatgctgccatggaagcgcctgtcgtcggcggacttcgatcagcaggatctggaaggtgctcaggaagagtggcgtccggcgttgagcgatgcattgatggggctgctacctgcgggagaacccacacgcgaacgcttcaagatcgcttggtttcagaacagattacgcggcgatcttgcctcggaggcgctgcgttgtggaacccagcgcaatgaaacggcagattga

SEQ ID NO: 511491 - DNA, 420 bp, Stenotrophomonas maltophilia
gtgaacgcggtcatctaccacaaccccaagtgcggcacctcgcgcaacaccctggcgatgatccgcttcgccgggatcgagccggaagtgatcgactacctggcccacccgcccagccgcgcgcgcctggtcgacctcatcagggccgcgggcttgagcgtgcgcgacgccctccggcagaagggcactccttatgacgagctggcactgggcgatgcggcactgagcgacgacgcgctgcttgatgccatgctggcgcacccaatactcatcaatcgtcctttcgtgcaaaccgataatggcacgcgcctgtgccgcccttccgaactggtgctggatatcctgccgaagcttcccggaccattccggaaggaagatggagagttggtggccgagcacaggggaagcccggcgacctag

SEQ ID NO: 511492 - DNA, 291 bp, Stenotrophomonas maltophilia
atgatgagcaagcagtacacggctgagttcaaggccgaggcggtcaagcaggtgaccgaacggggcttcgcggttgcggaggttgccaaacggctgggagtctcttcgcatagcctttaccaatggctccggaaggccagaagcgaggccctggcgggcacacccgagggggcgatgctgccatcgcccaaggattcagtcgaggtccggcgtttgaaggccgaggtcaaacgcctgaccgaggagcgcgacatactaaaaaaagccgcggcgtacttcgccaagggatga

SEQ ID NO: 511493 - DNA, 1029 bp, Stenotrophomonas maltophilia
atgggcggcggcggcatgaaactcttcgacttgaaggttgagccatctgatctgcatccaggcttcaagcgcttgcttgatcccaacttggcccctgagcgtgcagtactctcggcctgggccagcgggttttacgatcgagataagaagttcgtaaaggagtttcagaccaccttcgagtctagcttgtgggaactgtacctacacgctgtcttgaaggagctccggctggggatagactttgctcaccacgcaccggacttcctcgttacaaaccctagctgcttcaccatggaggccacgatcgcagcgcctccactgggtggtgcgccagccattggcaccggtgtccccgagatcccagccgacttgaacgagttcaatcgggaagcaacgctgcgagcgtgcaatgccatcagctccaagctaaagcgctaccgtcagcattactctacgctggaccacgtgaaagatcgcccttttgttctggcgctcgctccgtttgatcgccctcttgcctttttggagtacgaccggcctatccaggctgctctttatggacgtcacattgatgaagagcgcactatggcggagggcttgtcaacggtgatcgagcgggagattgtcgctgtatcgaagcgacctggcgtcgatgttcccgttgcgctcttctgctcggatgtctgcaaagaaatctcggcagttgtctatagcgctgtcgctggcttgggaaaggtgcgggctctggccgactccccagaccagttctcgacatacacaacgctccatgaatcgacaagctcgtcgatgcccgaagtacgacgtgcacgaaagcgggactacagcgagcagctgttagatggattgcacgtgttgcacaatccctttgcaacacatccgctgtcagttgacgtgttcaagcatccaagcgtgtcgcaagaccggattgagcgagacggcagccttcatcgaactagggaggaaggtttcctgatgactcgacagatcaactccttcatgcctgtctga

SEQ ID NO: 511494 - DNA, 237 bp, Stenotrophomonas maltophilia
atggacagcgactggcctgagacgctccagagaatcagcttcgttctcggcatctatgccgcactacacacgctctttcccgaccagcagcaagcagacggctggatacaccgcccaaatgcaggagcacccttcaagggcgagccagcattggcgctcatgtgcaccggccggcttggcgacttggagatcgttcgtgagtacctggacggccaagggacgtctcagccgtcatag

SEQ ID NO: 511495 - DNA, 426 bp, Stenotrophomonas maltophilia
atgagcaggccaaactctgtggaacagaaggcactggatgctctcgatcgtctaacgaagcgacgtcctaccaatgagctcctgaaatccaaactggcggcagggcatcggatcatcacgccaacctccgtcgcggcggaggccggcgtgaacagagggagctttggatcgaggcacgctcgacttggtcatgtctggattaagattcaggaggcggccgaggaggagcggcgaggctcggtgacggaggagctcaccaagctccgaggcgagaatgctcgattgaaggccctgctatataaggccaacgtgcacaacgcctctcttcagcttgcggtctctcgattgcagaggcgaccgggcaatagaaatgaagagaacaatgtagtcaacttccggaggaacaatcggaaccgtccccggtag

SEQ ID NO: 511496 - DNA, 2067 bp, Stenotrophomonas maltophilia
atgcccccagctaaagaatccaaaatagcagcgcgagagagcttgcaccctgcattccaagtcaactatgacagcgatatctggacctttgcgcaaaccacggtaggccagcaaaaggatgtcgtagaagttgactgggcaattccggtcattcgcggagagcgtctgacagattacaagcatcgtaggctgctcttggagctcaaatgctttcttaagaccgccatcgttgacgacacgatacggatgaaagtcggctccatacccgggacatatatgggacttaaggagctggtgaagttcatgggcaagaaccaactaatctccctgtttgatgtatctacggccttcagttggcaatacgtcgatgacctggaagagcagtacatgagtggggggaccagtaatggaaaggacagggcatggacacatgccaccgcttacaaactgattcatcctctgacccaaatctatgagatggccgctagcttgcgcgagcgaggcggggaggctccgtgcgaagcgccgttcgatggaaggagaacatacgacgtcgttaccgggccgcttgggcttgctcgtacaggtggactgatgccgattccggatgaggtctcagtgcccattctctcccacgcaaccgagtggattgagtacggctcggaagatgtcatcagactccaaggtgagatcatcccaatgctcattaaggcgaagaagctcaccggaccacgccggacgacacagcttcgtaagatcaggcagcacatcgagcaattccagatgagcttgatcccggggagccaaaccccgtggcatgagccgttgatcccaaccgaccgcacttcggaatctggggatgagttcgagataagtggtctccaggttcttagaaggctgatcctcatgacggagagcgcttgcagttcgttgttgcaaggctgcactggtattcgggcgcatgagcttatcggcctgtgtcttgaccatgaatcgaccctgcatcaaggcatcgtaaggtcagttgcctcgctcgatgggctgatggaggtgttctccatctgcggcatctcggcgaagagagaagccactccccatgagtggacagctggattgcgccctatgggaacaaatcatcaacccattccggtgaaggccatcgatgtgttggtgcgtctgatggcaccctggagagccatcgcgggttcaaccgctctgatgctgagctttgcccacggcaagtcgcttccccacaccgccgacggggtcggacgaatgactgcctccagaaactcgctgatgcagcgcgagttcgcagtcgatgccctgatcaagaagcggggcatcgatctagagcaggcaatgtacgaggtgcgctctctacgtccgcagcgctggagaatcacgtttgcgcaatacgtgttccgttcaaagccagagctgatgcctgcgctacgcacacattttcggcacatgagcgaacagattaccgatcggggatacattgggaacgacgctgcactgctcgagaacctggaaggggagagagtcatggaaacatcacgctttctcgttcagatcacgctcggaaagccgatcggcggagggccggcacagcggctgctcgcacagcacgcagagtcaatgagcaaggccttgaacgaatgtgatggcgaatcactgatcgacaaggccgtagcatacgtacagcagattgaccttaggatctggactgggacctatgcaagttgtcttattgacatcctgccgagccagtcaagttgcaacccggacgcaggcttactcgccgttcgctctgcgccaaacttcgccgtccggtcccctggcctctgtgcgggctgcaagtgctgcatcatcctgccggagcaccgggatttctgggaggctcgtcttaagaagaatcaaaaaattgtcgaggcggagcggactaggctgaagaatcagacgtcaacgatcgccgcaaagagagttcttcagagcagaaaagttctgaaaatgatctcgcaagctaccggggacggttccgattgttcctccggaagttga

SEQ ID NO: 511497 - DNA, 1830 bp, Stenotrophomonas maltophilia
atggcaggaaaaagggtcgctcagcttaggcatgctctagcagagaacgacagcgtcccatccgcaaagaaatggtcagtcattgagcgcccaggacgattggaagcggtattcagccgtgcacagggtctgcgagacaacctcgtcaacctcagtcgatggaaaagcatgggcgaagcggcaccagtctttgctgaggcgtactgcaaagcctttgcgagtagcagggaatcgagccgagcgtcagccgccggcaacatcgcgagcggcctttgccagtaccttgccgccaagggagtaaggatagacgccccagacgccattccgccggagctgggaacggccttcctagactatttgaaagggcgagacgttgaccatccggttgcgctctctgtggagacacaacgtcactactatggagtgttcaagaagatagtacttcagctccacaaaatggatcccaagtggacggcaatccgtattccgccgaagccgttcgccggagtgcctaggaaatccaagccaaaagaactggaccgtgcggcatgggctgccgtcatgaaggccgccgtagcggaatgcctcctcaccatggatgaggtctggccgcaattagagcgagtccgtaccgccctcacgcaaaagaagaagggcggcgttgtcaatctgggcgatccagcccaagcagttgcccagatactgacagacttcgacgggcatcttcctcgccaggcccaggtccacaaacttcgtggcgtcaagaagatcagtgagagcgaatacttccatctgagacggctagctcacccgattggcggtgaccttattccattctttctggtcttggccttgcattcggggttcaacgaacagccgcttcgaacactgacactcagcgggatctcggaacactatccgctcggccagaagcggacagtaatcacatcgtcaaaatggcgggccagcaaatcaaaacgaggtgcgcctcagcgcgcagcatttcccgctagcgaccatcccttggcacctgagcggctgatacgatttatcctggactggacaaggcgcataagagagtacgccgttggcgagctcgcggaggacttctttcttcacgccgtatccgaagggggaaggcatgcgcgcagaggcatgcttatcgattcctactcggcacgaactgacgacgtgaacacgcgcattactggatacatcactctgttctgcaagcgaaggggacttaagtactccggatcgcgcgccaacaggcttgcgttctccgaggcggttgatggcctgactgacggagacgcattcgagctacgggccatgcttggtcaccgcctcatttcgactgcccaagacagctaccagaccaacacgatgcagctccggcagagggagcagcttgcgggtgcgatgacggcacaggagcgttgggtaacgtcgagcgggaggattgactcccgctccacccccggttatcgggagcgcacggcaaccactccaggcttcctctgcgccgatccctttgaaagtccccaaccaaggcagcgtggtggaaagctatgcaccagctacggcgcgtgccctgcgtgtccacttgctgcagcagacacaaacggcgcatacgcattggcacggttccttcagttacaagagctctatgaggaagcgagggcggagttggggatcgagatctggaggaaaaagttccagcacgcctacgcggcgctccgtgattggtggatacccgcggtaagtaatgatgtcaccagaaatgaagcgatgcacatcattctggcgccgttgccggcgctcgagtaa

SEQ ID NO: 511498 - DNA, 1026 bp, Stenotrophomonas maltophilia
atggcggacaccgacgagatgctcctaaaaggatatgcgttcacgctgactgaactggactcggccgtgacccacgagaagctagctgcggcaaccattcatcgccgatggtcctcagtgaccaagcttgttgccttctgcgcaaagcgcggctacctcaagaagccaccacctctcgcgatcaagcatacaaagcgcggagaggcccagatcctagacatcgacgtggacctaccggcgctgaacgatgcggatgaactgattaccgcgctgcaccctgagacagtcactgggatccttgatgaactgggccccacatcggtgattgagcaccaaggggtccttgaactggcaccggccactaccgccgaacgactgatgggtgagctctgctacaacaccggtctgagacgggcagaagtgtgcagtctgaaggcggtgacgattctcgcaacccgaaccgacagccgagatcccctgagcgcagtagccatatccgtcgttgggaaaggcaaaaagaggaggaacgtccccgtgccggtgtggctactagatgcattgaagcgctacgcggcagacgttaggcagaggctcgttgacctccggtgtcgctacgacatgcgcgacgatcatggcttcctcttcgttcttgacaccaacgaccgcaggcatgtcggtaatccgataagccctcagattttcgatcgtcgcttcgcgagtgccagagatagactcctcagccgactgtccaaaggggcgaatcacgcccgatacgaatcaacacttcgcgagcggatcacgattcatgcgctccgacataccttcgccctttacacatacatggaaaagcgcgcgcaaggagatagggacgcgatcaaatatgttcaatccgtgctaggacacacgcttcgagacaccaccgaagcgatctatctacgaagcgccaacgccttcgaaagcgagactagggagtcgatccggttgcacatcgaagctcagcctttcatgcgaatcggcccgccctga

SEQ ID NO: 511499 - DNA, 477 bp, Stenotrophomonas maltophilia
atgaagccaacaatcctcgcgctggacctagaagggacgctcatctccaacgcagtgagccagatcccccggcccggtctgtatcagttcctggaggatgtccgatcgcaatttaaagagcttgtgctgttcaccacagttcccgagaacctcacgcgacagatagcggatgtacttatcagcgaaggaagtgctccgccatggttcgcgagccttcgctacattcattggactggaaagacaaaggatctgtcctacgtatccgatcgccttggagaagcactgcttcttgatgactacagaccctacatccacgctgggcagcaggacctgtggatagagataccgctctttagttcaccttactcgcttgaggacgacgcgctgccccaagtgactgaccgcctgaaggtacgcatgagacaactacaggtcgatcatgcgctacaggaagcgaatggcgagcagccactatga

SEQ ID NO: 511500 - DNA, 675 bp, Stenotrophomonas maltophilia
atgatcacgaagtctcgatcgatcaacacctcgtggaaggactggcatgggcacacccaccacggtagccagacaagatcctacgaggcctatcctagggagcacatctcgccgcccggtgaattcctgaccgcggtggagaccgacggtggtatagcgatggcttccagggtcatcgaccgcacagagtcagaggagatcattgcgaacctcctcaacgtctatcttgagtgctttctgcgctttgatatcgttgatcctaacttggctgtaccggtcagagtccaaaagatcaattggcgcattcttcctccagggacgtttccgttcgacagggcgatgcaagtactggatagctacctggcacagctgacggacgccgaccgcgtcgcagctgagcaacgtatccgcacaattacgcgccacgaacccgacttcatggcagttgggctgggcggattcagcgagtatatcgtcttcggattcacgcggagacagcggtacgtatttgagagtcccgagaccggcaatgccacttacattttccggaacgaatgggaggaagtgtcccagctcaccaagcgtcaaatcctacaagaacagctgcaagaggcgcggatcatccataccgcacgctgggccattgaagtatcagaagcgatacagcggcagtag

SEQ ID NO: 511501 - DNA, 201 bp, Stenotrophomonas maltophilia
atgacacgggtccgcaccctactgcagcgctcgttgccatgggtgctgctgcccctgctcgccgcctgccagaacgaacaggtcagtgagttccagcccgtgggccggcaagctgcacacacttgcagcaagatgccgttgggccgcggtcagtgccaggcagcaacccgcagccctccgctctcacaggcattcgcctga

SEQ ID NO: 511502 - DNA, 672 bp, Stenotrophomonas maltophilia
atgcaggaacacgccttgagcacgacaacaccattgcgcagcgcacgatgctggctgccggcggccctgttgttggcactggcggcgtgctcgccttacgcacaagcagagcgcgatgtcgccgcgggtggacgcggcctggccaagctcaataacgcaccgaagcaggcctatgagctggtgctgacactgagggacgcgccggggccgttcgcgatcgttgagggtgtggcccagtacgacgtcagcaactacgcagattgtggtcggatcctgcctgcgacgggtaccgcgggccgcatcaccagccaggaacccgtcacgctgcaccgggtcggcgaaaacgaataccgcggcacgttctacctcgaccgcatgcaggacgaggactactacgggcgtggcgcctgccattggacgctgacgggtgtcggtgcgatgttgcgtgctacgaacggcgaggcggatacgagattcctgacgttcgtcgacagggagcgcatggacgcggggagcccgttgacgcggtactacccacgcgccgactacccgcggatcgaagagatcaccggatacggagcaagtggcaaggaagatccttcagcgtacaaagaagagctgcgcaatgcgctgttctcaaccaccaccactgtgcagaagctcatgccatga

SEQ ID NO: 511503 - DNA, 507 bp, Stenotrophomonas maltophilia
atgagctacacaatccgcccggaagccgctgccgatcatgccgtgatccatgcgctcacagaagctgcattccgccaagccccgcacagcagccataccgagcagttcatcgtcgacgccctgcgcgcccgtggggagctgagcgtttcgctggtggccgagatggacggcaaggtgatcggccatgtggcggtgtcgccggtgacgatcagcgatggcagcatgagatggttcggcctgggtccgatttcggtattgcccgcgtggcaggggcagggcatcggtgcggtcgtgatgcgcgccgcactcgaagcactgcgtcagcagggtgcgcatggctgcgtggtgctgggtgagccggcctattacggtcgtttcggcttccgcgccgagtcgggcctggtgctgccgggtgtgccggcggagtacttccaggcgctgtgcctgcggccgccgatggcgcagggcgaggtgagctattccatggccttcgaagccaccgcctga

SEQ ID NO: 511504 - DNA, 627 bp, Stenotrophomonas maltophilia
atgatgcgcaagattttcctggtatccgcgctgctgatcagcactccactgactgccatggccagtgacggcatgagctacacgtatgtggaaggcggctggaaccggctccagatcagctccaatgcccacaacgatccaaaggccgatggtggctatgtacgtggctccttcgccgtcgccgaacaggtcaacgtgttcggcggctggtcgcgcgtgagcgataccacgcgctacgcctattccagtgtcaaaaccacgttcgaccagccgcatcttggccttggctaccacatgccgatcagcgaccggctggacttcaccgccgaactggcgtggaaccgccgcagcggcaaggacaaagtccactccgacggcgtgacctacacgaacaagacatccgtcaatacagccgtcggcaatgtcggccttcgcggcaagccgtctgcaatgaccgaggcgtggatcaaagcaggctacatcgacgggaacaaccacttcgatggcacctggacaggcaccatcggtggtcaggtcagcttcaaccgtacctggggtgtggttgccgaaggccagttctacgacgacttcgccgagtaccgtgtaggcgtacgcgcaagtttctga

SEQ ID NO: 511505 - DNA, 624 bp, Stenotrophomonas maltophilia
atgcgcaagatgctcctggcaacctgcctgttgctggtaacaccactgctggcgtcggccagcgacgaactcagctacacctatgtggaagggggctggaaccggctgcggctggacgctgacagcgcgggtgatatgaccttcaacggcgggtatgtgcggggttcgttcgctgtcacaccacagttccatgtaatcgccggcgcttctcgcgtcagcgcaagtgaccatcggggcgatgcgcgggtgaagaccactctcgacgttccgtacctgggcctgggatatcacgcaccgatcagcgaccgcctggacttcaccagcgagttcgcctggaaccaccgttcggcgaagtcggactatggcgtcggcaacgagcggtcccgccagacttcgcggttcaaccaggtgctgggcatggtgggtgtgcgcggcaggttcaccgacagtctggaaggctggctgaaaggcggctacgccaacggtggcgatggacaggacgcacgctggtatggcgtggtgggcggccaggtaaacatcaccgatacctggggccttgtcctggaaggccaactcgacaaggacacgaccgaatacagagcgggcgtgcgcgccagcttctga

SEQ ID NO: 511506 - DNA, 1179 bp, Stenotrophomonas maltophilia
atgcaatggagagaagctacagaaattgagggaaacagcgtccgagtgccacccacctggctcgacctctactactatgaagctctaaacattcttttcagattcgagaattcacttagaattttcgcctacataattctgaagaaggagctcggcgagaaatgggataatgccgccatctcaggcaactcaaccattaaaagcgagacaaagaagcgtttagctcaagcacgcgagcatggctatctcggatacgaagtaagctccccaatgctctacttaaacagcggagagctcacaacaataataacatccgacgcatactggaagcatttcgcgccctatttcaaggcgacgaaacagattatactaaacaaattaaatgaaatcggcacagtaagaaattcacttgcgcatttcaggccgttaaaaaaagacgacctcgatctcataaagcaaaatacaaaacacgtacttctcgaaattgaaacatgcattgatcgaatcaacgcaatatccagtgcaactcctacaaacaatgacagcgagtggtacaaaaagctttcgtcaatcaagaacgaggtagtcgagatatcacttttccagagccaagatcaacaatgggttcgcaccgaaattggcttcaaaaccccactactggaaaagaatcaattcggaacacattacttttcttatcaactcgggaaattccgaaccgaggaaatgctaaagaaatatgacggcattagaaatgcgtgcatttgcgtaagcgaaataccagcatttggaaacatatctcataatcacgacgtcgtattcgatcaaaagattagcattatattccatcagaaaaatctctccgacgggatagaacccatcttcagtgacttcacagaaatcgccaagaaggcagaaagggaagtggcgctccttcatgaggacagactaactctgggtgaattggtcaagtccgaaagcgccaacgcgtccttcatcacaaacgttgataacccattttggagcttaaacatatcaaatctcaacactccgcttgagagtgttgattccattgaattctgggggcaccgatatcatttcagctccaactttgtgactgacacgaaccactacccgtggatgccgacagctgtatccaagccagcttgggcaggtatctaa

SEQ ID NO: 511507 - DNA, 726 bp, Stenotrophomonas maltophilia
atgatcaggccgtcaacagcctgcctgctggagattacgcaccatgctgcaactgcaagacatcgagcttcacttcaacggccgcgcgcttttcagcggcgtggacctccgactgcccgcaggcgcgcgtgtcgcgctgatcggcaacaacggtaccggcaagagcagcctgctgcggatgctggccggacaggcagcgcccagcgcaggacagatccactggcgcgacggggcatccgttgcctacgtgccgcagcacgtgctggacggatcggcgcgcagcggcggcgaacagatgcgccatgccctggcgcgtgcgctggatgcagctccggatgtgctgctgctggacgaacccagcaaccacctggaccgcagcgcacggcgctcgctgctggcccggctacgccagtaccacggcaccttggtgattgcctcacacgacaccgccctgatcgaggcgctgtgcggcacgctgtggcatatccacaaccagcgtatcgaggtcttccagggccgctaccacgaccaccagctggaactgcagcgccgacgcgacgcgctggatcgtaccgtgcgcgacctcgaccgcgcgcagtcgcaggcccacgacgctctcatgcgcgaacaggaacgcgccgcctcctcacgcaagcgcggcgcggtgaaggtggagcagcgcaaatggggcacggtgcgctcggccaccaagctggagcgcggtaa

SEQ ID NO: 511508 - DNA, 522 bp, Stenotrophomonas maltophilia
atgcaggcggcattcggagggggtccattggggttggcatgcggccatcgcctgcaccggcgtcagcgcgctcggcagtgcatcgtagtgctggtcgatcagcgcgacctgctccgccgctggcagcagccagtcgccctcacgctggacatcggtggcaccctgcaatgcgcgggcgaaggtggatttgccgctgccattgtcgccggtcaccagcaggcagtcgcccacctccaggcgtacctgcagctgctgcacgaccaggggcgcgtggtagccgcatgcgccgtcggcgacctgcaccaccacgccctcccggcgccagcccgcgggaagctggaagcgcggcgcgatgacctcgtcgcgctgcagctgccggcggcgctcggcgatgtcttcctgcacgtctcggatctgctggcgtttctgtcccgccgtggtgttaccgcgctccagcttggtggccgagcgcaccgtgccccatttgcgctgctccaccttcaccgcgccgcgcttgcgtga

SEQ ID NO: 511509 - DNA, 321 bp, Stenotrophomonas maltophilia
atgcaggtgtcgagtttccccgccacctgtatggtgcggggccgtggttttcgggagttacacgaagacgacgggccgcaccagggcagtggtgacggtggtggtggtaatggtggtggtggcgaccggcgcagtcgaacggcccgcaatggcgggggcgatcaggctggcgtgggcggcatcaaggaccatggcgcacagaaaacactgtgcgccggcccgctgtcaagtgctgcgatgcaaaaaatcattgccgcgatcatcgcccaacgtgccggcaattggttgcatctgagaccaagccggcatcagcacgcctga

SEQ ID NO: 511510 - DNA, 1107 bp, Stenotrophomonas maltophilia
atggactgcaagcgtttcgtagccacaatgacggtggcactcaccctgaccggctgcatgtgggctccaggtcagcatcttcgctcgagcactttcgctcgcgatgatcagcccatcggcaatgaccagatcgatctgattccgatcacgcccaagctgattgccatggagcgcgccacccgcgatgtcgcgtcgatccccgctgccctgacccagtatcaaccgggtccgtatcgcattggcgccggcgacatcctctacatcactgtctgggatcatccggaactgacggtgccggcaggcccgcagcagcagctcaacgccgcgggtcgcctggtgcagtccgacggcacgctcttctacccttacatcggcaagatcaccgccacgggcaagacgcccggcgaactgcgcgaagagatcacgaccaagctggcgcgctacatcgaagcgccgcaggtggacgtgtcgatgctgacctacgccagccagcgcgtctgggtcaccggcgcctcgcgccaggcagccaccgttccactgacggtaaccccgctgaccatgggcgatgccatcagccaggcaggcctggatccgacacaggctgacctgtccggcattcgcctgacccgcgatggaacaacgtacaccatcgacctcgaccgactgggccgcagcggcggcggtgacaccaacgtgttcctcaaggcaggggaccacatctacgtgccctacctcgatcacaaggaagtcttcgtggtcggcgaagtcaaccagcccggcgcaatgaacttcaagaccggcgagatttccctgagccaggcacttggccgcgcgcgcggcctgctgcagaccacctccaacggcaatgctgtgtacgtgatccgcggttcgaacgacctgcagagcaccccctcgaaggtgttccacctggaagccaagtccccgactgcgttcgctgtggccagccagttcgacctgcagcccggcgatgtggtgttcgtcggtgccgctggcgtgacccgctggagccggttcgtgaaccagctgctgccattcacctccatcatcagcaacgccgccagcgcgcgtagcgacctggataagtaa

SEQ ID NO: 511511 - DNA, 693 bp, Stenotrophomonas maltophilia
atgagcaggatcgctcaggctgccacccgacatgcaagccgccagcgccccgtggcgctggccttgcttgttctcatcaccgcaaccagttgcggtgtcgtgggcaagaccagcgtcaagtcggtgcagatcgcactgcagggcaagcccgatgtggagccaacggctgccgaggttgctgccaatcggttcccgcagatcaaggtcaccgggcctgcgggtggcgcggtcctggtgcttggcaacatcgattccgggcgccaggcgtggtacagctccgagcgaagcatcgtctttctcagggatggcatcgtcgtcggcacccacggcagcaacccggaactgcaggacatgacgctcgaaggggattcccccttccacgccctgcaccggatagcagacggcacgaccgtgcagcgtcgctatgacgtcatgcctgattacaggtatggaatgaacgtcaccggcaccctggccaccttgggcaaagagaaggtccggatcctggagagcgagcgcgagctgttgcacgtgcgggagcagcttaagggcaacggctggaagcgcgacaaccactactgggtcgatcctgccaacgggttcatctggaagagcatccaggccatcgcacccgacaccagccttgaagttgtccagctcaagccctactcgcaggacctgcagaaccgatga

SEQ ID NO: 511512 - DNA, 774 bp, Stenotrophomonas maltophilia
atgacactgcgaccgatcattcttgcgctggcactggggctggttccccatgcgcacgcctcatcgccgatcaacgtcgaagcggccggccatgttcgcaatcccggcatgcacacgcttcccgccgaggcccgcctcagcgcagccgcactcgctgcagcgccggatgaagaagcctatatgctgggcgcagcccttcttcggcaacgctcgctgctgtcccagacccgcctcaaggccggcctgctattcgatctggaaacgctcgcctctcaggaggatgccccggagctcgccgatgcggccgcacaacttgcgcgcgaactcggcgatctgccagtgaccggacgcgaaccgcagcttcttgatccgcgccgactggaagccagtgcctcggagaatcggcccgcgctggcgggcgaccgcgtcgtctatcctggccgacccgaaaccgtgcacgttgttggcgcagtggtacagccttgcaagctgcagcatgaagccaccctcgacgcacgaagctaccgcaacgcgtgtgccttgctgccagtggccagcccggatgatctctacgtcatccagcccgatggcaaggtggagcaactcggcgtggccctatggaaccgcagtgcgcccgtgcgcctggcgcccggcgctgtgatctacgtaccattgagcgctgcgaagatccgcacgatcgcccccgatgtcaacgaggatgccgtgcgcttccttgccacccaggtgctggatgcacccggagtttcatactga

SEQ ID NO: 511513 - DNA, 2121 bp, Stenotrophomonas maltophilia
atgcgccatcgctccatcccactggcacgcgccagtgttgcccttctcagcctgagcgtcagcgctgtattgcacgcacaaacagcccctgcccccacagcaagcgactggggtggcgttggcctgctgcagacccccaccgcacgcatggccgacgacggcgaggtgagcttcaccgcaagccatacctcgccctacagccgctacaacgtggtgatgcaacccctgccttgggtcgaaggggcattccgctatgtttcggttgcaaaccgacgctatggcccggaatggctgagcgggaagcagaactacaaggacaaatccatcgatctgaaggtccggctgtggcaggaaagccgctgggcaccggagctgtccgcaggcttccgcgatatcggtggtaccggcctgttttccagcgagtacctggttgcgagcaagcggttcgggccagttgatgcgagcctcggcctcgccaccggctacatcggtaatcgaggcgatttctcgaacccgcttcgggtaatcagcgaccgctttgaagagcgcccacgcgcgcagggcaccggcaacttcaacagcaagggcatgttccgcggtcccgtcggcatcttcggtggcatcgcctaccagacaccctgggaacccctgcagctgaagcttgagtacgacggcaacgactacaagcgcgaaccacagaacaacaatcaaacgcagaagagcccaatcaaccttggcgcaagctatgccgtgaatcgcaacgtgcaactgcatcttggctgggaacgcggcgacacagccatgttcggcattaccctgcgcggcaatgtggcacgagcgaaatccacgcccaagctgctggatccgcctccggttgcccgagcatccgcggcaccctcggcgcagtcaatggatgacatcgactggcccgccttgagccggaccctggaagagaacgccggcctccgtgtcacaggcatcagccgacgtggatcggaagtcatcgtcagcggtgaacagcggcggttttactaccctgcgcagggcgttggccgagcggcacgcatcctggattcggaactgccatccgataccagctggttcacgatcgagaacacccgcttgggcgtacccatcgtggaaagcagcattgagcgcagcaccttcaacagctacctcgacaatcgcactccactgagcgaattggccggccacatcgagcaggcagcgcctgcgcagcagcgccgtgagagcctttatgcggcgccacttcgacgctacgatggcgcgttcaatattggataccagcagcagctcggcggtcctgatggcttcttcctgttccaggtcgcaggcacctactcggccaacttccacttcacgcggaatacctggctgagtggaacggccagctacaacgcgtacaacaactacgaccgcttccgctacgacgcgccaagcaacctgccccgggtccgcaccaacatccgtaagtacctgaccacggaagacctgaccctgaccaacctgcagctcaccagcaatcatcagctgggcaaagacctgtatggctcggcctacgccggcctgttcgaggccatgtacggcggcgtgggtggcgagatcctctaccgacccttcaacgagcgctgggctgtgggtgccgagctgaactgggtgaagcagcgcgatttcgatcagcgcttcagcttccgtgactacagcaccactaccggccacgccagcttctactatcagtggggcgatgagcacaagatcaccagcatgatcagcgccggccgctacctggcgaaggactggggtgccacgatctcggttgcgcgcgccttcgacaacggcgtgaacatgggcgcgtacgccaccaaaaccgacgtttcatccaaggacttcggcgaaggcagcttcgacaagggcatcttcatttcgattcccttcgacttcctgctgccccgatccacgcgcgcgcgtgcgacgttcgcatggaatccgctgtatcgagatggtggtgcgcggttgagtcgaagctatgcgctgtaccagctgacctcagagcgggatccggacttcttcttcgacaatctcgacagaatcgacgactga

SEQ ID NO: 511514 - DNA, 2229 bp, Stenotrophomonas maltophilia
atgaccaaggaaaccagtgcgcggcccgcccgcgaagacgacgagattgatctgcgggatctgctgggcgttctcattgaccgcaaatggtggatcctgggaacaaccttcctgttcgcgctggttggcgccgcctacgcgatcctgacgccgccggtgtatcgggctgaggccacggtgcaggttgagtcgaagatgcccaccattccgggtctagcagatctgacctctctgggcggaggcggtagtaccgcatccaccaccgaagttgcgctgctgacctcgcgtacgattgtcggtactgcggtcgacaagatgcagctcgagacggtcatcgagccccggcatttcccattggtgggcggactgattgcgcgtcgtttctcgggcgagactgagggcgaagtggcggctccggttctggggctttccagctatggctggggcggcgatgagctgaagatccatcgcctggacgttcccgcacggttgctcgacgagccgatgatgcttgtcgcaggtgataaggctggggaatactcgctgcttgatgacgagggcgaagccattcttgccggcaaggtcggcatgcccgccgaggcgcgcgggatcaggattgaagtcgcgagcctgaatgccaatccgggcatgcgcttcacgctgaccaagcagcgtcgcctggacgtcattgccgggctgcaggaagacatccgcgcgtctgagcagggcaaggactctggcatcctccgtgtcagctatgaagacaccgatgcggttcgtgcgcaggcgctggtgcagaacattgctgaagcgtatgtgcgacagaatgtcgaccgaggctctgccgaggcggcaacacagcttgcctttgtgaaggaccagctcccaaccgttcgcaagcaggttgaggacgcacaggcggcaatggcggcctaccagtcccgttcgaactccgttgacattacgatgcagaccaagggtctgctcgagcaggaggttgccgttgaggcaagcatccagcagctgcgcctgaagcaggctgagatggaccgcagcttcacacgtgagcatcccgcctaccgtgcgatgctgaaccagatcggtgagcttgaggcgcgcaagagtggtttccgccgcgaggtcagcgcactgcctgatacgcagcaggagctgctgcgacatacccgtgatctgcaggtcagcaacgaactgtataccgccctgttgaaccaggcgcagcagttggatgttgcgcgggctggtacggttggtaacgtccggatcgttgacgacgcgatcgtcgatatcagcaagccggtgaaacctcgcaagccgctgatcgtgcttgtgtcgttcctgttgggcgcattcctgtccacggccgcggttttcctgctccgcatgctcaatcctggcgtggaggatccggcgcagatcgaggaactggggctgccggtgtacgcggccattccgctgagcaactcgcggaatctactgaaggttcagaagggcaagggtggcaagaagcgtgtggtggcagatggtcgctctcaccttttggccgccgccgagcctgccgacctcgcggtggaagcactgcgcagcctgcgcactagcctgcactttgcgatgctcgaggccaagaacaacattctggccatctcgggcccgcggcccggtgtcggcaagaccttcatttcggcgaacctggcggctgtcgtcgctcaggcgggccagaaggttcttgtcgtcgacgttgatatgcgaaagggcaccctgcacaaggtgctgggcgtgtcgcattcggggggtttgtctgatgttctggccggcaaggtgagcctgcaggatgcgattcatgctgtccggggcctggagaacatgcattacatcacccgcggtgatattccgccgaacccgtccgagctgctgatgcatcctcggttcctgcagttgctggagggtttggccaaggagtacgacctggtgatcgtcgatacgccgccgattcttgctgtcactgacgccgccattgtggccaaccacgcaggctctaccttgatggtgactcgattcggcgtgaaccagccgaaggagatcgagctttcgatgaagcgcttcgagcagaatggcgtaaaggtgaagggcgcgatcttcaacgccgtcgagaagcgtgccacgggctattacagctatggttactacgagtacgcgtcaagcgagaagtga

SEQ ID NO: 511515 - DNA, 441 bp, Stenotrophomonas maltophilia
atgttcaacaaggtgctgctggtctgcatcggaaacatctgtagaagcccaaccgcagaagtgctcatgcggcaccagcttcgggaccgcacaggggtagaggtctcctctgcagggcttcaggcattggtcggtcggccgatagatgagaccgcaggagaactgcttcgggagaaggggcatgatcccagcgcccatcgagggcgtctggcaacgccgtctgtgttggcggcggctgacctggtgctggtgatggagcagtcccatgtggcgcgaatcgcccgcgaggttcctcaggtgagcggcaagacgttcctcttggggcattgggatggaaggtcggagatccccgatccctaccgccagcagcggattgcgttcgaacacgtctacggtttgatcgagcagggcgttgcccgctgggccagccatatcaagtaa

SEQ ID NO: 511516 - DNA, 1422 bp, Stenotrophomonas maltophilia
atgtcttacatgcccgcacggcaccatgccgggctctggaacgtctcgggaaacaggttcactcctgcgctcagcttggccttgaggatcggggatcccatcgtcttggtggcggctgcactgaccgcctatgcaatcagattcggcgatctgcacatgccgatgaactacgcccgactggtctccatcacagttcttttcgcacttctggtccttggatcctcgtcattgtacgaaagctggcgcgggcgcggcctgctcgcggaactcggcaaggtcgtgatgaagcttgccgtgatcttcggaggccttctcgcctactcgaccgcaatccaagtcacggatgagctttcgcgcatctggcttgctacttggtttggcttgagcttggctggcgcatttgccctgcgaattggcgttcgcggcatcgctggctggatccgcgctcgtggcgcagacctccgcagcgcggtcatcgtcggtgcaactaccgactcggagcacattgtcagctccttgcgatcggcgacctgggcaggcatcgatgtgcgcggctggttcgcgaccccgtctgatcgaggcagcgtgcagcacgccagcagactgggcgatctggaagggctcggcgcctacgtggaggctaatcacatcgaccaggtgtggattgcactccccatgcgcgatgaagagaacatcgcaattgccctgaaccagcttcagcactcaacggccgacatcaagttcgtgcctgacatgttcgggctgcacctgctgaaccattccgtcgagcaggtcgccggccttcccgtcatcaatctccagcagactccgctccagggcggcgcccgcctgatcaaggcattggaagaccgtatccttgccggcctcatcctgctcatgatctccccgatcatgctcgcgattgcggtggcggtgaagctgagctccccaggcccgatcttctatcggcaagagcggatgagctggaacaacaagacgttctggatgctgaagttccgctcgatgccggtcgacgcagaaggtgcgtctggcgcagtgtgggcaaaggccggcgaaaatcgcgccactcgcgtgggcagtttccttcggaagaccagtctcgatgaactgccgcagttcatcaacgtcctcctgggcgacatgtcgatcgttggaccgcggccggagcggccggtcttcgtgcacaagttcaagcacgagattccgtcctacatgaagaagcacatggtcaaggcaggcatcaccggctgggcccaggtcaacggctggcgaggctcgaccgatctccacaagcgcatcgagtgcgatcttttctatatcgagaattggtcgctttcgtttgatctgaagattgtctttttgacgatcttcaaggggttcatcaacaagaacgcgtactag

SEQ ID NO: 511517 - DNA, 1455 bp, Stenotrophomonas maltophilia
atgagaaagaaaaatcgctccttcgcccatagcatcgcctggaacttggctggagccgggattccgctcgctttcgccttctttgccatccccagccttttagcaggctacggcaacgaacgttttggactattgacgataatctgggctctgatcggctacttcagcatcttcgatttcggcattgggcgcgcacttacaaagcttgtctcagacaggctaggtagcaaaagtacagaagacattcacgacgtcacaaagacagccatgacgaccatggctgtcctcggcttgctagcatgcacgctactggttgctactgccccgctaattgccggagctctcaaacttgatgccagctttcgggatgagagcgtactcagcctccgaattcttgcgcttggcattcccttcgtaatcctgtcagccggccttattggactactggaagcacgagcggagtttcacgcgatcaatcgggttcgtctgctgatgggaatgttgaactttggcgcccccctactgatgctcacatggtcccatagcctggtaccagctacgatttcacttgctgtggccagagccgccaccacggtgctctattatcaaatttccatccacaaaggcgcactggatgtaggcaccggccgcttcgaccgcagtaacctacgcgagcttctcgggtttggcagttggatcacgctgagcaacttgatcagccctctgatggcacaactggataaggttgtaatcggcagcgtggttgcactgcacctcctgccctactatgcggtacctggggatctggtcaaccgcctcagcttcattcccattgcactcataggcgtgttctttccggcattcgcagcacattggagtgcgcggagaccagacaagctgacgtcactttacaagagtgcggcgattgtaatgttctctaccgtctatccgattgcgctgggcatatacgttctcgcacctgaaggcctttcgctgtggatcggcgagcagttctcccggcaatcaacgccactgctccactggctctgcgtcggcttggtcataaattcaatcgccagaattccccacgcacttctgcaagcggccggccgcccaagcatcaccgccaaactgcatctgatagagcttcccgtctatgccatcgcgctatggcagctgctaagccatttcggcatcattggcgctgccatagcttggtccggaagaatggcactcgactatctcctcctcagcatatgttcgagcacaaccatcccagagttacgccgcccatcaatactaatgctcgcagcggtgattatcggaatcgccgtaatgacggccgcagcacttattccatcccccctactcagacttgttcttacaatattctttggattagcgggaatagctttggcagcccctatcgttctacgtttacgtcacgatgattga

SEQ ID NO: 511518 - DNA, 1023 bp, Stenotrophomonas maltophilia
atgattgagccactaaaattcgacgccaccgtgcgatcaacgacattggttacggtaacctatgcggaccgcatcgagtatctgagtgaactgcttcgccgcgcattcgaatgcgagggagtgaatcaggcagtcgttgtgagcaatgcatcgacgtccgacctcagaatcatcgaaaatgaatggggtgatagacttcgcgttgtccgcctgagcagcaacagtggatctgcaaatggatactcggtgggaatccaggcagcactcgctgacaacgctgagttcatttggctaatggacgatgacaacgcgccccggaagggagcactgaggaagcttcattcacaacttgaaataaccgccagggcctatggggccgacaggtcggcagttttgggatttcggccgagccaccaggcggatatcgcacaaggcgtggatccagagcgcgcatatcctttgcgatcaagcttcttcggatttcactatcggcaactcatcttcaaaatcaagcgtcgcattgggcccaaggcaccgctcggcgaagcgccctcctccgtccagattccctatgcgccgtacggcggactaatggcctcacgaaagctgtttgaagccattggactcccgaacgtcgacttcgttctatatgccgatgacaccgagtacacaaggcgcataactgcacgaggcggcacgatctgtcttgctacagacgcggaacttgaagatctcgaggagtcctggaatctaaaggaaagctaccccaacaccttcctgggctggctgaagggcggatccgatttccgggcattctacgcggcacgcaatcaggcctactttgacagcaaaatctggacgagctcatggatcgagtacaggatgaaccgttgcatttatctcggactattgacgttctttgcgatcaagacgcagagcttcgcgcgatatcgccttttactcagggcaatccgcgatggcaagaattcccggctgggaatttccaaaagcttcccgctttga

SEQ ID NO: 511519 - DNA, 1269 bp, Stenotrophomonas maltophilia
atggcaagaattcccggctgggaatttccaaaagcttcccgctttgaatcgtcagaatccaatgcacccatgaaaatactgttcctgaatacatatgacgatccggcagacggcggtggcgtggagcttactgtttggacgctgatccgcgccctgaaggaaaaaggccacgagtgtattctcgtctcgacccaaccaggacgggcacttgacctccacgagcgcgaaggcgtgcgcatttggcgcgccggcatccgcaacctgtactggccaacaaaagagaagattgcatcttcgctatccaagctcgcctggcatacggttgatggctacagccgcttgatgcagagccacctgaagcaggttctcgaactggagaagccggatgttgtgtcagtacacagcctgcccggctggtcggcctcatcttgggcgaccataagatcattgagcatccccgtcgtacaggttctgcatgaccagtacgcaatctgcgcccggagctcgatgtttcgcaatgagcacaactgcgaagctcaatgcacggactgcaagttgctacgtcttccccaccgaaaagcgagtagtctgccatctgccgttatcggggtcagtcagttcattctcgatcgccatctccagcacgggtattttcaaggggtgccgatcaaagcggtcatcaacaatacgcggaacccacaatctctcgacgttggcgcccttacgcctgaacataagggcattcgctttggcttcatcggccgcctggatccaagcaaaggcgtggagattcttctacaggccttttcacgcttcgagcacgaggatgcacaactctggatcgcaggtgatggcgaccagaagtatgtcgcagctctcaagaagcaaaccaaggacgtacgggtaaaattcctgggcagagtcaagcagcgagacttcttcccggaagttgatgccgtcgtcgtcccctctctctggaatgacaccttcccgggcgtggtttttgaggctctcgccttcggcaagcccgttctgggttcgctccgaggagggatacctgaaatgatccagcacggccagaatggcttcctctttgaaccagacaacgacggcgaacttctcagccttctgaatcaagttgccagcaacccggaagagcgtatcgctatgggagccgcggccagagtctcttcgcgcccattcatggataccgaagcgtggttggacaagtacctggctctgtatgcacagctcggaagtcccgcatga

SEQ ID NO: 511520 - DNA, 1128 bp, Stenotrophomonas maltophilia
atgaaacaagtcaccgtttcgccgcccgtcgcccgagccgatcatggaaagcttgactccattcaagcactccgagccgtcgcagcatttgcagtggtagttcatcacgttggactgaccctcaacagctactaccccgctcctctcagctccacgctcaccctactgacaggacttggggcagcaggcgtcgacctgttcttcgtcataagtggctacattattttcagaagcacttccaagctggagtcaggcttctcttcggcacggagcttcctgcggaagcgagtgcttcgtatctatcctgcctactggatttggacttcagtgctgcttctcatgtggattggcggactagcgctcaaatcccatcagtactccttctccgtcatcgcgggctcatacctccttgtgccagtgaccagagcggatggatcgctgcaccccgtcctcgatcaaggatggacgctgtcgtttgaaatgtatttctacctcattttttctttcatcatcctttttggctggcgtaagaagggccttgcatggatcgcactccccttcctgctaatcgccttcgttgggcttcttcccgctgtccctgccagcatacaaagcgtggtttcatcccccttggtcatggagttcctccttggcgtgtgcattggatggactctctccaaacacccacccgcatcgcgatccatccgccctatccggtgggctttgatagctatcggaacaggcctcttggtgttcgcctttctgcagggagaagtcaagggaacgggtattgacaggctggttatatatggggcccccagcgcggtactggtaacgcttgcgctgcttgctccttcagcaccgatgttacgtcgagcaacctggttgggcgatgcgtcatattcgatatatctgacgcatggcttcttcactttggctcttggaacattattgaaaggcggcttcagcctcggaggagcaccagcaggcgtcgtactggccgtggtctcgctcgccatcctgctgatctcctccacggcctactggcttgtggaagaacccgtagcaaggctgcttaccagaaccggaaaaacaggcaacccagttgctgcatcgccactcacctag

SEQ ID NO: 511521 - DNA, 1005 bp, Stenotrophomonas maltophilia
atgggctctgcgcttattgccctccccattgtagggctttcgatagtcaatctgatttccattgcacttcttctgaacaacaatcccaacctattgacgggatggcttagtgacggacgaagcgcaaagatggatctggacgcgaccggagcaatgaccaacgcgctcccggcactctacgccgcttgctggtggggcgcatggcgcttgatggatcgcgaacacttaactggcaagcgggaatggatattacgattcgtactgactggcgggatactgatcgccatttatagcgcgctaatcaaagtcgcgcgctacgacctactcccctgcgtatttggtctggccgtcgtattcctggctcatcgatacagcactggcagattgaaactcgccaagagcatgacctccttcctggtcatggtcgcagcagtcgcagcgctgtttctggcgatggcatggcttcgcgggagcgacgagcttgccgcactaggcaagaacgtgatcggatacaccgctgcaagctacaatcgactagccgcccttctcgatggggacatcaacttcccttactccggcactggcgtctactcgttcaaattccttacatacattccggttttgaatagatggattgatttcgcatccctgtttggcatgcctaccaaggaagaagcctggataagcgaattcggagcaatcgcacagtcggggctcgacggaagctacatatgggcatccgcgttcggctatgtctactcagacataggcatactcgcagtggcctacttcttcttcatcggcctggcatcaatggctgcttggcggagcatgatcacagggcacgtcgcaggcttaacaatatatccatggatcgcattctccatcctattctggatgggtgacaatttcctcgcctactcgaagcttatcgtgttcgctggaactgcggttcttatgggggggtacgagaagctagcacgagcaaagcgccaccagagctga

SEQ ID NO: 511522 - DNA, 1086 bp, Stenotrophomonas maltophilia
atgatcacagctcgcgcagaccatggcggtgggccgcgacatctggaattgcttcttcgtgatggcgcaggctggatcaccccttacttggcctgccccgaggacgatccatactgggcgagattcaacgaaattactggtggccgcgtatttcgaatcccccataggaaattcgaacttcgccaagcttggcgcttggcaatgcatgcgcgccgcgaaggaattcatctagttcacgcacatgggaaaggcgcagggctgtatgcgcgtttcgtttctgccatagcgcgaatcccaggcgttcataccgcgcatggaattcatgttggagagtacggacggattagcagaaagatctatggcctttatgagaacgcaagctcactctgggtggagcacgtaattcacgtatcagacgaagagaaatcgcaggcgcgggcgattggattgtggcggaagcggccatcgaccgttatctccaatggcgtagtcagccacacatcaagtgaaatcagcgatatgcgcgaccgagcgcgccaaaagttgggcgtgcaggacggaaggcccatcgccgtcaccgtcagtcgattcgactatcagaagaacatgccggaagcatatgccattgcaaaagctctgccagatatgcacttcatctggataggttccggcgttgactctccgacgctagcagagcgcgccgcatcagagggagtgagcaacatcactttcctcggtcaggttgataacccattgaactacttggcggccgcggacgtctatctctcaacttcgcggtgggaaggccttcctttggctgtgctggaagcaatgtccttgggtattccttctgttctgtcggatgttactggacatgtcgagcttgtacgtaaacatggcgtcgggcttctctacacgctgggagacgtcggctcggccacagccgcactactgcgtgttgcacacgaaaagccgcttcagaaggcactctcggagcaggcacttcattcgcagctgcacaaattctcatcgaaggtcgtcgcaatggagaccgccgccatttacaagaaagtactgaaagaatga

SEQ ID NO: 511523 - DNA, 1110 bp, Stenotrophomonas maltophilia
atgaaagtagcgatcatccattactggttcgtcacttggcgaggcggtgaaaaggtaattgagcaactactcaggctctatccagaggccgatgtcttcacacatgttgcaagcccagagatagaacataagcaccttgcggggcgtcgggtgcagaaaacttttgtatccagattgcctggagctcgaaagcgctatcagaagtatcttccgttcatgcccattgccttggagcaactggaccttgccggctacgacctgatcatatcgagcgagtccgggcccgcgaagaacgtcattacacatcctgatgcagtacacatctgctattgccatagcccgatgcggtatgtctgggacatgtatcggctatatctcgcggatgctggatggctgaccaggctgttgatgcgaccattgatgcattacatgcgaatcaccgattccgtgtcggcctctcgcgttgatcacttcattgcaaactcgaagttcatcgcacgccgcatagacaagtgctatcgccgaagcgctgaggtcatccaccctccggttgaggtagacgactttgaagcgcgcgccgagaagcaggactattacctactcctcggccagttaactgcctacaagaaagctgatctggtaatggatgcgttccttcgcagcgggaagcgcctggtcatcatcggtgaaggtgagcaactggcggccatgcaggcgcgggcaacggatcgagtcatcgttctcgggcggcaaccgttccctgcactgaaggagcacttggccaatgcgagagctttggtgtttcctggcgtagaggatttcggcatcgtcccgcttgaggcgatggcctccggaactcccgtcatcgcatttgcaaaaggaggcgcgctcgagacagttgtagaaagcgacgaccccgacgtggccacgggattgtttttccacgagcaatccgttgaagcgatcaatgatgccatcgctcgttttgaggcgcgtccaaggcccatttcggctaccgcatgccgtgcgagggctgagaagtttgggcctgatcgattcagggaagagctctcgtctttcatccaggcaaagatccgcaaggaagcctga

SEQ ID NO: 511524 - DNA, 519 bp, Stenotrophomonas maltophilia
atgggcgccgatgataactacgcccagtgccaggcccaacgcagtaacgacgatgcgcacgccccaggcctgcaggatcatgcgcagcgagagttcattgagcatgcgcgggtgcaggcgcctgcgcagccagacgcctgccagcatctgcagcgtggcctcgaggccggccggcaggaaatactgggtgccgacgaactggtagcgggccagcaggctcgcgccaaggcaggccaggccaccgcgccagccgccgagcaggccgctgatcagcaggatgtcgaaacccaggtggagcttgaccacaccctgggtgtagcgggccacgaaccaggaattgaacaggtagatcaggcccagcgccacgcccacgtacaggcggcggccttcaatggcatggccagcgcgacgggtggcgatcagcagcacgccgatcatgccgatcaccgccgtggcctgcagcagatacagcggcaggctgggcagggcgctgtccaggacctgggccgagacccgtga

SEQ ID NO: 511525 - DNA, 285 bp, Stenotrophomonas maltophilia
atgcacctcttcggtactgtcgcgctgccacaggccgttgtcctgcagcgggccatagcgcaggcgcagatcgcgcaggttgcccatctcggccacgatcaggcaggccttgccgatgccgtcgttgtcgcgccagtagtgctgcaggcgctcgccgagcgcacgcatgttgggcaggccactgatcggatcgacgcgcagccaggcgtgttcgcgctgacgctgtgcatcgatctgcgcatcgttgtagaccagtgcaaacactgcgcccagcatcagcagtga

SEQ ID NO: 511526 - DNA, 474 bp, Stenotrophomonas maltophilia
atgacgcatgctgccgcttcatccacccttcaagccccggcctacggactgctgctcggccacaccgagtgccatttctgccacggcccgacccccaccgccgcgctatgggtgccctcgttcgaggagcacgacgacgagggcctggtggatcagggggagggtgctttgttgcgctacatcgagcgcttggatgaggggaccgctgcgttcgttgccgggcacgccccttggcttcgcttcgccactacccgaacgtcagggcaatcctacctggcccaccattgcaccacctgcggggcccttcaaggggaccacttcgtgttctcgccggatggtccttactggccccagagcgacgtcgagcttggacgcctgacgtttgtccagggctttggcccgctcaccgctcaagcatcggcaggacagagcgcctggatggaccgggtccctctgacctgcacccaagcctga

SEQ ID NO: 511527 - DNA, 234 bp, Stenotrophomonas maltophilia
atgaccacgcgtgccgcccgccaccgctattacgcatacgagcgccgcgatggctctgtgtgttacctgccaaaactgttgcacgaggggattcagcgctacccgcgaacgattgcgtactaccacctggtgcagtggacgggggtgtcgaagttgctcagcagcgacgaatacaagcggatggcgtggatgggtgcgagccgtccgatggccaggcacactgctgtggtttag

SEQ ID NO: 511528 - DNA, 345 bp, Stenotrophomonas maltophilia
atgctgtccctgcgcaacccccgcctggataaccccatggggcgtttaccgacttccttcgtcaacgcccacgatgccgacgagatccgccggttggccgggaagcacggcattccgttcaacgaagccgtgcggcaaatcctgtcgctctacttccgccagcctttcccgctgtccagcaagcggatgggcgatagcaagaccgatcgattgccccagatggtggccaggcgccacatcgtggaaggcatagaagtgctggcgacgaccctaggcctgacccgcggcgaagtgttgcgtcagatcgtccgtggcacgttgaggaagcaccatggtcgtcattga

SEQ ID NO: 511529 - DNA, 210 bp, Stenotrophomonas maltophilia
atggccaagaagaaccctcagcccgccaccgaccgcctcgacgcctttctggtggaggaatacgaagtccagggcgagaagcgcagcaactggtcgaagatcggcgcggcctggccgcaccaggacgccaagggctaccgcctcgtcctcaacgccctgccggtcagcggggtggtcgtgctccgcctccctgagcccaaagacgcctga

SEQ ID NO: 511530 - DNA, 414 bp, Stenotrophomonas maltophilia
atgcgcttgagcaagcaggacatcgccatgggccacttggaaggcgcgtgcatgctttatctgacggggcttcacccggccacagtcgtgcttctggcaggcacggcagaggacatgctccggaccctgcccccggccaacgacacgcctaccgttgggcagcacatgcttgaggtggctaggcagatgagcgcccgtcaagatctggtctacggtgacatcaaagaggacatggtgggactgaggaatgcagtgaaacatgcgacccgagagggcgagcaccacgtggatctgttccccgtcgacgagcaccgctacctagtaggcgcgttgctgaatgcatttcgctgcggggctcatttttctgcggccatgacggaaacttacgcgcggatcgccgaatccgagggctga

SEQ ID NO: 511531 - DNA, 639 bp, Stenotrophomonas maltophilia
atgtggcgtcgcaatgggctgtcgatcgtgctgtttgtgctgatggcagttttcttggttgcacaagcgttgaccggctggcaggttcacaacgaggaactggcccagcacggcttgccgatcttgccattttggggctacctgaccacgggccacttcagcagcgccacgttcgagaactgggaaagcgagttcctgcagatgggcatgtatgtgctcctgaccgtccggctccgtcaaacggggtcggccgagtcgcggccggtggatccagcggaggaaaaatcccgcgttgagcctggcgtgacgccatggcccgttcgtaagggcggcctctggaagcgtctttacggccactcgctggccatcgctttttttgcgctttttttcctttcttttacgcttcacgcgctgggaagctggagggcgaaatccgccgagaatcaagtggatggccttctccccccaacgttcctcgaccaccttttcagcagcgacttctggtttgagtcgatgcagaactggcaaagcgagtttttggccgtgctcgcattggtcgtgctgaccatcttccttcgacagaaggattctccccagtccaaagcggtggaagcgccgcactcgcagaccggggactaa

SEQ ID NO: 511532 - DNA, 552 bp, Stenotrophomonas maltophilia
gtgtccaagcccgcgctcttgatcatcgacctgtttagccggtttgacttcccggatggcgagcgctttgcgcccttggctttgaaagctgcacacgcagtggcggatttgcgccgtatttttgacgaacaaggttggcccgtcatctatgcaaacgacaacttcggcaactggaagtgcggctttcgcgagctggtggaagagtgcctgcgcgcgccgggcgctcccccgcgcatcgcgcagctgttgtcccctgggtccgaccattacacgattctcaagcccaagcactccgcgtttctgtcgaccccgcttcaaatcctcttggagaaagtcgacgccggccccctggtgctgaccgggatggccatggactcctgcgtcttggccaccgccatcgatgccaactcgcgggagtatgagtgcttggtggtgcccgaggcggcggccgttcttccggagcgtcggcaagcaacgctggacgtactcaatcagtccggggtggccaagaccctttcctccgaggaactccagagggcgttgctctcctga

SEQ ID NO: 511533 - DNA, 162 bp, Stenotrophomonas maltophilia
atgcggtggctgctggccgatcccacccaactgcgccaagtggtcaatgccgactggtcagcggaaggcgcggaatggggcgaacgccccggtaccgatgtcggtatcggtatgcttcaggcgtatctgagaccattcttgtctccatcgagccgcaactag

SEQ ID NO: 511534 - DNA, 186 bp, Stenotrophomonas maltophilia
atgggcaagatggccgccttcggtcaggccatcggtggcatgacagcttccgatgatatcgttaaaggcgcaacggccggttatgtctttgagcgtttagagatcgcgtgctacaccctgatcgcggtggccaagagggcgggcgatgccaaagcggcacgggtttgcgaagaaatcctggactag

SEQ ID NO: 511535 - DNA, 273 bp, Stenotrophomonas maltophilia
atgtactttgaggtctaccgcaccagcgggtggatgggctttgtcccgtttgggaaaaagtggcgttggcgattgaagtcgatcgatggcacgacactcatgcaatccaatgaaacctttgatgaccgatcaggatgcctgggcatgatcaccttgcttcagtccaaccgatgccatgtggtggacgcggacgcggggcgcgtgatgcgccgggaaggaaccgagtgggttgacgctgggaacgcagagagcctgctcacggccagccgttga

SEQ ID NO: 511536 - DNA, 363 bp, Stenotrophomonas maltophilia
atggcccgatccggccccgagttgccggcagcgtcgccccacgcccttcgcgtggaaatcatgccgctggagtgcggcgacaccgcggtgatcgtcgaatttgaatccgaaccgcccgcgtcgtggcgagctcttctgacgaagaagttggcagacgtagaaggccttgagctggcttccgcccagtttgaagggcgggttctctacgtgctgggtgcggaggggggaaggggaggcagcgtccacagggtgagtcaattgttgcggtctcttcccggagatcctgagcgctcaaacctgctggacgagcctgtgggccggggtgtcccggggccggagaaggctccagcgacgcaggcctga

SEQ ID NO: 511537 - DNA, 1632 bp, Stenotrophomonas maltophilia
atgctcggcaacgtcgtttgggccagttatcaggtgcagcgcaagcagctgatcgacagcaccctggaagcgaatcgcgtctacgccaacaagctggcgcaaaccactcagcatttcgtgctcagtgcacagcagcagctcgcatccagcgccgcacacattggccatcacctggaccaaccctccacatccgacgaagaagccaagcggctcaaacagcagacggattcgttcaactccgtggcggtggtggacgctgcaggcgcggtcaaggccgcctccccagcgatgccggagcttcagggcaaagccctcaccagcgcggcaaacaagcagaccttggagagtcgctccccgctggtcagcgaccctttcatcgcgcccaccggcaacctggtcgtcaccatctcccatcccgtgttcgatgcgaaaggcgcctacgcgggttatgtcactgcgtccattcacctgaaagaaaagaacgtcctgaacaccctgttgggaacgcacttctaccgggacggctcctacctgtacgtggtgggtcgggatggaaagctcttgtaccaccccgaaccaaaccgcgtcggagagtcagccattcgcaatgaagtggtgcgcgcggtgagccaggggcgcgcaggcgctctccacaccgtcaacagccaaggcatccacatgttggccggatttgcaccggtgccagctgtgggatggggcgtggtcgcccaacgccccttggaggcgacattggcccctttgggcggcctgatgtcgaccgtgctgcgcaacgccgccccgttgggcattctctcgctggttttgatctggttcttttcaaggagcatttctgcaccgctgtggcagctcgccaggaacgtacaggcagaagacgcaggcgaggcgatctccaaggtccgcctggtgaactcgtggtatttcgaggcggcgcaactgaaaagggccgtgctggtgagtttcaggagcttcagcgatcgcatcggacagctggatgtcgctgcgctcaccgacccgctgacgcagctctacaaccgtcgcggccttgagcgggcgctgagcgagttcagccgctccggcgcacactttggggtcatcgcgttcgacgtcgaccatttcaaggccgtgaatgatcgctacggtcacagcgtgggcgacgacgtgatcgccgatctagcgtactgcatgcgcgccaatgcgcggccgcaggacgtcctgtgccgcttcggtggggaagagttcttgatgcttttgcctgggctcgatgcccggggggcagtgctcgtggcagagcggctgcgcaaagcgatcgaggagcatgccttccctgcggtgggccaagtcacgatttccgctggtgtcagccacttccccgacaccgagggcaacgcagatttggccatccggcaggcagacaaagcgctctaccgagccaaggatgctggacggaaccaagtggtgctctaccaaaagcgacgccggtcgcccccccctctgcttcatgacgccccgaacggtccctccggctggcacactgggcgctgtgacaatgccaggagcaaggcgtgggtctggacgtgccgcgaggcgtttggattggaacgaccgttctag

SEQ ID NO: 511538 - DNA, 687 bp, Stenotrophomonas maltophilia
gtgggtctggacgtgccgcgaggcgtttggattggaacgaccgttctagcgtatagcgctgggatggtgaacgctgccggctacttggggtttgagcaccaagcactcagccacctcactggcacgacctcgcttggcgcgattgccgtcgggaatggccggtggggccttgctttgcagctcggtgcggtggtcgccagcttcgtggccggtggttacgtcgctggtctaacgttgcgcagacgcgatctgtcatggcactacgtgggccttcttgccggccagtccctgctgctgatggcctcagcgtgggcactcgtccagagcgatacatggggtgcttgcatggcagcggcagcggcagcgtgtgggcttcaaaacgccatgaccacttactacagcggctccgcaattcgcagcacgcacctgacaggctttttcaccgacatggggctgctgctgggccaatcgacccgcggggcgccgttgccttggcggcggcttgccttgggggcgttggtgctcttcgcctttgcgggcggaggaatcagcgcagcctgggcattcccgaggtttgggttccagctgttgaacgctccagcgctctgcgcggcagccatggctgcggcgctctcatgccaccttgccagcaagccgacaacgcacccatcggacggcactccatag

SEQ ID NO: 511539 - DNA, 171 bp, Stenotrophomonas maltophilia
atgggcaccaaccagaatcagccgggccaagatcagcagaaccagaaggaccagcagggtcagcgcacgcccggtcagcgcgatagcgacgaccagcgccagcagcagcaagatcccagccagcagcgtgagcgcggtggtcagcagggcagccaggacgaagaagaataa

SEQ ID NO: 511540 - DNA, 645 bp, Stenotrophomonas maltophilia
ttgtctttcgccagcaccgccgccctcccctaccgccgtttgtttgtggtcgacagctacagcattgtcgcggaagggattgcatccttggttggcgagcattttgagtacgtcagcgttgccacgaccgcgcagtcgttgagggccgacctcagcctgggagcggacgcgcttgtcttggctgacctttacgttgccggcaccagctgcgtgtccctgatgcgagagatgctggcaaagggtacgagcgcggcattcgtttttctgcctgctgaagccactgccgccgtagcagcccaagcgatggaggcaggagccaaggcattcctgcatcgccggtgccctgtgcaagagcttgagcgggccattgcagcggtccaaacgggatatacctacgtggctgcatcgctgatcgcgacacgggaagacttggcccgccaacgaccgtccctgaccaccaagcaacaactggtcttgaagctcgtcgctggcggtcgctccgcaccggatatcgctgaggcgcttcacctgtccctgcgcacggtcgaatcccacaagagggccatcatgcgccagctcggagttcagtccgtcgccgcgatgttggatgtggcgaagaacgaggggctgttgagttcctcctga

SEQ ID NO: 511541 - DNA, 612 bp, Stenotrophomonas maltophilia
atgaattccaagcgcaatgtccgtgtgagcgggtctgccgagtacagaccttggccagagttgaaccatgcagcccgatcgctgcgccgcatggcgcgggaggatggaagcttgcggctgcatctgatgaccggatccttggtgctgacggccatggccgtggaggcattctgcgcgacggtgggaccgaaagcgcttcccgaagcttggtaccatggacgagccccggtctttcgtaagccgttggtccgtcagctggagctcattggtgcagggataggagtgtttgtagacttcgcccaggagccctgggcgtcggtacgacagctgctggaggcgcgctcagatctgctggtccccaagccggggttcggtgtggacgagatgttgagcgtggacgaggatgctgacgcgcgattcgatgcccacatggccgtgcaggcccagcatcgaatccttcatgggatcgccgatctggaacgggtggcgagcgaagtaaaccggggattgctccgtctctgggacgcggcaggaggtgacgaattggctctgaatgtgctggaggccggccaatggacggtgaccgagttgccgggtagcaccctgccttga

SEQ ID NO: 511542 - DNA, 471 bp, Stenotrophomonas maltophilia
atgccaaaccatgcggtggtgtttgtcagtgaggccagcccctacctcgcccctggtcggctgcttgagttaatggcagatgcggagcggttcaacagggaggctggggtaactggggtgactctctacgacggggaccggttcctttcttacatggaaggcccgccggatggccttcgcgttgcttacgccagggcatccgaagcgcgcagccacctgaacttgattgagttggcgcgcggacgtgtctcgcaacgccggctgccgcggtggccgatgcgattgtttcaagccaaagaagcgcagctccagcgcattgctatggctgactgggcgagcttcgcgcaacggggggatcccgaggcgatgaatgcgacggcgatggatctccttttgcatttcaccggagggcaggctgcttcggtttatgtggcgctcacgaaggccggcagcaagagagaggagatatga

SEQ ID NO: 511543 - DNA, 276 bp, Stenotrophomonas maltophilia
atgcggttggaatttactcacagccacatctaccaacgggccaccgcgtccctgacgggcgagcaggctgaaccgggcgagagagccacgtgcttggtccagctcagcgatggcgtggtcctctccaccagctgcctgattcaagtgcgtgagatcatcctctccatgcctgattacctgaccgcccgtggggcaaaaatttccgcaaaggactggctgacgcggagagatttagaaaccggcgcctggaaagcaaaatcaaaggttgccgtttag

SEQ ID NO: 511544 - DNA, 1245 bp, Stenotrophomonas maltophilia
atgaaccgcttgcgcctgctcaccgccaccgccctgctcaccttgtccggggccgccggcgcctcaactgtcccgcactgggtcgccagctggcaggccagcccgcaaccggtctggggtggggcgttcctgttcccgaccctggtcccggccgcactgcaggaccagaccttccgccagatggcgcgaatcagcctgggcgggcctcggctgcgggtgcgactgagcaatgcctacggcacgcagccgctgcggatcggagcggcgagcgtggccgcccgggagggggacatcccgcagccgctcagtttcgacggccagcccggggtgctgatcggccccgggcaggaacggctgagcgatccgctggcggtggccaccgaagatcgccaggcgttgcaggtcaatgtcttcgtaccggggccgacgccagtgcagacgttccattgggagggccggcagaccagttggattgcgcccggcgaccagagcctggcccaggctctgagcggggccagcagcaccactgcccggctgttcctggccggcatcgaggtcgaggccgccgccaacacacgcagcgtggtggtgctcggcgactcgatcaccgacggcgccaccgccagcctcgaccaggaccagcgctggaccgaccacctggccgcgcgtctggcaccgcggggcgttgccgtgatcaacgccggtatttccggggggcggctgctgcgcaatggcatgggcgaatccgccctggcccgcttccagcgtgacgtgctggaacagcccggcgtggccagtgtggtcgtgctgatcggcatcaacgacatcagctggcccggcaccgcgttcgcccggagccaggcccggcccacgctggccgaactgcaggccggttaccgcgccctggccgaatgtgcccatgcccgcgggctccgcatcctgggcgccaccttgacaccgtttgccggcgccctgcccggcacgccgctggctgactactaccgcccggacaaggacgccctgcgccggcaactcaacgcctggctgcgcaccgacggcccgtttgacgcggtgatcgacctggacgcggcgctgcgagacccggccgatccgtcacggatggcggccgcctacgactccggcgatcacctgcatccgggtgatgcgggcaaccgggcgatggccgaggcggtggatctggaggtgctgatggggccatccgcgcataccgtggatctacggtaa

SEQ ID NO: 511545 - DNA, 462 bp, Stenotrophomonas maltophilia
atgcgctggcttgagacccgcgttccaccgccgctgatgatgctgctgtgtggcgccatcggctacctggcgagccgcctggcagcgggaccggtggttccgctgccgatgccggcactgctggccggtggggtggtggccatcggcttaacgttgaacctgctgccgaagctggctttccgtcgcgtgcgtaccacggtgaacccgctgcgccccgcaatggcgagcgcgctggtcacgcatggtgtgtaccgttacacgcgcaatcccatgtatctgggccaggccacggtgctggcaggcgtcatgctgtacctgcagagcccggtcgcattgctggctgtcccgctgttcgtgctgtacatcacgcggctgcagatcatgccggaagagcgggcgctgtcggcccgctttcccgaggcatacgccgccttccgtcagcgagtacgacgctggctgtag

SEQ ID NO: 511546 - DNA, 243 bp, Stenotrophomonas maltophilia
atgacgctgcacaatcgaatcaccgctttttccttcgctgcagcggtgacacttgccgcgctgctgccttcagcaccggcaaatgccgccgaagaggtcggcctgcaggaagagtgcgtgcccttccgtgccggctttggcatccatcagcgctgcacgctgtacgtgctctatgacgacggcacccgcgtggccagcgaccactacaaccgcgacgagaacgggatgatgtacgacccctga

SEQ ID NO: 511547 - DNA, 585 bp, Stenotrophomonas maltophilia
atggatgagctgcacgctcccttcgctcgcttcggcctgctgcaggcccaggatgaacgtgactgggacggaccctttccgctgccatcggtgctggcgcgcttctacgcgcaggtcgggccactggggcccgagatcaacgccagggttggccatgccggcatcaccatccccgggctcgaggtgtgggtgccaccgctgcaacggctgtggcgccatcaggccggttaccgctggaacggcatcagcggcgaggcgatcgaagactggcccgccaactggctggttgtggccgatctgggcgccgatcctttcatcctcgacctggacgatggccgcgtgctgttcgcacgacatggctgtggacgatgggagcaggacacactcgtagacgacctgccgaccctgatggccattctggccgcggccggcactgtgtatctggaagccggagatgatctctacaacgatgacgacgacggcggcatccgcgccgaataccaggaagcggccgtgcaggcagtggcccgggtgctgggcgaccgcctgcaggccgaggccttcatcgaggcgttgctggggtga

SEQ ID NO: 511548 - DNA, 4908 bp, Stenotrophomonas maltophilia
atgagcggtccggcacggcggaagcggtggggatgggcggcggcggtactggcaggaggcctgctgctgggcctggccggctgccgcaacgacagcgggcagctgcccaaggccagcggtgaagcgatcaccaccaaagccgagcaggtgaaggaattcaccctgctgcgcgcctacccggaccagaagaatgacggcctgtcgctggcgctggagttctcgcgcccactggtcggcacccaggatttcgacaagctggtgcgcttcgaagagaaggtcggcaccgacgacagcagctggaccctgtccgatgacggcctgaccctgcgctacccgttcgtcgaggccggcaaggagttcagcctggtggtctcgccggacctgctcgccgccgatggcagccgcctgggcaaggagctgaagcagaaggtgttcagcggcgagctgaagccggtggttggcttcgcctcgcagggcagcgtgctgccggccaaggacagccgcggcctgccggtggtgtcggtgaatgtgcccgaggtcgacgtcgagttcctgcgcgtgcgcgagaaggacctgccgaccttcttcagccagtaccagcgcggcggccgccgtggcagctgggagctgagcagcgactatgagcgcagcccgatcaacaagctggccgagccggtctacgtcaaccgattcatcctggggggcaagaagaacgagcgggtgctgacctacctgccgacccaggacatcaaggaactgcaggagccgggcctgtacttcgccctgctcaagcgcaccggtgactacgagggcgagttcgataccgcgttcttctcggtcagcgacatcggcctgcatacccgcgcctacaaggacaagctgttcgtgcacaccgccggcctcaaggacggcgcaccgctgaagggcatcgccctgcgcgtgctggatgccaagggcgaggtggtactgaagggcagcactgacggcaatggcaacgcgctgctgaactacaccctggatgccacccacgtgctggtcgccagcagtggcaaggacaccagcttcctgccgttcaaccagccggcgctggacctgagcgaattcgccgtggctggccgtgacaacgcctggttcgatgtctatgcctggtccggacgcgacctgtatcgcccgggcgagaccgtgcgcctgtccgccctgctgcgcgacaacgacggcaagccggtgaaggcacagccggtgttcctgcgcctgaagcagcccgatggcaagaccttccgcgagacacggctgcagccgggcgaccaaggctacatcaacttcgagcaggtcattcccgccgaggcgccgaccgggcgctggcaggtcgagttccgcaccgaccctgccagcaaggaagcgatccagggtatgaccctgcgcatcgaggagttcctgcccgagcgcatgaagctggacctggacagcgcgcagaagacgctgaagccgggcgaggatctgcgcctgcaggccaatggtgcctacctgtatggtgcgccggccgatggcaaccgcttcaccgcacgcatggcggtggccgccgaacagcagccggtggagggcctgccgggctatttcttcggtgacccgaccctgcagctgccgcgcgaggccaaggacgtgatcgacaccacgctgccggccaatggccagctgcgtgaggatgtggcgttgccggaagaggcagccaaggccaaggcgccgattgccgtggtgctgtccggcagcctgtatgaaaccggtggccgcacggttacccgcaccctgaagcgggtgatgtggccggccaatgcgctggtgggtgtacgcccgttgttcaacccggaggacggtgccgattccaacggcaacgcgcgcttcgaattgatgcgcgtggatgctgctggtacgccgcagccggccaagggcctgaagatcaccctggtgcgcgaactgcgcgactaccactggaccttcaacgacaaccgctgggactatgacttcacccgccgcttcgagaacaaggaaacgcgcaccgtcgatgccggcagcagcgcggtcgccttcgatttcccggtggagtggggcgaataccgggtggacgtgttcgatccgtccaccggcctgacgagtcgctacccgttccgtgccggctggagctggggcgatgacaaccgcggcctggacgcgcgtcctgacaaggtcaagctgggcctggacaagaccggctacaaggccggtgacaccctggaagtgacggtgaccccgccgcacgccggcaagggcatcctgatggtcgagaccgaccgcatgctgtacgtgcaggacatcgaggccaagccggggtcgaccttcaagatcccggtcaccgctgactgggagcgccacgacgtctacatcaccgcgctggtgttccgtggcggcagtgcgccgagcaagatcaccccggcccgtgccgtgggcgtggtgcatgtgccgatggatcgcaaggggcgcaccgtagccgtcggcctggccgcgcccaagcagatgcggccggagcaggacctgccggtgacggtcagcgcgccgcagctggccggcaaggtggcgcacgtcaccgtctcggcggtggacgtgggcatcctcaacatcacccgcttcccggtacccgatgctggcgcgcacttcttcgcccagcgtcgcctcggcatcgatgcctacgacatctacagccgggtgatcgagagcttcgacggcagcagcggcaagctgaagttcggtggcgacatggcgctgcaggcgttgccacaggccaagcgcccgactgcgcgcgtgcagaccgtggacctgttctccggcccagtgcagctcgatgccaagggcatcgcccgcatccgcctgaaggtgccggacttcaacggcaccctgcgcgtatcggcgctggtctacagcgatgaccagtacggcaagcgcgacgtcgaaaccattgtgcgcgcgccgatcctggccgaagccagcatgccgcgcgtgctggccccgggcgaccgcagcaccgtgaccctggacgtgcagaacttcaccggcaagccgggccagttcaacgtgaaggtggaaagcgagggcccgttgaacctgggtgagggcagccgcagcgtgcagttgaatgccgatgccaagaccacgctgagcttcccgctgtctgcacgcgaaggccacagcgtggccaaggtgcgggtgcgggtggatggcaacggcttcaaggccgaccgccgctacgagctgccggtgcgtgcggcgtggccgcaggtgctgcgttcgcaggtgcgcacgctggatccgttggcggcggtcagcctcgacaacagcctgaccgatggcttgatgtccgagtcggtcaatgcccgcctgctggtcagcccgctgccgccgatcccgttcgccagtgcgctgcagggcgcgttgaactacccgtacggctgtgccgagcagaccaccagcaagggctatgcggcgctgatcctggaccaggcgacatcgtcgatgctcggtgccgacggcctggatgccaagacccgccgcgagcgcatggaaggcgcgttcggccgcctggcgtcgatgcaggtggccaacggcaacttctcgatgtggggtgacgacggctatgtgaacccgtggctgaccccgtacatcaccgagttcctgctcgacgccaaggacgccggcttcgcggtgcccgacaacgtgctgcagaaggcactgaaccggctcagcgaggacctgctgtccggtggcaaccagttctacggccaggaggatcgcgagaagctgaagttcgccaatcaggcgtactcgggttacgtgctggcccgggtcaaccgtgcgccgctgggtacgctgcgtacgctgtacgacaacgagcgcagcaaggcggtgggtggtctgtcgctggtccacctgggcgtggcgctgtcgctgcagggcgatgccaagcgcggccaggcggcactggctgcggccttcgccaagtccagcagcgaacgcccgtcgtacttcggcgactacggcagcgccatccgcgatgacgcgctgatgatcgcgctgactcacgaaaacaagctggccaagccggcctgggacgcgcgtgcggtcgatctgggccgtggcctggatgcgcgacgcaacgccggctggatgtggctgagcacgcaggaacaggtggcgattgcccgcctcggcaaggcgcttgctgccaaccagaaggcgctggtggccggtgaactggtgattggcggcaacaccgaagccatcggcgagcgcaaactgttcggccgcaacttcagcgccagtgagctggccagtggcgtgcgcttcactccgcagggccagccgccgatgttcgccagcatcgacgtggctggcatcccgcgcagcgcaccggcgccggacaacagcgtgctgggcgtcgagcgcagctactacggcaccgatggcaagccgtggtcgccgcgcccgctgaaggaaggcgaagcactgatcgtgcgcgtcaccgtcaccgctgacaccacgatgccggatgcactgctgaccgacctgctgccggcgggcctggagatcgagaacttcaacctgggcgatgccaagcagtgggccgacgtggtggtcgatggcatcaccatcagcgatcgcggtgaagcggccgataccaagcacgaagagttccgcgacgaccgctacgtggccgcgctgaagctctcgcgtggcagcaaggccaacgtgttctacctggtacgcgcggtgaccccgggaacctactcggtgccgccgccgctggtggaggacatgtaccggccgcagctgcgtggcgttggccgcagcaacccgaccacgatcacggtagtacagccgtga

SEQ ID NO: 511549 - DNA, 906 bp, Stenotrophomonas maltophilia
atgcagaggtacatcggcggcggctatacaggggccctgatgattgccggctgcgctggcagagtagtgaccaaccggcatcaggatgaggatgcgtctggtgcagcaaccgacatgctggtgctcgttggtgacgatgccaggacactccatgagtggcgccccggcaaaaccgatcttgcatggtcagcactccctgcgaatgacggcaccggcttcctgatccgattcgactccggcatctacctttggccatctgatggcagtcctgcccagcggatcagtgatgcaacggtaatgtcatcgccgttcctgactacgtccaacgggcacgtcgcgtggcatgatagcgatcatgtaacggtcatgagactcgccaataggcagcgcgtactgcagttgacacgtacccccgcgatggtgggcgggcattcgaggcagatgatgggcgcgctctccccgaatgccgcaatgcttgcctgctgcgccactcccggtgagatcgagtacatcgatatcgctcaggcggaaactgtccgccgacatcgaagtgattttgaaatgatcaccaagatggagtggagccccgatgggcgctggctgctggcgttggaacaatatggaaaatggcgcttgctgtgcctggatacggcaacaggggcgtgtccttccagctggccgaatttcgctgacatgacacgagccgactttgcgctggacgccgacggtaagcgactggccatcctgcgccgtggacagatcatcctccatgacttcgcggacatgagggaaattcgaagctttgcgatagatcatgtggtacgtaccgcgcatatcgcatggacgggagacaacgccatctcggtacggaccgactatggatgcctttccacatacgtgatctga

SEQ ID NO: 511550 - DNA, 1044 bp, Stenotrophomonas maltophilia
atgcatcgcccgctgtccgcactgattgtcggcctgttgctgccactcgcctcccacgctggaagcacgctggtcacacccggtatcgagttcgtgcaccacgactggttcctggcctgcgacaacaccggcacctgccgtgccgcgggttatggcccggaaaacgcagacagcctgctgagcctgatgctggaacgtgcaggcggccccggtacggcagtgaaggcgcggctgcgggtgggcgaggatggcgaaagcgcgatgcctgaaggcgcgctgcgcctgcaggtgaacggccgtgatctgggcccggtgcaggacaccggtgccgacgaggccgtggcgctgcggcccgcgcaggttgaagcactgctcgccgccctgcccggtcaggcccgcatcgaggtgatcgacagcaacagaacgcgctggccgatttccgaccgtggggctgccgccgtactgctgaagattgacgaggcgcagggtcggatcggaacacccggcgccctggtgcggaggggtacgcgtgccgaaatgactgtgccggctgcgcgtgccaagccggtgatcgcgagcgcggcgctggcggcgccacgttccggagacagcggactgggaagcagcgaagcgctgcgcgacgccctgatcgccacgctcggcgacagtgacgactgtccgcgcctgatcgagtacacgggcaccccggaaatggtgatcgagcggctggacgagcaccacgtactggtgcaggcgctgtgccagatgggcgcgtacaactacagcaatggcttctggatcgcgcgcgaccggcccccgttcgccccgaagacggtcacgatggaagcagagggcttctcgcgcgtcgaacgcacgctctacgcgcgctacaagggccgcggcatcggcgactgcgtttccggctcggactgggtatgggatggccagagattccagcccagcagtgcgttcagtaccggcctgtgccgtggcatgccgggcgggcactggatgctgccaaccctgctcagtgaggtgcgttga

SEQ ID NO: 511551 - DNA, 1059 bp, Stenotrophomonas maltophilia
atgcatgcatcttcactgtcatgcacgccgctgctgcttgcgtcgctgacgatggcctcggttgccccggctgccgaaccggctggcacgtcgttggtggagggcgacggcgtgatggcctgcgacaacacccgcacctgccggctggcagcctacggtccactggcgccgctgatgctgagcgcgctgatcgaacgcagcggcgggccgcgcacggcggtcagcgcaaggctgtccatggccgagggcggagaggacgcgcctgcgacccctacagcggtggcccctgaaggaacgttgcgactgcacgtggacggaaaggacctcggtgccatcggccacagcgaagcgctcgaccctgccctggagctgcccacccgctacgtgaccgccatgatcgaggcgctgctgaagggcaagcgcgtcgagctgagcgatgcctcgggccacgcgtggccgctgtctggccgcggcatccgcacgctgctgctgaagatggacgaagcacaaggtcggctggatacacccggcgcgctggtgcgcaagggctcactgccggagtcgaaggtcccggctgcggttgccgcgccgcccctgaaggcaccgccgcttctggtcgaagcacaggaaagcgatgcgcagctggccgagcgggcggatctgctgcagcagctgcaaccggtggccgccgcgggaaacgcgtgcgaccggatgtcgtcacgccaactccgcatcgagcgggtggatgccagccatgtcctggcgctgttgaactgtgcaaccgaccgctacatcgtgccggcgggcacctggctgatccgcgatcgtccaccgtttgcgcccacgctgatcaccccgagcacgctgtttccgctctacccgcacgccgtattcctggaagaaggcgttgtgaccgacaccgatgcctgcggcacgaaccggcattgggcgtgggacggctcgcgcctggtcctgagcgcgacgtatctgggtaatgactgctccacccggagccgcgggcactgggcgttgccgacctacgttacggacgtccagtag

SEQ ID NO: 511552 - DNA, 375 bp, Stenotrophomonas maltophilia
atgatcacgcgcgcgatggtgtttctgggggtgatcagtgtcgtgctggccagcagtggctgcgcgatggaatgggtgaggatggatgcagcggcgccgccgttcggtgccacccacgcgggctgccgggcccaggccggcgagcactggccggtgcggaacgaagtggccacgcgcacggtctacgaggaccagcgggtgccctgcaggcttgatgaagtctgcgccattgacggcaagtacaacatggtacccatgccgaaagaggagagttacatcgtggacgtcaatgcgtccgaccgcagcagcgagttcaatgcctgcatggccggtgccggctggcagcagcagctcatctggttcaatcgccgctag

SEQ ID NO: 511553 - DNA, 642 bp, Stenotrophomonas maltophilia
atggccgatgaactgccgctgctgctggccggcgagccgttcatgctggtcggcgcgcgcgccatgtactggcccgcacggcaggcactgctgatcgccgacctgcacctgggcaaggccgacgtgttccgccgcgccggcatcgcgctgcccgctggcggcacccacacagacctgcagcgcctgcagtcagtgcttgacgcgcacacctgccgcgaactctggatccttggcgacatcctgcatgggcccgcacatcgcgccgcgtggtaccagcaatggttggcatggcgcgagcgcaatgccgcgctggacgtgcatgtactgcgcggcaatcacgaccggcagctcccgcatgcgcagctgcaggtccatatccacgatgaagtacggctgcaggcgttcctgcttcgccatgagccgattcccgatgcagcattgcacgtgatcgccggtcatctgcatccgcagatcgccttgccgccgttgcggcggcgcttccctgcgttctggctgcgcgagcgcatgacgatcctgcccgcattctccacgttcaccgctggaatcacgcccgtacctgcccacagcgagcggatgatcgcctgtgtggaggatggcctggtggaactgcccgtgcggtga

SEQ ID NO: 511554 - DNA, 1200 bp, Stenotrophomonas maltophilia
atgcgatcgctcaactccccagtcacacaggacaatacctcgaacccaggcaggcccacgtccatacggcggggtgaaaggctgcatttcctcgacgccctgcgaggcatcgccgcgacctacgtggtgctgttccatctggtctacgtgggaggcgtggcagctccatcctggttgtccggattcgtcgcccagggcgggaccggcgtcatgctgttcttcgtcgtaagctgtttctcgctcttcttcaccatgcctgcgagattgaaagaagcgcgaccgatcgtgtccttctttacccaccgcttcttcaggattgcccccctgttctacgcgtggctcgtggtcacctgcatcctgatgacgcaggtgtatcaccttccggttacccctgctgcggtgttgcagagcatattcttcgtgttcaacctggtaccgggaaaccagagcggcttggtcatggccagctggaccattggcgtggagatgctcttctacgccattttcccgatcatctatttccgcacgcggaatgtcgtggaggcatggtcgctgctgctggctaccctccttgcttacttcgcgatgattttcatcctgcctcatctcccgctttcgccggagacagcggccagcatcgagcaatggctgttcatcaaagacctgccgatcttcgcattcggtgccgtgtgctattacatgctcagagaacgcttggtcaatgaacccgatgagcaggagcgttcactgggaattcttctgctgctggctgctgcgtgcatctttgtggcgcgcagcaacagctgggtggacgacagaatatttgcgggtcatccctacatgtggccagcggtctggtattcattgctgatcatcgggttggcgctcaatcccattcgcctgctggtgaatcgactcacgcgtttcctgggcacgatcagctattcgctctatcttgcacatggtccggttatcaacacactgcgcccatggtacgaccggctcaatcagcatcatgactggccagcgacgcagacctacatgatcgcggctatcggcactctactggtgtcaattgccattgcctacgccacgtaccgcctgatcgaagttccgttcatccgctatgggaaagtgttttactcgcgtttcttcggtaacaggcaggacgccgtaacatcacggcagatcggcagctga

SEQ ID NO: 511555 - DNA, 2334 bp, Stenotrophomonas maltophilia
atgccggaatacaacgtgcccaacaccgaggacaaggcatcagcctggggaagactggcgtctgtcattgcctgtgtcctgaccgtgctgatgatcacgccgttggctcccgccatgcccttcccgggtttggatgggtcctggagttacgcgatgaatattgccacggccgagcatcttcgctttggcaaggacatcgtgttcacttttgggccgctggcctcgatctacacgcgtgtctacagccctgccaccgactggatgatgctgttggggtccgcgctcatcgccgtcgcgctgttcgccggcttctttgcggttgcctccgcacgcaagcgtgtgtttctgctgatcctgccagtcgtgatcagtttggcctggggtcgtgatgcggtgttcatgctggtcccggtgctgatcccattcgtgttgcaccggggattgcaacgcgggcgtgcgtacaccgccgccctgtgcctgctggcgacagcttcggctatcctgccactggtcaaagggaactttggcttgctgcttggcctggcggtgctggtcagtgtgatcatgtgctggcgcgtccagcgacgttccgttcttttgatcattgccgttgccgggatttccctgctgactgcgtggttggcgagcggacagcgtctgttggacctgccgggctacttcatcgcccaggcgcccattgtctcgggctataccgatgcgatgtcggtaagcggaagcctgcgcgacattgtcttctatctgctggcggcgcctgtgctgatgttcctgtccgtgcagcgcccggtgcgggaatactggtatgcaccagtgatggtcgcggcctatctgttcgttgcgttcaagtctggcttcgtccggcacgatgagcatgcattcgtcgccgctgtcgctcttgcatatgttggatttctgatcgtactgacgcgacgggggcgctggggggcgacggcgttcgtggtggcgatgctcgcatgggccggcatcacccacacctacgcccgcgtcggctgggacagcagtgttgcccgatttgccgagatggtgcgcaaaccgcttttggggacctggcaacgcctgacccagcctgacgtgttgtccacgcagtatgcggcgatcaccgccggattcggccagcgcgcgcctttcgccggttatgtcggggaggccgatgtctatcccgtcgaccttgcggcactgattggctctggtgcgacctggaagccacgtcccgtactgcagagttattcggtctacacacctgccttgttgcgggcgaacgccaagcacttgcagcaggccccccctgctcgcgtgtacttcaacgccgatcccatcgatcatcgctacccggcgctggaagacggcgcgagctggctgtccttgttggctgctttcacgcccaaggcgctcgaaggggggtacgcggtcctcgaacggcgggatgaggctaatgaggtgcttcagcccgtcaggttgtccgaagtcaatgccgtcctcgggaaagacgttgctgtggcagcgtggcaggagccggtatgggtgacgctggatattcaacccactctgctgggcaagcttttttcaacgttctacaaagcccccaagctgtcgatgaaggtgcgctacgaagatggtagtaccgccgattatcgaatgatcgcaggcatggcgcagaccggcttcctgctctcaccaacggtgtccgatgcaaaggacttcattgctctccgttccagctacatgcaccagctgctggacgcgaagcgggtggtttcgttcggtgttgctggcgaccgcgggaccagcctcctgtggaagttggactaccgcgttgcattctcccgccttgacgttcccctgtcggttgaagctgaccggatcctggtacctgattggcaggcggcccagccgctgtcctcctaccctgtatccggggactgcaacatcgatgaagccgatcaacagcccgtcagcgcaaacatggatttgcccaagcgcctgttcacgattcgtggctgggctgcgctggatgggcgtcaaggcaagacaaacgatggaaccttcctgctgatcacaagtggcgacacggtgtcttaccgcgtcgcgacctcccaggtgcctcgtccggacgtcagcgcacacttccaacagcctggcctcgaacatgccgggtatgaggtgacaattgatggcagtcgactgcctgaggaggctcagatccacgtgctgcagagcggtccgcagggcgacgtgcaatgtgcgggtgcgacgatcacgttgcgcaggttgcaggcaaagataccttcctcgtga

SEQ ID NO: 511556 - DNA, 756 bp, Stenotrophomonas maltophilia
atgactgccacctccgcatgttctgcctggctggccctgatcgcagcagtattcgccgcacaaccgacccatgcggcaacgacgtctgcccccgcagaggatcagcgctgcatcgcgaggcttgtagcggacctcgacagaacatggccggacaacgctacgatcaacattgttgcatttggtcacagcgttcccgcaggctacgccgccacgcccgtggtagataagcgtaatgcctatccccgactgctggaggacgctctgctggatcgtcatccgcacgcagtgctgaatgtgattacgtcggcggtagggggtgagaactcagaccagggtagtgcgcgcttcagccgggatgtgctcgatcatcatccccggatggtcctgattgatttcggactgaatgatcggagtctttccttggcgaaatcaatgtccaacctagagggcatgatatccaaggcccgtgaggcggacatctgccccgtgctgctcacgcccacctgggacatggcatcgaatccttccgacccggccgacgctcttgccacccaaggcgaaatgatccgccagcttggtgaacgcactcacacccccgtcgtcgacagcctggctgcatttgcggcgttccgaggcgatcgggggcaactgatggcgcagtcgaatcaccccaatcgcaaaggccacgaactggtgcttcaacagctgcttcggttgttccagcctcatcagaatgtgcctgcacacgcagactga

SEQ ID NO: 511557 - DNA, 987 bp, Stenotrophomonas maltophilia
atgtccggctgcacgtccccggcgccggtgaagccggttcgccggggacgcgcaggattgtgggtcgctgccacggcagcggcctacctggcggtcctctggtacatcgaccgcgaccgcaacatcctttcgcagctggcagaccatgccagcacactggccctgtgcagcgcgctggtgctggccagctacgtgttccgctatcagcgatggcgcgcggtgctcgccgcgcagcgcctacgcccgcagagctgggcccggggcgcgctggcctacctcgcgggctttgccttcaccgcctctcccggcaaggccggcgagctgctgcgcatccgttatttctgctggcagggcattccggccagcgccaccctggccaccttcatcttcgagcgctcgctggacctgctggtcatcaccgtgctggcgatcggtgcggcgcacctgattccggcgttcggcgtgctcgccaccctcattcttggcgtgttgctggtgctggctctgttgggctgctgggtaccgctggcgcgtactgcgcatcggttcatcgagcacctgccgggtacacaactgcgccgcctcggtcatttcctggtaagcggtgccagcgcactgggtccgttgctgcgcgcgcgcttgctgttgcccgccagcctgcagggcgccgctgcctggctgctgaccgcagcggcctttgacctgctgtgccaagccctgggtattgccctgccgtggccactggcgctgggaatatacccgctggccatgctggtcggggcgctctcgttcgtacccggtggagtgggtaccaccgaggccgccatcgtgctgatgctggccgccaccggcgttcccacggagatcgccctgaccgtggccatcggcatccggctggtcagtctctggctggcagtgctggtaggcatgctggccatgctcgcgcttgagctgagggccgggcccgtgggccaaccaggtgagtga

SEQ ID NO: 511558 - DNA, 636 bp, Stenotrophomonas maltophilia
gtggtttcgctgaaacacctggggctggccgcactgctggccccttgcagtgcaatggccgctgccgaagcggcatcgcccgcagagttgttcgatctgcatgcacaggtgatcgtgcatggcgatgccctcgcgcagaaggcgctggccgcgcagctggagatggatgacgcgccagccttcgttgccgcgttgacggctgcaagccaactggatgaagcccccgagctcgctggatggccggctgctgcacaggccctgcgcgagcggcaggcctctgcgcagtgcaaggccgatggtgtgagttggccacagggccgccagggcgacgttgccgaagtggcttaccgctgccacctgccggatctgtcgggcctgctcccggtgtatcgccagcaccgcgtgcccttcaacgggccgcatccaccggagatgtccgcgcccctggcggcggcctacacgacagcgatgcacaacgcgcccgatcgcgtgcgcagcggcacactgatcttccagcgcactggcggccaccgcgcatggcgcgtgcgcgatccgagcccgctgatcgcgctggtggccgacgccttcctgccgttcttcgaatggaacgagcatctgccggatgattccgggtag

SEQ ID NO: 511559 - DNA, 963 bp, Stenotrophomonas maltophilia
atgtccctggccgaattcgccctcatcgaccgcatccgcgcccgcaccgtcgagcgcgacgacatcgtgctcggtattggtgatgacgctgcactgctgcagccgcgcccgaacgagcaactggtggtcaccgccgacacgctcaacagcggcgtgcatttcccgaccgaaactccggcgttcgacatcggctggaagacgctggccgtcaacctgtccgacctagcggcgatgggcgcgcgcccggcctggtgcacgctggcgctgtcgctgcccgaagccagcgaagactggatcgaggccttcgccgacggtttcttcgcactggccgaccagcacgacatcgccctgattggtggcgacaccacgcgtggcccgctgtcgctgtcggtcaccgcgatgggtcaggtctcacgcggccaggcgctgcgtcgtgatcgcgcacagattggcgatgacatctgggtcagcggcaccctcggcgacgccgccggtgcactgcgcctgtggcagcagggcgcattgaacgtcaccgccgccaccctgctggcggactacgaaaccctgcgcctgcgcctgctgcggccgaccccgcgcgttactctgggcctgcgcctgcgtgcattcgcgcatgccgccgtggacatctccgatggcctgctggccgacctgggccacatcgctgcacgcagcggtgtacgcgccgaagtcgatgccgatgcattgccgatgtcgtcggcactgcgcgaactgctcggccgcgatggcgcccgtgactgcgcgctgcacggcggcgacgactacgaactgtgcttcaccgccgccgccgaccagcgcgacgcgctgcactacgtggccgaatcgctggacgtgccgatcacccgcatcggccgcatcatggaagggcagggcgtgcacactgaaggccacgacggcccgagcggatacgagcatttcgcctga

SEQ ID NO: 511560 - DNA, 735 bp, Stenotrophomonas maltophilia
atgtcacgtgtcgtccatgtcctgctgctgtgtgcgctggcgttccccagtcacgccggtgcaccgcagatcaatgtcggcgtcctcttcgactacctgcagcctggcagcagcaacctgctcaaacgcatccgcaataccggcgccggcaccgcctacgtccgggtggaagtggcagagatcgttttcgatgccgatgacaagcccgtcgaagttccggtggatgcgccatcgctggtgcgcaacgcgcctggggcgcatggggtcattgccagtcccagtcgcctgatcatcgcaggcaacggccagcaggccacacgtctggtgtatcggggcctgcgcgacgaggaacgctactaccgcctgcgcttcgtgccggtggcgcccagtgccgaggaattctcgctcagcgaggaacaggcacagcaggcggcagagctttcctcggccatccgcgtgttcaccggcttcggcaccgtgctgttcatcgcgccacaacacccgcgctatgacacacgcatcgaatccggccagatccacaaccacggcaacgccaccattgttctggaaaacctgcgccagtgcgagcgggccaaggtcgacgcctgtacgaccggaatcatcgtgcacgtacgccccggccgctctcacctgctggcgtctgacgatacgcatttcatccgttacgacctgaaggagggcgaacgccagcgcagcatcgacagccgccgctga

SEQ ID NO: 511561 - DNA, 2505 bp, Stenotrophomonas maltophilia
atgcgcctttcacaccaacatccgcaaccggttccgctgcggctggcggttgccattgccgccctgcttgctgctacctcggcgcaggcaaacgcaggcgcgccagacgcacaggtcagcctgctggagcagcgcgaccgcatgcctgcggagttccgcgagcatctgttcggcaatccgctgaccgtgcgcgtggaactggacgggcaatacctgggcgacgccgaagtactgctgcatgaagacaaccgcgtacagctgatcggcttcgtcgaaagcaacgacagcccatggccgcagagcgagcgcacgcgctgggccgggcagctggccgaaccgctgccgcttggcatatgcgcgccgcagtgccgtggcctggccgcgctgcactacagtctgaccaattcgctgctgagcctgttgaggccggcaactgccagtgcggaacaacgcaacattgccctgccggcgtccggcagccacggcttgatcgtacgtaacagcctggcggtgcatggcggccaggaccagccggccagcgcacgctacagcgctgaactgagtggcagcatcggtctgtggagcacggttggcagctaccagtactacgcccaacccggcagcacggagcactatctcagtgcgttgtatgcacaacgcgagctcggcgatcatttcgtccgcgcgggctatttcctgcccacgttcgagggcatcatccgccagccacgcgcgccgggtacgcagaatgacaccgcgctgggggtgatgttcggttcgtcggatgtgctgctggccgacacgcgcagcgccagcgtctatccggtctatatcaccgccaaccgcgagggtgtggtggagattctgcgcgacggcaacctgctggccactcaggccgtgaagccgggcgtgcaggagatcgacacgcgtcgcctgccaggcggcatctacgacgtggtactgcgggtcatcgaagacgggcaggaggcctcgcgcgaaaccgcctcgatccacaaacccagccgttggcgcgatcccacccggcgctggcgctacagcgcgttcgccggccagcagcgcagcctgctcgacagcgatcgttcaatgcaggaaggcgagatcgccgccggtgcggtggtcaactacctgctgcacccgcgcgcggtggccggtgccaccgtgcagcagatcggcacgcgccgcgccaccggcctgtcgatggactggcaggccagtgatcgcttcagcgcctacaccaatttctacacctccagcgatgccgggcgcggcgtggatctgcagggactgtatcgctaccgtgccggttcggtggtcgccaaccacgcgcgcagctgggcagagcagcgtcatcggctgcccgccagcgagggtgctccgccacgttgggaaacccggggaggctggcaggacaccacggccgtatcgatcacccatcgcttcagtcaccgcgacaatgcgagcctgcgcgtggcccgcagttccggcttcacccgtggcaccggcatcgacgtgtcctacggtcgccgcgaaaccctgttcggcaggcatgacgtcaactggcgtgtctcggcctacgaccgtccgggcagccgcttcacccactatcgccgccagcgcggcattgatctcaccgtcagcctgtctctcggcagcgagcgtcgcagctacagcggcagcctgggcagccggacgggcgaagccggccagcgcgacggctacgtcaccgcggtcgccacccagcgtgtggatgggaagattctgcgcagcgtcaatggcatggtcacagctgaacgcagcggcattggcgcgggcgccggtacctatctgcagagtccactgctggaaggcgatgtgcagctgtatcgcggtgccagttctggccacgttggcggcagcgccaacctggacagcaccgtggtgatcgggggaggacatgctgccgtgctgggccaaggacgcagcggcagcgtggacaccggcatcatcgtcgacgtgcgcagtgacttccccgatgtcacgttgcgtgccgacgacagtcgtggcggtggcgtgcagctgcgcccgggacgcaacttcgttccggtcaccgcctatcgtgcgggacaggtgcagttcgacttccacggccggcacgcacctgcggcggcgctgcagccgtcgaccatcagctaccacctcaacaagggcggcgtggtgcacaccacggtggatgtactgcgcaccttcaccgtgatgggtcaggtactggatgccgatggcaacggcatgcgcggtgtgcaggtgatcaaccacgccggccgcagcgtcagccaggaagaaggcttcttcacccttgaactcagcgcacgcgcgccggtggtggagctgcgctacccgaaccggatcagctgtgtgctgaccatggaggagggccgctacccgcgcgaaggcgatgtactgatggtgggcggcatcggttgcccgccgtcggtggtcgcgcactag

SEQ ID NO: 511562 - DNA, 1188 bp, Stenotrophomonas maltophilia
atgactattggcatccggctgttcccgttgctggccgtaatggcggcgttgcctgccaccgcacaggtggtggacgtcaatgtcaccggtgaattcaggcccaacgccctggatccgggcgataccgcattccgcaacacgacaccccggggcagcttctgcaactggaggccggccgaatgcgatagaaacggagcctatatcttcgatctcggcaaccgcgagtactggcgcaaggaagggccgagcgacgacacatcaaggcgtgataccacctacatccgcttcccgccgccgcgtacgatcaccctgcaggaggtgtcgagcggacgcaccttcgaggcgaccatcagctttgcggcgctgtccatgcgcatcaacttcggtggtggcgtcgatccctggtaccacggcgtcagtggaggttgcacgaccatccgcggcgccggtgggcgtggatggtcgctgggcggttgggcggtgcggacgccagccagccccaccgagtgctacagcaccaacacgcggtatgcccgcagctactcctacaggaacgtggggctcggcatccacgttaccctgcccaatgcaatgacgctgcaggacggccgttacgtggcccaggaaacctggaccaccggcggcgccggggccgacatcgatctgggcgacaatatcaccggtgtcgaggccgtgcgcatgaacttcgtgttcgatgtgatccacgatttccaggtgcgcttcgccaccgaggcgcctcgcgtacagttggcgcccgaagggggctggtcgccctggatcgatcatggcactgcgccggcgaggctgcgccaggagctgccgtttcatctgaccacgtcgatggacttcagcatgaagctgcgctgccagcaccacgtcggcgaccagtgcggcattcatgatccgcgggcggacaagcaggtgccggtgggggtggacgtcacccttccgggcatgagcaacctgcgcgatggccgtccggcgcagaacaccgtactgctggccgatgacggtcaggcaccgcgcttcacgcccgatggctacctgatgcagcgccgttcgaccctgcgcttcaccgccgggcgtgaagcggtgctggagatggtgaagacaccgggctcgcgctgggaaggagacatgaccgtgctgttcgacgccaatccctga

SEQ ID NO: 511563 - DNA, 408 bp, Stenotrophomonas maltophilia
atgacttcttcgctctatccctatctgttcgccacactgggcgacgccgtcgaacgcctgccggatgatctggccaaagcactggaaaccacgttgggcagcacgatgcgcgcccacgccgacgaaggcatcaccctgctcggctgcctgcagcgcatccgccacgtggacgccgccgacggccaaccgtggccggacaaaggtcgcaagtgcttcgccttcgcgatggcgcgcatcgaccgcgccaatgccgggctgaccttgctgctggaacggctgcacgccatcgagcgtgtgcgcgtggacggcgatgccgaccagcaggtgggcgatgacgtgcgcgaagggttgctgctggcctgccttgggctggccgagtatgtggatgtgcagttgcgggtggcgtga

SEQ ID NO: 511564 - DNA, 966 bp, Stenotrophomonas maltophilia
atgcgccattccatccttgcccactgcgtcctgctcggccttgccttcgaggcagaggccgcctgccgacagatcggcggcgatgcctggatcgatcttgaaccggaggtgacctttaccgagcagcccgaccgctggttggggtatggggggggcaaggtgcaactgctttgcgatgatgccagcgatcgcacgtacgacctgctccccatcctcgcaggcatgcgctacgtccgcgagatcgaccaagggggctacacggaatctgcgtatgaactctctccggagtctccgctgatcgtgctcacctatctgcacggaagctgtggtgagatggagcccgattgtgcgccggaagagacgccgataggcgattattcgctgcgggatggtgttcccgtacgagtcgctatcggctcggccgccaagaaggaaatctacgtcacggtccatttctactcacgcggcggccggatgcaggccatctccccacgcagcgcagggacggttaccacctccataggtggcggctccgcgcggcaccacctcaacctgggcgtccgtttccgcgcgcagacctgcgcggtgaccccgcgcgatgtgacgttggatgacatcagcgcgagcgcgctggatgcacagcacgccgccggcagcaaggatttcaacgtgggcctcagctgcgccgctggcggccgcccgctttatctggagctgcgcgacgcgcacgacctggccagcactgccgacaccttggcgcccgcgcccggctccaccgccggcggcgtggtactgcagatcctgcagcacaacattccggtggcgatgcaacagccgtggatgagcggcgacaccgccgccggtggcatgcaggtgccgttccaggcccgctacgtacgcacggccgatccactgcgcgccgggttgatcaagggcgaagcggtgctcacggcggagtatcgctag

SEQ ID NO: 511565 - DNA, 990 bp, Stenotrophomonas maltophilia
atgcaagaaattgcatggattggctcctgcttccctcgtaggctcccgcctcttccatcaatcgccgcgcttgcggcgcgagcgtgggggcggatctgctgcgcaacgcgggcggcagcgccttcggcgtcatgctgtccgcgcggcaacgccggcggcacctccaccaatgcgctgaccggctactacgcgcgcggcaaagtgaagggcgccgcactgggtgtgtatggcacctggcgtccaccgcatgaagatccgtatgcagggttctatgtggatgtttcgttgcagaccccggagcgctatgacagcaaggcccggcagggcgcggtggaagcgggttatgcgatgcgagtagggggtgctgccaacggtggtctctacctggagccgcagctgcaggttgggtacaaccgctgggatgatctgcgccacaccgaagccaacggcacggttgtgaccaggcgcgatgccgatgggctgttcggccgtgcgggtgtgcgccttgacggcgtgacccggtggggcacgagcgccgcgcaggtgcagccgtatgtggctgcgcactggctgcaccagcgtgcagcgtcgggcgtgctgatggacgatgaggcggtggacgcgtacattccgcgcagtcgtggcgagttcagtgccgctgcgtcgctgaaatttgccaatggcgtggcgcgtggggtgggctgtcgttgcagcgtgcctcgggttgccaccagaccagcgcccaggtgggccggagctacagctggtaaaccctgtggagtcggttctctttgcaacgcaaggggatctgactccatgtgcggagctgcagctggtaagccgcgccatcaggtagcaccaggtcgttgttggcggcgctgcgcatgccggagctgcgcgggtttgactggcagcacatggatgagcagcaggtctaccggcaactgctggccgaacgaacaccccgcatgcgcaggcggcacgcgatga

SEQ ID NO: 511566 - DNA, 351 bp, Stenotrophomonas maltophilia
gtgcacgtgttcatcgatgcaccgctgccgctgttcaaggccggggcctatcgctgctcggactggttcaaccgtagcaatccggcgtgcgccgatggcctgagcatgttgcgcgcggatctgcagcggctgcgtgcgccgcagatggcactgctggccgagctggccgcgcgctacccgtcactgaccgtgtgggatccgttgccgctgctgcgcgggccggatacctgttcggccgtacaggacggtgaaccgctgttcttcgataacgttcacctgagcgggcacggcaatcgcgtgctgctgcctagcttccgccagctgctgatcggcctggcggccggcagatga

SEQ ID NO: 511567 - DNA, 723 bp, Stenotrophomonas maltophilia
atgaaactccgccacgctttccggctggtcaccctgttggccagccttgccgcattgccggcgccggccgcagtgacgctgcagggcacccgcgtgattcatgacctgagcactggccgcgatgtaacggtcaaggccagcaacgtcggcgagctgccggcgctgacccaagtgtggatcgatgatggcgacagccagtcgcgccctgagaacgtgcgtacgcccttccggctgacgcccgccgagccgcgcctgctgcagccgaaacagggccaggcataccggatcacctatgcgccacgtccctccgacgaaccactgccgacggatcgcgaatcggtgttctacttcaacctgctggatattccgcccaagcccgcagacgccgccggaaggaacctgctgcagttcgcggtacgcacccgggtgaagctgttccatcgtcctgctggcctgccaggcaatgcccgcgatgcagccggccaactgcagtggcgcgcgcaggcgggctgcttgcaggtgagcaaccccagcgcctatcacgtgacgctgagtacgctgtccctgcccgatggcagcgagttggacgtggacatgatcgcccccggtgcgcaggtgaacctgccgctgccggcgggtagcgcgatgccggcttcggtgacgttccagtggctggatgactacggcacgccacgcgatgcccaggcgcgcatcgaggggtaa

SEQ ID NO: 511568 - DNA, 513 bp, Stenotrophomonas maltophilia
atgtcactgacgttccgtctgctgtctctttccgtcattgccgtcgtgtcaccctcggtgtccgccgaaacgctggaaatcaccggcgaactgatgacctccacctgctcggtcggttccaccggcggcaccatcactgtgccgatgggcagggtcgacctggcctcggtcaacgcagctacccgagcgggtcagaagaacttcaccatcgccctggattgctccggctcgggtgcatcgcaggacgtaggcgtgcgcttcggtggcatccccgatggcagcaccggcaatctggcactcacggcagcatcaaccgccaccaatgtgggcgtggcgctgtatgacgcggctggcaaccagcagaagatcggtgacgatcccactgtgtgggtcaccatccccgccggtgccagcggccagctggactacagcgcctggtatgcctcgccggccaccaatgcgacggctggcagcgccaacgcgtcgggtgacttcgtggtgctgtaccgataa

SEQ ID NO: 511569 - DNA, 993 bp, Stenotrophomonas maltophilia
atgaaccgtccttccaccgcgctgcgtctgtgctttgcgtcggcattggccatctgcgtactggcactgccgggtggcgccgaggctggatgctctcggttcgtcccgggtgaccaggacatcgtgcttcccccgttcccgatgccgaacgtggatcggcccgacgctgcatttggaccgttctccaatggctttgtcgaacaaggctttgagtgcacagcagggcagacagcatttgtcgtcgacctgaccgtccctggcctggcatacgagcgcgatatcagttatcgcggtctcacgttccgggcctacagcgtgggcccacgctcgccgttgatcgggtttcatcacgtgctgagcaccggagggggggcgagcgggcagattctagtgccgctcgctttggggcggaatcgcaacccgggtcccgtactggcgaccaccacgccagttgcatccagcctgtacatcatgctgttcgctcgcggcggtgccatggaaagcttccctgccgccgccctgggcttcgccacgtcgtcggtggagtccgacccaagccagacgatgcagcacgccatgcggctggaggtcaccatccgccctgccacctgcagcatcaccagcacctcgcacgcgctcgacaatgtggtggccaatgaccttgctgccagcggcagcaacgccaaggagtccagcttcgatgtgatgatggattgcccgatgggcaacatcgatgttcatctgtcgctggccgacgccaacaatcctggcagcagcaatgatcaactcgcacccgccccgggcgctactgctggcggcatgcaggtgcagctgctgcgcggcggccttccggtgcagtttggccgcgtctggtcccacggctgctccagcaaggtctcgcagtccattccattcagtgcgtgctatctgcgtaccgccgattcgctggttcccggtgaggtgaaaggggaggcggtgctgaccgccgtttaa

SEQ ID NO: 511570 - DNA, 2535 bp, Stenotrophomonas maltophilia
atgagaacatttcgcacccttcagctgcggcgcacccgggcgttgcgcgcggtgcggtcgctcccggcggccgtcagcgcagtactttcggctggcgtggcggtggacgccgtcgctgcaccggtcgagttcagtgaaggcttcctgattggcggcgaggccatcgacatgacccgctacgccaacggcaatcccctgcctgccggcgactacgctgtggatgtgcatgtcaacggccagttcatgcgcagccaggacatccgtttcgtcatcgacgacgacccgcacctcgccgtgccctgcctgtccccgacgctggtacgcacgctgccattgaagccggcattcctggaaacactgccggtcgatgaacgtgcctgcgtgcagctgccgacgctggtggacggcgcaagcattgccttcgacagcggcgaactgcaggtgtccatcagcattccacaggctgcccaggccgtcgctgcgcgcggcttcgttgcgccggaactgcgcgatgacggcatcaccgccgcattcatcgattacagcgccagccactaccgcagccggggcaacggcagcagctacctgggtctgcggacaggcctgaatctgggtgcctggcgcctgcgtcaccgtgcgtcgttcacccaaggcaaccaaggcaccgcccatcaggtcatcagcagccacctgcagcgcgacattccccgctggaacagccagctgttgctgggccagggcaataccggtggcgaactgtttgaaagtgtgccgttcaccggcgtgcgtgtggctagcgacgagcgcatgctgcccgattcgttgcgaggctacgcgccggtggtgcgcggtattgccgaaggcaatgcggtggtcaccatccgccagaacggcagcatcatccacgaaagcaacgtggcccctggtccgttcgccattgaggatctgtatcccaccaatttcggtggcgatctggaagtcagcgtcagcgaagccgatgggcgcgtgcagcgcttcaccgtcaatttctccgccgtaccgcaggcgctgcgtgcgggagcgtcgcgcttcgcgttcaccgttggtgaactgcgcgatacaggcacgacgccgcagacgttgcgcttcaccgagggaacctatgcgcgtggcctgaacaaccggcttaccgtgttggggggtgcgcagctgggcgagggctatcacgcgctgctggccggtgccgcggtcaacacggctatcggcgcattcggtgccgatgtcacccactcacgcgcccgcctgcgcggcagcgagaccgttacgggcaacagcttccgcttgaattaccaacgttatgtggccagtaccggcaccaacttcggcctggccgcgtaccgctacagtacgcgtggcttcctcagcctcaacgacgcagcacgcgtgcacgacgacgactggggctacggccagcgcgcacggcagcgctaccaggtgaatttctcgcagaaagtgggccagcgcagcaacctgtatctcagcggcggtcacgtgtcctactgggacagcgcccgacgccgcaacgacttccagttgggtttccagagcacgctggggcggatgaattacagtgtgtcagcgctgcgctaccggttgggcgatggtcgccaggacacgcgctatgcgttcaccctcagtgtgccgctgggccgcagtgccaacgcaccgcgtgccagcacccagctgagccaggccgacagcgggcggcagtcacagctgggcatcagtggcagcctgggccagtcgcgtgcgctgagttacagcctgtccagcgcacaggacaagggccagaacagccatagtgcctatgccgcgtggcagggcagccacggtaacctcaacgcgggctacagccggagcgggggctaccgcagcctgtcactgggagcgtccggcagcgtggcagtgcatggcggcggtctcaatctgggcgcgccggtgggtgagggctttgcgctggtgcaggcaccgggcgctcagggcgcacgcatcggcagcggcagcctgcgcgtggcccgcaacggctatgcgctgttgccgcatatcagcccctatcgctggaacaccatcgatctggatccctccggcctgccgatcgaggtggaactgctgcagacctcgcatcgcgtggcccccaccgccggtggcatcgtgcgcgtgccgttccaggtacgccgcgaacgcacgctgttcatcgacgctaccgatgcgttgggccagccgttgccattcgctgccgcagtgcagaccgaggacggtacgccggcgggcgcggtcgggcagggcggtgtcatacagctgcgcggcgcgcaggacagtggtgtgctgatcgttgaccccgaaggcaagcgacgttgccgtatcgactaccgcatgcctgacgcgcctgatgcctacgggttgtcgtggagccaagtcgtgtgcatgccgcaaccgttgccaccggaaggactgcaggtgagcacgccggagccggaagcgagcattgctccgtga

SEQ ID NO: 511571 - DNA, 2394 bp, Stenotrophomonas maltophilia
atgcgccgtcattctgcacgtacccagtgcctacccatgcgccccctcacccagtgcctgctgttggccctggcgacccttcctgcaacatccgtgctggcacgcaacctggatggccaatccgcgaccgtgcgcgaggccaccgcagttgaagcctggaccctgatcaatggctccagcctgactgtcgaaaagggtcgtacggagacgatcagcagcaccgattcactggtaacgctgcgcaacggtcgcgtcgaagcgctggccagcggcgcaaccgccggcgtggtgctgcgcggcaggtccacactggacatgaccggcagcaccctgcatgacggacaggtcgtggtggcggacctttctacggcgcgtatcaccggcagtacgttgcactcggggggcgccagctcgcgtttcagcatgggtatttcccttgagaagtcgccaagcacatccgatgccaacagcaccgtcatcgtcgactcttccttcgtgcgcgctgaagcatcaccgggcgcggcaaagctcagcaacggccacgcggtgcgactgcagcagggaaccgccatactgcagaacggcacccgggtggaaggcgccaactccggcgtactgctgttgggcggaaccatttcgtctgtgctcggtcagcccatcaccctgcgcgtggacaacgcccaggtggcctcggacaacggtgccgccatctgggtggcgccgcgcaggctggtgcgctacgacatcaccgtcgccaatggctcgcagctgtccggcggcgatggccacctgctgctggtacgtcccgatggtgttgccgcatccgaagccgaagttcacttcacggtggatgacgcacgccttgcgggcgacatcaccttcgaggccgagcgcgttaccggcagcctggacgtggtactgcgcaacaaggcgcagatcgatggccgtttcgccaacgtcaccacggccagcatcgacagcgacagcacctggctgatgaccggcgacagcacggtcggccatctcacccttggcgcgggcgggaccgtggcgctgggcgatggcagcagcttcaataccctcagcctggatgcgttcaccggcaacggcggcaccctgctgttcaacacccagctgggcgatgacacctcgctgaccgacacactggtgatcaatggcgacgccaacggccaggccaatgtgcgcgtgctcaacgccggcggtgccggtgccaagaccgaccgcggcatcgagctgatcgatatcggtggtgcgtccaatgctcagttcgatctggtcggccgcgcggtgggcggtcagtacgagtacttcctagtgaaggatgccaacggcaactggtacctgcgttctgaactagccacggaaccggacccgtgcaagatcgacccgaccctgccggactgcacccccgttacgccaatcgacccggttgatccgattgatccaatcaccccggtgccagtgctgcgcccggaggccggtgcctatctggccaaccagttcgcgctggaccaactgctgcgccatacctggcacgaccgccagagcggtagtcccgccaccgagggggtgcgcggctggacgcgcgtggatgccaaccagagcaagctggcggccgtggatgaccagctggacctgcgcgtggaccgttcgcgcctgcagttgggcgcagacatcggcgtgttcgacaacggtcgtggccgcgtgggtgtgatgggcaccgctgcacgcagtagcgccacctcgcgttcgcagctgaccggcttcagcgcacgcggaagggtggaagggggggcgctgggcgtgtacggcaactggaggaccgaggcgctgtatgtggataccagcgtgcagcgcggccagttccgcaaccgcgtacagggcgaaggcctgaccgaggaacgctacgactcggatatctggcagtcgtcgctggaagccggctatcgcttcaacatcggtcagatcggtagcacggcgctgagcctgcagccggaggtgcagctggtctacaccgacgccagcaccgatgtacacaccgagaccaatggcaccgtggtgcgcgccctgggcgacagtggtttgtccggccgtgcaggcctgcgcctgcagggtgaaggccgcagtgcggccggtgcctcggtcagcccgtatctggcggccaactggtaccgcgatggcgccggtaacggcatcgccttcgacgacgagttgctgaaggccggaatcccgcgcaaccgctatgaactgagcgcgggtgcgcgcgtggaattccgttccggcttcagtgcctggggcgggttcggggtgatgcgcggtgacagtggttaccgtgaagcgactgcgaacctgagcatcgcctacaagtggtga

SEQ ID NO: 511572 - DNA, 546 bp, Stenotrophomonas maltophilia
atggatggcacacgcctggcttcactctgcatcgcactggcactcgctacgtcggccacccatgccgccgctgcggagcaggtgcagctgccgccgatgaagggctaccaccaggcccaccagaacaccgatgcgcagggcaaccgcatcaccgagtacgtgcccaacgggcagaccgtgcaggactgggccgacatggtcaccgtcaacgacgcgccgaacagtagccacgcaagcccgcgcgagttcctcggcatcatcgaagccggttggcgcattgcctgccccgatgcacagagtcactggatccgcgagggcgaggaaggtggtcgcccgttcgcgttgctgatgctcagctgcccggagaacccgggcaccggcaagcccgagttcacctggatcaagggcatccagggcacagagggcttccacaccgtgcagaaatcgttccgctccgagccggagaaggatgacgtcgtgcagtggataggttggctgcgcgaggtcgagctgtgcggcagcgggcaggcaccggcctgccgctga

SEQ ID NO: 511573 - DNA, 1212 bp, Stenotrophomonas maltophilia
atgattgctctgctgctggccctcagtctggcgaccacggccgcagccaccgcaccggcacccgcggaaggcgaccagctcgagcaggtggtcctgctcagccgccataacctgcgtgcgccggtggtggcgtcgggtgccttggccaacgccactccggaacgctggccaggctgggaagtggcggcaggcgagctgaccaccaagggcggcgtgctggaggtctacatgggccgctacatgggccagtggctgcgtcaggcgcagctgttgccgggctcggattgcccacagccgtctgacttccacgcccatgccaacagcctgcagcgtacccaggccaccgcacagttcttcgttgccggtgccttcccgggctgccatgttgcggtcgagcaacgcatgccactgggtacgatggacccgctgttcaatccggtgatccaccgcgatgacgcggcgttccgcgcacgtgcggtgtcggcgatgcagcaggcgttgtccacatccgatctggcaccggcactgtccgtggtggaggagatcacccgctatccgcagtcggcggcctgtgcggggcgcagggattgccatctgatgccggccgacacgaccttcagtgcggagccgggcagggagccacgcgcttccggctcactggccctggccagcgggctggtcgatgccttgttgatggagcactaccagggcagtggcatcccgcgcgaaggttggggtcggctgaccaccgaggcgcaatggcaggcgcttgcgcagatccgcaaccgctaccaggacatcctgttcggaacgcccgaggtggcgcgggatgtggccggaccgctgctggaacgattgggcgcgctgttcgaagacccggcaacgccgagggtgaccctgctggtcggccatgactccaacatcgggtccgtgctcgccgcgctgggaatcagcgactacaccctgccagggcagtacgagaagacgccgatcggcggcctgctgcagttcgagcgttggcgtgatcgccgaagcggtggcgggcgtttccgcctggcctacgtctacccgaccactgcgcagttgcgcgatgcgctgccgttgacggaagcgcagccgccgggccgtgtcgtgctgccattgcgaggctgcgatccagtgggttgcagcagcgtgcagttccagcagctgctgcagcgcgcccatcgctga

SEQ ID NO: 511574 - DNA, 261 bp, Stenotrophomonas maltophilia
atgcgtggatgcgcattctggggacgcctcaagcgcatccgcgatggcgacggcgacggcgccgacggtctgcccaggccggaaaccgatctgccgcccgggcgggaactcgcgatggcacacgcggagcgtgccgccattgccatgctgaccgtggtggaaatgctggacgccgccgaacgctaccggtcgatggccacgcccgaccgccatccggatgaggggctaatcgatcggttgttcccgcctgccgcgggctga

SEQ ID NO: 511575 - DNA, 792 bp, Stenotrophomonas maltophilia
atgcgtaatctaaggcggtgtgaacatgagaacggtaaagcttcgcgtgagctgctcttgcgactgcgtgaaggctactcaaaactgctagctatccgactggacttcggctattactccaacctctctgataaagggcggatcttcgcgcagagtgtgagcttgaaggaggcgcagcagcatcgtgaccggctgctcagctatcttcgtaggggcccgctctcagagcatctggccgggtacatctggcgcctggagtatggtctcgagaaggggcaccactaccatgtagcgattttctacaacggccaagcgctcgctaaggacatcagcattgctgacatgattggccactactggaggcagacggtgaccaaagggcgggggatgttcttcagttgcaacaagaacaaagagatgtacgagaggtccggtatcgggatggttgatcgctcagatgaggagaagtgggaggcggtgcacgaggcgctccgatatctcacgaaacaggacctctacctgcgctttcggcctggccccaggattcggactttcggagttgggggggccgtactagctcagcgatggatcaggggccggtcactgaccggccttcgtccttgtcaggaccttcttcttagtcagcgtggcatagaccgcagtcagcttgggcgaagcctgcaaggtgcgtcggaaccagttctcatccttccccttcccatcttccaaatcaaacatcgcttggcgaaaatccgcagtgaacctgaatggattttgggagtgaattgctaa

SEQ ID NO: 511576 - DNA, 219 bp, Stenotrophomonas maltophilia
atgaacaacacttcccagaaccagaacgaccgtcccaactcggatggcgagaagaagcagtcaggccagcaaggccaggtggacggaaacgagcttggcggtgaagacctcgccggaaagcaaggtcagcaacagcagcagccgggaagcaaggagtctgagcagtcgacccacggccaggaccaaaagggcagtgctggtcgcgatagccgtcgttga

SEQ ID NO: 511577 - DNA, 636 bp, Stenotrophomonas maltophilia
atggaccactgctgcggccacaagcgccaggaactggaagcgctggcccttcacagtgcgcaacggcgcgtactggtggcggtactcatcatcaacctggcgatgttcttcatcgagttcggcgcgggcattgtggcgcgctcgagtgccctacaggccgatgcagtggacatgctgggcgatgcgatcgtgtacggcctgagcctgtgggcagtgaatcggggcgcgcgctcggaggctggtgcagccctcgccaaggggctgcttattctggccttctttgtctttatcgtggtggaggtggtcagcaagctgatccacggcgtgcgtccttccagtggcttgatgctggggttcggagccatcgcgctggtggccaatctggtgtgcctgacactgctgtggcggttccgcgcgctcaacatcaacatgaaaagtaccttcgagtgctctcgcaatgacgtcgccgccaacatcggtgtactggtggctgccggtggcgttgcgctgaccggaagcggctggccggacatcgcagcaggcacggtgatcgctctgctcttcctgaaatctgcattggacgtgattggcgaggcgtggccggcatggcgaaccgccagggcggtgcaacgctga

SEQ ID NO: 511578 - DNA, 654 bp, Stenotrophomonas maltophilia
atgacccagctgtcccatccgcttgccttggcgctgagcgccgccctcctgtccgccgtagccccggccagccgaaaggctcacacagagggtagcgttgctccgtatctcgctccgctgatggtcatcacctacctatgccgcctgcgcggtattgaggctgtcacgctgacagatgcgaacaacaccgaggttggcattgtttgcaaacggcgcaagggcagcaaggacaatgtgaccgaatggaatgatgatctacgcctttcgtggaatgtcctggatggacttcgcaaggaggcgatggaacgccacaaaaggccagtgcaattgcagcccgataagcgcccactagtggtaagccagaagggcttgccgctgaccaaatccggacttgattccgcttggcagcggctaatggatttggctactagcggggaggatccactgttgaagccgggggaggaattcaccctgcacggcctcaagcatcgcggcatcactgacagtgagaagccggaggacggcggccacaagagtgcagccatgcgagatcgatacgaccatcgattgccggtcgtgaaacctgcgtcgctccctgacttttcaggatcgttttcaggacgaaaagaaaaaggcgccattgatggcgcctaa

SEQ ID NO: 511579 - DNA, 768 bp, Stenotrophomonas maltophilia
atgcgctgctgcgcaacctgccgtgggcaccgttcactgcactggcaccgatctaggtttccagccaacggcgcagcccctcgtggtgggcggcgtttgaaggcagaagccttggggttggccgggcgggacgggtttgcgggggatgccgtgaatccgtccgtggaggcttggccgcggcttgctcgtgtgcgctgtcctgcgcacacggcaagaccggggttgagcctcctgcccaacccgcccgaggcatgcctcgggcccatgccgcggacacccccgcaaacccatcccgcccggccacggacagtttccgtgtgcgtccaccacggaaaagaaaatgaagatcaaaagcggatcgcggcgctcgctcggagccgagcatggctcggctctacagaacgtcagtgcgcggaaaactgtcgaaggcggggtgggtcggatagcgggggtgtgagccgcatggatgcggcgaccaagcctccatggacggattcacggcgtcccccgccatccgacccaccccgccaacccgcagcaatcctgccgttgctgttgctgtcgactctgcaggtgcagggctgcaagccctgcaaagcaactacgtcacccagcctgcaatcaccagcagggcgaggatcgccagccacagcagcagcatccgccacaccaggctcatcgcatcgcgcaggtccggcaggcgctgccacaccggcagcaatccggcctcggtgtaatcgtgcgcgtcctcgcgcagctcggcgttga

SEQ ID NO: 511580 - DNA, 1158 bp, Stenotrophomonas maltophilia
atgcccgcgccattggccagcagcgccaacgcgcagccgcagaattccggcagcagcgcaacgcgcgcgccacgcggtgatggaaacaaggagttcagccaactgctgcagggtggctcatcgggtgccgatgcgccctcgaaaccctcgaaagcctcgaacacgcccacgccgtccacgcagggaccggcatccgacaacaatggccaggccggcgccgagcgcaggccggacagcgctgacgcgcccgaagagaccgcagccacggtgcccacagcgcaagccaagcccgctgccgaaaaggacgcccaggctgcggccgaggaggcgccctggccgccgctcggcctggcaggactggtgctggcggtaccggcacctgcagaccctgccgccgctctgccggcggtgacagcgacagccaccgacgcagacggcaacgcaccccccgcccccgccgcactaccggtcgcagcagccctgccgtccacagcagctgcgaccacatcgtccaccgccgagggtaatgcccccagcggcgccgaccaggtgaccacactgccgttgcctgagctggtgctgcccggcaagcgcagcgagcgcggtgaaggcagcgacgcacccctcatcggcgaccgcaccgcagcgccgctgctgcatgcaccgggcaacgcggctgtgcaggatctgaagaccgcgttggccacgggcaatgcgatcttcaatggtgaaccgacaccgaagccggtgctcggtgacgacggtttcgaccaggccattggcgcgcgcctgggctggctggccgaccagaagatcggccatgcccacatccggctgagtccggatgacatgggcccggtcgacgtgcgcctccagttgaacggcgacaaggtgcatgccagcttcagcagcccgcacgtggatgtgcgccaggcgctggaaagcagcctgccgcgcctgcgcgaacttctcggcgagcagggcttccagctggctcatgccgatgtcggccaccaggcgcccggtggtgacggcaatgcgtcgggccaggccggtggcggcggcatggcaggtgacggagaaccgtcgccggccgagggcggtgtgtcgtccgcacagttgatccgccagcgcgggttgctggacgcatacgcctga

SEQ ID NO: 511581 - DNA, 816 bp, Stenotrophomonas maltophilia
atgcgcgccgatggcgagctggttggcctggcgggcgtgctcggcgttctggcgcacggtggaggtcagttcctccatcgaggcagcggtttcttccaggttggcggcctgctgttcggtacggcgcgacaggtcgctgttgcccgaggcgatctcgccggcagccgagctgatcgcacggctggactgcttgatgcgggtgacgatctcgctcagctgcgcggcagtggcgttggcgtcgtcgcgcatgcgggcgaacacgccctggtagtcaccatgcatgcgcacggtcaggtcgccctgcgacagcgcggcgagcaggccggagatctgttcgatgctgccggcgttggcatcgagcaggccgttgatctgctgggccagctgcaggaagaagccttccttgtcgctggcatcgatgcggccggacaggtcgccggcggctgcctgggcgatcacgcgtgccacttcggcttccacctgtgcttcctgggtgcggtcgcgccattccaccacgtagccgacggtgtcgccgccttcattgcggatggtcgagaccacctgggcgaactgggcatcgccgtactgcatcgggcgacgcgccacgccgtgtgccttcaggttgcccagcagggtctggtccatctcgccgcggtgttcaagcacggtgaccggcttgccgatcagcgaggcctgggcgtcgaagtccggcaggtcgcggcgcacttcatcctggtactggctcagggtctgctgcagggcgcggttgctgtagacgatggtgttgctggtatcggtcaggtacacgccggttga

SEQ ID NO: 511582 - DNA, 735 bp, Stenotrophomonas maltophilia
atgaccctcatcccacgtgcaatcggcgccgtcgcgctgatgctgctggcgcccttctgcgccaccgccagcccctgcgctcccgaccctacggcgtcgatcccgtcggccctgctgaccgaaggcttcctgcaggcccaccctgacctctactggcgcgacctgggccagctgtcctggcggcgcggcaagccggcacaggccttgatgcgcttccagcgcgcgagcctgtacgccgacaagttctcgcaatcgatggtcgcgcgcatgtaccaggaaggtgtcggcaccgagaccgacctggtactggcctacatctggatggacctggcctccgaacgcggctaccgcgacctgctggtcgagcgcgagcgctactggcaacggttggatcctgcacagcgccggcgggtgcttgccgaaggcccggcgttgtacgcgcagtacggcgataccgtggccaagccacgcatggagaccgttctgcgggtcgcgcgcaacagcatgaccggcagccgtaccggcttcgtcaaccccggtctgcgcatggagctgggcgaaggcccggaagccaaccggatgattaccggcgatgattactaccgtgacgccttctgggaaccggacagctactggtgcctgcaggaccagatctggcagaacgctccgccgacacccagcgtcgagatcggcaccctgcggcaggtgcgcgacgaggagccgggtggcgactag

SEQ ID NO: 511583 - DNA, 1002 bp, Stenotrophomonas maltophilia
atggccgcccaccagggcattggtttcctgcaccatcagcccgtactcgccggggaaggcgctggcgtcgatgcgatagctcagttcgccgccgtcgtggcggcgcgccatttcgcgctggccgctgattactgcgtgcaactgccgctgcatggcggacatggcgtccagcaggcggccggtttcgtcatgcggctgcgggccgatgtggctgtccagcttgccgcgggcgataccctcggccacggccgttgcctgcttcagcggcacggcgatgcggttgccgatgagccagctcagcgccagcacgatcagtaccagcacgccaccggagacggccatgatggcggtgaacaccagcgcctgcttctgcacgtcgtccatgtagacgccactgctgaccacccagttccagggcgcgaacaggccggcgtaggccaccttctcgacctcgcctttgctgccgggcttggcccagcggtagttgacgaagccgccaccggccttggctgcttcgacctggtcgtagtagatgcgcacgccgtcgtcggtgcggaagtccttcatgtccttgccgaccaggtccttgcggaacgggtgcatcagcaggcggtagccggtgtcgtagatgttgaagtagtaggcatcgttatcggcgcgcatcacttccagcgcctgcaatgcggcgctcttggcagcgtcctcgctgagctcgccggtgccggccagccggtggtaatgctggaggatgccgtagctgagttcgacctgggtcttcagcgcggtcttgcgggtctcggtaaggtcgaggtactgcatgcgggcggcgatcaccgagagcgcgatcacgccgagcgcgatgagcagcgtcagcaggttgagcttgcgccggacggagagattgctgaagtagtgttgccagcgatgcaggagattcatcgagcaggaccaggtcgaaacgggcgggcggcgccgagccggtcacggcgggacgagcggtga

SEQ ID NO: 511584 - DNA, 516 bp, Stenotrophomonas maltophilia; identical to SEQ ID NO: 510575

SEQ ID NO: 511585 - DNA, 420 bp, Stenotrophomonas maltophilia
ttgagcctgctggcctccaccctgctggcggtcggcaagaccgccgctccggccggcccgcagatcggccagcacgcagccgccgcaccgagcctgttcggcgcggtgctggcgctgctggcagtgctggcgctggtcatcggcctcggctggctgctcaagcgcctgcccggcagtggtttccgcccggccgaaggcatgaaggtggtggccagcctgagtgtcggtgccaaggagcgcgtggtggtggtcgaggtcaacggccagcagctgctgctgggcgtcaccgccggcggcatcaacaccctgcacaccctgcccgaaccgctgccgccgcccgcgcccgtgcgcgtgccggacttcaagaatcttccgaatttcgcccagctgctgcagcagcggctgcgcaaggacccctga

SEQ ID NO: 511586 - DNA, 780 bp, Stenotrophomonas maltophilia
atgcgtgtcgcccgtacccgtcttgccaccctgatgccgtggctgctgatgctcgccctgtgcctgttgccggcactggccttcgctgcacccggcgcaccgaccacgccactgccggacatcaacgtcggcaagatcggaggtgcgccggtcagcctgccgctgcagaccctgctgctgatgacggcgatcaccctgatcccgtcgatgttgctggtgctgacctcgttcacccgcatcatcatcgtgctgggcctgctgcgccaggcgctgggtaccgggcagaccccgtccaaccaggtgctgctgggcctggccctgttcctcagcgcgatggtgatgatgccgacctgggacaaggcctggagcaccggcatggcgccgtacctcaatggcgagatcgacttccagaccgcctggacgctgaccaccacgccgttgcgcggcttcatgctggcgcagatccgggagaccgacctgatgaccttcgccggcatcgccgggcacggcacctacgccagccccgacgcgatcccgttcccggtactggtcgcatcgttcgtcaccagcgaactgaagaccgccttcgaaatcggcttcctgatcttcatcccgttcgtgatcatcgacctggtcgtggccagcgtgctgatgtcgatgggcatgatgatgctgtcgccgatgctggtgtcggcaccgttcaagatcctgctgttcgtgctggtggatggctgggtgctgaccgtgggtacgttggcggcgagcttcaatccggcgtga

SEQ ID NO: 511587 - DNA, 270 bp, Stenotrophomonas maltophilia
atgtctcccgaacttgccttgaccgaactgcgtggcggcctgatcaccgtgttgtgggtggccggcccgctgctgctcaccgtgctggtggtgggcgttgtggtgggcgtggtgcaggccgcgacccagctcaacgaaccgaccatcgccttcgttgccaaggcggcggcactgaccgcggtgctgttcgcgctcggcagcctcctgatcggccacctggttgaattcaccacgctgctgttccagcgcattccacacctgatcggctag

SEQ ID NO: 511588 - DNA, 2136 bp, Stenotrophomonas maltophilia
atgctggtaggcacgtacaacccgtggctggtggcgatctcgttgctggttgccgtgatggcttcatacaccgcgctggcgatggccgggcgcacggtcaccgcacccggcaagggcgcggcctggtggtggcgcctcggtggtggcttcgccatgggcctgggcatctggtcgatgcacttcatcggcatgctcgccttcgacctgcccattccgctcggctacgacctgccgatcaccctgctctccctggccctggccatcgcctcatcggtgttcgcgctgtggctggtttcgctgcgcaccctgccgcacccacgcctggccggcggggcattgctgatgggtaccggcattgccggcatgcactacgtcggcatggcggcgatgcgcatgcaacccggcatcgactatgacccgggctggctgctgttctcgctgatcgtggcggtcgccgcctcatggactgcgttgtatgtggcattccgcctgcgcgcgcagcgcacccgtgtcggcgaccggctggcagccgctggcctgctcgggctggccatcgttggcatgcactacaccggcatggccgccgcacgctttccggaaggcagcatctgcggcgcggcggtcggcgatggcctgcagaacgagtggctggcgatgctggtagtggtgctgacggtcgcgatcctcgcggtggtgctggtggtgtcctggctggaccagcgggtggaggcgcagctgctgcggctgcgcaattccatgctgagcacttcgttgaccgatgcgcagcaggaactgacccaggccgcactgcatgatccgctcacccgcctgcccaaccgcctgctgttgcagcgccgcatcgtgcaggcactggccgaggccgaacagggcggcagccgcttcgcggtgatgttcatggacctggacggcttcaagcaggtcaacgatgcctatggccatcaggcgggtgacgcattgctggtggcggtggccgagcgcacccgccagctgctgcgcccgcatgacatgctggcgcgcctgggcggcgatgagttcgtgctggtggtgcgcatcgagcacgatgaggatctgccaaccctcgcccggcgcatcctgcaggcggtcggcagtgggccgttgctgccggacaacgaactgcaggtaaccgccagcatcggcgtggcgatctgcccggatcacgccgccagcgagcggcagctgatggcctttgccgacgcggcgatgtaccaggccaaggaatccgggcgcaacgccttcgtgctgttcgccgactggatgaatgacagcgccgaacaacagttccggctgctggccgacctgcgccgggccatcggcagcgagcagctgttcctgcactaccagcccaagatccgcgtggccacgcagaaggtggccggtgccgaagcgttgatccgctggcaccatccggagcatggcctgattccgcccgatcggttcatccgcctggccgagcgcagtggtgcgatcaacgagatcgggcgctgggcgctggaccaggcctgcctgcagctgcggcgctggcacgatgccggtcacgaaggctggtcgatgtcggtgaacctgtcgccggtgcagttcagttcgccgcacctgctgcaggatgtgcgcgcggtgatcgaacgccacaacatcgccccgcgccacctggtgctggaaatcaccgaaagcacggtgatgcgcgataccgacaccagcctgcgcctgctgcaggcgctgtcggcgctgggcgtaggcatctccatcgatgacttcggcaccggctattccagcctgctgtacctgaagcggctgccagccaccgagatcaagatcgaccatgcgttcgtgcgcgacctggaacacagtgcagaggacgtggtgatcgtctcggcgatcgtggcgctgggccatgcgctggacatggacatcgtcgccgagggcgtggagaccgccgcccagcgcgcctacctggagcgcctgggctgcgactacctgcagggctacctgctgggacggccggtcgatgcggcgcgcttcatgcagctgcacgacctgccccggccgcgggtggaactggcgcagagcccaccgcccagcgacaacgcgccccggtag

SEQ ID NO: 511589 - DNA, 2250 bp, Stenotrophomonas maltophilia
gtggccctacgcaccccccttgctggcctgttgctcgcccttgctgttggccacgccaacgccgctgatctgccgtggtcattgccagccgatgcttccccggcccaggtcgacgctgccctgcaggcccttggcaagggcgtgctgaagtcgcccagcctgaccgatgtacagcgcggccacgcgttggtggcggcgggccagacggccgaagcgcggcgatcgatccagcaggcacgcgcatcgcttgcagacgaaggtgataccgcagcagtgcaacgctgggtaccgatgctgctgctcgtcaccgccggcgagcaggacgcagcggagtatgcgcgcgccttccacgccaccttcgccgccctcgacgacgttgccgcggtgcaggccggtgccgcactctcggttgagccagccccggtgcgcgcccagctggagcaggccgtcgcggcacaggcgggggcgacgaccattgccgaggctgtcgccctggaactgctgcgcctgcgggcggtactgcgtgcgcagaccctggccgctgccctggcccctccgctggtcgcggcggaagagcagcgccgcttcgccatcgacgacgcattgcgcatccccgttggcgatggcgtcgtgctgtcggcgcagctggcccgccctcgcgccgcatcggcgcccctgcctgcggccatgctgttcaccatctacaccgatccacccaagaaccggcagaagatgctgctggcggccgcgcatggctacgccggcatcgtggtcgatgcgcgcggcaagggccagggcagcggcaccattgccccctacgagcatgacggcgcggacgccaacgcggccatcgactggatcagccgccagccatggagcgatggccgggtggccatgtatggcggcagctacgagggctttactgcctgggcggcggcgcgccatcaccatcccgcattgaagaccatcgtgccctacgttgccgccatccccggccagggcctgccgatggagaacaacgtgttcctgagtgccaactacggttgggcgttctatgtggccaatggcccgatgctggacaacgacacctacaaccagaacgaacgctggtcacagctgccccgccgctggtatgcctccggccgcccttaccggcagatcgaccaggtcgatggcacgcccaacccctggctgcagcgctggctcgatcacccgtcctacgatgcctactggcaggcgatggtcccctatggcgatcagttcaacgatatccgcatcccggtgctgaccatcaccggctactacgacgacggccagatctcggcactgcagtacttcaaggaccacctgcggcaccgccccgatgccgatcactccctgctgatcggcccctatgaccatcgcggtgcgcagtcggcgctcaagccgatgcagctgcgtggatacgacctggacgccgtcgcgcagttcgacacgcccgcactgaccttccagtggctggaccatgtgctgcgcggcgcccctcgcccggcgctggtgcccgaccgcgtgaactaccagctgatgggcgccaatcgctgggggcatgcggcaacactggacgccgccgcaggtgcccatcgccgctaccacctgtcggccgcacccgcttccgccgatggctaccaccgcctgcaggaacagccgccagcgccgggccagctggggcagaccgtggacctgggcgaccgcaacgaaatgcggcatggctactacccgttcccgatcatcgcggcgcaggacgaaagggataccgcgctgtcctttgccaccgatccctttgccggtccgatggatctggtgggcagcttctccggcgacctgaaggtacggatcaacaagcgcgacttcgacttcaccgtcaccgtgtacgagctgctcgccgatggacgccggatgcagctgtcctattacatgggccgggccagccacgtgcgtgacccgagcacgcgccagttgctgcagcccggccaatggacccacctgcccttcgatcgcacgcgcatggtcgcccgccgcctggctgcaggcagccgcctgctggtgaaggtggatgtgctgaaggacgcgatgcaccaggtgaaccacggcaccgggcgcgatgtcagcgatgaatcggccgccgatgcgggcgccccgctgcaggtggattggcacagcgacagtgttctgacgattcccctgcaccccaccagcgacaccccccagtag

SEQ ID NO: 511590 - DNA, 1131 bp, Stenotrophomonas maltophilia
atgtccgagaacgaatccgccggcgaaaagaccgaacaacctaccgaaaaacgcctgcgcgacgcccgtgaacaaggcaacctgccgcgctcgcgcgaactcggcaccgccgccgtgttcggcgccggcgtgctggcggtgatggccatgagcggctcgatcggccgtggcgccagtgcctggatgaagcaggcgctcagcccggaacagagcctgcgacagaacccgaaggaactgttcggccacttcggcgacctgctgctgcagttcatgctggtgatcgcaccgctggtgctggtctgcctgctggccagcttcgtcgccccgttggtgatgggcggcctgcgctggtcgcagaaggcgttgctgcccgacatcaaccgcatgaacccgatgagcgggctcaagcgcctgtacggcccggaggccattgccgagttcaccaaatcgctgctgcgcgtggccttcgtcggcgtcgccgccggactggtggtctggaccggcttcgacaccctgcgcgggctgatccaccacccgctggagaccgccatcaccgatggcctgggcttcaccctgcgcctgctgctggccaccgccggcgcgatgctggtgctggccgccatcgatgcgccgtaccagcgctggaactggatgcgcaaactgaagatgacccgtgaagagctgcgccgggaaatgaaggagagcgagggcagccccgaggtgaagggccgcatccgccagctgcagcagcagatggccaaccgccggatgatggaagcggtacccaccgccgacgtggtggtggtcaaccccacccactacgcggtggccctgaagtacgaaggtggcgccatgaacgcccccaccgtggtcgccctgggcgtggacgaaaccgccctgcgcatccgtgaggtggccgacggcaacaaggtcgcgatcgtctccgccccgcctttggcacgcgccttgtatcgggaagggcaactcggaaaggaaatccccgtgagactgtattcggccgtcgcccaggtcctgtcctacgtctaccagctgcgcgcctggcgcactggcccgatgccggacgccccgcacatccaggtggatgaattcggcaaggggggccgcccgtga

SEQ ID NO: 511591 - DNA, 2109 bp, Stenotrophomonas maltophilia; identical to SEQ ID NO: 510578

SEQ ID NO: 511592 - DNA, 1683 bp, Stenotrophomonas maltophilia
gtgcagaccaccgaccacccgagttctccgaccgccaccccgccgtcttcgtcccgtgaccacagcatgaaaatcaaacgattcgtcgccgccgacatgcgctcggccatgaacctggtgcgcaaggaacatggtcctgacgccgtgatcctgtccaaccgccggatcgaggaaggcgtcgagatcgtcgccgcggccaactacgacgagagcgccgtgcagcgtgcactggaagcctcgcgccgtgatgtcgcaccgccgccggcacccaagcctcgcaccgctgctgacgcggtgatcgccgcggtcacccgccgccgcagcagcaccccggcgccggaaccggtcgccgccaccacctcggccgtggccgccctcgcccgtgcggccgttggggccaccggccgtaccctggacagcgccgacgagatcgtgccgacccgtggcagcactggcttcgccgccaccctggcgcgcgccgccgtcaacgaaccggcgctgcccgaacagagcttcgccccgttcgccgaggccatcgttgcaccggccgccaccgtgccggccaaccgcgcccgcttccagatcgacccgccgcgcgacatgcatcacgaaagcgtggccccggccgtgcagccgccgccgctgccgaccgctgccgtgaccgaagcgcagcccgggatcgccgccagcgaaccggcagcggccgaggccgccggcgaagccagcccggtccccatgctggccccggcaccgacgctgaccgtggttgcccaggacgacgccgaaatccgccagctgcgccaggaagtggccggcatgcgccaggtgatcgagcgcgagatgaaccgcttcaccgacgagcgcctgcgtggcagcccggtgcgcgccaccgcgctggacctgatggacgagtacggtttcgacgccgggctggcccgcgacgtggccatgcagatcccgctggagaccgaagcccatcgtggccgaggcctgatgctggggctgatctcgcgcaagctgccgatcgccccggtcgacccgctggaagaaggcggcgtgatcgccctggtcggcccgactggcgccggcaagaccaccaccatcgccaagctggcctcgcgcttcgccgagaaacacgcgccgcgtgacgtcgccctggtgaccaccgacaccacccgcatcggcgcccgcgagcagctgtacggctacggccgccagctcggcatcgcggtgcacgaagccaacagcggcaccgacctggaccagctgctggaacgcctgaaggactacaagctggtgctgatcgacaccgccgggctgggcccgcgcgaccgcgcgctggccgcgcagctgcagtggctgcgcgccgcccgccaggtacgcaccctgctggtgctgccggccaacaccagcttcggcgacatggacgaggtggtccgccgcttcggcgccgccaacctgcagggcctggtgttgagcaagctggacgagaccggccgcttcggcaacgccctgtcagtggccgtggaccacgccctgccgatcacctgggtgaccgatggccaggatgttccggaggacctgcaccgggccagtgcggccaatctcgtacttcgccttgaagatttgcgccgcgcggccgatatgccctgcaacccggagttgaaccatgccgtcgcgtga

SEQ ID NO: 511593 - DNA, 888 bp, Stenotrophomonas maltophilia
atgccgtcgcgtgagtacgccaagctgaccaagaccttcccgctgtcggccacccgcagcgagccgctcggccctgtgcgcaccattgccgtcactggcggcaagggcggcgtgggcaagacgaatgtgtccgccaacctggcggtggcactggccggcatgggcaagcgcacgctgctgctggacgccgacctgggcctggccaacatcgacgtgatcctggggctgaacccgaccttcacgctggccgacctggtcgccggccgctgctcgctggacgacgtcatcgtcgaaggcccgaacggcgtgctggtggtgccggccgcgtccggccgccggcacatggccgagctggccccggcagagcacgtcggcctggtcaacgtgttctccgagctggaacgcgaactggacatcatggtggtggacaccgccgcaggcatcaccgacggcgtgctgaccttctgccaggccgcgcaggacaccgtggtggtggtctgtgacgagccggcctcgatcaccgacgcctacgcgctgatcaaggtgctgtcgcgcgaacgcggcgtggaccgcatccaggtagtggccaacatggtgcgcgaccccaacgagggccgcgtgctgtacgaaaagctgacccgcgtctgcgagaaattcctcgccgatgtctcgctgaactacctgggctgcgtgccgcaggacgactggctgcgcctgtcggtgcagcgccagcagccggtggtgaaggcctacccgtccagcccggccgcgctggcgatcaccgagatcgcgcgtcgcaccgcacgctggcaggcgccgaccgaaccgcgtggcggcgtcgagttcttcctcgagcgcatcctcaagcagcgcggggtggccgcatga

SEQ ID NO: 511594 - DNA, 744 bp, Stenotrophomonas maltophilia; identical to SEQ ID NO: 510579

SEQ ID NO: 511595 - DNA, 381 bp, Stenotrophomonas maltophilia
atgcgcatcctgatcgtcgatgacttctcgaccatgcgtcggatcgtcaagaacctgctgggcgatctgggcttcaccaataccgccgaagccgaggacgggcatgccgcgctgtcgctgctgcagagccagccgttcgatttcgtggtcaccgactggaacatgccggtgatgaccggcatcgagctgctgaaggcgatccgtgccgatgccaagcttaagaccctgccagtgctgatggtcaccgccgaagccaagcgcgaacagatcatcgaagccgcccagaacggcgtgaacggctacatcatcaagccgttcactgcgcagacgctggaagagaagctcggcaagatcttcgaacgcctggcggccagcgcctga

SEQ ID NO: 511596 - DNA, 606 bp, Stenotrophomonas maltophilia
atggataccacggtcgacaagagcgccctcgccctgcgcctgcaggaagccctggacgcactcgagtccggtgacgaggccgcctggcggcagcgcatcgacggactggtcgcgctgcgtacgcagccgatgatgagcggcctctcgcggctggcccgcgagctggggcaggcactgggtgagctgccgaccgtgcccagcgaggccggtgagctggacgacgcctgcgcacgcctggaccacgtggtggcaatgaccgaacaggccacgcaccgcaccctggacctggccgaggaatgccgcagcctgaccgaacagctgcgtgctgaaggcctgcagccgggccaggacgcgcagctcgagcgcatccgccacaacctgaccgagatcgccctgacccagagctaccaggacctgaccgggcagatcatccgtcgcgtggtcggcatcgtccgccgcgtgcacgagggcttcggcgcactcggcctgccgccggaacagcatcgcaccgacccggaactggccgggccggcactgaagggactggaccgccacgcggtctcgcagaacgacgccgacgacctgttgtcggatctggggctgtaa

SEQ ID NO: 511597 - DNA, 741 bp, Stenotrophomonas maltophilia; identical to SEQ ID NO: 510581

SEQ ID NO: 511598 - DNA, 1017 bp, Stenotrophomonas maltophilia; identical to SEQ ID NO: 510582

SEQ ID NO: 511599 - DNA, 783 bp, Stenotrophomonas maltophilia; identical to SEQ ID NO: 510583

SEQ ID NO: 511600 - DNA, 1215 bp, Stenotrophomonas maltophilia; identical to SEQ ID NO: 510584

SEQ ID NO: 511601 - DNA, 309 bp, Stenotrophomonas maltophilia; identical to SEQ ID NO: 498726

SEQ ID NO: 511602 - DNA, 366 bp, Stenotrophomonas maltophilia
atgagcgcacgtatcttggtggtggacgattcggcgtcgatgcgccagatggtttccttcgccctcacctcggccggttttgccgtcgaagaagccgaagacggcgcggtcgcgctgggtcgcgccaagggccagcgcttcaacgcggtggtcaccgacgtcaacatgccgaacatggacggcatcgcgctgatccgcgaactgcgccagctgccggactacaagttcaccccgctgctgatgctgaccaccgaatcggccgccgacaagaagtccgaaggcaaggccgccggtgccaccggttggctggtcaagccgttcaatccggaacagctggtcgccaccgtgcagaaagtgctgggctga

SEQ ID NO: 511603 - DNA, 1992 bp, Stenotrophomonas maltophilia; identical to SEQ ID NO: 510586

SEQ ID NO: 511604 - DNA, 2250 bp, Stenotrophomonas maltophilia
atgaagtggttccaagatctgcccatcgcccgcaagctggccgtggggttcaccctcaccaccttgatgaccctgatcctcggcgccttcgcactgctgcgcctgagcgaagccaacgcgcagttgcgcgagatggctggcaacgacatcccctcggtccagcacctgggcgaggcgcgctcgcagctgggggaattccgcacctatgaacttgcacagctgagcatgctcgaccagccggagaaggtcgccgactacaacaagcgcatggacgacaccgccaaggccgtgcatgacgagctggccgcgtactcggcgctgccggcgctggccaaggagcgtgaactctatcgcgcggccagcgcacagctggaccgctacttcgccgccaacaaggcgatgcgcgacgccgtggccgccggtgatggcgctcgggcccagcagatctccgacgagcagtcgcgcccggcgcgtcgcgacctgttcgctgcgatgaaggcgctgggcacccacatcgccggccagatggacggcaagatcgccgacgccaacgccacccatcgcaacagcatgatcgccatcatcggctgcatcgtcctgctgtcccttgtggccgctgcgctggccatcgtcatctcacgtgcagtgaccggccccctgggcaaggccgtgaacgccatccaggccgtcgcacgcggcgacctcagcgtcaccacccagagcaccggcaaggacgaggctggccgcatgctggcggccaccgccgacatgaccgcgatgctgcgccgcttcagcgaacagacccagctgatggcacagatgcatgccggcccggacatcagccaccgtattccggaagacttcccgggcgtctacggccagctggccagcggcatcaacacggtgatcttcgaacacctcgatgcgatcgtcgatgccattgaagtgctcaaccagtacgccatcggcaacctcgccccggacgcccgccgcctgcccggcagccgcgcgatcctgcacgagtcgatggacgcggccaaggccagcctgctggccatcaacacgcagatccagcagctggcctcggccgccgccgccggcgacttcagccagcgcggtgatgcgcagcgtttcgatcacgatttccgcgtgatgatcgagcagctcaacagcatgatgcaggtggccgacggcaacctcggccagctctcgcagctgctgcagtcgatcgccgccggcgacctgaccgcacgcatggacggccagttcaacggcgtgttcgcgcgcatgcgtgacgacgccaacaccaccgtcgcacagctgacccagatcgtcggccagatccaggccagtgcctccagcatcaccttggccgctggcgagatcgcgtccggcaacagcgacctgtcgcgccgtaccgagcagcaggccgccaacctggaagagaccgccgcctcgatggaggaactgacctccaccgtgcgccagaacgccgagcacgcccgccaggccaaccagctcgccatcggcgcgcacggcgtcgcttcgcagggcggcgaggtggtcggccaggtggtcaccaccatgtcggccatcgaagcctcgtcgaagaagatcgccgagatcatcagcgtcatcgacggcatcgcgttccagaccaacatcctggcgctgaacgccgcagtggaagccgcgcgtgccggtgaacagggccgtggtttcgccgtggtcgccagcgaagtgcgtaccctcgcccagcgttcggctgcggcggccaaggagatcaagggcctgatcgatgattcggtcggcaaggtcgccgaaggctccagcctggtgcaccaggccggcagcaccatgggcgagatcgtcgcctcggtgcagcgcgtgaccgacatcatggccgagatctccgccgcttcgcaggaacagtcggccggcatcgagcaggtcaaccagaccgtggtgcagatggacgaaaccacgcagcagaatgccgcgctggtggaggaagcgactgctgcggcgcgcgccatggaagaccaggccgtgcagctgggcgaagccgtggcgcgcttccggctggcatcgcagggcgtcgccgctgcgccggcacgcttggcaaatgcaccgcagccacgtcaggtcgcggccgccctgcccgtcaccaaggcagcaccgacacggccgctgcgggcgtcggccgcccagccggcgctggctgccgagggtgattggcaggagttctga

SEQ ID NO: 511605 - DNA, 774 bp, Stenotrophomonas maltophilia
atgtccgacggccacgacactgaactgcatgatgtccacgcggccgacgccgcggacgaacgcttcctggtccgcaacccccgccagctgcggcagctgctgcgctcgctgatcgaccagcgatcactgatcaacgcgcatatcgacggccgggatcgttccttcccgaccgccctgcttgatctcgacgaggacgaagactacctgctgctcgacggcagcccgcaggaggcgtcgaaccgtgccgccgagcaggccgaccacctgctctgcttcgcccagcttgaacgtgtccttgtgcggttccgcctgcacgaactgcagcgcgtggacaacgacggccacgtcgccttccgcgccccgctgccggacgaactggtgcatctgcagcgccgtgagctgtaccggctggagaccccggtcaccgactcgccgcatctgctgctgccacccggcgaagcacgtgccgaagcgctgtcgatgcgggtggtggacatcagcggtggcggcctggccgtagtggttcccaacgactgcgccgtattcggcctgcagaagcgctacccggcgcagctgtcgctgcccgatggccccgacctggacatcgaactggtggtctgcaacctgctgccacagcgacagcccaatggcatcgaggtcaagcgcgtgggaatgcgctttgacagcctgccgcgcggcggcgacagcgccatccagcgctacatcttccgcatcgaccgccagcgcaaggcgcgccgcaacggcgagctctga

SEQ ID NO: 511606 - DNA, 492 bp, Stenotrophomonas maltophilia
atgaacgacaagaccagctccgccgccagcgccggtggcgaattcctcagcttcaccctcggcgccgagcactacggcgtggacatcctcaaggtgcaggagatccgtggctacgatgcggtcacccgcgtgccggacgccccggactacatcaagggggtgatcaacctgcgcggcaccatcgtgccggtcatcgacctgcgcttgaagctgcgcctggacaacgcccgctacgacgccttcaccgtgatgatcgtgctcaacgtcgaagaccgcgtggtcggcatcgtggtcgacagcgtgtcggacgtgatcccgctgtcggccgagcagatccgcccgaccccggagttcggcgctgcagtcgacacccgcttcatctccggcatcggcacccacgacgaccgcatgctgatcctgctggacatcgagaccctgctcgacagcgccgacatgggccaggcctccctcgccgaagacgctgccgcctga

SEQ ID NO: 511607 - DNA, 384 bp, Stenotrophomonas maltophilia; identical to SEQ ID NO: 499341

SEQ ID NO: 511608 - DNA, 921 bp, Stenotrophomonas maltophilia
atgctcaagctcagcctcgatgccctgcagatcctgaatgccatcgaccgccgcggctcgtttgccggcgccggcaaggccctgcacaaagtgccctcgaccatctcctacaccgtggccaagctggaggaggacctgggtgttcagctgttcgaccgggtcggcccgcgcgccgaaccgaccgaggccggccgcgcgctgctggacgagggccggcacctgctgcgcgccgcccgcgagttggaactgcgggtgcgccgggtggcgtcgggctgggagaccgaactgacgctggcggtggattcggtgttcccgacctggctgctcggcccggatatcgccgcgtttcgtgaggccgaggcaccgacccggctgcgattgatcggcgaggccctgtccggcacctgggaggccctgctggaccgccgtgccgatctgctggtcggcgcgccgggtgagggccccagtggcggtggctatgtggtcgagccgttgggcacggtggagttcgtgttcgcggtcgcccccgatcatccgttggccgcagtgccgggcgtgctcggacgcgagcagctggtcgagcactgcgcgatcgcggtctctgattccgcgcgcaggttgctgccgcgcacggtgggcctgttgatggggcaggagatgctgacggtgccggacatggccagcaaattgaagctgcagtgcgaaggcgtgggcttcggtttcctgcccgaaccgtgtgcgcgcgctgcggtggcgcgtgggcagctggtgatccgtgaggtggaggagcacaagccggaagagaccttctggctggcctggcgcaccggcgaggatggcgccgcactgcgctggtggcgcgaacgcctgcgcaggccggagctgctgccgcagtggtggcaggcaatggccagggggtag

SEQ ID NO: 511609 - DNA, 633 bp, Stenotrophomonas maltophilia
atggcctccagcgcccacaggccgctggcgttgcaggcaaaagcggccttcacactgcccagttcagccagcgccaacggccgcgccaactgcgtatcgggccaatgccgcttcagcagcgcttcggccgtaccgcgcagggccggcgcctgcggccagagcagccgttcaccatcgtgcacggccaggttccaggtgctgccttcactcacgtcgccatcagcggtcacgaacagcacatcgtcgaatccttcggccatcgccgcgcggcgctcggcgaacaggccaaacgtgcccacgtgcttgatccgcggcatttcgcgctgccagagcacactgcgcacgcgcttgggcgcgaccagggccaccggcgctgatactgccaccagcacgtccaccggcaccgccgccagcgggttgcggaaatcgaaccggcgcgagtacaccgtcacccgcagcgaggcatcggccaggccggcctgctgcagggcctgtgccatccaggtctgtacctgcaccgtatccagctcgctgccgaacagtgcacgcgtcgcctgtgacagccgcgccagatgcaggtccagtccctgcaccgcgtggtcgcgcacctgcagcgaggtgaaatggccgtag

SEQ ID NO: 511610 - DNA, 564 bp, Stenotrophomonas maltophilia
atgaaacgcgcactcgtgattgccctgctggcaggcgccctggtggtgagcggcgccaacgctgcagcgcgcaacgtaaccggtacggacgcgccgcgtgcgttgcaggccaatggcccggtcagcgtgaaatgggaggatccggccacgttcaccgagatccgccagagcaccaaccgcttcgaggccgaacgcggtgactgggtacagcagctggcccgctacctgcagaccaccgctgccaagccgctgcagcctgggcagaccctcgatgtcactctggtggacatcaagcgtgccggtgactacgagccttggcgcggcccgcgcgcgcgcgacatccgcgtgatgcgtgatatctacccgccccgcatcaccctgcagtacacgttgaaggacgccgacggccgtattgtgagcgaaggcgacgcccgcctgagcgactccggctacctgcagggcagtgggttgctgaccaacagcgatccgctgcgctacgagaagcgcctgattgatgactgggtgaagcgccagctcgccagccaagccaccgctgcgcgctag

SEQ ID NO: 511611 - DNA, 681 bp, Stenotrophomonas maltophilia
atgaacgactttaacaaggcatgctcctgcccgagcggtgacggctcgctgcgccacccgtgtcccgcccatccctccccgggtggtcaggatgcgccggaaatcgagcagctgcgggcgctcgtttccagcatcctcagtaccgtttcgctgggacaccagaaaggcgcttacgcctatgcaggcgaagatttcgggcgctaccttgcagaagccgcgcgcgattgccgcacgatcctgcgcgccctttccgacatcgccgcccgccagccggctcgcatctacggatgctgcgcccagccggagggtgagctgcacaccgccgaatgcgcgaacatgcggcacctcgccgcccgccggacggtgaatggactctcatgggctgactactggattgagcgcgggcaacccaacgtcgcccacgacttcgacgcattttctcgcgctgatgcttgggcgctccagcgcttcccagacgccgcccagccggtgggccagctcacggatgccgagatcgacgcccgcctcaataccctgtaccgcgacatggtggccagcggccagcacaacggcggcatgtcgggcgttgcatgggaccgggccgtctatcgcatggcttcaagccagtcctccggaaattccggagaactcgccgttgatagccagggggtgggcaaatga

SEQ ID NO: 511612 - DNA, 672 bp, Stenotrophomonas maltophilia
atgcgtgagcgaccgatcctgttcaacggtgccatggtgcgcgccatcctggccggtcggaagacccagacccgtcgcctgtgcaagccagcagaggtgcatggcctctcgttcgccatcgagatcccggacccgaaggaacacggacaggtctacaacggatcgacgttcggtgatgaagaaggcggcgtgcgcttctccaatccattcggccagcgtggcgaccggctgtgggtacgggagacctggcggcctcagaccgtgcacagctgcgcgatggacacctgtgactgcgacagcgttggcgtgaccttcgccgccgacggcgagtgggtgctccacacctggtcacaaaatcccgtgccggacagctggtacctgcccgacgctgcagcgcgcgggaacctgccatcgatccacatgccccgctgggcctgccgcctggtgctggagatcaccgacgtgcgcgtggagcggctgcaggcgatcagtccagccgatgcccttgccgagggcgccatggagtgggccggtgagcaggatacccccattcgcgacctggactcgggcgacgaacgtgtcgccttccgcgcgctgtgggacagcaccggcggcgactggaacagcaacccctgggtgtgggtcatcaccttcaagaggatcaaaccatga

SEQ ID NO: 511613 - DNA, 681 bp, Stenotrophomonas maltophilia
atgagctgttggacattggccatcgattggccggtagtgacgcagggattcggtgcgctcgcgcagggagccggtgcgctcgtcctggcctgggtaggactggctggcctttcgtcgtggcggaagcagctgaagggaacgcgcagccaggcgctggctgaagaggccctcagccttgtgtaccgcgtcgccgacggcattcgccacatgcgtcagccctgggcatgggccggagaaatgcggaaggtcgaaaggtcggaaggcgagagtgacgaggatttcgatcagcgcaaagagtacggagtggtggaggtgcggtaccaagcgcacgccgacgcagccgcacaattggcagctatcaggttcaggctacaggcagtactaggcgaaggcgcaaagagctcgattgacgaggtcttggagctactcgccaaggtccggagtgaggccggcaacgcagcgcgtcacaagcgcgtgatgttgcaccaggcggaccttattcggaggtttccgagcgacgcaacgagcgatgcatacgaggacgccaaacgccgtttgactgaatcagaacgatggatccaagagcagctgcctggtgaagatccagccgaagaggtcctttcgagggcagtcaatcgcgttgaacgcgcacttcgggacgcggcctcgttaaagccatag

SEQ ID NO: 511614 - DNA, 789 bp, Stenotrophomonas maltophilia
atggatgagccgtcttccctggtatcaaagtacagccctgaggcagccgagcgcttgagcgcttcagcacgagcgttgccgtcaagggttgcgaatctgttgctcgagctcatgaagctctcccagagcgcccggccagaggcgcgggaccacctgagcttcggggtgggtaggcgcctgcacactatgctcgaggccgcgactgaagtcttcgcgttaatccctccgtcgaacaccagggtgacacgcgaggttctgaagcgggcaaccatcaacctccaagccttcctgatccacacggtcgggatcatggacaacatggcttgggcatacctgcactggcacgcaatagaggacaccgtcaagcggaacgacgtcgatctttttaagaaggcaacgcaggagaagctacctatgccattggtcgactggctgacggctgagcacatccttgattggcgagacaactacctcaagccctaccgcgacgcattggctcaccgcatccccccgtacatacctgagacctactccccacaagaggctgacgagttacagaggcttgagagattgcagttagaggctgaaaaatcccagaactggggggaggcagctaggttccgggatctggtcgatgcaattccagggcacggctttgttttcgtgtactcatatgcaccggaacaaggaccggtcctacttcatcagcagatattggccgacttcgagaccatcatcgatgtgtcgaagatattcatcagcacactgtcgacgccccctcgcctatga

SEQ ID NO: 511615 - DNA, 393 bp, Stenotrophomonas maltophilia
atgacagcagccccgtccgctccccgggcgatcgtggcggcgcgcctgcgccaagcccgcgagctgaggggattgagccaacgggaggttggagtgcgtatggggttggacaaagacactgcatccgcccgcatctcccgctacgagtcgggatcgatgtcgatcagtctggaagcccttttcaagctggccgaagcactggaagtgccaccggcttacttggtcgcaacgacgccaagcatgtccgaagccattctcgccctgagcatggagagcgtctcccagcagtcccgcttggcggacatgttgaacgcgctcgtcaagctgccgactcaagagcgcgaagcattcgccaaactgcttgaaggcaagtccacagccgcggccgagtaa

SEQ ID NO: 511616 - DNA, 300 bp, Stenotrophomonas maltophilia
atgacgcaatccattcaaccgtattccgaagagggctttgccgcgttccgcgaacaggcccagcaggcgcaggaagcccttgtcgcaatgcgcaacgcgctggaaaacttggccaaggaggaaggagtctctcctgaggtatcgctggaaagggagatcccagatggcccgttcttccctcaaggccaggccggtgtggaccagctgaagctcattcccgggcacgagcccctgatggctagcacttccacatcgctgtctggttggatggaatggatcaaatctcaggtgattggatga

SEQ ID NO: 511617 - DNA, 186 bp, Stenotrophomonas maltophilia
atgagcttggaaaagatttgcctggccgcagcactgctggccctcccggccgccgcgccagtcctcgccaagcagggcgaggtgtgctcatcgaaaccatcagccacaaacaacacgctctccgacagcatggtgtctgaatgcaagacggcgggcgccgccaccattccgaagccctacagctaa

SEQ ID NO: 511618 - DNA, 903 bp, Stenotrophomonas maltophilia
atgacggacgatctgaacaaggcccgcgagctagcggcgatgcctgcgcgcaagaggcctgtgctgctcatcgctgatcggaaggcattggcagaaatgacagccagggcagaaattcatccttgggtcagcggatatctggggctctaccggcagaaggcatggtggaacccgcaggcttgtctgattgaggctggcgaggacctatacgcggaaaagagcgcgtcgcttcgcgaagtcgatacccctgacgatcagctgattgagaggttgggaaaggctctgaagttcaccatccctctgatccgactgactccagcaatcgccgacgatgtgttcacctttgattatttgaagcccatcgagaacgggaagttctatgtgctccaccccgttcggcatagccactacgtgttagcggctgattacccccagcgggttcttgtcgagactcattcgacgttcttgaagctcgctgctgccttgggggctaagagtgtgaagctcacttcggtcactgcggaggagtcgaaaaaaggtgggggatttaaagcacccattgaggagattaaggctgtattggggctaaaggcttccgtagacgagtcggtcagtgccacgtattcgcacgagaagacctttgataagcagtcgcaagcgcctcacgtccctgaagatttgaaacaatgggtcgagagcgatacaaaccttgaaacgatggcgcacctccgcctgaagaacggtgtcaccaaggaccacgtgagcatctcggtcgcgagaaaagcaggtgtcgatgctgagttgctcgcaaaggtgggagacaaagaggccagcgcgaacgcgacgtatcatgctgcgtcgacctctacttggcatttcgcagtcgaataccatcccctctag

SEQ ID NO: 511619 - DNA, 987 bp, Stenotrophomonas maltophilia
atggatctgaaaccaaccaatggaacaggggcaatgattattgacgatgtgagcagtgcaggtaagcaggccgaaggtgatctgttcaaggcttttgatgagctgggcctcaatccatccgatgagcaagttcagcagttgaaggctgccgtcagcgggatcgttaacgttaagctcaaggttggggtctttgggcaaaccggtatggggaagtcgtccctttgcaatgcgctatttggtgccgaaatctccaaggttggtcacggcgtatccatgacgcgccagcagacggaagcgcagatcaacctgggcaatgggggcggcataacccttgtggactttcccggtttgggggaggacgaggagcgcgacgaggaatacaaggcgctctacaagaaggagatgccaaagatggatctcattctctggatgctggctgtcaatgatcggaagaacaaagacgacatccttgcacatgaggagctggtcaggccgattgccaaggaaaacgccattcccgtgatttttgttgccaacaaggctgatgcggcgcagccctcgggtgactggaacttggaaaacaaccgccccagtctcaagcaacaaaagtcaatcgacgctgcggtcctgggctctactgacgagaacggcgtcttgacaaagggctttgtgcaaaagttctccgtcgagcattccgatatctgtgttgtttcggtcgataagggctacgggctggtgcgtctcgtagacaccattgtgaggtctcttcctgccgacaaaaagtttggtgtggtccgagaggcaaagaaagaaacggtatccgagcaggcgaagactgaagctaaggaagggctcttcgataccatcaagcgcgaggtgatgcgtgttgtcaaggaggccgcaccggctcttgcggccgcagctgccaagaagttgattgagatcggtttgggctggttgcggaagaagcccagcttccggatctaa

SEQ ID NO: 511620 - DNA, 2646 bp, Stenotrophomonas maltophilia
atggctctttccctcaaggtgtatcagcaacgggccttgtccagcctggcccagttcctcgaagacgcccggctgaccggcccggcatccgcgtttgagaagaacgcggatgccggtctggtcacccaatacaaacccatgcctcatctcgaggcctcgccctacgtgtgcctacgcattccgacgggcggcggtaaaacggtcatgggcgcgcacatcatccaggcggcgggcgacgcctacctcgagcgcgagttcccgctggtcatgtggatggtccccaccacccagatcaagacccagacgctggaagccttcaagaatccccgacacccctaccgccaagaactggacgaggcgttcgggggcaaggtcgctgtgttcgatgtggaggacttcacccacatccgccccgctgacttgggcaccaaggtgtgcgtggtcatttcgaccatggcggccctgcgcgtggagaaccaggaaggtcgcaaggtttacgagcaccacgaagatctggagcctcacttcgccggcagcgtgtccgacttgccctacttggagcagaacaaggcgggaaaggccatcgcgtccttcgccaatctgctgaaacttcacggcccgttggtcatcaccgacgaagcccacaatgccaacacgcccctgtcctatcaggtctacgagcggcttggtgccaaggtcgtggtggagctcacggccacgccggaagccagcaaaagcaatgtgttggtgagcgtcagcgcgttcgagctcaaagttgccaatatgattaagttcccagtcgtgctcaaggagcacgtcgggcaatgggaagtcgcagtgggtagcgccgtggctcgccgtaacgagttgggcaagaccgcgctgggcgagccggactatatccgtcccatcctgctgattcaggctgagaacgccaagggcactgccacggtcgaggaggtcaagaagcacctcatcgacaacgagaaggtgcccgagaaggcgattgccatcgccacgggcgatcagcgcgagatcgacggggtggacctgttcgccaaggactgccccatcgaggtcatcattaccaagcaagcgctcaaggaagggtgggattgctcctttgcctacgtcttctgctcggtggcccaggtcaagagcgacaaggacatccagcagctgctggggcgcgttctgcgcatgccgtatgccacccgccgcaagcaggaggccatgaacaaggcctacgcgcacgtcaccactgcggcgttcaatctggctgccgcagagctcaccaagtcgctcatcgacatcgggttcaaccctctggaggccgtgggggcggtgctgccggatcccacacctgggcccggcttggacttgcaaggcggcaaggtcaatccggtgcccgtgacgcccagggccaccattgctgtgagcaaacagcctgatcttaccggcatccctgctcgggaccaggccagcgttgtattcactccgaacgaagagggtaaggggggcttggtagagatcacgggcgaggttgacgattccacggtggaggccatcaccaaggttgtgccaaccaaggagcgcgaggaggcggtcgccaccatcgagcggcaccagatcgcatccaaggccgtcaaggcacccagccagaacggcgcagtgttcagcgtgccgcggctgggggtcatggagcagggcgagctggagttcgtggagagcggtgccacgccgccgggcttcacgtgggacttgctggcctatccccctgacttgaccagcctcaagttcaacgcagacagcaaaacctttgaagtcgatttggtggacgagaaggtcagctatacgccgattgatgacgacgtgaacacttatttgccaggcttcgccaaggaccgcacccaagcggacttggtgggctggctggaccaaaagatccgtgatccgggggtcaagcagcccgtgctgcgggagtggttgcgccggtccatcagcgggctgtccgaagatcggggcttctcgctatcgcaactgctcaatggccagttcgtgctccgacggaagctcggagagcagcttcagatcgccaaggcggaggcgcttaaggatggcttccagcaggccctgtttggtgccgacgctgagatcgtggtcagcgacgagcccgatgccatgttcacctatccggcggacatgacccagtatccggcgcatgcctactaccaaggcggcacgtatcgcttccgcaagcactactaccccctcgtgggcgatcttcaatggaagaccgccgggggcaaggtgggtgaggagttcctctgcgcccaagccatcgaccaactggatgaggttgagttttgggtccgaaacttggtggacaagagccagttctggatgccgacgtccaagcagcggacctacccggacttcgtagcaaagctcaaggacggtcgcctcctggtcgtcgaatacaagggcggcgaccgttacacggcggactctgagaaagagaaacgcatgatcggtgagctgtgggcctccaaaagcaagggcaggggggtctacctcatggcccagctgacggacgagaagggcaacagcgtcaccgagcaacttaaagcagcgatctctaaatga

SEQ ID NO: 511621 - DNA, 288 bp, Stenotrophomonas maltophilia
atggtgagcgcgattctgttgctgacgctgctcggcctcatggtcctggtcccgctctggacgttcaagcgctttgccgacgccaaggcagcttggcaacgggtgaggggcggtgagcgagacgctcgcacgcacggccgcttcgtgatccatggcggactgtttggggtagggatggtggtcacggcgttcatggcggccattgggacagtgtcaggctggcctgtggtgtttctggttcttgcctgctcgatcctctgggcagctaagcggggtggggcgcgatga

SEQ ID NO: 511622 - DNA, 246 bp, Stenotrophomonas maltophilia
atgccatcgcccaaccacatccccgacgacgcttttcccgaagaggccattggcccggccgatctggagagcccagagacgccggaaggggacccgcaatacttgctcgtgcagagcgggtttggtctccatgtccgtctgggaaaagacggcgaccagggattgcgcagcgaggatgaaatcgcccagctggtgcggcgagcgttgtatcaccgcaagagtctgacccttcatatcgagttctaa

SEQ ID NO: 511623 - DNA, 753 bp, Stenotrophomonas maltophilia
atgagtaagcgcactttgaagaaggcaaagccgaccgatcctcgcaatgagtcttacaagcggttgctgaaggccatccaagccatccccggggattcgccccgggagcagatgcgcaagttcaccgcgcttgcgctgaaggttctcgtgctcaagcatgcggagctggccggctggcgaggtgggcctttggctccctggtgcgacttgacactgcttgggactgatgtggatgggacagaggattggtgcctcgaagcgggacaggcctacggcggcgcagtggaaaccttcgagccgttcgaatgcatcctgggtcagctctttagcgagttcgtgggtgcggggaagaaggacgacgctcaatatttcaccccttgggactatgcgagggcgctgactgcctttgctccaacgcctcaaaaagacgagtggtccatgggtgaccccacttgtggagccggcacgctgttgcttgcgaagcttcacgaactggctaggaaggatccgaaggcccttctggggcttaccgtgaaagcgaacgaccgcgatccgttgtgctcggcgatgacctccctgcaactgctttcaaaccaggtgatttggaggatgccaatcgggagcgtggtggtcgagtgcaaagacatcatcacccaatacctggaaacgcgggtggtgttttggtctctcacgcgagatcggttcatcgccatgggcgaagaaatccgccttgagaaagcccgccgcggatga

SEQ ID NO: 511624 - DNA, 537 bp, Stenotrophomonas maltophilia
atggaacagcaaactttcaccttccacatcaccgcagcgcttgacatcgtcgctctgttgccaatgcctggacgaagccacaagggtgccgagcgcgaggtgtgtcggaagtcagcaaaaaagttggcagaggcgttggtgacgtttttcagcatcaatcgcattgaaaagtcgatttcctgctcagttgatggagggattgctgaagtgctgccgcgagtcagttttcctcaccatcttgcgggcctcatggatttccccgagtcctatcctgccgatactaaagagggtttcgccgagctttgcggcgatggattggcgacaaggagctatgccatccaggcggcgacgcaggaggaagccctgtcgcgattccgttccttcagtgccgagcagctcaatgctattccttggcaagtgtggggtgtggccttctacgacgcaatggagttcaccgtgcaggggcagttgtttgccctgaatgtgagcgaagagaagatcgaaatgatcgctgatcacaccgagcttgagctgtag

SEQ ID NO: 511625 - DNA, 249 bp, Stenotrophomonas maltophilia
atgcaaccgctcatcctctcgctcgacccctcgctctctaaccagttctctaacgtaaccccgcagatcctcgcggacgccttggccgacgtcctgccccacgcgttgggcctgcttgccgccaacaccagcacgtcggtcattgtccccaaccgcgacctgcgcggcctccaccccgaccaggtgctcaccttgcagctggcaacgctggacagctttctcgagatggccggcgccgccaacggctaa

SEQ ID NO: 511626 - DNA, 972 bp, Stenotrophomonas maltophilia
atgtcgtttgattcaaaagcaaagaccgaagcggcgctgatccgtcgctacgctgaccgctacgggcacgtggacgacacgttcgcgggcgggtggggggtagcctggggaaagttgctgcgcgctctcgacaaagaactggccgatgagaaaaagcaacgccaggaactggcggctggcaagcgggaggcggtgtggacggacacatggaccgccgccgaagccgcgggcctactgaacatgacttacgaagccttcaacgcctgggctcgcaaggtgggtgtggtggtggataaaccagggcaggcgcgcacccatgctgccatatcgttggtggaccttatcgacgccgtcgaggaccagaaaaggcggccgacagagcgcccgtggcgggacgcgagggagccaggccatcccttgggggccacccgaacgctgcccgaggggctggcgacgtttcgcgagcaacgcaatggcgagctcctcttgaccattggggtcgatgagcgaggcgagcgcgtggtggcgtcggtgaggccaatcgaaacacggggcgcgaaggaccatgttcgtatgttcttccgaagcaagaacatcgctgaggttgatcaacacaactacttcaaactcgaggtcgagaaatgcggactggccgaagcgttcggcatgccttgggcacagcccgcactgaaagacgcgttgctccaatgccacaaaggctggctgggcggcgttgctgacttcatggcgtgggaggaatccctcgccgtcaaggacgcgtcggaagcccggtccgcattcgatgctgaagaggacccgcaggcttcggcagccctggcgctcaaggcgcgcgaagaagagcgactgaaggatgccaggactgcgctcatggcgcgcaacgaagcaagggagatgctgttgcacttggcgcttccggcccccgccccgagcaaaaagggaacgcccttctag

SEQ ID NO: 511627 - DNA, 3051 bp, Stenotrophomonas maltophilia
atgatcaacaccacactgctgaagcgaaacgccgggggaaccaagggtggttctgcgtcgatttactacctcttggcccaggaaaagctctctgaagaagccgagcaggcaagcatggccgttggctactacagccgctccgcgccgagcaaagaggcgcaatcgaagttctacggcggcttggcccagcacctgggtctggcaggcgtccgcgccacggaagagctgatgattccgctgacggatggatttgaccccaagaccggtcgagcgctatgccacggagccggggatcgcggacaggtcaaagtccgctttgataagaccggcaaggccccgttgcgcgacaaagacggcaaggtggtcacgtatctggccggtgggcatcgcatcggctttgacctgacaatcagcgcaccgctggatatctccgtggcgtttgcactggcgtccgatccggcagagcaagaggccattcatgccgcgcaccgcaacgcggtccagcgggcgatggcagccttcgaagccatgtccgaaacccggcgcaacaaggccgggaaagacgtcattggggtggatgggttgatctggagcagccatcaccactacgcctcacgagccgacgaagcgaccggggagatgggcccgaacctccacacccacaacctgctctacaacctttccttgggcaacgacggcaaagaggccagcctctctgctgaagaaatctaccgctaccgcaaagccatggatgaggtctacaagaccgagctctaccagggcatgaacgcgctgggctatggggtggaccgcatccgtgaactggacgacgacggccaggaaaccgggcgcgtctacgcgcggatcgcgggcctggacgaggaggtgacggatcgctatggcaaccgccgcaaggaaatcctcgcttacgcggccaagcacaacgtgtctaatcagcaggccacgttggccacgcgcaaagacaaggacgagccgccttaccaggagctcatcgcgcactggcaggacacgctgaaaggcttcgacgtatccacggaaagcctgaagcaggccaagggcaacgcgcacgaaatggagcaaaaatccccggcagaactgctggagcggctccatgagaccgacgccatcttctgcgaccacaacctcttggaggtcttgggccaggaatacgccggcagcgtgaccgtgccagagctctacggcttggttgaagcgttcaagaaggagcacggcctggtgctggtcaaccccatgcgcctgcacgacgacgacaagggcgactcgctggcaaggcggcatacccaggagcgctactgcgccccgtggatactccagatcgagcaggaggtggtggccttcgcgattgaccgagccaaggaaacccatcaccacgtgccccaggccgacgtggaccgggtggtgaaagactacgagaaggccaagggctttcaactctcccaagagcagcgccacgcgctggaccacatcacccagggcagcgggggcgtggtcaatctttccgggctcgccggaaccggcaaaacgaccattagtgaatgttttaaggccgctttccaaacccaaggattcgagttgctgggtgtctgcgtttccaacgcagcagcagagaagctggaggcggaaagcggcatgtccagcgtgagcatggcgcagatgctccatgatctggacgaaggcaagatgcagttccgcaagacggacgtcattgtcgtggacgaggccgggatggtggacgctcgcaacacccacaagcttttcagctacgccgccaaggctggggcgaaggtcatcatgcagggggacgtggagcagcttcagcccatcggggctgggtccggctttcagttgagcaagcaagcggtgggcgacgccaaactcacggagatccgacgccagggcaaacaggaagaccgagacaccgcgctgtcgttctacgcaaccgatgaaaacggccaggtcatcgacctgaagaaggccagccgttcccgggcgcagaccctcgacaagggcaacgaaatcaaggcccggttgctcgacaccatccgcgaaacggccacggagaaggaagcccgcgagcgcttgctgcacgaatacttcgaagacccaaccccgatgcaggagaagttggtcatcgcccacacccgtgcagacgtggccgcgctcaatgcgggcatccgggctgggttgaaagaacggggagagctgggccaggacgaagtggtgatcgaggcccgggacaaggggcgcaagttcgacttggcgttgtccaaaggcgatcagatcgtcttcaccgcgaagaacaaggacctgggggtcatcaatggcacccaggccgtggtggacaacatcaagccctcaagggcgggcggctacgacatcagcgtgtccattcgctcggagaccaagggcgacgggcggcggctgacgttcaacagttttgagatgaagagttttcagcattcctacgcagggacagtgcataagagccaaggccagggcaagcgggaggtctaccacctggcgaacctgggcatgctcgacgcccacagcgccctggtggcctttacccgtctcacgaagggttcctaccgcatgtatgcgacgtccgatgacgtggagcggttgaacgagcggctcgggttggagcgcttgaaggagaccgtgctggacgctggcttggtcaaggacaccaaagccgcgcagcgcagcggggccaaggtgacgttggacgacttgctgaaaaagcaggtcggggaagtagagcagaaggcatccaaccgcccggggcagcagcgcagcggcgcggaggtcaagttggatgccctgctgaaggagcaccaggagcagaagcaagcgaagctggccgtggcgaagatgagcgaatccgagcgcaaggcccgccaactgctggaggtgttcgagctggcacgaggacagaaggccaagcccgtgttgccggtcgcacagcccgtccagcgcgagcgggtgcgccagggcatggatcggtga

SEQ ID NO: 511628 - DNA, 1692 bp, Stenotrophomonas maltophilia
atgtcgccgcttcgcatttcgatcttaacggctttgatgggggcctcgttgtttgcctccccatcgtttgctcaaaccgccacgggaaccggggccacggcttcggaacccaactcgacggcgaccggggaatacgcccaagcctcagccccgaatgccactgcaacgggggcctatgccaatgcctccgggaacggggccatcgccacgggcgttcaagccaacgcctccgcagacaacgcggtggcgtcgggcacgaatgcccaagcgtccggtgcgaactccattgcgacgggccaggccgcgaacgccgcggcggtgaacgccgttgcggtaggcacgctgagctacgcggggggcgaagctgccatgaccttgggggcacaatccgcggctaccggagcccattccttggcggttggtgtccagtcacaagccagtggggatctttccatgtcctttggctacttcagccgttcgcggggcaatgcatcgattgctcaaggcaccttggcagaggcaaacgctgaccatgcagtcgccataggcagttctgccgttgccgatgcatttcagtcacttgcactaggcgttggggctgaggcccgagcgcaggattgcgtcgctttgggttctcatagccgttgctgggccagcgacgaagtcagcgtgggatccacctttgaggacggaggccagagcacccgccgaatcactaacgttcgggccggcacctcagacaccgacgtcgcaaacctcggacaggtccgtcaggcggcccaagcgctgggcggtggtgccacgttcgttaacggcaactttgtcgcgcccatttatcagttccgcagcggtgccacgcatcaaactgtgggagccgctttggacgacctggatggacgggtgactttccttgaacaaaacccaggcagcggttccggcacgcccggcccgcgcggcgcagatgggttaagcgcctacgaggtggcgttggccaacggcttccaaggcaatgaacaagattggctggcaagcctgaaaggggagccaggggtccaaggacctgccggcacggatggggtggacggagccaccgggaccggctcgggctcgattgcaaaggcgggcaagaacgtcgaagtcaccacgaacgcggacggaagccaaaccgttgcagtcagcgacaacgtgcaactgtcggacgctgggtcgctgagcgtcggctcgaccgcggtcaatgcccaaggcgtctccattcaaggtggtccctcggttacgactgcgggagtcaatgccggcaatcaacgcgtgaccaacgttgctccggggcgcatcgagcgcgactccacggatgccgtgaacggtgggcaggtctacgaaatgcagcaggtgtgggatgaccgctggacggaaaccgaccgccgcttccgtcaccaagatcgccgaatcaatggcctgggggcgcagatgggcgcgatgacccagatggcgacggctgctgcgcagaacggcggggctgccgtcggccaggtgaacctgaatgtcggcgttggcttctcgggtggcagtgctgcaatggccgtgggctggggagcacgagtcagcgagaaggtcagcgtctcggcgggcctgtccttcggctctggcaacaagccggtggccgggttcggcctgagcatcaacctggggcgttaa

SEQ ID NO: 511629 - DNA, 384 bp, Stenotrophomonas maltophilia
atgctggatatcgtactggtcgaagacgatgcccgcctgggaacgatggtcagcgactacctgcaacggcatggctaccaggtggcccacgagcgcagcggcgagcgcgccgtggcccggatcctggcggagaagccggccctggtgctgctcgatgtgggcctgcccgaccaggatggtttcgaagtgtgtcggcagatccggccccactatgacggcatcatctgcgtgctgaccgcccgtaccgacaacatcgaccaggtgctgggcctggaactgggggccgacgattacatcggcaaacccaaaacccatcgaaccgcgggtgctgctggcccgcctgcgcgcccacctgcgccgccaccgccgggtcgaaccgcgtga

SEQ ID NO: 511630 - DNA, 471 bp, Stenotrophomonas maltophilia
atgaggccgaccatcttggcattggatctggaaggaacgctgatctccaacgccataagccagattcccaggcctggactctttcagtttctggagaccgtaagttctcagtttgaagagctcgtcatgtttacgaccgtgccggagcctcttacgcgcaaaatcgctgggctcttggttcgcgagggcagcgcgccagagtggttcactcaagtccggtacgtccaatggtcgggtaagaccaaggatctttcgtacgtctgccctcaacttggagctgctcttctcttagacgaccatggcccttacgtgcaccccggacaggagcagttctgggttgagatcccgcagtttggctcgccgtactctgacgatgacaagggactgaagttcgccgctgagcagttgcttgaaaggctcttcactctcgggaacccaatgcttggcgaaggtcgaccagggcatctgtag

SEQ ID NO: 511631 - DNA, 843 bp, Stenotrophomonas maltophilia
gtgcaacttctgcagttctgggtccctagaacacccttgcttgaagagacactaatcgacactataaagcttccactattcttccaatcattcgatgtagaggatgagaaggcgactcttaaagttctcgagcaactgtctcgctacgaaaaaattgatgatcttccggagcccgttcttaggcaggtactagcgaacaagattctcagagccagaatcacgcaggtcgaagcctccaatgacgatgaagcattggcgctcgtacgggatgagctgatatcgatccataacgagcaggctgaaagtttggagaagacaaggggtgagcttgtcaacgtatctgcaaagcttcaggatacgcaggcctcttacgatgatgccaagggtaagttgctagatagtgaatcaaagtatcaaagtgaagctgagaaggctcaggctttaagcgatgctcttaccgggcagacagagctgcgtgaaatcgcggagctaaagttcgcgaaagccaaatacttaatctacttcgtgatagtccccacgttcttcgctattttgctttccatcggatcctatcttgccgccgtctacggttttcctggtcgcgtgtccggctggaaaatgtatatgcttctggttgttcccgcatttctgattccttacgccgcagcatggatgatggtgagtaggtacttggaagcaaacaagaacttgaccgactggtggccgtcgaagttgggtgtgtttgggtcaaaggcgtggaagtggatcctagggctggttgcggcgtcgatagccactagctacgtagaggttataggacgcttgataacgggcgaatcctga

SEQ ID NO: 511632 - DNA, 1080 bp, Stenotrophomonas maltophilia
atgcccaagcagcacgctggtccaggattccacgcggaacagctcgccggggtcctgccacgcatgtgcacgctcgcgccacgcctgcagccgctgctgcagcgattcgggcacgcgcatctcgcgacaggccttccacatcggttcgctgcgctgcgtggcgtggtagtgcaggatgatgaagtcgcgcacgtgctccatttcctgccggctgacatcgttgtacagctgcaccagcgacgcactgatgccgtcgaacgggaacagctggatcaggcgcactaccgcgctgatcgtcagatggatgctggtcgactccagcggttcgatgaagccgctggccagcccgagcgacaccacgttcctgttccaggccttcagccggcgcccgctgcggaacggcaccttccatggatcgcgcaaaggtggagccccggcatcgcgcagcagcttcgctgcggcctcgtcatcggacaggtggcggctgtcatacaccagcccgcagccaacgcggtgctgcagcgcgatgtgccagcgccaccccgcttcgtgggcgatcgcccgggtatagggcaccggcggcgccaccgcttcggtctgcaccgccacggcgcggtcgcacggcagccattcgtgccagtcctcgtagccggtgcccagcgtctgctcgatcagcaggccacggaagccggtgcagtcgatgaacagatcgccctcgatcacctggccgtcgtccagtaccagcgcctgcaccgaaccatcgtgcacgtgctgcctgacctgggcgatcctgccttcgatccggtgcaggccgtgggcctcagccctgcggcgcaggaaccgcgcatacaggctggcatcgaaatgatacgcatagctggcctgcggctgggtgtgcagcgagaagcggtcgccatgcgatgcgatgctctccaggctgaagtcgcccagctccgagggcatgccgcggcgcaggctgtccagccagaagtgatggaagggtgccgcccaggtgccgtggccgatggtgccgaacggatggaagaagcgttcccccggcaggcgccagttctcgaatga

SEQ ID NO: 511633 - DNA, 216 bp, Stenotrophomonas maltophilia
atgatgttcccttcaccggaatcgaacccgcgtccgcacggtggttcaaccggcgggctcggccgctgcgtcattgtcggcggcggggtcggtgagccgcggaatcgtcagggcacagcgttgcgcaatcaaggtgttgatttgctcaaccacgacattgccagcaaaactctgtccggggtcaaactgcagcttgcgcgtcgtggcgggcagtag

SEQ ID NO: 511634 - DNA, 1041 bp, Stenotrophomonas maltophilia
gtggtccaggccctgcgccttgaccgcctcggacacggcggcgacctggtcggctgccacgatcagcacgaagccgatgccgcagttgaaggtgcgccacatctcgctgtcggccacggcgccttccttctgcagccactggaacaccggcggcagggtccaggacgatgcctggatgtccaggccgaggccgtcgggcaccacgcggatgatgttctcggtcaggccgccaccggtgatgtgggccatgccgtggatggcctcgccgtgcgacttcagcagtgccaggatcggcttcacgtacaggcgggtcggtgccatcagcgcgtcgaccagcttcacgccgccctccagctccaggtcggccgggcggccggcgcggtcgtagatgcggcgcaccagcgagtagccgttggagtgcgggccggacgaggcgatgccgatcagcacgtcgccggcggccacgctggcgccgtccttcagctcgctcttctcgaccgcggcgaccgtgaagccggccaggtcgtactcgcccggggcatacatgtcgggcatttcagcggtttcgccgccgatcagcgcgcagccggcctcggtgcagccgttggcgatgccgcccacgaccgctgcggcggtgtcgatgtccagcttgccggtggcgaagtagtccaggaagaacagcggctcggcaccctgcaccagcacgtcgttcacgcacatggcgaccaggtcgatgccgatcgtatcgtggcggttcagctggtgggccagcttcagcttggtgcccacgccatcggtacccgacaccagcaccggctcgcggtacttgttggacaggtcgaacagggcgccgaagccgcccaggccgcccatcacttccgggcggaagctgcgcttgaccaggggcttgatccgctcgaccagcgcgttgccggcgtcgatgtcgacacccgcgtcacggtaggtgaggggggaaggggcggaagacggggtgttggtcacgggcgtcggcgctggcaggggttgaatgagcgattttaa

SEQ ID NO: 511635 - DNA, 1410 bp, Stenotrophomonas maltophilia
atgaaccaggcagcaggcagcggtgagaacacccggctgatcgtactgatcagcgtggtagcgacgattggcggttttctgttcggcttcgacagcggcgtgatcaacggcacccaggacggcctgcaccaggcgttccggtccggtgaatggatgcaggggttcgagatcgcgtcgatgctgctgggctgtgcggtgggcgcgttcagtgccggccgcctggccgaccgcctcggccgtcgcaacgtgctgatcctgtcggcggtgatgttcctgctgtcggcactcggtgccggggcggcggcctcgtcgggctggttcattgcggcgcgggtggtgggtgggttcgcggtaggcgcggcgagcgtgatctcgccggcctacattgccgaggtcgctccggcccgctatcgcggccgcctggccacggtgcagcagatcgcgatcatcaccgggctcaccgctgccttcctgtccaactacctgctggcggccgcagcgggcgcgtcgaccgagccgctgtgggccggacaggctgcctggcgctggatgttctggatgcaggccgcgccatcgctggtgttcctgctgctgttgctgaccattcctgagagcccgcgctacctggtggtgaagcggcgcaaggacgacgcgctgcgcgtgctcacccggctgctcggcaacgacaaggcccgcgccacgctcgaagagatcgatgcctcgctgtccaacgaccaccatcgcccgcgcctgtccgatctgaagagccgggcgaccgggcggatccgcccgattgtgtgggtcggcgtcgggctggcctgcttccagcagctggtcggcatcaacgtggtgttctattacggcgccgtgctgtggcaggcggtcggcttttccgaaaacgacgcgctgctgatcaacgtgctgtccggcgcgctgagcatcggtgcctgcgtggtcacggtgctgctgatcgaccggatcggccgcaagcccctgctgtggttcggctcggccgggatgtcgctgtcgcttgcactggtggtggtcgcgtttgcaagtggttcactggccgacgggcatctgcagctacccgggcgcatgggcacgctggcgctggtggcggccaatgcctatgtcgtgttcttcaacctgtcgtgggggccggtgatgtgggtgatgctgggcgagatgttcccgaaccagatccgcggttcggcactggcggtcgccggcgcagcgcaatggacctccaacttcgtgatcacggtgacgttcccgatgctgctggccgcggcagggctggcggccacctacggcatctacctggtggcggcgatcatctcggtgattttcgtggtccggcatgtgcacgagaccaagggcaaggaactggagcagatggaaggatga

SEQ ID NO: 511636 - DNA, 999 bp, Stenotrophomonas maltophilia
atggcagtcaatgacgatctggtggtcctgcgccccgaagggctgtactgcgccgccggtgatttccacatcgatccctggcgaccggtcccgcgcgcggtcatcacccatggccacggcgatcacgcacgcccgggcatgggcgaataccactgcagcgacggcagcctgccgatcctgcgctggcgcctgggcgatgtgccggtgcaggcgcatgccgagggcgtgccgttccgcctgggccgggtgcaggtatcgctgcatcccgccggccatgtactgggatcttcgcaggtgcgcatcgacgacgggcagcaggtctgggtggcgtccggcgactacaagcgccagcctgatccaacctgtgcgccgttcgaagtggtgccctgcgataccttcatcaccgaggccacctttgccctgccgatctatcgttggccggacacgcccaccgtcgctgcggagatcgtggcgtggcgccgcgaatgcgaacagcgcggcgaagctgccatcctgctgtgctatgcactgggcaaggcgcaacgggtactggccgaactgctgccgctggacgatcgcccggcctggctgcacggtgccatcgccaatggtgtggaggtgtatcggcaggccaacgtgccaatgctggagacgctggcggtggccgagcagggtcgccagccggatgccgccggccagttgatcctcgccccgccctcggccgccggcacgccgtggatgcgccgcttcggccgctaccagctgggcttcgcctcgggctggatgcagctgcgcggcaaccggcgtcgccgcaacgtcgatcgtggcttcgtcatttccgatcacgccgattggcccgcactgctgcagaccatcgaacagaccggcgcgcagcgggtgatcgccacccatggcaataccgatgcgttgattcccttcctgcgcgagcgcggcgtagcggctgaagccttccgtaccgatttcgggagcgaggaatga

SEQ ID NO: 511637 - DNA, 1086 bp, Stenotrophomonas maltophilia; identical to SEQ ID NO: 499792

SEQ ID NO: 511638 - DNA, 996 bp, Stenotrophomonas maltophilia
  misc_feature (8)..(17): n is a, c, g, or t
atgcaatnnnnnnnnnnatgcaatgaccttgaggctgaagcaaagaatgactacaaggaaattgaaaaacttggtcaagaggtcggagcaatagaggcgctgctctcaaatgagacggttggggcgaaggagttcaatgacatcctgcatcgtttcatcggtcgctctgagctttgcctgagctttaatcaaaagaaaaaaggctatgagatcatcagaaacggagtgggtgagcatgatgggaatttgagcgaaggtgagaagactgcgattgcatttgtctacttcatcacgaagctcaaagaaaacggaaacaacatcaaggaaacgattgtggttgttgatgatcccgtctcaagctttgactcaaatcacttgtttcatgcctattcgttcctaagaactcaatgcactgaagccaagcaactttttgtgctgactcataacttcacctacttcaagctagtgagagactggttcactggaacgaacaggaacaggattgccaaaggaaaagctgagaattgcttcttctatcgactggatgcgcctcctggctcaccccgccattcgctgcttgttgacgccgatgattctctgaaaaattacggctctgagtatcactacatcttcaaaaagctctatgaatacagggcgcatacgatccttaatagagatgaagcctttttgactgcgaacctcgctcgcaagctcattgaatcgttctttaccttcaaatatcccaggcggagaagcgacataagtcaactgatggatgttggtctgaaagactgcgctatcacaacgccggaactcaaggaaaaaatatatcgctttatcaacaaatactcgcatagcgatgtaattgaaataaccgaggaatcggcagaaaacttggctggcgaaagccatagcgtcatcggacacatctttcagtggtttgaagaagtggacaagaagcattacgacgaaatgattcaggttgtgacttcttga

SEQ ID NO: 511639 - DNA, 822 bp, Stenotrophomonas maltophilia
atggacgacatccacccgatcgcgccggacaagcgcgccgccattctttccagcctcgccgacatcgaacagcgacacgacgtgcgcgttctgctggcgtgcgagtccggcagtcgcggctggggcttctcttcgccggacagcgattacgatgcacgcttcatctacgtgcatcgccagccgtggtatctcaccgtcaacgagagcaccggccccggcgatgcgcagcgggatgtgatcgaattgccgatcgacgatgagctcgatgtcagcggctgggacctgcgcaaggcattgcgcctggtttcaaaatccaatccgacactgattgaatggctgcgctcgccgatcatctaccagcaggatcacaccgcagtgtcgcagctttggaaggcagctgagtcgttctattcaccactgggcacgtggtggcactacttcaacatggcgcgctcgaaccatcgcggttacctgcgtggcgaaacggtacgcacgaagaagtacctgtacgtgctgcgcccactgctggcctgccagtggatcgagcacgaacagacccccccgccgatggccttcgaggacctgctggactggctgctgacgcacggcccggtgcgtgaagccatcgatgccctgctggccgttaaacgcgccagtgccgaggtcagtgccggaccacgcatcgcggcgatcagcgatttcatcgatcgtgaactggccatccggactgcgcaggcgccgcagctgcccgctggacacggtgatgcggcgtggctggatgagctgttccggcagatgctggccgagcacgcgccgatctga

SEQ ID NO: 511640 - DNA, 1542 bp, Stenotrophomonas maltophilia
ttgaacatcccggtcagcgccaacctcagcgtggctgacttcaaccggctgctgtcggtcaacaaggtctcgctggcacagctggtcgatgccaccgccaccgtggtcggccgcgacagcaccgtgggcgtacagctgcgtgcactgtccgatctggtcgccacccagctggacatcaacaagctcaacatcgtgctgggcagccagtccggtggcggcggtctgttcgccgaagtggtctcgcccgatggcacgatcggcagcgcgctggaaacgaaggtcaacgtgctcaacctgatcagtaccgccatctccatcgccaacgacggcaatggcgttgcggtgaagggactggacctgctgggcatcaacatccaggccggcgtggtggaaccgccctcgatcgccatcggtggcgtcggcacacgcgcgtacaacgcgcaggtgcggctgatggtggacgtggacagcaacaacctgttcgcggtgggcccgttgctgaacctgctcggcacgcgcctgcacctgccactgcatgtcgatgtcgccaacgcgatgggcacgctgaccggtatccagtgcggcgccagtccaccgaaggccaccatccaggtcgattcgtcggtgctgcgcgcctgcgtcggtaatgtcgacccggcgcaacgcttttccaggagcaatgtctgcgacgccaccctgaagaacgagcagttgctgagactactcggacaacccttgatcaatgacaggatcaccctgcccgccctgaccagctcccagaacctgaccctggccgccggcgagaccgcctcgacccggatcaacccgctggcagtagggaacgcggtgtctgacctggtcaatgaactgctgcgcgtgctgtcaggcatgctcagctcacccaagcagggcatgagcgccaacgacactgccaaggcactggccgaccgctacctgcaggcggccttcccgccgaacacccgctatgaggtggacaagttgattccactgctgcgcgatggcgacgcaagccggcaactggccccgctcaacagctggaccgtacccggaggcctgccctacgcctgcggcctgctgaacctggccacctgccacaaggacggtccggtctgggacgcgttcaaggtgaccgtcaccggccagggactgggcgtgctcgatgggctgctgggatcgctggtgggcggcctgctgatcaaccgctgcgacagcctgctgggcaacctgatcgactacaacgggtgtgtacgcaacaacctggcctcgtacatccagaccgcgccggccggcttcctcgatggtaccggtggaaccggcgtcaccaatccggatggcagcgtgagctgcagcggcctgctgtgcacgctgctcaagccgatcctgaccgccctgcggccggtgctcaacagcgtcggcaccctgctgaccaacctgctggcgagcgtgctgggcctggaactcggccgcaccgacgtcaacgtgcagtcgatccagtgcagcgcggcgcagctggtctactga

SEQ ID NO: 511641 - DNA, 1323 bp, Stenotrophomonas maltophilia
gtgctttcggtccatgtgcttggcgagggggagcgagtgccgatgcttcacgacgagcagggagtgccgctgttctatccgactctgttcgccacctcccagctccgcaatgccggggcggccgtcaacacgatccgaaacaagctggccgatctcgtcgtgctcctgcgatgggagcaactccatggccgcgacctgatctcagagttccgaaatggcagctttctcacggtggcagacattgcctcgctgcgggatttcgccaagctcgacatgcggtatcagcagcctgccgcggaggaaaaggcaggggcacgcaagaccggtgtcgtggacttcctggaagcgacagttgggtcgagtccggctctggccaccatcggtgggcagcagcacttcaatcgcatcagcacgttcgccgactacctggagttcacggcgtcggtcgtcaccctccatctgagctcgacgcaaaccgcacaggaaatcgcgcggatggccaagaccattcgcaagcaccggccacgcgggttggccaagcagcgagaggacgattcggaactgcgttcgcctccctccgagctcgtcgagcggttcatggcgataggcgccgagggtgacctgcgcaatccgttccgacacccggacgtccaactccgcaatgccatcatttttgggctgctgcgacacaccggaatgcggcgaggggagctgctgagtctgcggctcgatcagttcgacttgggccacgaaccgcacgtctgggttcggcgcaatcaggacgacaagcatgactcgcgacgctaccagccggtagccaagaccaaagagcgccctttgccgctgcctgagacgctcgccaaccagatcgaccgttacatgctgaaggtgcgtgcccagatcggcccggctcgacggcatccctacctgcttgtctcgcatcggaagggcagcacatggggcaagccgctctcaaactccgccctcaacagccagatcttttcccgtatgcgcgcggtggatcccgccttcgaagcgatccatccccacgcctttcggcaccacttcaactacgagatttccgtcagcatcgatcagcacaacgccaaggtccggtcgaaggacgatactgagtcggtgctgatcagtgaggcaagggagctggatgttcgtgcgtttctgaacggtcatcgcagcagggcctcgggcgcgacgtacaaccggcgccacatccgcgaagccagtgacaaagccgttcgtcaggtgcagaccggattgaagcgacgtgagaacgccaaggaaaacgacgatgatccgcgttaa

SEQ ID NO: 511642 - DNA, 1581 bp, Stenotrophomonas maltophilia
atgatccgcgttaagccgaagcagctcgatatcgtgaggaaggctgctgctgcgacggtgtcaatggacggctacccgttcgattcttcgggtgaccactggcgattgaacaaggacgtgcagattgcactagtccttcctgggactattgacccgacaaccgaagccggctttcgcgccacgttgttgcgttacgcggaagaggcatctgcgcgacacaccgaaaacatggctacgcgattcaagcgatacctgcgggacacgggagcgtcgcaggttacggtgatcaacctcattaactggcgcgcgagacttgcgccagacgagcaatatcagctgggcggactcaagggcttcttgttggcctggcacgactacgggtttgagggagtctccaaggaggtcgtcgacttgctccaaggctggcgaatccaggggaacgaaaagggtgtggccgtggccagtggctgcccggacagcgggccctacaccgacctcgagatggctgcacttttggattgggcgaaccaggcagtagcccggaaggacatcgcatttgaggactacgcctacttgctcaccttggtgatgaccgcgcgacgtcctgtccagatcgcggccttaaggggccgggatctgattcgggagcctggtgtgcgcgcatcaatgttcaggctccacgttccgcgagccaagcaacgcggcctcacgtttcgtggtgccttcaggtccctggccatactcgaagatctttatctggtgcttcggcagcagcataggaagtccgttgccgcagtatccgaagccatcggacgatcagttgatcccgcgctggcaggcgaagtgccgatctttctcaatagcaagcggctcgagggggtagggcatgtccacgagctaacggacctcctgaagggcgtcgcgcccgatcgactgcacgcaactaccgacacacttgcgaatgcgctgcaacgttgcgcgaaagcttcgaccgcacgctccgagcgcaccggcgagttcattcacctctctgcaacgcgattccgacacacgcgtggcaccaagcttcgccgcgagggctttagtgcgttcatcattgccgaactgctggatcactctgacatccagaacgtgcgcgtgtacacagagaacacggcccaggaggcggtagtcatcaatgagctgatcggtgcgcagctagccccttttgcgcaggcctgcctgggtaggctggtccactcggagcgcgaggccattcggggggataatccccgcagtcgcgtgccgaacgaccggcagcacgcagtggggacctgtgggaactatggtttctgcgccagtggttaccgcgcctgctacacctgctatcacttccagccctgggttcatgggccgcacgaggaagtgctcgctgacctctacgccgagaagggacgcgcccgtgcggcgggctgcgcggacgttgtcgtgaatgccaacgaccagctgatcctcgccgtcgagcactgcgctgcgatgtgcaagggggctagcacgcgtgtgtccggcgtgggcctgttggaggccgatggccatgggtga

SEQ ID NO: 511643 - DNA, 1842 bp, Stenotrophomonas maltophilia
atgggtgaggtcgtccagttcgtacctcgtgccgaccgcgatgccgctgccaacctcgtcgagttcattcggctggcaagagacgaactcacggctttttccagcggcggtgcctgggactgcgacaagtggcagcacaacgaaaccaccgttgtattcgccacgaggacggcgcccctcgatagctattcctttacgcccatggccgagccgttgaagcagttcgccaaggcgtacatccgctatcgctacagccataagccggtgaagagtctagcgatgatgctccaagctctccgttgcttggaagctggactgctggcggcttgtggccatgcagatgtagtaatgctgacaggggcttcgatggacgtttgcgccaccaaatgccgggagctctattccagcgaagatgtgcaccacaagaccgggctgcatatgcaggccatctttgacttcctacgtgaaaagcacctggttccctcacttccggcttggaagtcgccgttcaagaagccggttatcctgaccgaagatctgggcgaggcggggcgtgcgcaccggaaggcaaagctcccttcgaatgaggccatgctggcggtcgccgacgtgttcgcacaggcgggcgacccggaaagccggttctactcgtcgatcttcgtcctgctgatggccgtgccagcccgcatctccgaagtccttaagctgcccacggattgcattcaatgggaggccgatgacgtgggagagtcccaaatgttcctgcgttggcatgcagccaaggggaaaggtgcgacgaagaagtgggtcgtgcccgcgatgcatgacgtcgtgaaggaggctgtccgccgtttgatcgagattggtggaccggcgcgcgaggcggcccggaaggcgttccaacgctcggtgcggccgtcgacaggggcaggcctcatccaggagtttggaggcttctactggcctttcgtcgataacaagaagacagtgaaagcctgggacgcgctgtgtttgcatcgggagagtgagttcggccgcgagaaggctatccggccaagctcatggcgcgttcccagtgcaaacgaggtaaatggacgcttgggctctcgcgagagcttatccctctttgatcgaatggggctgcgaaatgtcgatggcacgcgcatccaactgacctcgcaccagcttcgtcattggctgagtacgatatcggagcgagcgggcatggacgactacaccctagcgcagtgggcgggcagagctcgggtgtccgacaaccaccattacgaccatcgctcgcccgaggagcgcctagaagcgtcgcgcgagctgcttgcgaaccgacccgtacagatgccggagcgcatcaagcatcgccagccggtgacttaccaggaactcggggttgatcggccgggaacggccaaggcaacgctctatggcatgtgcgtccatgactacgccatggccccgtgccagaagcaacgggagtgcatgacctgcaaggagcacgtatgcatcaagggggaccacgtgacgttggagaggattcgtctgctggaggcgcagacggaagctttgctccagcaggccaagaaggctcatgaggatggcgactttggtgccgaccgctgggtggacaatcacaaatggaagctggctcacgtcaaggcaatgcggatggcgttggagaatcccagcgttccggaaggcgcggtcctcaggattccggaggggcacgacccctctccggttcgtcgtgccctcatggatcttggcgtggtagaggcgccctccatggaggcgcttgttccgaagatgattccatttgccctgacctga

SEQ ID NO: 511644 - DNA, 450 bp, Stenotrophomonas maltophilia
atgccgaagaaaaccatcaccaagaccacgctgccaaagatcatgcgtgagcttgatcgctgggaaggcaagctcacttggccacttttttgcgagcgtgtcgcaaaggtgctggacgtctcagcgatttcgaagcacacgatgtacctctaccccgccatcaaagagcggtttcagcagcgacagaaggacttgcgagaggcgagggatgcactcccacgagacttcacgctggattccgcgatccggcggattgctgatctggaagcacaggtaaagcggcttgaagagacgaataatctgttgcttgatcagtatcgtcgctggcaatacaacgcttatgccaacaatatgcgaatggatctgctcgcttgggacaagccattgcccgaggttaatcgatctggccgctcccgcgcatctaaaaaactttctgcaagaccaaaatga

SEQ ID NO: 511645 - DNA, 1266 bp, Stenotrophomonas maltophilia
atgagcgagccaatgaaagcgagcggctccgccagtggaatggacataccgaagcattggaatgtcaccaagttctggactgtagctcgccaagtctcccgatctggcctcccagatgcgggtctcatgtcggtttacttggatcgtggggtgatcccatatagcgagggcggcggtctcgtccacaagccaagcgagtcgcttgacgcgtaccagcttgtcgaaccaggcaacttcgtcctcaacaaccagcaggcctggcgcggttctgttggcgtgtccaagcaccgcggcattgtcagtcctgcttacctcatctttgagctgtccaaggagctggaccccaccttcgcgaactatcagttccgggaaactcggttcgtcgatgaaatgatgcttagctcccaaggtgtaggcgatattcagcgccaagtgaagtggcctttacttcgcctcgcgaaggtgtttcttccgccaatcacagaacaacgggaaatcgcctcccacctcgagcgcgccactacccgcattgacgccctggtcgccaagaagacccgcttcattgggctactgcgcgagaagcgccaggccatgatcacgcacgctgtgaccaaggggctggatcgtagtgtagcgatgaaggccagtggttctgccagcggcctagaccttccgaagcattggaatgttagcaacttctggacagtctcccgtcagatctcccgaactagtcatcagaatgttggcctcatgtcggtttacttggatcgtggcgtaatcccctacagcgagggcggtggtcttgttcacaaacctagtgagtctctggacgcttaccagcttgttgagcccggcaactttgtgctcaacaaccagcaggcctggcgcggctcggtcggtgtgtccaaacaccgcggcattgttagccccgcctatcttgtgttcgagctgtctaaggatctgaaccccgacttcgcgaactaccagttccgggaaaagcggttcgttgatgaaatgatgctcagttcccagggagtcggtgatattcagcgccaagttaagtggccactccttcgccttgccaaggtgttcctgccacctatcgatgagcaacgggaaatcgtcgcgcatctcgaccgcgccaccacccgcatcgacaccctgatcgccaagactgagcgctcgatcgacctactgcgcgaacaccgcactgccctcatcactgctgccgtcaccggcaagatcgacctgcgccccgcggcctaa

SEQ ID NO: 511646 - DNA, 3243 bp, Stenotrophomonas maltophilia
atgcatcctgccttcaacgacaccgcccaccgcgaaaagtatttcgaggagtacatcgtcaagcaactcgccgcgtccggctggaaggtaggccatacgtctggctacgaccagaaccacgccctctacccagaggatctggtggcgtggatccagggaacacagcccgcgaagtgggcaaagctggtggcgagtaacggcgagaaggccaccgccacactcatggaacggctggctcaggtgctggaaaaggacggcaccgtgcatggcctgcgccgcggggtgaagatcgcaggtgcaggcgaaatcagcctcagcgaaggcttgcccgaggatgcgcgcgacccgacggcgtgggagcgctacaacgccaatatcctgcgcgtcgtgccgcagctcttgtaccgccaaggcagcaccttggccatcgacctggtgttcttcatcaacggtctggctgtggctaccgtggaggtcaagaccgacttcacccagtccgccgacgaggccgtaactcagtacaaggacgaccgcgtgccgatggatccggtcacccgcaggaaggagcctctcctgacgttccagcgcggtgccgtcgttcacttcgcaatgtccgacagcgacatccagatgtgcaccaagctggatgggaagaacagctacttcctgcccttcaaccagggacgtgatggccgcaaggggaacccgacccgggaggatggcgagtatccagtcgcctacttctgggaacaggtctgccaacgcgataactggctgcggatcttccacagcttcgtgtacacggagaagaaagaggtcgtcgacctggatggcaaccacaaaaaaaaggaaacgcagatcttcccgcgcttccatcagtggaacgccgtcacccgcatgatcgaggacgccaagggcaagggccctggccagtcctacctatgcgaacactcggccggttccggcaagaccagcaccatcgcctggacggcacatgacctaatccgcctgcgtaccgacgcaggcgtcaacctgttccattcggtcatcgtggtcaccgatcgcacggtgttggacaagcagctccaggacgccgtccagcagatcgaccaccagaaggatctgattgcggccatcggcgagaaggacaccggcgtcagcaagtccaaggaactggccgaagccctggagcgtggtacccccatcatcgtggtgaccatccagacttttccctacgcgatggagcagatcctgaccaacggaaagctggccgaccgaaacttcgccgttatcatcgacgaggcccacaccagccagaccggcacggcggcctccaagctgcaagccacgcttgccctgcgcgatgccaaggcgatggaaggtctcaccatcgaggagctgctggagaagatccagtcctcgcgcgcccgccccaagaacgtctcctacttcgcgttcaccgccacgcccaagcacgccacgctcatgctgtttgggacgcgcccagacccgaccaggccggccagcaaggacaacttgccgttctcgttcgacaagtaccccatgcgccaggccatcgacgaggggttcatcctcgacgtgctggagggctacctcccctacaagaccgcgttcaacctggctgagcccgcgaaggacggcaagcgcgtggaaggcagggccgccaagcgggcattggccaagtggatgtcgctgcacgccaccaacgtcacccagaaggtcgagttcatcgtcgagcacttcgcggccaacgtggcctcactcctgggtagcacggccaaggccatgatcgtgacctcctcgcgcgccgccgccgtccgctacaagaaggcattcgacgcgtacaccgaggctaaccccaagcacaaggcattccaggccctggtggcgttctccggcgcgctcacgggcaaggaggtcatgcacgcctctgacgagcagttgaaggacgatccgttcgccgctgaggaggacgagcagttcaccgaagccagtatgaacccgcgccagtacggctcggatctgcgcaaggtgttcgaccgtcccgagttccgggtcatgatcgtggccaacaagttccagaccggcttcgaccagcccaagctttgcgcgatgtacctggacaagaagatcgccaaccctgtggagatcgtccagacactctcccgactcaaccgcaccactgccggcaaggacaccacgttcgtcgtggacttcgtcaacgatccacagtccatcctggatgcgttcgcgctgtatgacgccggcgccaagatcgagaaggcgcaggaccctaacgtggtctatgtgctccagggcgacctggacaaggccgacgtctacacccaggccgatgtcgagggctacacggccgtccgcttcaagtcagccgccgcatacaccgcaggcgacgatgcgacgcacaagcagctctatgcggcgaccagcgtgcccacccagcgcttcaacgatgcgcttgctgcagcccgcaaggccatcttggccgccgaaaacgactttgagcatgccaaggctcagggcaatgaggccggcatgaaggcggccgacgccaagcgcgctacggccgcagaagatctccagaggctgctggacttcaagtcaggcctgtcccacttcggcaccctgtacacttacatcgcccagacgatcgacttcggcgatcccagcctggaagcgttcgccagcttcgcgcgcctgctctccaagcggctcaacggcgtgccgccagatcaggtcgacgtgtccggcttgctgctgacaggcttcgacatcaaggcacaggacaagcccgtctctggtggtgatgatcaggacctaatcctgcagcccgtgggtccaggtggtggtggacagccaccactgccggtgtacctgcgtcaggtgatcgccaagctcaactcgatcttcggcgaggccacggcgctgaccgacaaggtggccttggtcaaccatgtcgccgacatcgtgcgcgaggacgctaacactgtcgcccaggtcaagaacaacacacgcgacgtggccatggccggcaacatcaagggatcggttcaatccgctctggtgcgcgctctagactcgcacagcacccttgccgcgcatgtgttgaagcatgaccagcaggcgctggctccgctggtcggattgatctacgacctggtcaaggctgggcagaacattgaccgtgcggagctgggagcgtag

SEQ ID NO: 511647 - DNA, 639 bp, Stenotrophomonas maltophilia
atgcacaagcgctggctggccgccatcgtcgtggcgggattgtggtgtggaaccgctgctgcgatcgatctgggcgcctatgtgcgagcggacaagttcggcgatgtcatgctgtctcccgggggcgattatctggccgcgaccgtgcctgcggacggcttcaccgctgtgatcatccttcgtacggacgacaacacgccggtgggcaacctgcgcccaccactcaattcgcatgtcttcggcctgcactgggtcaacaacgatcaggtgatgttcggtctggcgcagaagttcggtacccgcgatgcgccgtgggccaccggcgagctgctgacactggatgcacgcaccggacgaccggaactactggtgggctaccgcgaccttggcctgcgcgtgcggcccaagtaccggacgtcggccgcggcgttcctcagtgacgccctgcctggcgacgatgcgcacgtggtcatcgcagtaggcggatcgcggctggatgccaacggttatgcggcccagctggaactggcaagcggcaagcagcaagcagcggctgctggcccgcgcgccgatgccgggtgcctcctatgtggtggatgcccgcggcgacgtacgtttcgtacagggcgccggtactga

SEQ ID NO: 511648 - DNA, 438 bp, Stenotrophomonas maltophilia
atgaccccggccggcaccgtccagctggacctgccccggatcaccgcgacgctccaacgcggagtccgacgggtcgcggccttcatgtcgttgggcttgaatgccgcccgcagcgccacgccggcgtcactggagctggccccggccgacacccgctaccatttcatccccaccaacttgagccacgaggccgtcgcccacattgccgacgagttccagctgtggatcctgaccaacggggtgcgcgaactgtgtgcgttcctggagcgctacctgcacgatctctacctggccgcggcgctgatcagcctcagtcagggcggccgcctgccgccggacgccccggtgcccacggtccccacggcgttcgaacacacggggattgggcgcaagctggaattgctgcgggagaccttcggtatcgatgcccccccatag

SEQ ID NO: 511649 - DNA, 2964 bp, Stenotrophomonas maltophilia
atgcaggaagcagatgagagctgtggcaagactgcagccgcgccggaacaggcgaagctcgcgccggacgaacagacggtcggattggttctcccgctctatggctaccatcaaggcccccaccctagggctggccgacatgtcggtttgcgcagatcgctgcgaactgcagtggttttgggcacgctgagtgatcacaccgtgctcgtcgccgacgaagaggatggacgcgtctaccgcacctcatcggccagtttagtcacggctcgccaagctgttcgcctaacacttagtgagcatcttgaggtcgccaggcaattggccctcaagggcaatcgctatggcatttccattctggcggcccactttcgtggcatcaacggcactgcctatgccagcccggcggccttcgcctggtgtgtccgcgcaatgtgtgaaggccacatgttcaggagcgcaactgctgaggtagaggcctggattcaggctcagatcgaggcctcctccgatttaggagacgccctccctcctcccgcagagagcggtgagatcgagctatggtctggtaagccggcggaagcgcaagctgccacagatgcgacatcgcgctcacttgaaagtgcgctgcagctcggcgccgattcaatcgccaaggccgacggagattttgagctccagcgaacgtacgcagatagtcacggcagcagactggcgatcgacgttcagtccggccttcaagtggtcgtgctgggccccagcaatgtcgaatcggcagagggatttgtcgatgtcttgtttctagacaatctcgaggcttgcgcccgtcatgctagtggcctgagtttcggtgacgacaccatcgatccgggttggctatgggaagtggtcaccgactcggcgcgtcacggcaaatctccgctccccatcgcgctttggctggcttcctcggatattggcccctccggtcaagcggacgcaagcttggagcgatctttaacgcggatcttcggcgccgcttttgcagccaggcagtgggcgaatgatcggcctgcgctcgcgcagaaatggatacggctcgcccgagagtgctggcgatctctgcctaaggtggagcaatcgcgcgtcgcggctgctattcctgaactggtatcgtcgctttcgaagcggcgggctccaagtcccgcggccccactccgagcagctttccgcgcaacgatcgatgggctgctgacgcggcaccccgttcctttgattgcgcgagacaggccgcctccgccgagtgcagcggtagagatcgagggcattgaagcggttgatcttgtgatcgaggcgaatgctgctgcgcctgtcatggcagtgccgcgagcaagcaacgctcagtctcgcagacgggtgggcgcggttaagtttggcaattcacagcgcgtcctgcgctttgatttgtcagaccacgcactgttggcttccgagtgggccttggtggacaaagagtcggcccatctcgatgcggtgacgtcggctctcagttggctagaggctcgaatgggactgagcctgcccaagacatggcgagaaggggcacacgagattgagcgccaaggcgtcacgcttcaattggaatcgggtgaaggcatctttgctttccggctggatcaccctgacacgactcacccaacccggtggtggaggatggaggccactgtcctcgcggggatggggggcgtcggcggcatggtgggcgttcgcctaagcgcacgagacctggtgtcccttccggcaccctctaggacggttccagctattgtccgtgaatgggcccgctcgcctgggctgggtatcgctggtgcgcccgctggagcccctacattcgtccgtgatgaggagggtatgtcgcgcctgcttgccgccgtccaagacagcggtcgcgacgcacctctgtgggtagtagccgctcgctttgagctgatcaagccgctgcaggctctggccagaatgtatgtcgttgagccggcgatgtgggcccaatatgctacccattacggtgcgctggctccgagcacggtccatgtgtttcaaaaggctggcggtaccagggcacacgtcgacataagcaagggacagggactggagcagctacgtgagttgactctccaagctcggcaccgccctgaggttcctgcgtttcgagacattcggaacgccatagccgaagccaggttgcgtgcgttgagcaacgggaaagactcggcactcaacgacgccgttcttcctccgccagttccaaccgctgaagacattcgggctttgatttccagggaagtcagggactatgaagagttgctgcaagtggccgaagacgagcgaaacgctgcggtcgcagaccgagactccgccctgcacgatctgcaaacaacgaccgatgagatagtcgagctcaagcggcgcctgcacagcgcacaactgcggctgggatctgcagctcccactgatgagccgacaacagagcgggccgcacctcccgccacactggaggggctcgcggagtgggcaatctcgctgcggcctcgggtggtcttcccggaaaaaacgctccgctctgccagccgcgtggcccatagcgagaccgcgctgatatatgcctgtctggaacaactgtctgaaagctactggcgatcacgctgggcagacgacgaagcgagtcgtcgccaagcgcgcgacgagtgggaggaattcctgaaagagaatcgactgcggttgtccggcgttggtgttattgcagcccgccacttgggtgagtatcgaggcatcgtaggcgggtcgacctacaccatggacatgcatgttgcaggtagtaacgcccacgatccgctccgctgcctgcggatctactgctacgtcgatgagctcaatcgcagggtggtcgtaggccatttgcctacgcatctgaccaatgccttgacctag

SEQ ID NO: 511650 - DNA, 894 bp, Stenotrophomonas maltophilia
atgtcttcagaaacccattcgctgcgttgggggcaagcgcggcgtatagccttcatcgatcttcgattgcaatacgacggtcgcttgaatcgccgcgatctcattgatttttttggcatatccgtcccccaggcgtcctctgacctagctgagtacgtcaagatcgcgccaggcaacatggagtacgacccgagtgcgcgggcctaccgtgcgcagccaggctttctgccggtcagcggccgcgcgacgtccagccagtacctattcgagttgtatggcctggagcgcggcctgctgacacgagatgagagcttcatcggctatgtgccgttgaccggcattgtcggcacccctgcgcgcccgattgcggcaacggagatctccacgtgggtgcgagccatccgcgacggcgacaggttagagggccgttaccagtccatggacgaggacgcgcccctcagcctgaccatctccccgcatgcgcttggctacgatggcctcagatggcacgtccgggcttactgccacacccgcttaatgttccgggatttcgccatcgggcgcttcgagatccacacgatccatgccgactcccccgcaatcgatccaagcaacgacattggctggttcacggaggtcggggttcagctaatcccgcaccccgcgctgacgcccaaccagcgggcggcggtggcccgggactatgcgatgcaggatgacgtgctgattcttccctgccgaaaagcaatgctgttctacacgctgcgccacctgaatctcgattcgctggagattcaccccgatgcggctcggcagcatgtcatcgtggggaaccccgacgaagtcgcccaatggatgcgcgaagatcgtcagggcctgtctgtgggcggctga

SEQ ID NO: 511651 - DNA, 228 bp, Stenotrophomonas maltophilia
atgcgtattgagatttaccaggaccgcgccggcgaatggcggtggacgttctatgccagcaacggtcgcaagattgcggactccggggaagggtatgcgagcgagtacaacgcggtgcgcgcagcgcggcgtctgaaagagctcgctccgagcgccccgatcaagcggcgcgacggcaccgtgctgaacgaaagcgcgcgttcgggcttggggccggatccgttctaa

SEQ ID NO: 511652 - DNA, 636 bp, Stenotrophomonas maltophilia
atggaacatgagtacgctgtcttgggcggcttcaaccgtgccaatgtcggcaagtgggtaatgggggcctctgtcgggctggccgcggcagtgagcgccttggccggcctagttgtggcattggttgtggatttcggtgtggaaatgccgcgactggtgctctggccgatcaccgccggctcgatctatctactgctgtacgcgctctttgaccggtggatgtggcggataccgcgcctttctaggtggctgcgcgttcccaatctttctggcacatgggtctgccacgggcaaagcctgcatgcttctgacgatcgccccctcctggcatgggaaggcgaggtcgaaattgcacagagctgggacaagatccagattcgcctcagaacgcgccagtccgtctccaaaagcctgtcggcagcgctgatttatgactgcacagatggctaccgcgtcctctacaactatcgcaacgacccgggcatcggcgagcctgaactcaaggggcatcgcggctgcgcagaactgctgttccgcgccgacctgaccgctgccaccggtgagtacttcaacggccacggccgctacacctacggaaccctcaccctgacccgaaaggaaaccacgacaccatga

SEQ ID NO: 511653 - DNA, 966 bp, Stenotrophomonas maltophilia
atgagtgcggacatcaacaaacgtttgcgtgcgcttgacgcgcggcgccatggcttcgatcggagctcagtcatcttcgactccgcctccgggtttgaggcacgcgcgcacctgagcgagacctatcagaaacgcagtagtgggtaccatacgcgctatgcactgggcgccatgcaagcagtagccgccagctacaccgccctgagtgttgccgaggccgagcgtgtgcaagcgcaaattgcaacgcgattggaccgcgatgggctgagctgtacgttccgtctgcagggctccgttccgggcaacattcatatccgcggcgtcagtgatgtcgacttcctggttctggagcagcggttccatcactacgatgcgacgggggtcttggcgctggctgggcactaccgtaacccgtacctgccgtcagccgtcgatacattgctcgatctgcgtcaccgactggaggcggcgctgaaggacgcctatccggcggcggaagtcgactgcacaggtgccaaggccatccggctgtcgggtggatctctgcgtcgcgaagttgatgttgtgccagcttcatggaatgacaccgccgagtatcagcggacacagtccgaggacttccggggcgtcaacatcctcgacaagcctgcgcgtcagttgatccacaacctgcccttcctgtatctgcgacgcctgcgcgaacgtgatgacgaaacgtggggcgggcttaaaaaggccattaggctttgcaagacactgaaggcggacgccatcagcgacggaaagaaagttgaaatcagcagctatgacattgcctctgcactgtggaacgctgctgctggaactctacaacgtcccgcaggacgtgcaccagaaactgctgcgccgcttcgccgaggctgcatccagtggagatttccgcacgatgaaggcgttgatggccgaatcggccgagctggtgggtga

SEQ ID NO: 511654 - DNA, 384 bp, Stenotrophomonas maltophilia
atggacgaatcgcactgccgccacctgatcgagcactacctgcaggcctacaaccgcttcgacatcgacgccatgcttgcggtgctggcgcataacgtgcgtttcgagaaccacagcggtaaccagctgacgatggtcaccgaaggcatcgatgccttcggcgaactggcacggcaatcggcgccgttgttccgtgagcgcgagcagcggttgctcgagctgaccttcaaggatgatgtggcgctggccagcatcggctggcgtggcgtgttcgcgcaggacattcccgatggtcccagcgcgggcacggaactggcactgcagggacacagcgagttcgcttttgaggacggtcgcatcgtgcggatcgtcgaccgcagctga

SEQ ID NO: 511655 - DNA, 657 bp, Stenotrophomonas maltophilia
atgagcgttcttcaacgtctgctacttgtcgccgcctgcattgcggtcgccgggcctgcgagcgcagcaaaccatatcagcacaaaactcccacacgaggcccggatcagcccgctcgttattctggatgcgaataatgagggttcctgcgcactgccctcgccagatgggcgtcgccgcaccccctacttccccgatctcaggcagcgttgcagcatccttgcacaagccctgttcgcgtcactcattacccgcggcttcgacgcgaaaatagagtccttcacgcctgatgcgcccatcggctacaaggagtattacgccgcgttcgctgagtggaagcaaggcgtgcttgaaaagtaccccgatcggtacgtgctgacttaccacggcttggtggacgaaagaaaacaaagctacctggtgatgaatctgtctggaccaggcgacggcgaacgcccgctgcttggcacgatagagctcagcaaggaccagatgtggaccattaccaagctcggcgatatgaacttcattggtccgaccccgttaccgcgtctcatcgagctgctgagcaacaccctggaggagcgctgtccgacccgcgggttcatgcgcaactgctatggccgtggctggctcatggacaagagccccaggtaa

SEQ ID NO: 511656 - DNA, 222 bp, Stenotrophomonas maltophilia
atggctcacgaaatcaccatggatcttgccaccaagttcgttctgcacaaggacgtcgaacttgccgtcaggaaagacggaaagctgctcggcaccgccctgatcagcaaaggcaacatcgaatgggtgcccgcaggtaattcggtgaacaagaagcggctgagctgggccaggtttgccgagctgatgcaggaccatggcaaggatgtaaagatcaagtag

SEQ ID NO: 511657 - DNA, 861 bp, Stenotrophomonas maltophilia
atgaagatccagcagattgccccgtgcaacaaggtgaccagctgcaagacggaccccaagtactacgcaccgaccaccaactacggcagcgcatgcccgacgcgcactgcggccattgccctgcagaagctggagcaggcctacgcggaagacaaggcaacccacgaagccaaccttcccgccatggcagccaatcaggaaatcatcgaacgggtaaccgcgctgatggccgagatcggaatgccttcgcgtttcagcgaacgcgatctgcgctcccgttcccgctacccgaagtcgatcacacatgacgccggctaccttaccgacctgcgccgggaggtgaagacgagcgacgggtgggaccacgcccaggcaacctacgagcgtttgctggccgactaccgcaggttcgaagcagaagcggcgaagcagaaggaacatgctgaccgccacaaggagatgaagcacaaccgactgatcgagcagcgcaaggcggacatggctctggctgcgatgctgcttcggtacgacctccccatcgatgcgtcatgggaggacgtcctggaagccttgcgcggccgtgataagcgcctcgacttggccgtggcaatgcgacagacgcgcggcgattggagcgaaggcccctaccgtgtgcgccatgcgctcgaccggttctccgtcgaaaccgacgaggacaaggccattgccaacgacgtgctggactgcctgcgggacttcgaagacggccgcgtgttccgcgacacgacctggaactacgaagttctgtttgccagcgtggccgaccagcagttgtcggcggacgtgcagaccgccctggacaacgcacgggacacctactga

SEQ ID NO: 511658 - DNA, 291 bp, Stenotrophomonas maltophilia
atgaagtctgatcgtgaaatcaagcatgccagcgaccttgcggatgccttggctggccacgcccgcgctatgtcgttcgctgagggcgatgcaccttgcctcaaaaccacgctgctggaagcgagtcaccacatcgacacgaactgcgtgcaggtgtgcgcgaagaaggacggcctgctgatccgcacgcttcgcggccaggcccgctacatgacgtggcgcgagcgcatcgcctaccggctgctgcgcggcaagaccgagattcatcctcgcgacaacaggtacgcctga

SEQ ID NO: 511659 - DNA, 318 bp, Stenotrophomonas maltophilia
gtgacgccgcgcaccctcaccctgctgggcctgctggtctgcgaggccacggacgtcgagaacagcgcggacgtccgccgggagcgcgtggcaaaggcgtacctcgacctgttcaacgaactgcgtgccgagaacctgcgcttttccgaagtattcgaggcagctcgcgctgtgctgagcgtcagcgactttcccgacctgctgcaagccgaagagcgcctgcgcgaagcgctggacgcctgcgaacccttcgattccaaccaccagcaggaagccgtcaacggcatctgcgcagaaggagattgcaatgaagtctga

SEQ ID NO: 511660 - DNA, 186 bp, Stenotrophomonas maltophilia
atgaacatggatgacgtccacgacttctgcgaagcgcagcgtgccaacggtgttggctatgcggcttgcaacaagtgccctatccatgcggcttgcaccagtggcaccggctacctgacccgggcctcgctggacgcatggcaggagcgctgcgtggccgcactggaaaaggcggtgaccgcatga

SEQ ID NO: 511661 - DNA, 393 bp, Stenotrophomonas maltophilia
gtgagcatttcgctgtttctcgaagtcgaagccggtgccgacctgagtgccgtactgcacgccctggattcgatccaggccgagtacgtcgacggtaccgacggtctgcatggatatcttcccgcgtccaacgccagcttcgggttcggcatcgtcgacccgcgggaggcacttgcagcggaagggattgaagccgagtggcaggtgggcctgctcggctcgtttcatttccgcgcgagcgggtttgaaagtgcctgggaggaaatctgccgcttcatcaatcgttacgctgcggcgtgcgagttccggtttgtgctctccttccagttcgagagcatctatgcggcaaggctcgggaaggatctggtcttcccggggcctgctgctccgtaa

SEQ ID NO: 511662 - DNA, 261 bp, Stenotrophomonas maltophilia
gtgcgggcgctcaaggtttatgcattgggaatgccgtgggatgtcgttgcaagtaagtactatcgtggacttgcagtaggttcaattggcctgggaagtctggtttctgattttcttgggttcaccgagttgcatttcgatgaagcggaggagtggttctgtagcggaggtgattacggggtcctcgaaatttccggttggggtgtgccgctcgaggatgagccggagcaggtcgtgactgcaatctgcgttgtggcttga

SEQ ID NO: 511663 - DNA, 417 bp, Stenotrophomonas maltophilia
atgaagaactgcgggatactcctgttgactgcctgcgcggcccttctggcctgcacccaagcaccgtcgccaccgccactgcagcatgggcagatcggcaccgctgctgagctggctgcgtatggcccgaggacacccgaaccgatccacctgcgtcgtgaccgggtccctcccgatctggtcgatctgatcccgttcgcggaaaagtgggggatcggcgatgacgtgcttcgcaatgaaatgcgggagcgcgccactgacgcggaaaagcaggcattggcggatgcgctggcggggcgccatgcgcgcatcaccgcctggttggacagcttcccgcaggggcagcccatgtctgaagaagccgctgcgttcatgtacatgcagctgggcaccgacgaaatgggcctgatgccgtag

SEQ ID NO: 511664 - DNA, 1131 bp, Stenotrophomonas maltophilia
atgacagacatttctcagctcaaggtttcgctcactaagcacaacgctcacaagattgccgcgctgctgaaaaaatacggaccaagtcaggccctcaagaacctcgcggaggttcatgccgatgaggctcaagcccataagaatctgtccgtgcaaccgggaaacagaattcctgacgtatggtccaaagccaagaggattggtgaaaacgcaatcgatgcactcgtcctgattggaatcacatttagtcatcaccagttgatcacagcaatgatcaacgcaactagtcgatcaggtttctccgggcgcatcgagagaaacaagcaactttcggcgaaggcctacacaaatttcgttcaaatcatcgatcagctcggctatgcaacaaggcgcgatcacaatggcgtctcattcaacctgcgctcaatgttcgaaattccaggactcggccccttggccggcgaactactcggccacaaactcacggcagcaagatgggatggggaaggcaccattgcagatgaagcgatcgcgcacaatttccacagagttcttggcttgacccccagggagtttaaggactggataactaccgattcgcaacccgaggccgcaggaaatcagcttctacctaaggacgaagagttctttcaaacggaagaggaggacatccccccttcagcattcgagttcaagccaggccacgaggaacggcccgccgacccgattacgcgatccgcgtctgcgagatcacaagccaaccagcggcataacgacatccaaaatcgcctatacgctcacctcacgaaaaagtttggcaaagacaacgtcggaacagaaatagacaccggaagcggaacatctatcgacttggtgaccaaagaggatctcaaggttacgttctatgaaatcaaaaccggaaagtctgtccgcgcctgcattcgccaagcaatccctcaacttcttgagtatgcctattggccagatagaattctcgccgatgaacttgtaatcgtatcgcaccttccgattacagaaacagccaagctctatttgaaacatctgcgcgagcgctttaatttgccaatttcctatcagcaattcaatctagctagaaataccttgatctaa

SEQ ID NO: 511665 - DNA, 1224 bp, Stenotrophomonas maltophilia
gtgaccctcatagacaaggaacgcgaagcagtgttcgcgcgcacccagctaaagcaacgaacgtacccccactacatcaagtacatgggatcaaagtccaagatcatggacttcgtgctttccggcatcaatgaggtctatgacggcggggctctgtgcgacttgttcggaggaagcgcatccctggccggagcagtcggagatcaaattagcgtccactccaatgacatccaagcttattctgcagtcttggctgaggcatacctgaacgcgtggcgctcaccccaaacgccgacctccgagcagatcattgaacaagccaaagcgattgctgataggaatcgcaaagcgattggccccctccatgattactccgcgcaaatttcattggcgcaattcaatgccgtcgagcgagagcagcagaccttgcttgaacgaactttccgcagaccatggcacctgttcctgaagtactactccggcacatggtggtctgcggaacagacgctctggatcgatgctatacgtgaagttgcggatcgctacaaaggtgacccggcatacaatgtaattctgtcatccctaatgttttctatggcgtattccagccaaggaacaggccactatgcgcagtatcgcgatgcaaagaccgagtcttccatgcgggacatctccatctaccgccagcggtcagttccacatctattcgcgaagaagtatgacgacgtagtcgcgggaattccgactcgagagccaactttggcgcatagagtgacttcgctagactaccgaacatctttagctggattctctggcggcaccgtgtatgcggatccgccctatgcattcgtccactacagcagattttaccacgcacttgaaacgctggtgttgtatgactaccccgaaattcaggtaaaaaacggagagattgtcaaggggcggtacagggagagtcgtcatcagtcaccgttctgcattcgctcgcaggtgaagggagcatttgaggacctcttccgaggcgtcagcaacagcaattccaatctagtcttgagttacagcaacactggcatgatttcgattgatgaacttgctgagcttgcatccaaggagttcgggcgccggtcaatcgatctaatctttactgattacaaacacatgacccttgggcgtcagtttgatcgccaccgggaagtggaagaatgcctgatgctggtgaagtag

SEQ ID NO: 511666 - DNA, 309 bp, Stenotrophomonas maltophilia
ttgactgcgaacctcgctcgcaagctcattgaatcgttctttaccttcaaatatcccaggcggagaagcgacataagtcaactgatggatgttggtctgaaagactgcgctatcacaacgccggaactcaaggaaaaaatatatcgctttatcaacaaatactcgcatagcgatgtaattgaaataaccgaggaatcggcagaaaacttggctggcgaaagccatagcgtcatcggacacatctttcagtggtttgaagaagtggacaagaagcattacgacgaaatgattcaggttgtgacttcttga

SEQ ID NO: 511667 - DNA, 933 bp, Stenotrophomonas maltophilia
atgagtgagacgagctggggtcgggttaagtaccgcacaacgaactggaaggcgtacaacgcagcgttgaaagcgcgaggagacctgaccatatggctggataaggacatgcagtggctggcccagcccaggggcaagcgtggtcgttgccagaagttctcagatgcggccatccagttttgcctgaccatcaagggcttgtttgggcagcccttgcgccagacgctgggcctggtgcagtcgctattgcgtatggcaggcctgccttggccagtgcccgactacagcacggtgtgtcgcagacaaaagagcttggaggtgcaggtgcgctaccgagcaagcgacaaaggcttgcacctgctggctgactccacgggcatcaagttcttgggcgaaggtgagtggaagactaaaaagcacggcgcagagcgccgccgccagtggcgcaaggtgcatctgggtattgatgcccagacactgcagattcgggctatcgcagtcacaaccaatgaagtaggtgactcgcccatggccgctgtcctactgggccagatccccagccatgaacaggtagctagcttcactggtgatggggcctatgacaccaaggatgtgcatgaggcctgctacctgcggggagccattccaatcatcccgccacgcaagggggcgaagctacgcaaggggctggcatttgctcaccgcaatgaagcggtcaaggcgtgtaggcagttggggcgggctatctggaaacgctggagcggctaccaccgaaggtctctggtggagaccaagatgaattgcttcaagcgcctgggcgagaaggtgatggccaggacgtttgaacgccaggtggccgagctcaacattcgcgcttcaatcctcaatcaatttaccgctctgggcacgccccagacggtcgctgctgcgtaa

SEQ ID NO: 511668 - DNA, 165 bp, Stenotrophomonas maltophilia
atgaggttgccggccagcggccggcactacctgtcggagggcgtgaggatgctggcgctggagatctgggccgcgcagctgtttgggtggatgcggcaggcggtgccccgcgtggtagtgccggccgctggccggaagttgcgggttcctgccgaaggttcatga

SEQ ID NO: 511669 - DNA, 3039 bp, Stenotrophomonas maltophilia
atgttcagcaaggaagaacagtctcgagttcttgcgagtctaagggacgctcagcgcgcagccttcgagaaaattagggcatatatcgatgccccacacggaggtcagtcatttctagctgtgctgccgaccggggcaggaaagtcgggattgatcgccaccctagcgcagtcgcagaagatcggatcaacattgatcctaagcccgcgagtggctgtctgcgaacaacttgccgaacaggtatctggcgggttctttgccgaccgatcagtgtcggtgagcgcgctacgagaagtagaaaacatcgatgaagaactcacagattcttccatttatgtggctaccttccaaaaattgttgtgcatgaatgaagatcggctaaaagatcttcagtcgagatgcgctctcgtaattattgacgaagggcatgcggagccggcaccaaagtggggttctctggttcgtagctttcagtgtcacaaggtcattctcacggcaactccctatcggaatgatctcttccaattcaatgtcggccaggatcagaatttctgctacaccttctctgatgcagtgggtgatgcggtaatcgcagatccagagttccaagcttgcgaaaggcacgaccttccaaaaatagttaaagaatttatcaagcagaatccacttgcaaaggtaattgttaaggcgagggattttcagggtgttgttgcagctaaacaggcaatggcgtcggaaggtttttcggttcttgcaattcacgatcgcttcaaaagcgatatcgccattggtgaattgagtgacgttccgaaggatattaaggggctagactttcaggtcattgtgcaccaaagaaaactggacgaaggtgttgatctgcccagtgcgaaactttgcattctcacctatccgatagctagtgggcgagaattggttcagacagtcggtcgagtggtgaggctgttcaacggtgtaacgccactgattattgattgcgcggctggaagtaaccaaaggctttgggaaaactacaagattttcgatcggtatatatccgatgcggtggcttggaataagttcgtaaggtctctggataccgctagtctcattgagagctatctggatgtgtttcctgatgttacttatctcggttctaactttaagagaaaatttgatattcaatcaatcgacgttgacaaggacgttgtaattccaacggcgtcggtttgtttcttatctgtagggcctggtttttcaattgaatcctttgttgataccttgttgtggaggtatcagagagagggcgagctgtcccgtcattgcctttctttgtacggattccatgtaatactttctgtaaaatttgaaaactcaaagtacttgaagggcagtttgttctttgagccctcgctgcatatcacaatcgctaaggtggttggggacctattggctgtttacgatagccgctcgataaatcattcgaatgatgtcgagcttagaactctacagcctgtggaagtgcagagattgcttagtctttctgctcgaggaaaatccgttagggtaaaagagactcatgccaggtccgtcggtacatcgcgcagcaggcctgagcgtgtgtcccagataagtcctgatctaaacgttgcacctaatgggcaggccgctgcaagctatgcactgtccgtaactaaggttgtcaatgtcgatgcggcacagcgtgtggaaagtagctactatttgagtgcggcatctgggcgagtggccgaccaaaagcagcattccttcagtctagaaagtctgtctgactggctggatgaagtgacctcggtgatatcaaaaagagttacccagttgagtcctgcaataaatggatatgccctacctatcgcagccgatctaagtggtgatcctgtttccgcaacatttgacttcagtgggttggacggggttgctaacgtattccaggggagtagtcgaggccaaattgctgctgggattgagtacgttgaagttagttcctggaagctcaagctggcaggcgcaagaatttcgatggcctacagcagtgctgaagagcggattaaattctcatcgaaaaaccctatctcaatggccgtgatggggtctcctatcagcgacttcatcgactacttgaatcaatgtgaagtaaaaatactttttgccggtggcgtatcatatgttggcggaaaattctataggtcctccctcccgacatcagtgggatttgatctagattccaccgcgatgagtcgaattttctttcctctacctgagttgcaggctcttggattgacggagaaggggaggctagagggaaaagagtatgttggcacgctaaacgaaaagttcgatcaaaactcagtattcgatataatcgacagtttggccaaaggtccccatgcgaggtataaatctccacagtacaggtcactccaagcaatgattgcagatgctgacattgttatatgcagtgacatgggaacggaagctgcggattttataatttcttcgcctcgcttcctttgctacgttcatgcgaagtgtggcaactccgtgcggccgcgatcctcggccggggcgctcgcagaagttggaggtcaagcggtcaagaatatcgagtatctcataacgtcagatacgaatttgccttttgggaatgcggcgcttctgtcactggcttggcccagcgctggttcggcctacaagatatctcgacgacttcgggttctaaagaagtttggcgaaaatgtcgtgcttccggcaacgaactcggcttataacgttaggctaaataaagctatttccacgattgctgagcgccggagatcgcccgcttgcaggaaagaggcttggattgtcgctgccaactcgttctcattctctaatttcaggaagcagttggcgaaagggccctcagctaacgctgaatcacttcaagcctatcaattgatggattcatgggccgcgacatgcagtgcaaacgacgttgagcttagggtaattgtctctccttag

SEQ ID NO: 511670 - DNA, 1326 bp, Stenotrophomonas maltophilia
atgagcggacttaccgatagggacattcgtgtcctgtcctcctacgcaaaggagggaaaccgcgagctgtattggaactatctcgcgcagcttcccgataatgatggctatggactgctggcattgggcgttgtgcgcaacgacagtctccctggccgggtggccaacagctttgcaaccgccgttgccgagcaacaggctacgctgttcggcaacgagaagaacgtagcgttcaccgaacgcaggcaagaaaccttcggccaggatctgatcaggaacgacctggcagagcgcagaagttgggtggaggccggcaggcccgatcttgctctcaacctgccctatacgagcacgctcaagtcccacgatgtttccttcgaagccaacaacctcaatgtgaactgctggacgccacgcttgctgctggtgtccacggagcacaaacgcggcgatcaggcagccgagaaagtctggcagaacatgctggacaacagcgctgccggcgcattccgtgccggcaagacggccgtcagcgtgcacctggatatgccgcagcccgctgggcatttctacttcgttgagctgagcaagttcgagggcgcagcactcctgcagcgcgatgccgtcgatccgaacgtgattggtaacaagttcgactatcacagctacgaccccaaggacggcagctggaaccacacagtgggcgttcccccgctcgatagaacaaccaaagagaccgatcccgccgagatctccgcgttgaacgagacccgcgaagttcgcttggaacgcgaggccaaggcgaagcagtttcatcctgaagatccctacagagagatcgccaagagcccacgcgtggtgtctacgcaggaacccgagcctctctttacggaaggtcgccgaatcgcagcgatagagccaggcagcccggactacgcgctccatcagcagattcgccagggcgtcgctgcactggacgagaagcacggccgccccttcgacgcgaccagtgagaacctcgccgccagcctgacagtgaaggcacgcgagcagggtctggaacaggtggaccatgtggtgctgagcaacgccacggccaatcagccgccgggtcacaccatctttgttgtacaaggcgacctatctgaccccgcccacctgcgtgcagggatgcccactgccgtggctgcacaaacgccggtggctgagtcgctgcagcaactggctgtggtgggcgatcagcgcgagctcgcccgccagaatgagcagcaggcgctggatgcacgtacgcaggaacagcagagccacgccatgcgcatgggctga

SEQ ID NO: 511671 - DNA, 1146 bp, Stenotrophomonas maltophilia
atgaaccggcgttggatgttcgtgttgatgctggtgagtgcgctggtgctggtgatgccgcgggcgtgggcgcagtggccgccggaaacgcatccggccgaccagagccgggacatcgtaatgagctgggatcgctcggcggtaccgggtgatgtggagttgtgggcgccgcggacggtgttgggattcagtcacgacctggcgctgaagtatgggcagatccatgtggtttgtgagtctgcttcagatagtgaattcggtcggtgcccgacggagggagcccttcccctaattactggaacatccgaggtcatgttgcgtcttgtggagcagcggacgggtctgactgcagaagtccgtgctattggaagcctacagagagtcatgtcaggtcgcgtctgcgcaggtgatttctgggaagaaagtccgcgacctttgtactcggcattctggtttcggtgtggcgtggggactggagcagatgagccgattggagccggtatcgagctggccctgcctcaacgcgaaatctcgcggctcgtagcaggccattggaaggccacgatgcgcctgaatatcaaggccgatcccgccgcagcacccgtcgccacggccaccttcaacttcgatttcaccgtcaccgactacgacgcgatctcgatctacttcccgaccttcgacaccgtcgcgccgctggtcaatctcgatctgcgctacgaccccatccagaaggtggtgggtggcaggaaacaactggatatgtgcctgtacgacggtctgggttcgcagagcgagtacctcgacgtcacggttcgcgacagcggtccacgcccacctgcgggatcggacttttcgctctggcaccgcgatggcggcagcgatgccagccagcgcctggactaccgcgtccacctggactacggcggccaccgcctggcgatgaagcacaacgtcaagcagcagctgcgcggcatcgacagcgcacagctgcggctggtgatgctgccgggcatcagccagccggtgtactgcgtgccgacgccgctgaccctggaaacaccgcccacccctatcgccagccagcgccccggcctgtacgagggcgagctgaccgtggtgctcgatgtccccactgccaaaccctga

SEQ ID NO: 511672 - DNA, 3990 bp, Stenotrophomonas maltophilia
atgaatcgaatctatcgtcgtatctggaatcacgccaaaggctgctgggaggtggccagcgagctgaccaggccctgtggcagaaaagcgagccgcgtaaccggcgccggtggactgctgatggtcgcactgctgttggcgggcggagaggtgcacgccaagacccgttactacattgggtgcgatcccttcaatctgggaaatggcgagtttgtttcctgctcgcctattgctggccgctatgacgacaccatgttcgtcggctatgcgctgaccaacggcctgaactcgcttggctacggtgcaggcgtgaacatgagaggcgacaacaccaccgcatttggcatcggtgcccggatagacggacagaacagcgccgcgtttggcttcaaggcacggaccagtggcgttgatagtgttgcctttgggtacaacgccagcgccaatggcggtcacgcactggcaatgggtgcgaacgcatacaccggagcacttggggctacggccgtgggcaacgatgctgcggccacccggcagaatgcggtggcccttggcagcggctccagcgcggaaaaggagaatgcggtggcgctgggtgccaacgcattgtccaacggtgtagatggagtggcgctgggaagcaaagcaatggtcgacaccggtgcgggcacgggtggcgtcgccatcggtggtggtgctcgcgcggggagctggggttacaccggtgccatcgccatcggcggcgatacgcgcgcgtacatcgacggcgtcgcgctgggctatgcggcgtctgcctccgcacagggcgccgtagccctgggtgttcgctcggtggccacggaagccaatacggtgtcggtaggcagcgcctcggtgcgccgtcgcatcgtgaacgtggccgatggtcgtgtcaccgcctccagcaccgatgcggtcaccggcaagcagctgcatgccatgaacgagcgggttgacggcatgatcaagcaggattccgcaggtggcgtcgtgcgcatcgccaacagcaataccggctcggaagtcagcatgcgcaatgcggtgctggccacgcgcaaggtgagtggcgtgtccgacggcgcgctgacgacgaccagcaccgaagccgtgaacggacgccagctcaacacaaccaatggcaatgtcatcaaggcgcagaccgctgcgggagaggccaaatctgatgcgagcaacgcgctgactcaggtggtgacgctgggcggcctggtcggggaggtgtctgcaaccggcaatgtccgcttgggtgaaaagaacagcggaacggtgttggatgtgcgcaatagcgccaatgcgaaccggaaactggccggcgtggcagatggggtggtcagcgccagcagctacgagggcgtcaacggcaggcagctcaatgccactaatgacaaggtggcggcggtggagagtattgccagggctgcgggcacagaggcggcggcggccaagacggatgcagccaaggcgttggtcgaaaccgcggcgcttggcgggctggtggcacaagtgtctacgactggcaatgtgcgtctgggcgaaaggaacagcggaacgacgttggatgttcgcaatagcgccaatgccaaccggaagatcagtggtgtggcggatggcttaattgatgctggtagcaccgaagccgtgtcgggccgtcagctccacgcgtcgaacggtcgaatttcggaattggagagcactaatcagtatataagtgtgggcgttgactcattcagtgaacgcgcagaagcggccttgcttggtgtggctgttggtgattcagcgaaggccggagcggaaggaggcaccgccttgggcgcgttcgcagccgcattgggaaagaactcagtggcagtcggccgtggagctggggtctccggtgaagcatctggtggatttgcgatgggagctggtgctcaagtgcatgcagtcaatggtgtcgcaattggagcgggagctgttgttgaaggctcggccgccggctcattggcgttcggcgcgggatcctttgctgacgagacggatacggcatctttcggtaatgctacgaatcaacgtcgtctcgcctacatcgctcgtggctctgccgaccacaatgccactgctgtttcccagctcagggactctctcgctaccctcggtggcggcgcaggcatggatgccagcggaaatatcatcgccccaacctactcggtgcagggcggaacgcagagcacggtcgaagacgcactgatggcgcttgatggcgccgtcatcactgcaggtcgtcgcgcgggcaagatggaagatcagctcagctcgattttccaggactcgccgtcggcccgtgccgatggcatgaatcagatcgcgctcagtggcgtgagtggcatggtgctgaccaacttggctgacggtcgggtagcgccaggaagccgtgatgccgtgaacggcagccagttgtacgccgcagagcagaagatctcgcagaatcggaatgatctggaggcgatgcgtatggagcgggagatggggcagcaggcgatgcgtggattggactcgagcgtcattgactacggcggtgcgcgtttgactggtgtgtccgatggttcagtctctgcggatagtcacgacgtggtcaccggtcgccagttgtttggcgtcagtgatcgggtatctaagatcgagcatcagggccgcttcctcaaaattgatacggatcagctgagcgaagatgccttcgcaggattcttgggtgttgcaatcggtgactcggctcgtacgcagggcgagggggggacggctgtcggttcgtttgcctcttcgctgggcgtaaattctgtcgctataggccgtggatcttccgtgtcagcgaactccttgaatggcttcgcggtgggggctggtgcacatgtcgcatcgacgaacggagtttcaattggtgcaagttcaagagtccacgcgggcgcagagggatcattggcgctgggcgtggggtctgaagctactgaggcaggaaccgcatcctttgggagtgcaggaactgagcgccgcctcgtaaacatcgccaacggcaccgccaaccacaacgccgccaccgtcggccagctgcgcggcgcgctgtccgcgctcggcagcgaagtcgatgccaacggcaacatcgtcggccccaccttcaccgtgcagggccagtcccagtccacgctcaatggtgcattggaagcgctcgacggcgcagtggtcagcaaccgctcgcgggtgaaccaggtcgagtcgcagctgcgcagcgtgttccaggacacgtcctccgtccgcgccgacggtctcaaccagctcaccctggccggaacccacggcatggtcatctccaacgtggccaatggcctgatcgcggccggcagccgcgatgcggtcaatggtggccagctgtattcgatgcagcagcagctcaacggtcgtatcgatggcctggaggagcgcatcgatgcgccgcagccgcgggcaatggccgtcgcgtcggtgcccgaaccggaagcgccggtgccgctggccgatggcggccagcaggtggcgtcggtcggcgagggtgagaagcccgcgcctcagccgaagacgaagaaggatgagacgcccaagccgcaggtcgatactgctgagctggagaagatgctggcccgcgccaacgagtacaccgatggcgcgatcagcaacttcgagcgtcgcctggacaagatggacaagcgcttcaaccgcatggcggcgatgagcagcgcgcagaccgcgatggcgatgaacaccgccggcctggccacctacaaccgcctgggtgcgggcgtgggctacagcgagggtgagtcggcgatggcggtgggctaccagcgtgtgctcaacgagaagggctcggccaccttcagcctcaatggcgcgttcaccaacagcggcgaacgcagcatgggcgtcggcgtgggcatcggctggtaa

SEQ ID NO: 511673 - DNA, 216 bp, Stenotrophomonas maltophilia
atgcgtcttggcgtgcacgacagcgcccatgtgcgggaagccatctttcaggaggtccagaagcgcctgcgctacctgatgaccagttcgcccgagcaaggcatgttcaagccctatcatttggcaccggagtcctcagtagccaaactgtttgtagattgggtcgtccctatggaatgggcgtactggacaggtgagcgccaccccagccgctag

SEQ ID NO: 511674 - DNA, 198 bp, Stenotrophomonas maltophilia
atgaaggtatttctccatcaggtgctgtgcatcgctatcaccgcgctctatggcggcttgtatcggcgtgttaccgaagtcatcgacgatgtcttgcttcgccccaaagcggagcagggcatggattaccccagggtcgccagcgaggtgcagcgcagtctgtccgtcgctgttggtcgcgttgacgtctacatgtga

SEQ ID NO: 511675 - DNA, 459 bp, Stenotrophomonas maltophilia
ttggccttcacccccgacactgacatagaagccgctgagctcgttgagagcctggtccagttcttgttcgggggcgagcgtacatatgaagcaatgcgcaccggtgtggagcaagcctttcggcgcgcgcggcaccagcacggctcggtgatctatgaccgacgtgaatggtggatcggcactgacgacttcgctcagttcatggtggaccgtggccctgcccccgctttcttcgtgccaaccgtcgatgtcattcgctatgcggatctcagcgtttgggagggtgcactgagccgtgaggccgacatccgggctctggcctggcccctgccattcgacgcgctcgagagcgtggcgggcttcacgccagaagcgatcaacacaggctggattctctacgcgctggtgagccgcgcaggccttcgggcgggccagatagttcttaaactatacacgtag

SEQ ID NO: 511676 - DNA, 510 bp, Stenotrophomonas maltophilia
atgatctcctccacctaccaaggcttccgcaccgcgccaattccctctggttgggcccagaccggtgagcgctgggcgctctggtataacggccgcgagacggctggcgtcacgcccgatggtggtcccaggggccggctatggatggaaggccagaagatgtggcaggtgaaggaagtgcgcgcggcaaacgtccggcaggcgaagcgatacgccgagcgatggtgtgctgccaggctctatcccgatctgcctctgcgccaagcggttgcccggctgaccgacagcaccccgattcagcccgagccgccggtgcccggcctgccgccgacccgagagcagcagcaacaggcccggcggctggccgaggccacgtcagctgccacagcgagggtcagggaggcactggagccgcgccgatcgccggaggagaccaagcccagggcgaaggacccgatgaaggcatgggtgagagctgggcgcaccgaagtaacgcgaagcagtaggtaa

SEQ ID NO: 511677 - DNA, 888 bp, Stenotrophomonas maltophilia
atgcagagacttacccattcatttactctttttcgcgttcagctacacaagcctcaacagatgcctctgcttggggtggaggcgacagaagcgcaaatcctcagagctgcattgctcgaaaagccttgggacgaggtccgagggcacatttggagagttggcaatgtcagcgaggtctccggcgatgcgatggttttcttcataggaaaagagcagccgacgacgtttggcacagtcggcgcggatggcgatttccatgaagcggaggcagtagtggctccgaatactctggttgttgtggatctcaaatatcagcttttagccattgctcaccgggtgcagctctctcagagtgtttacgcggtcgcgagcaggattcgcactttgcttgcgtcaagtcagagtgtccgtgagacggaatgcaaagtttctgtagcagccgttaatgaccctacagatttcattcgggtcttggagacggctcaggcggtggtgaagttcaaggtcacctacgggctgccgaacgtttgggacgccgatgatttccagaagccaatgcaggaaacaactcgcattctgggtgccgatgagggagctgcggtcttcaagggtgatgatcttcgaagagggccgctagttcgcctcgcaaaggcatcgtccgcaattggcaaggcagctgtcgcttgggtgaagaagtctgccggcgatagagttgtgaccgtcaagcagaagaacaatcctgtgatccttgagcaggatatcgtcacagaggactcgtctgtctcagggcaggatgtggcgtacgtcgaacaatctcagccactgagaattgcggacctcatagtacgacgtatgagagaagagtacttaaagataagacatgagtga

SEQ ID NO: 511678 - DNA, 540 bp, Stenotrophomonas maltophilia
atgagtgacgagcccatccccacgttctggcattggttcttccacggtgttgccaaaaggcctggctataggcgcgtggctaatgcttggggatttcttcatcttgccttggggggcattgtcgcgttcgtggtcgaagttgacttccaggagcttgcgaagggtgcactgctacctctgatggcgattctggtcggcctgaccttttcttgggccggtaacgttaattcgatcatgcagaccgaagaggtgcagaaattcttgaacgagaagggtgggccgctggagtatgtttacacgtttcagttgtgcattcttatcaacatttccgtcatctccgcttggtgtgtccctctactgaatttgccgtacttgcttccctgccagacacgggcgccggtggaaggcgcgatggcggccgtgctgtttgcttcggtctccctcgcagttcggaccggctggcacgcggtagtcgggtcgaacatgttgctcttgcgcaagctcatccaaggtggcagtccgggtggagggattgagtaa

SEQ ID NO: 511679 - DNA, 123 bp, Stenotrophomonas maltophilia
atgactccccgacacatcgtggaaacctggatcgagcgcttcaacgcaggcgatgctgctggcctggcggagctgtatcaccccgacgcgatcaatcaccaggtcacccaggacccgatctag

SEQ ID NO: 511680 - DNA, 1161 bp, Stenotrophomonas maltophilia
atgtggctggacgagccagtcgcacggacccgcaaaccgacagatgaagagatcaacagcaaatactcagctcgagagcttcgcattgttacggaatcgaatcgcgagcaactcccaaatttcgtagctgcactcaagcgcgcggattggatgcggctgcagccgttctaccaacgccggaaacgttgggatgtcaagcgaaagtctaagctaattgagtctctcatcatgaacatccctgttcctccgtgtttccttttcgagtcggattttgcccgatacgaggtaatggacgggcaacaacgtatctcgactattagcgaattctacgagaacagtttcaagctccgcggtctagagcagtggccagagcttaacggtcgacagtacagcacgctgcccagcgagatccgtaaaggattggatcgtcgatcaatttcctacatcgtactgcttaaggaatctgccaccaccggggagcacgagatgcttctacggcagcaggtttttgaacgccttaacactggcggcgtgcaccttgagaaccaagagatccgccactgcatttatcacaatgagttcgacgatcttcttctggagctctctcgacacccgaggatgagggcggcgtggggtctgccgaagtacagcgaggaagaggaacagaacccatcagattctttgcttaataaccctcatttcagcaagatgagagacgttgaattcgtccttcgattcttctctcttcgccatcgcaatcagtatcgtgggggacttcagcagttccttgataggtacatggttcgaagccggaagttcaatgcggctgatataagcgagctgcgtgcgatcttcagtgaaactattgagctggcggctgaagtttacggcgcggagttgtttaagccatgggtgcagaagcaaggccgaattgcccgccagcctcagattgccttcgccgacgctgtaatggttgggctgagcgagaatctcggcaatcgcgagaagttgctccatcgttcaaaggaggtcgttcaggcgacgcatcgactggttgctaccgctcgtcctggcaccttcactggccaaggaaacaccgcaaaggcaatccaagagaggatggacgctttcaaagacatgttaactgctgttttggcataa

SEQ ID NO: 511681 - DNA, 1038 bp, Stenotrophomonas maltophilia
atgttcaactcgcaaccagcggcactatctcgccaattggctgacttaagggcagctgtcctatggcaagaaagcctacggcagaccttgaatgctgctacgccgaatattgccccccttgggctggaccaagcggctgtcgatattctcaggagtggggcaccggacaaactggcttggcagatccttgattcctcggcagccgtgacccgaacttacgcattatgggaacaggcaatttgcgatcttgttgaagaatacgtagatgagatatcaaaactccatcctacctataacggattagcggaggctgtacggataaatcatcgggtcggcgtcggttacatactttcgaaatgggcgccgaccaacactcttttttcaacgttgtctgaggacgcgattgcaaatggattggttgatggcctccgggggaacgcttacaagctgctggccgatgcatttcttaccgactctgacaattatcgcgcggatgtcgtgaacaggatttttgccaagctgggtgtcgagaacgccttcgctcgagcgtgtaccgtgccggaaggaaagccactatttgaccgtatcatctgggatgaagatacccctgcgaactacctgaagagaattattacggaacgtaatgaggcatcgcacggagccgtatcgaacatcagtggatcgaatcagctagtcgcttacgcagacttcgttgagactctatgcctatgccttgccacattgttgcggactcagataatcgaagcaggtcgctcaaccggcgcgactaaggaggtggcggtagcagtgaagaagtacacaggcaaaattttcggttcgcgtgcgtctcaacgaattaggttggaacccggcctttcgttcttcgctggaaagggattgatttacgagatcacgatcgaggaactgaggattggaaacactgtagtggcggaaatcaatgctgaagcagggactgagttcggcatgagactaaaccgagatttgccggagggcgcttcgctattagttctctcatag

SEQ ID NO: 511682 - DNA, 918 bp, Stenotrophomonas maltophilia
atgggagaggctaatagaagaggggatcgcagtacacgcattgctctcgcacttagagaagcgatgccgctcaaactagatgtacgcagggaagcacaggaaggaatatcctccacttcatactcgactattgcggaatctggtcgcgaaatatctcccatggaaggcgtaatgcctatcgttgtaaagggaccgagtggagacgacttgagggtcgttgggacgggattctttgtcggcccaaacatgatacttacagcaaaacatgtttttgatgaaggagaattacctagatttgcttgcgttcagataaaggatgccactaacgaattctattttcgacagttcaggcaagttataaggcaccctgtatcggacgtggcactttgtgagctccacccactgctgcacgctgagcacgaagtagcgcttccaaactatgtacttccagtcggcggacctgttccatcgcccggattgaagctgaccacttacgcattccccgatacagttgttgcacgccataacggggtgcttcacatgggcattgcggggcaccattacgatggcgctgttttggatgtcttcccagtacagcgagatcgcgtgatgttgaattttccttgcatgcgaacctcaattcatttgcacggcggcgcgagcggaggccctgtgatcaacccagaaacggggattgtggtggcaatcaacacctcaagcttccagggcgccaccgatgagtcacacgtcacgctcattcacccaattctggattttccgatctataaaacacattacgttggtaacgtgtctctgggcattacgttgcgcgggctgtcctcccgtggtgctgcgagagttttccctgagaactcacttgttcggcacacagccgcgccgaccatcatggagttgtag

SEQ ID NO: 511683 - DNA, 891 bp, Stenotrophomonas maltophilia
atggattcttttgccagctcagccgaaatagggaaagcggagacttcgtgggcgctgacgaaccagaccaagcagagcgagctagagcagatatttgagcgtggccggatagacttcaatacggcagggttttatgactctgtagagttcctcaagcaggagcagcgtgatcctggctatcttgagttctatgcgaggtacgttgaagcgaagaagtacgatgagagctatctagcgaacgcgagacagaagattgctatcgtgacggaagcggtgcgcgcatcggtcgagagagatggtaggttaggagcgtgtgtagacgcctcgggcatgattgggcgaatgctggacaggctaggaatctggaactacgtagcaaaggcaactctcactatcgaattcccatcagcgtcagctctttcgcctcgccacttctgggccatcgaccacggtcaattcactgcaccgcacgccatagttgttgcacccccatattatctagtagacgctaccgtaaaacatcaaccctacgatgctcgaagagcgaatctcatcccagatttagttctttctgataattttgagcctgcacggtggcgtcctgaggatcttgcgaatcctatgctattgcaattactcaagcaacggcgactcaagttcaaagattacatcgcaagatatgctccgagcatggcagaactcatgaaccagctgcctgctcgatcgttttctctcaacggcacatcgcttcgctatgtgattgttgcaattggaggcacagtcgagccccttgaggagattaccggctataagccgagcggccgtaccgcacaggaaatttttgatcaggatgtgttaccgaagctcgcgtcgaccgatcaatcgacatga

SEQ ID NO: 511684 - DNA, 471 bp, Stenotrophomonas maltophilia
atgaagccgaccatcttggcattggacctggaaggaacgctgatctccaacgccataagccagattcccaggcccggactctttcagtttctggagagcgtacgttctcagtttgaagagctcgtcatgttcacgaccgtgccggagcctcttacgcgaaatattgctgggctcttggttcgcgaagggagcgcgccagagtggttcactcaactcccgtacgttcagtggtcgggcaagaccaaggatctgtcgtacgtctgccctcgacttgggggggctcttctcttagacgaccatggcccttacgtgcaccccggacaggagcagttctgggttgagatcccgctgtacgaatcgccgtactcggaagacgacaaggggctgaagattgcctctgcgaggttgctcgagagactctcacttctggaaaaatcgatatccgacaagctgagaccagagcttcgctaa

SEQ ID NO: 511685 - DNA, 684 bp, Stenotrophomonas maltophilia
gtgggacacctaacgctgatcgatcccgatgaactcaccgccagcaaccttgggcggcacgttctcggtgccagcgatctgggtaggaacaaggcagaagcaatgtgcgaccgcctacggtcagacgttccgatcgtctctatcaaggcaattccaacatacgttgaactggctctcgtcaagaatcacgcagacttccagaaggcggatctcatcatcgtgaccagcgcggactgggagtcagaagaaatgctgtggcgggctaagagcgtaggagccccttggaggctgattcaggcctggagcgagccgcatgctcttgttggtcatgcattgatcgctgcagacgttgaagccgatgctaggtcgctgttcgaggacaacgggagattccgatacaagttcaccaactggaacggaggcgacagcgtacccctacctgcctgtggacagagcttcatacccggcggtgggcttggagttagtgcaatcgcttcgatggttgccgccgaagcaatcgaacagctgacatccagctcgaccgagccactttggataagccgtatcagcaacccacagagggcttcagaactggacgggcagtacgttggccccaaactatccagtggggcgactgagatgactctgaagcgagcatggcctgggactgcccccaatgcctga

SEQ ID NO: 511686 - DNA, 1449 bp, Stenotrophomonas maltophilia
atgcgcgcagcccgtaccgccaccctcttgctggccctgttgccggcgctgtcctgggcgcagcagaccgcgcccgccccgagcaaggaaaccagcgggcaggcagcgaacagcgaggaggcggtgacctcgaaggtgccgctggaggacatccgccgcttcgtggcggtgtacaacgcggtgcgcgcggcctatgtcgacccggtcgatgacaagaagctgatgcagtcggcggtgcgcggcctgctgctcgacctcgacccgcacagcacgtacttcaacaaggaagacgcgcaggccttcgacgagcaggccaacggcgcctacgagggcatcggcgtggagttgcagcagcagcccgacaacgccagcatgaaggtcatctcgccgatcgacgacacgccggcggccaaggccggcatcctcgccggtgacctgatcatcgccatcgacggcaagccgatcagcgccattgatgcgagcgaaccgttgcgtggcccggccggcagcaaggtggtgctgaccatcgtgcgcgcgggcaagccgaagccgttcgacgtcagcctcacccgccagaccatccgcgtgaccagcgtgcgcagccgcctgctggagccgggctacggctacatccgcctgagcaccttccaggccgacaccgggtcggacttccagaagcacctgcagcagctgcagaagcagtccggtggccagctcaagggcctggtgctggatctgcgcagcaacccgggcggccttttgactgccgcggtgcaggtggccgacgacctgctcgacaagggcaacatcgtcagcacccgcggccgcatcagcatcagtgatgcccggttcgatgcgacgccgggcgacctgctgaagggcgcaccagtggtggtgctggtcgatgccggttcggccagcgcctcggaagtgctggctggggcgctgcgcgacaacaagcgcgcgcgcgtggtcggcagccgcaccttcggcaaaggctcggtgcagaccgtgttgccgctggacaacggtgactcggtgaagctgaccaccgcgcgttattacacgcccagcggcaagtcgatccaggccactggcatcgtgccggaggtcgaactgaagcctgcggcgcgcccgggagacgaggcactgccggccagcctgagcgattacagcgaagcgaccctgccgggccatctgcgtggcgacgacgaaggcaccgagggctaccgcgccggtgcggtgctgccgggcgatggcccgatcaacgacgcgctggccgagctgaagaacccgggttcggtggctgcacgcttgaaggccgaagcggcgaaggcggatgcggccaaggctgcgaaggccgctgcggcgaagccggaagcgaaggtcgaacctaagccggaagcacagccggaagcaaagcccgcaccggccccagcgaagccgtga

SEQ ID NO: 511687 - DNA, 861 bp, Stenotrophomonas maltophilia
gtgatcgaacgttgccgcgacgagtttccggttcgactgatgtgccgctgtctgaaggtgtcggccagtggctattacgattggagcaagcgcctgcccagtgccggtcagctcgaaaatcaacgtttgctcgaccagatccgcgcgttgcatgaggacagtcggggcacacttggcgcaggccggatgcaggaagatctggccgatgccggccatagcctgagtctgaaccgggtggcgcgcctgatggcagctgacggcttgcagggctggccacgaccgaagcgccgaggccagcaaggcaggcctgcgttgactctgccaggcgtgcgtaaccggctggagcgggacttcagcgcattggagccggagaccaagtgggtcacggatatcaccgagatcaaaacccagcagagcaagctgtatctgtgcatcgttctggatctgtttgatcagcgagtggtgggctggtcgatgcaacaccgccaggaccgtcagatggtgattcgtgcggtgcagatggcagtctggcagcgtcaagaaagttacgaggtgatcctgcattcggatcgtggcacccagtttcgcagcggcgactatcagcgttatctagcggccaacagcctggtctgctcgatgagcgcggtggggcactgcggggacaacgctgcgtgcgaaggcttctttggcctgctcaaacgcgagcggatctatcgaacgagctacccgacactggatgcagcacgagcggatgtgtttgactacatcgagcgacgccacaatccaaggatgcggcgaagggtcgccaggcaggatcagaaggttgcagctcttttagaaccgtccgtgatttcggggtag

SEQ ID NO: 511688 - DNA, 288 bp, Stenotrophomonas maltophilia
atgtcgaagcgaaggaagttcagcgccgagttcaagcgtggtgcggtggagcaggcaagccagtcgggtgtgagctgcgcccaggtagcccgggagctgggaatccgggatacgttactgacacgctggaagcgtgaggcgcagggtcaggggtcagtcgtatttgctggtgccgggacgccccgggacgaggagcttgcgcagttgaagcgcgaactagcccgggtgaagaaggagcgggattttttgcgagaagcggcgacgttctttgccaagggatcatcctga

SEQ ID NO: 511689 - DNA, 831 bp, Stenotrophomonas maltophilia
atggatgacatggaacgcttccgtattcgcaacctagtgctgaatgacattgactctcaactaaaaggggatgacagctttcaagttgccagatacaagatgttcctgggcatcaaacatcacatgccgaagtttacgcatgcacgctatcaccggccctttgaaaacactgaaagcatcccagggacagcgatggtgctcgacaatgccctgtcgagagcgatgagagagattgcaaatcagatcaacggcttcggtcagatgatacgcaagcttgaagcatgggatctggtgatcgaaggactagatcacgagcaagtattttcgcttgcaattgagcacattgaaccgcttgccaatctcgccatttcggcgacacaagcaatccgagggcaaatgatctacgccacggtcgagtgtggcgcactcagcaacgctctcattgatgagcccctgggctgggacggccgcgcgaacgtcaccatgaagattgcaaagtccgtgactgagaactggaaagggtggccggatttggcaaagaagctgaccctccttgaagcccaggaactcaacgaggcaagcggacacttccggaacagctttcagcacggcgcgccccgccagctcgtcattgggctgacggagcacactgagtggaccaagcatactgatggttccttttcatggggaattgggactcacgatcccatcaggctcaatgagatcatcccccacttgaagaggactcacaacgaccttctcacggcgcacgaagcgctagtagagctttctaaggaatgggagtcttctgtgatgaatccagttccatag

SEQ ID NO: 511690 - DNA, 318 bp, Stenotrophomonas maltophilia
atggttgcccaagggctggccaaggccatgttccgtccaggctacggctacaagaaagcaggtgtcagcttgctcgatctgatccatatggatgtccagcagggggatctgtttgccgggattgatcagcgcagtaaggccatcatggaggttatggaccggaccaaccagaagttcggccggggctctatgggctttgctttcacggcttggcgtccaagcggaaagacccttgaaaagcccgcctggtcagtcaagagggacatgctctcgccggcttacaccacggattggaagcagctcattcgcgtgagataa

SEQ ID NO: 511691 - DNA, 633 bp, Stenotrophomonas maltophilia
atgacggctcgatggcgaccatccgtgccgcttcaccaggttcacgcccaggccgtacagcagcgaagccgccgcaccggccagcaccgcggtgccgatactcaggccggaaaccttggcggtggccagcaccactacgccagcgaagccaaccagcaaggcaccggcgcggcgcatgccgatcttctcgccgaagaacaggaaggcgatcagcgcggcgaacagcacggtcatcgcattgcagatcgcgccgatcgccgccggcgcctgttccgctgcataggcgaacagcacgaacggcaacgccgagttgatcaggccgatcggcgccagccacagccagcgccgcggcgggaactgcgcgcgggcgcgccacaggaacggcagcagcaccagcgcacccagcaccagccgcacttcgaccagcgcgaacgggccgaacgacggcaccgccacccgcatgaacaggaacgagcagccccagatggcgcccagcagggtcaattccagcggcgtgcgccaatcgcgctcggccgcctgtgggaccgcattcatgccttgcctccgtacatcgtcaattcctcgccaaggcggataggatcaggcgcagacgcccgccgcacaagcgcgtag

SEQ ID NO: 511692 - DNA, 549 bp, Stenotrophomonas maltophilia
gtggaccaggccacgctggttggccagcgcaccggccacgtcgagcgcgagttcctggcgggcgtacaggttgccatccacgttgcgcaggtcgcccgtgcggctggtcacgcgcgcattgccctcggcccccagcaggccattgctgttgtccagctgggaggccagcacctgcagctgaccggcgccacgctgcacgatggtgccagtgcggttgtccaatgccccggcagcgtccacggcaaggttgccgccagcatcgagccggccaccggtgttgacgatctccgtaccagccacgcgggcaccggtgcccgcggtcagcgtaccgccgctgttgtcgaggcgcccggcaacggccacgtccgcctcgccgttgccgacgatcaggccggcattgctgttgtccagggtgccggtctcgattttcagcacgcccgtgcccgcatgctcgatgcggccaccctggttcagcagctgcgcagccttcaggtggacactgccggcgttggcggcgatgcgcccgccggtgttgcgcagcgcgcctga

SEQ ID NO: 511693 - DNA, 363 bp, Stenotrophomonas maltophilia; identical to SEQ ID NO: 498292

SEQ ID NO: 511694 - DNA, 183 bp, Stenotrophomonas maltophilia
atggccggtgttcatcgcctgcagcatttccagtacttcggcgccgcgcacctcgccgaccacgatacggtccgggcgcatgcgcaggctgttgcggaccaggtcgcggatgctcaccgcgccatggccttcggcgccaccgatgcggctttccaggcggaccacgtgcgggtggttgagtga

SEQ ID NO: 511695 - DNA, 903 bp, Stenotrophomonas maltophilia
  misc_feature (138)..(147): n is a, c, g, or t
atgctaaataaaattcaaacaaaattacgtaaagtggtgatggcatttgtcaaagctgacgccgccaatgggacaatcaaaaatcaagcggtcaacgtagagaaggacaagtcaccaacaatcgtgattgccatttcnnnnnnnnnnacaatcgtgattgccatttccagtgggaaggtgaagtcggaatttgatgtggatcacgatcaggatggcaatcgcctatctcgtgcaatctacatggatgatgcgacagcttttaagtcgctagtggaggacaacccaagttttgctcagcactacactattcatcgtataggaaaaaacgatctaaaggcatgctcaacactcaactacattgttgagtgcggcagaggtgggcaagacgtgcttaaaagcactcaggaaatgatatcgttcgcacttgactgtggggcggatatcaacgcgcgtgcgcctgatgatagatggaacccgtctggttggaccccacttgaaacagctatctattccgacagatatctattgatcccatttctgattcaaaacggggcgcgcccgatccacggcccgcgagcggatgcgttgactgatgatgcgaaaatgctatgggcattctttcggcagacagtaggttgctcaacgtgcaccgactcggaattggtgaatattgttgatgcctttgcttcaataggattggttaagagtggctttgagttgaccggttgtgaagccttggacacccaagaaatgatgagtatcgcccaaaattgcaggaagtcatttatggacctgatcgcccaggttgacgcggccaaagcgaagaaagagaaggaaattttgttgcgcgaacttgctatcccttctgaacatattgaagtccggcccaagcggcgaatgtaa

SEQ ID NO: 511696 - DNA, 441 bp, Stenotrophomonas maltophilia
atggttggatctttttacgacagtgcgccggccaccgagcagcaaagaatttggcgcgagtcggcaccaatgggccgcatctttgaacagccggaacccatcgttctaggaccattgctgtgcgatgcattggacttcaacgctgcggaattgccaagtgatttaacgttctggcgttcggccatcgaagacctggcgcttcgattgcacgaagggctcaaagtcacgcccagggcggcggccaagatcatgtgcgcgtacaacatccatgttcgttttaaggatcttccaacaccccaatggtctatcgctgacagccccacagaagtcgaattgacccagcacctcagcgatttcctgcatcacaaacaacgtcagcgattgcaccacgccattggtggcgagcttaaccattcggaaaggatagagcggcgaatgtaa

SEQ ID NO: 511697 - DNA, 231 bp, Stenotrophomonas maltophilia
atgaaagttgcaatcaacgctttaatcggaacgatctggattgggttttggtcaaccatcgtcggcttccttgtcagtggggtgttgtggggaagtatggacttggggccggttgttggcgtcctgggcttcctcattggcgccggcattccgttcttcttcctcatgcgtaacatgcttcgcaatatcgccaagtaccaagcagagcagcgcatgcgaacctactattga

SEQ ID NO: 511698 - DNA, 750 bp, Stenotrophomonas maltophilia
atgactgtagatgtgtttcagcttgcaattgaaaaaaggtatgatgaacttctggcagtcattgatcggggcgaggtcgaggacttagacgccaatagtccagacaattgttttactttgttgcattacgcagtgttggctgataattctttgttgatacgtgatcttattcgccgaggggcgaacgtaagtgttgttgatgccaacagaatgacgccgctggcgtggccaagttcggcgcattcagtcaaggcgctacttgatgcgggcgcggacattaacgcaatagatgattttggagtctctccaatcttccattattgggggagtgacgatggtgatgctattgaactgctggtgcaggcaggtgcgaatgtcaatgcgagaaacaaagacggtgaaacagttctaatgcatcacttcatgaacgcaagtgagatgtgtgcgaatgaggttgtttcagtgtcggccttattatccgctggggcggatgtaaatgcggtcaatggttcgggtgacacggttttacatttggcggcagatggttcaattgatgaggatttaattgaggtgctgcttgctgctggtgccaatccctctgcggtgaatgctagtgggctaacgccaagtgatgtcgcaaacgatccaggcatcaaagcaattattcaacgagcagtgctgaatgcagaattgctttcattgattgaaagttcacccgatcgcatcaagcgtggtgacggcgggatctga

SEQ ID NO: 511699 - DNA, 1782 bp, Stenotrophomonas maltophilia
atgaaacacaataaacattccagcttttttttagctctatgcatcggcatggctttaagcggacatgctgcagctcaatcaacggtcaatgtcggtgaaggcaacacatccaccgatgatgctccatcctatgcatccggagccattttaattggttatgacaacatcaataatggcgtgcaaaacaatctcaatggctttggcaacacaagcatttggtcctccacagtagtgcccgatccatcggtcatgtacggactcacacggaataccgcattcggaaactttaatttcctgcaagggtatggcttgtatgcaaatggcataaacaaccgagttcttgacggaaacgaagtcttcgtttccggtcgtgacaatcagttgcgaggccaaaacgttttcgtgtctggcgatcgcaatgtcagcgacgcactttccaacggagcaatggcctacggctcaagcaatggcttgtacggctacgcaatgatttacggaacgagcaacgtaggccacagcggttttatatctggaaccaacaacttcatcatgtccgaggcaggtggggcagtgtttggcgtgtccaactacgaatacggaacgaacaactatctgttcgggtatggaaaccgcactgccgaaacagcaggtggcaacctgttgtcgggaacttacaaccaagcaagcggaaccaacagcacactggttggtcacttcaacaacgcagttggcaatggcggtttgggattgggtaacaacacccaggtcagcggcgcttgcgtgtcactcgggaattattctgagtgtaatgaagccaacactgtgtcgttcggcaacgaacgagcaaacggcactaaacgtttgttatatgtgtcaaatggaattagcagtaccgacgcagtaaacctcggccaattgtcggatcttgctcaaactcttggcggaaccgcaggcttcaccaacggcgtatacaacgggtggagcgtgaacttgggcgggtcgacctacggcaacgttcacgacgctcttgtgggcttggatggacgcctcacggccgtggaaaacaaccccggtggcggaacaggaacacccggaccgaaaggcgacaaaggcgacaaaggcgatccaggtgtgggcacacctggccgcgatggaattgatggggttgccggcgccccaggccgagacggtagcgatgggttgaacggtgcagacggtcgaagcgcgtatgaggttgcggttgatgacggctacaaaggatccgaacaggagtggcttgcttcacttcatggccgcgatggcaaggacggacttgacggtgcaacggatcctctggctgtgaaatacgacgacgaaagcaaatccacagccacgctgcaaagcgcttccggtggatccacccgcgtgagtggcgttgcttcggggcgtatttcgcaaggatccacggacgcggtgaacggtggacagttgtgggatatggagaaccgttggaacgatcggtgggatgacaccaacagacgcatttcgcagcaggacaagcggatcaacggcttgggcgcgcaatcgatggcgatgagtcagatggcaatgtccagtcaatacctgcctgttggaaaagtctctttcaacatgggcgtgggcttctacgggccagccgctgcggtggctcttggaggatcagcacaggtaactgagcgcattcgcttagtcggcggcatcactggcggatctggtggaacaagtgttggcggcggcttcggggcttcaatcaccttcgactga

SEQ ID NO: 511700 - DNA, 774 bp, Stenotrophomonas maltophilia
atgaataaatctgttttgcttgcttttgggttgtctttaattgtttcatcggccagcgcattcggcgagggagcatttgtaagtcatgaaggtgaggcgctgcatagctttgttgagcgtgtgtcgttggctgagcggtcatcgagctgcgggtatatatcgaaagcggaaagcgcttatcgcattcgtctggtggactgtgcgctgaaatactctgatgcggaacttgttgtttacaccgctggtggctgggcgcgtctggcatttgagtcaatgagtgcgtcaataaatattgggggcagcaatcttgagggtagggttcttggtgaattgactgcacgttctgcaatgacaatggatcaatttgccgtatcgatttcgggtccaattgtgcagtacaccaaaaacactcagcacgaagtgtgcgctcagatttgcaagtccccacagggggattggggtgcagtcgtcacaacggtcggttcgcacgtgatgtgccccatcaccagtgtttgccccgagggcatgaccgcgacaggtcaggggattcattcgcacccaactggttcgacctacaaaatcaatgctgctgacaaggctgtgcttctatcgggtccgttttatcgcctgggcgctaaagaagcacgtggccaaacagatgtcttttccgcagaagatttcaaggctgggcctggctacatggtcaccgacaagggccgcttgatgcatcaagacggccccaaaaaggttcgggttataagcattgataggtga

SEQ ID NO: 511701 - DNA, 312 bp, Stenotrophomonas maltophilia; identical to SEQ ID NO: 501977

SEQ ID NO: 511702 - DNA, 543 bp, Stenotrophomonas maltophilia; identical to SEQ ID NO: 508092

SEQ ID NO: 511703 - DNA, 435 bp, Stenotrophomonas maltophilia
atgttgttgatcggcagtcctggctgcggcaagacgctgctggcctcgcgcctgcccagcctgttgccggataccgaagaaaccgaggcactgcagctggccgcgattgcctcggtgagtggcgaagggctggacccaagacgatggcggcagcggccgttccgttctccccaccacagtgcgagcgcggcggcgctggtgggcggcggcaatccaccctgccccggcgagatctcgctggcccatcacggcgtgctgttcctggatgagcttccagagtggaaccgcagtgcgttggaaaccctgcgtgagccgctggaatccggccacatccgcatcgcccgcgcggcgcgcagcgtgcagtatcccgcgcgattccaactggtggctgcgatgatccgggtctgtgcgatcgttagaagttcagtacactga

SEQ ID NO: 511704 - DNA, 1086 bp, Stenotrophomonas maltophilia
atggcgaggcttgcatcggaagcacctgccctacagttcgacactgacgatctgaagaagtgggggtacgtctggcgtattggcacaaaggctcggaagaagagcaagagcgctgcgggtgaagaggaagaggaggaggatgaagagctaagcggtgatcccgccgacgctgccgaagatctggtgagcgattccgtaccggttggtgaacctggttcgagcgcagctgaggttgagagcgaggctgcttctacggatgaagatcctgaagcgacagttgagcttgccgaagcggtagaagtgcaagagatcgagatcgttgcggcagcatcgcttccggaagtcgaagaaccggtggtagcggtcacgaaggttaggcggtcactctacatcgcgccattgacctcggtggaggctgggcttccgccagaactagcgggcaccgtcagcgagaacaagtacccctctgccttcactaagaagcagggcatggacttcggtctgacgttcgacagggctgtcggatcggcgttctctaagatgcttggtgacattgaggtggtggagtacaagacaggcagctcactactcccgcccaaaccggaatgcatcgaggttggaccggcacgtattatcggcggtgttcgacctcaaaactttgatgtcgcttaccgcccagatggcctgaggatcgcctacgacagcaagaccctgaatgacacttccagcgttcgcaagaattggcagaacatggtcaacgatcttggtacggaagcgacaacggttcatacccgcttcccctacgccatagttgcttttgtagtcgctattcccaagcctgcactacctaagaatcaggaggcagatatagtcaggacgcttgagcgactcgcaacgcgggagagtgtgatcgaccagacgcatctcgcagaggctatcgcgctcatcgtttgggacccgcttacgggtgagatttgcccgacttcgccggcgccaggttcgccccttaggcatgagaattttatgccgaagatcttccgctgctacacggaccgctacaaaggtctgcctccacatgacaagtga

SEQ ID NO: 511705 - DNA, 1635 bp, Stenotrophomonas maltophilia
gtgagtacttttttgaagtcgcaacctgatcccgacaagctgcgcgggggatactacactcctgagacgatcgcaaagttcgtatgcgagtgggcagttcgtcaagacggcgaacgcatacttgagccatcatgtggggacggcaacatcctggcagcagcagctaggcgagttgcctcgcttggagcgaagacctctgagctttacggtgtcgagttcttggctgaagaagcggcaaaagccctagctcgtctgaagaaggctaagctggaccacaacgcctgtatcctcaacgaggactacttcaccttcgccagccggcagaaggttgaaggcgttaagtacgatgtggtcatagggaacccgcccttcgtccggtatcaggactttcctgaagaccaacgaaacattgccttcgcgcttatgcgggagatggggcttagtcctagcaggctaactaacctttggcttccgttcttagctgtggccacgtcaagcctggcgccgggtgggcgcttggcgatggtaattccggctgagctttttcaggtcggctatgccgccgagctcaggcagttccttgccgaccacttcaagcaaatcgacatcgttactttcaagcaacttgtgtttccgacgatccagcaagaggtcgtgctgctacttgcagagaagcaatcgggggaaggaacaggcatccgggtgcacgaggtcgacaatgccgacgatctgccaaagttgaccagtagcagcatgatgaagcaggcggtcaagcctgtggatcatgctgaggagaagtggacgaagtacttcctcgagaaggacgagattctgctcttgcgtaacttgagagagcgtgaagacgtcgacttgctcggcaagcatgtagacgtcgatgttggcgtcgtaacaggaaataacgactacttccttctttctgaagaagaggttgccgagcaccaactacatgacgactgcattcctcttgtggggcgctcgctagcacttcaaggaacgcgcttcacaagtagtgacttcaatcgctgggctggcctcggtaagaaatgctacctgttcctccctaagtcgccctacggtgctgccgccgcgaagttcgttgagctcggtgaagaagcgaagataaatgaggggtacaaatgcagcattcggaaggaatggttccgcgtcccgtctgtctggacgcctgacttcttcttcctgaggcaagccgattcatcaccccgtatcgtagctaataccacctcggcgacctgtaccgatacgttgcaccgaggtcgcctgttgagcagcgtcaacaagaatcggctgtgcgccgcgtttacgaattccctgacgttcgcgacctccgaggttatcggcagaagctacggcggaggggtaatgacgtttgagccaagcgaagtagagaagctccccctgccaatgcttaacgccgagcttttggactggaagcagatcgacagtttgatccgagagaagaagctagaggaagcgctggacatcgttgatgaagtcgtgctggtccagggtctcgggctgaagaggactcaggtcaagatgctcagggggatttggaagaagatgagcaagagaagaaagggaaggcggcgttag

SEQ ID NO: 511706 - DNA, 858 bp, Stenotrophomonas maltophilia
atgacgatctggaggagtcagcctggtcttcacaggcagatccgggtccgtgcacatgaccgctttgagatcggcgtcgtcgaagccaggtctggcgagacgtggttagagcttcatggcagcctcgccgcgctgagcggggcgccatataagaacaaaacggacgtttggaccatatacgagaggtctatgaactcttatgttggctactacagggtatccactcaggctcaggggcggagtgggttgggtcttgaagcccaaaagcaatctgtcgaatgcttcgtcagaactatgggcggagagttgatagctgagttcgaagagatcgaatccggagcccggtgtggacgcccgagtctggagcgggcactcgctcttgccaaggcacgtcgggctgtacttgtcatcgcgaagctggatcggcttgctcgaaacgtcggatttatctcaaggctgatggaggcaaacatcgagttcgtggcggcagattcaccacatgccaacaagctaaccattcacatcatggcagccatggcggagtacgagcgagaccagatcagtcagcgcacgaaactcgcactcgaagcggcgaagcgaaggggcagaaagttgggcaaccctcgcctttccgaagtggcagcgcgaggtactgccaagcgagtagcccttgcggacactttcgctcgggagatgaagccatggttcgacctagcgcaaagcaacggtgcggactcttacggcgcgatctctgtctacctaaatgagcgctccgtgcccacgcagagaggacgcaaatggaccgcagccggagcgcggaatgtcgcgctccggcagctgagtctttcacaggtctaa

SEQ ID NO: 511707 - DNA, 930 bp, Stenotrophomonas maltophilia
atgaggtggaactggttagttttggtatcagtggtgcttttgttgggcgcgtgtcatcagggaacaagcgaactggactacccagcgacccaacgcaagttcgtggacttgaatcgtgggtgcatgctcgcctacggggctggcgccaacgagatccaaaggtccatggcgttcaattcgtgcaacaaggcacgcactaccttcgcctccaacagtccgatccggggatggctgggtagaattcagagcatcagtaccaaccaaggtgccgatgttgtgtcgcttggggttacgacgtctgtcgatggcttcgatataggctaccgaaccgtcagtaatcgtgtctccgacatcggctccggctctcttatcacgccggacaacccgcttttctctgtactggctgggatgcgtgagggcgaagtggtggagttcgacggcgagttcctgcaagaccccagcggtgaacgaggggtgtgggagtcaagcctcacggaaaaagggtcgattgaagagcccagcttcaatctacggttcactgcaattcgacgccctggcacagatatgacggctggcgccgaagctcagaccgcgcaggcgaccggcaacccgccagccacgccgccgacacatgaggcgcagaagcccgtgacgcagaatgatctgatgcgatcggaagcgattgccagcggaaggcagccctatcgaacaaccagatcacagctgcttaggttgggatatcagcccgaagccggagcgagtgaaagcctgcccaatagtgtagatggcgatccggcattgtgcgggaatgccggctgccagatcccctggacccgaggaggccagtccatgtgcgtcgcggtgacggtgaatgacgatctggaggagtcagcctggtcttcacaggcagatccgggtccgtgcacatga

SEQ ID NO: 511708 - DNA, 669 bp, Stenotrophomonas maltophilia
atgttcatccgtggcacccgcttttcgtacagcaaccttggcgcgaagcagcgccaggcacttcgcaacctcatccctaacgaggcatcgcctgctccgcaagttggcgccaagccgaggcgaaatcggcagggtgctctgtccttcggtccgcaaatcgacagggcggcatctaaagaggagcggatgaacgcagctcttcttgagtacttccacgagcgcgacttcaacggtgtggcagccaccctgacgtttcgtacggctcgcccccccgccgtcctgactctggaagctggtgaagcagctgtgcgggaactcatcaagcggctgaacaagttctctgcggggcgcaggcgtcgtcctttgcgagtgatcgcggtacgcgaaggtggtgttggtcccgctgctgccattcgcctccactaccacctgaagatcgaagtcccagaaggaatgacggcagaaaactttgcatccaaggtggagcagtattggaccaagcttagctgggcgagtccgaagcagaacgtggtcaagcccgtaagcgatgctggttggaccagctacataacgaagaggcgcagtaagcagagctatgcggatggtttcgattggacgaacacgcatctcctgccacccccgattgccgagtgctcgagcggtgcctga

SEQ ID NO: 511709 - DNA, 1773 bp, Stenotrophomonas maltophilia
atgccccaactccaaaccatgcccaaagtctattcctacactcggatgtcgacccctgaacagctaaagggggactctagacgtcgacaagtggaggcagcgaacgcatatgccactcggagggggtgggtgctagaagatcgcttcgatgatcttggcgtctcggcgttccacgggaagaaccgcaggcttggcgcattgagccacttcctcggactagtggatagcggcgcgattgagcgcggaagtgtgctcatcgttgagtcgatagaccgcctgagtcgccaggacatcagccgggcgcttccgcttctgcttgacctcattgatcggggcatcacagtcgtgacgctctcgccggagcaggaatactcttccgaaaccgtcggggatgccaccaacttgattggcgcacttttcattatggcgcgagcccatgaggagtccaagatcaagtccgtccgcggtcgtgcggcgtggagcagtaaacgatcagaggccagaagcgccggcaaaattgcaactaggcgagtgcctggctggctggtcgtaaagaacgccagtatcgaagtggatccgcaccgcgctgatgttgttcgcgagatctttgaactagcgcgagacggctggggggcatattccatatcgaggcaccttaacgaacgtggcgaggcaccttggggtagcaagccgaacgcggtgtggcgcgagtcttacatcaagaagttgctgcggagtcgtacagttcttggagagtaccagccccacacagtgcgcattgaagatggacgacagattcggactgaggatgggcaggcgatcgccgagtactacccaaaggtgatcgacgcggggctgttccgagaggtggcagttacgctggacgcccgtagggtgactggtcgcggacgcaaagggcagcggtttgggaatctcttcaccgggctgctccgttgccactgcggcgctggatacaggttcgtctccaagggacctccgcctaagggtggggactaccttcactgttcggttgccttggcaaaaggcagctgcgcgatgcagccattgcgatacggcttagttgaagaatttctgctcgggaagatcgaaagccttgatgctcgcagggtaatgagtggtgcgctcgtcgatcagcgcctgaaagaagcgctggacgagaagcatgctcttgaagaacaagttgaggcttcacgcaatgcaattgaaaagctaactgacttcatcattcgcgaaggcgcagttgacggcagtcgagcggtgaagctcaggctggacaaggaagaacgaacgctatcgttagccagtaagcggctcgcagtgattgatctcagagtcgcagaagtccagatggcaagtgagagtgaacgcagaactgcgctgacccagctgatcacccaatggcgaagcgacccaaccaatgcgccgatcttgcgacgagcgttggctgagcagatccgatcactggttgatcggatggttgtgtcaccagggactcatgtactggaagaagtactggacgggggaccgaatggctctgaggatggcgagactgtcgcgtcattcgatgactggcggactaccttcggggtaaagagtgaggcacaactcaggaagctgttcaaagaccggaactttgaagtccacatccactatcgcagtggcgctgaagagcgctttgatgcaatgcgtggtccggtcttcagggcgaacccgagtcgtaggatgaaggaaatgaggatggtcaacggctga

SEQ ID NO: 511710 - DNA, 558 bp, Stenotrophomonas maltophilia
atgaagacaagcaaagtcgccttggttggacttggattgctggccgcggccgcgtactctgcggcgggaacggctggggtagactacgtatcaaaggtgttccgcgacggcgcataccttcctcatgcctacagcgaacgtgaggtccttcgccggtatggagagggcgacaaggtcgtagatgccgtgggtctaattcggcgtgtataccgggatccagccacacagctggaggtgatagttagctccaatcctgacgttgagccgaagttccgaacaatcgatgagattcgcgtctcatcgatcgcggccgatcgtccttcctcggctcgtgtcgagagtctgaagggcctgaggctgaagggggttgcgatcggtgatccggcgtccaaggcggtcagtgctgcgcgtagatacggctcgatggacactgcgcgagcgaagctgggctccttcgacgttgagcgcgtctgcgccttctcggaaggtggatctaacatatgtttcttcacccgagatgagaaagtcgtttcaatggccgtggggttcggcccttga

SEQ ID NO: 511711 - DNA, 231 bp, Stenotrophomonas maltophilia
atggggcgcctgagtgcggtgaggcgaaacggcacggttgctgcggaataccattacaacgatcttggccggcagagagcccgtaaggccggaggtgcctcagcactgagtctctacgatgagcgcgggcaatggctgggggagtacgaccaggcgggtattgcacgtcagcaggcgatctggttggacaactttcctgtcggattgctgaaggggagcgccctctactaa

SEQ ID NO: 511712 - DNA, 585 bp, Stenotrophomonas maltophilia
atgaccgcaccactgcccgtttccccagccaccgttgtagaggccaccaaggcgtcgtcgcctgtcgccgcggttgtctccgctatgcgccgcgtggatccggccggcgctcccgttgccgccaaccaggtgcgcgcgtgggccgacaccctgatgacgtcgctctactccgcgcagcctgtccgctgggaataccgcctaagggatgacttcaagccgggctgctgggtccaggccgatgccgggcacgtctacgccgctcaccagcgtggactcgttgtgcgcgccctgttcgagacaccgcgcgtcatccagcccgagaaggtccacgacttccagcggcgcgtctgcacacgttgcgggatgagcgaggactgggcaggcccggactgcttcccacctgacaaaaagcccgacccgcgcaccctgctccccttcgatcccagctggctcgtccagccactgcagtggctcatcgatgcgccggcccacctcaacacctacgaccgccgccaccgcgcggcgcaagccgccttcctgctggaaaagctcgaagcccacatccaggagtgcaacaagccatga

SEQ ID NO: 511713 - DNA, 183 bp, Stenotrophomonas maltophilia
atgagcaggaagatcacctactcgtttgacaacccgtatgcgggatacgacgccgaggaccatggcgaacttgaattccccgatggcacttctgatgaagacgttgaggaagaggtcaagcagctgttcttcgagcgatacaactttgggtggtctgacaaggatgaaagcccccatggctga

SEQ ID NO: 511714 - DNA, 426 bp, Stenotrophomonas maltophilia
atgaaccccatcaccctcaggaagatcggtgccgaccgcaaccagctgccggacgactccaacgaccacgtcgccgtgttcctgccggattacggcctgaccttcactgccaccagcatcgtggacaccgacgtttcgcacgccgagtgcgaggccgctgccaaggccttggacctgctcggccacaccgactgggatctgccgaccatcgaagagctgcagctgctggtcgaccgcaaccgctactcgccggccatcaacacggacttcttcaaggacatccagaacgactggtactggtcgaagactccggccgcctggtcctcggcgtccgcgtggctcgtcgatttcgacgccggcctcgtcggcagcgacccccgcgacaacggcgggttcgcgttggccgtgcgtcgtgccggtcagtga

SEQ ID NO: 511715 - DNA, 558 bp, Stenotrophomonas maltophilia
ttgaacgccatcaccatccgcaccaagggcgacaccgagatccagctcgccctttctcctgcggcgatcaccaacctgatcgagctcgccgcagatcccgtcgcctccggcagcgtgaccgccactggccacaccaagctgttagccgacggcaccagcgctgccggcagcgacccgcgcaccgaccacgtcgcggtgatcgaccacgccaccggcctaatgtgggcggtcaagtccatcggcgacagcgatggcgacccgatgagccaggccgactgcgaaaaggcatgccgtgagctgcgcctgctgggctacgacgactggggcatgccgacccgcggcgaactggccgccctggtcgacgacacccgccatgagccggccatcgatacctcgctgttccccggcgtgctgccccgctggcactggaccagcacgccctgcgcctggtcctcggcgtccgcgtggttcgtctctttctactacggctacgtcagcaacagcctccaccgctacggcgacgggttcgcgttggccgtgcgtcgtgccggtcagtaa

SEQ ID NO: 511716 - DNA, 243 bp, Stenotrophomonas maltophilia
atgcgccacctggtcctgcccttcttctgcgccgtcgtggtcggcctgctgctcgccacgctctcttgggcgctgtgcaaccaactcgaacccgtcgccctcgcctgcgccatcggcgccgtgttcttcgcatggcgctgctgggaagacctccagaccacttggccagccttcaaggccgagatgcagcggcgcagcgccgagcgccagcgcgcaccactggccgcagacgacacccactga

SEQ ID NO: 511717 - DNA, 669 bp, Stenotrophomonas maltophilia
atgaccgccaaggccgatgcgcgcatgaacgccctcgggcgattcgagaaggacactgccgagcaccagatggaggtgctgctggacaacggcatctatcgccatctccggttcaagcgcccgggcagctacgcgttctcgttcgacgttgtcacctggcccggatacctggcgatcagtggcgacatgggcgactccatgttcacccggctctgcgacatgttcgagttcttccggtggaaggccgacgaggatgaatccgggcagctgcgcatcaaccccggctattgggccgagaagtgcgtcgccaacgacggggacaagcgcgagttccgcgccgatctgttcgaagcactggttaaacagcgattcgacgagttcatcgatgaacaccgcgatgacgacgacggcgagccggcatgggcaccgcagctctgggaagaactgcaggatgaggttctccacataggcgatgaatccgtcgcagaggccattggcgcgatggatcggtttgagccgagcaaggatgagcccttcgcgcgattccgattcacggatgcttgggagtacggcgaccagctgcaggtctacaccttccacttctactggcgcctgtacgcgatcgcctacgccgtccgggcgtatgacagccggagcgtgacggcatga

SEQ ID NO: 511718 - DNA, 240 bp, Stenotrophomonas maltophilia
atgagcgccgtcatcctctacttccccacccgccgcgttcgggccgccgccgtcgccgaggccgtccgtctggccgcgcttcgcctgggcttccacccgcacaacgccgacttcgcagccatcatcgcccgccgcgacttcctcgaaggccgcagcagcgccgcacgcgctatcagcgacatggtcgacgcccttagcaccgctatgcgcctgatgcgcgccaaaggcggtgctgcatga

SEQ ID NO: 511719 - DNA, 885 bp, Stenotrophomonas maltophilia
gtggcactgatttcatgtgtggaatgcgggcgtcaggtcagtgaccaggcagaagcatgcccaaactgtggccatccagtaaaggcaaggccggtagcgcccgcgccgctccctcaagcgcatctttcggcggatccaggctcaaaaggcaggaacactggttgcgcgctcatcatcgtcctgatcgtgattctggtcgtggtcgcatcttgctggccttcgtcggatagacgaagcgctgagcaggcaacagatgcgtccacttcttccgaaacctctgcacaacgccaagcgcgactcatcaaggacgcgcgggatgaaaagctgcctttagaaacccggctcgaagctgccaaagtcgtagctgccttgttcccggactcttctgacggcaaagagggggcagagcttgcgccgcgcctcgcggaacaggttcgaaaagccgcggtagggaagcagtgggagtatcgatcgaacgatgatccgatgaccgggaagaaggtcaatgtagctttcgttcgcagcagcaacactcacgatttcaagttcccgtacgccaagccacagcgcgcgacgctcagcgccaggcggcacccacagcacgggaacgacatcattctaagtatcgagcgcggccagcttcagtgcccgagctattcgggttgcagcgtaatggttcgcttcggcgatgctgcgccaagaagattccgcgccgccgggcccgccgacagttcgacggagaccttgttcatcgaaggctacgcggacttcctgcgccgtatgcaggctgtcgatgaagtgcgtatccaagcaagcgtctaccaggaaggctcacctacctggacgttcgacgtgagcggcttcgatccaagccgaattaagtaa

SEQ ID NO: 511720 - DNA, 297 bp, Stenotrophomonas maltophilia
atggacgacaaggctcggatcgaacgactcgaacgggaggcggtcgcgcaccggcaggaactggacatcctgatcggccgcttgaacgcggtgcacggggtgctcttccagatgctggcggaccgcgagaactctgcagaggtactcacagcgaacctcgctgcagccaacgaacggatcgccgcggacctgctgcaatcaccgcttccagagacgacggtggcggagcatcagcgcgtggcgggagagcttcttgcagtggcaaacaacgtgcgcctgggactccagaagccgtaa

SEQ ID NO: 511721 - DNA, 321 bp, Stenotrophomonas maltophilia
atgagcacgatcaaccatccggctcgcgcgagtgatctgagcaccagccacgacgcggcgcactacgtggttgccagtggcctccaggcgcaccagcacgaccagagcgccaaggctgtgacggacaacccgggcatgaccagcaaggagctggccgaggccaccgggctggatcgccacatgctggcccgtcgtctgccggagctgatcaaggaagggcgcgtataccgaggccagaacaggcggtgcaaggtcagcgagcgttccgcatgcacctggtggccggtggcgccaggtcagaacctgggcttggggatctga

SEQ ID NO: 511722 - DNA, 372 bp, Stenotrophomonas maltophilia
atgtggtcgaaggcaccgccgccgacgaaagaagagagcgcccggatccagttggccaagacggggccgtgcatggcctgcctggtgcgttactcgcaagggctgatggcgcagcgctatgtggtctacggctgcgagtacaaccacgccaaatcagggaaccggcggcgcggccactccttcggctacgcgctgtgccagtggcaccaccagcgctatctgagagagggcatgaccgagcagcagatggtggagcgctggggaccgccgttgcattactcaaagaagtttcacgaggcgtttgggtcgaacgacgacctgatcgcgcagcagacctacatcaacgaactgagaggtggcaccaatggctaa

SEQ ID NO: 511723 - DNA, 228 bp, Stenotrophomonas maltophilia
atgactcacaagctgctttcgctgcatgtgaagggtcgccacaagtcgtggagcttcgaattcatgggcgacccgaagcatatccccgaatgggaggcagacggccttgaggtctgggaggtctgcaacgtcgtgccgctgtgggtggcacgcctcggcctgacccgcgcctggtgcttcgcgcaagacattttcaacttcaagaacccatgggagggcaacaaatga

SEQ ID NO: 511724 - DNA, 240 bp, Stenotrophomonas maltophilia
atgagcaagccgagctggaacgatgcccccgcatgggctcagtggctctcgatggacggcgacggcctgtggtcgtggtgggagatcaagccggagtgggatggggaggcaaaggactggtttatctccgtcgatgcccccggtgcggagtctgccgaagccgagtacgccactggaattcccgacgaatcaggcattgattgggatttcgcgttcgacacgctggaggctaggccgtga

SEQ ID NO: 511725 - DNA, 330 bp, Stenotrophomonas maltophilia
gtgagcgagattgaattgaaggacgcatacatcgtgggcgagctgcgccatatcgtcgctacgggcgagggcgacatgctctggatcaaccggcaccacgccgcagccctgctgtccgcgatcaattcgccggcgccgcagtggcagccgatcgagacggcgcctaggaatgggtgcccggtgctgctggatcacccggagtggcacaggcgggtgctgcgaggcgaatgggatgccgccgcgctggcgtggcgcgtgcatggcttgggatgcccggtgaaccagccaacccgctggcacccgctacccgctcgcccggaggtgccatga

SEQ ID NO: 511726 - DNA, 207 bp, Stenotrophomonas maltophilia
atgctcaacatcgtcaaccagtatcacgttcggcctgaccatgtttccgcagtaggtatcccgtacaacccgcccgcccggcgcggcgtccaagccttcgacatcttcctgctgggcgggcagaccctcaccgtgatggttgctgacggcgctgttcttcagcaggccagagacgagctaatccgggcagtggataacctgccctga

SEQ ID NO: 511727 - DNA, 183 bp, Stenotrophomonas maltophilia
atgatcattggctggccgcatgcggcgctccttgccctgattgtgctgcacgtcggtatcaacctggccctgcacggtcagccgcgcaagggcactcatagtttcgggtatgcgttgatccgcgccgtgctggtcgtggcactgctgtggtgtggcgggttcttcgatggtgtttgcgtatga

SEQ ID NO: 511728 - DNA, 1494 bp, Stenotrophomonas maltophilia
atggccctgcggggtggaacccgcttcccctatctgcaggcactgcccggcgtggaacctgggccgaacggctgcgcctttctcagagagatcaaaatgaccattcaggaacagcaggagaagctgcgcgccacgcgtgaagccctgcagaagaagctcgatgcggtcgtccagaaggcgatggacgaaggtcgctcgatggacactggcgaaaaggaagagttcgacagcaccgaggaccagatcaaggcactggacggcgatctcgaccgcctgggccgtctgcttgcagcacaggccaaggcggccgtgccggttgcgcagatcgtcgtcgaaggcggttcggccaccgaacccaagcgcgcggtcggcaagggtccggccctgatccacagccgcaagaacgaagagcagggcatcggctttgcccgcttcgcgatggccatgtacgccggcaagggcgacgtatccagcgccaaggcatttgccgagaacgctttccgcgacgacgtgcgcctcaacgagatcatgaaagccgcagttgctgcgggcaacaccactgatccggcatgggccggcagcctggtccagtaccagaacctgtccagcgagttcgtcgacttcctgcgcccgcgcaccatcatcggccagttcggtgtcggcaacgtgcctggcctgcgtcgcgtgccgttcaacgtgcgcattccgggcaagaccgccaagggccgcgctcagtgggtcggcgaaggtttccgcaagccggtcaccaagtccgggtacgagaccgctgagctgaagtgggcgaagattgccggtatctcggtcatcaccgaggagctggcgcgcttctccgatccgtccatccaggtcctggtgcgcgacgatctgtcggatgcggtcatcgagcggatggacgaggacttcatcgatccggcgaaggctgccggcaccggcgcatcgctgtcgccggcgtcgatcaccaacggtgtgaccgcgatcccggccaccggtgacgtgtatgccgacatccagtcgctctgggcgacggccgactcgaccaacctgccggtgggtagcgcggtgtacatcaccaacagcgcgaccgcgcgtcagctggccggcctgcgcaacccgttgatggcgcgcgagttcccgggcgtgaccatgaccggcggtgaaatcgacggcgtgccgctgatcgtttcgaactacgtcccggctggcatgttcatcctggcattcgccagcgagatctacctggccgatgacggcgtggtcaccattgatgtgagccgcgaggcaacgatcatcatggatgacgacgccaccgccacgccgacgatcgctcagatccagagcatgttccagaccaaccagctggcgatccgcgccgagcgcgtggtgacctggaagaagcgccgcccgcaggcggtttcgtacctcaccggggtcaactggaccaacaccgtcgacccgggcacgggcgggggctaa

SEQ ID NO: 511729 - DNA, 231 bp, Stenotrophomonas maltophilia
atgtcgaagatcccaatgatcaggggcaaacgcgtggtgagtgttgacgcgcgcctggctccgctgttggagcgtcacggcggctaccagcgccgcgacatgcaggcccagcctgctgtcgaacctgcaagcagccaggccgcggcagccaagcgcgccgccgcagcgccgaagaagactgcaaagaaggcggcagccaagcgcgccgccgacaaggaagcgtccgaatga

SEQ ID NO: 511730 - DNA, 1434 bp, Stenotrophomonas maltophilia
atgactggcttctcgccccgtgagctggctacggaattcggcgtccggcggtacggcgtcggctacctgaagacactgtctccggtagatgctggcccggggcgagatggctggaacccgcttgtgcgcgagcctttcaccggtgcctggcagcggaacatggaagagcgtcatgagacgatcctgtcttacccgaccctgtatgcatgcctcaaccggatctgctccgatatcggcaagctgcccttccagctgaaagcggaggacgaggccggtatctggaatctggattcgaggaacacgtccttctggccggtgctgcgcaagccgaacgcctaccagagcgctcagcagttcagggaggcttggatgctctccaagctgctgcagggaaacacctacgtcctgaagggccgcgacgagaggaacgtggtgacccgtctgtgggtgctggaccccagccgcgtccagccgatggtctcggaaaccggcgatgtcttctatcagatcagctacggcagcgcttcgaacatgctgccggagaagtatccgggcgagcagctgatcgttccggcgagcgagatcatccatgacaggatgaactgcttccaccaccagctgatcggtgtgccgccgctgtgcgcagcaaactggccggccgtgaagaacctgaagatcctcaaggactcgaccaccttcttctccaacggtgcgaacccgggcggcatcctgactgcaccggcaggcatgacggaagaagacgcgcaggaggtgaaggactactggaataccaacttccatgggtccaatgccggcaaggttgcggtgatcggcgccgacatgaagttcacaccgttcgccttcaagtccgccgacaaccagctggtcgagcagatgcgctactcagacgagcagatctgtcagccgttcggcgttccgccgttcaaggttggcatcggcagcattcctgccggaacaaagccggatgaggtcaaccagatgtactacggggatgcgctgcagacccacatcgaggccatggagaacctgctggatgaggggctgggcatctctcggcctatgggcgtggagctggatcttggcccgctcctgcgcatggacgtgggcaagcaggcagaggtcgagaccaagctggtaagcggcaacgtcaagactccgaacgaggcccgcctgtccttcaacctgaagccgcttgagggcggcgacaccgtctacatgcagcagcaggactacccgctcgaccaggtatcgcagaacaagatcaacgccgagcctgccgaagcggatgcgacgcccactgagaatgacgacccgccggctgacgacagcgacgaactgcgcgcgctgcagcagcagattttcatgatgaagacccttcacgccgctcgcgccgaggtattccgcaatgactga

SEQ ID NO: 511731 - DNA, 396 bp, Stenotrophomonas maltophilia
atgcttgagttcgtcaccaaggccgatgcccgcgagcagatgcgcatcgacagcgacgccgatgaccgctggctggagatctggatcccggcagtgtccgcctcggtcgccgcctggttgaagcaggagtggcgcctgtacgtgctggagcgtgatgcggatggtcagctggtgcgcgacagtgctggtcggcctttgccggccaaggacagcagcggggagccgatcctgcaacccgccgtgatcgccgccacccttttggagcttgcttcgcagtaccgcttccgggaaggcgagggcgacaacatggtgccgagcgatgctgggcacggctacgtgctgtccagggccgctacggcgcagctagcgccgcttcgctgcacgacggtggcgtga

SEQ ID NO: 511732 - DNA, 390 bp, Stenotrophomonas maltophilia
atgaccgagaccaacaacaccgcagcgccgctgctggatccttctcttttcatctctgatgatgtgcatgagcggcacgtaaagctgcccgatggcaaagagcatgcgttctacatccgcgagcaggaggcgggtgtcctgcgcgggttcttcaccggccaggccagcgacgaccccgataagcaggctgaatcaatggcgcgtctcatcgcgaaggccatttgcgatcccgagggtaaacccgctctttcgctgtcgcaggccaagcgtctgaaattcgcggtgcagatcgccatgaccaaggccatcagcgaggtgcacagttaccagggaaaggagagctcgcccgccgagggagtggagagtggttccgataccagctcgctttga

SEQ ID NO: 511733 - DNA, 840 bp, Stenotrophomonas maltophilia
atggcacgccagatcatcgacacctccccgccgacgggtactccggcacccacagcgttcaacatggtcaacgcaatgaccgcagagctgtacccgctagctacaggtgctctgcagaagaccggtggggtcctgtctggtgatctgatcacccagaagaacgtgatcttcaattcgttcctgagccctaacggccaggtcggctaccgtatgctggtgaacatttctgacacggtggatggtggatacaccattcagagggtcagtgcaggaacttggtccgataagctgaaaatcaatcatgatggatcggtcgtcgcgctgtcattcaatccgacatcctcggcagacatcaaggattacattgaaggttatgcgggcgacgcagatgaagagctcgaccggcttgcagttgtcacgtatcgccttcgccccgaattctccagtagcaccaaggtgtacgttggtttacttgcagagaacttaaaacacgttcgacctgatgctgctggtgatgaaacccactacgagaatgtagaggtggtggtaggggaggactcggagggcaacgacctggtcgaaacgcaacagcgtcttgtcccaatgagctacgacctggcgcaggtagttgcgcttaacacccgtgcgcatcagcagaagtcgcgccgaattcgagaccttgaacgggacgtggtcgagctgcgcgcggaggtggcggaactgcgtgatctggagcgggaagtggccgagcttcgcgcggcggtgaaggatctgcgagaccaggaccgagacgttgcagaactactgcgtcgcgtggaagccttggagcagacgccgtga

SEQ ID NO: 511734 - DNA, 696 bp, Stenotrophomonas maltophilia
gtgatcaccgcggatgtgcagcagcttgaaccaggcggccgcgtgacggtgtacgagctggacgccaccagccttggtgcggaccagctgtggttccaccagcacctgcaggccggcgtcatctggtggcaaggccagcagtacggggcttggccgatcgaggccaccgggttcgcccagaccggcgatcagcagccagcgccacacctgaaggtaggcaacatcgatggccggatcggtgtcatgtgccagctgtacgacgatctcgtcggagccaggatcatccgccggcagacgctggtgaagtatctggacgcggcgaacttcgccgaggggaatccgactgccgatcctggcgagcacttccgggacgaaatctggttcatcgagcgcaaggtcgcggagaccaaggaaatggtcgagttcgagctggcgaccgccatcgacctcaacggcgaggtgctgccggggcgccagatcatgtccaacgtgtgcacctggctgctgcgtggcggctaccgggggccgtactgcggctacaccggcgcggcgtacttcgacatcaacgataacccggtgagcgacccggggcaggacgtgtgcgccggcctggttcgcagctgcaaacgccgattcggggagaacaacgagctgccctatggcggcttcccggcggcgggcctggtccgcacgtag

SEQ ID NO: 511735 - DNA, 822 bp, Stenotrophomonas maltophilia
atgaagccggagatcagcaccggccaccaccacttaccacccaaggcccgccatgtgcgggccttttctatgggcgaagccatgcaacagaccactctgcagtccatccaggcgcacgccgtggccgagtacccgcgtgagtgctgcggcctggtcgtggccggcgctgccggtgaggtctacgtggcctgcgccaacaccgcggccaagccctcggaccagttccgcatgccggcggaggactatgccgcggcggaggatcggggcgatgtgatcgctgtggtgcacagccacccgaacgccgccgccgccgcctctgaggctgaccgggtcatgtgcgaggccagtggcctgccgtggcacatcgtcagcgtgggccaggtggcgggcgaggcgcctgcctgtcacgacatccagaccatcgagccgtgcggctatgcggcgccgctggagggacgccagttcgcccatggcatcctcgattgctacagcctcgtgagggatttctacgcgctggagctgggcatcacgctcagccagtacgaccgcgacgacaactggtgggacaacggacaggacctctacagcctggaccgtctgcgcgccgaaggcttcgaactgatcgatggcgccccgcgccgcggcgacatgatcctgatgcaggtccgttcgccggttccgaaccacgccggcgtctacctgggcgacgacctgatgctgcatcacctgtacggccggctgtccgagaaggccgtctacggcggcatgtgggctgagcgcacctgctacatcgtgcggcaccgtgaggcacgccatgactga

SEQ ID NO: 511736 - DNA, 612 bp, Stenotrophomonas maltophilia
atgactgaccgcctgcgcaagatccggctctacggagcactgggcaagcgcttcggtcgtgagcactgcttggcagtggccaatgctgccgaggccgtgcgcgcgctcggcgtgctgttcgacggcttccagcagtacctgcttgaggctgagggcaaaggggttcggtttgcgatcttcgtcggcggcgagaacgtcggaaaggatcagctgctcgacccgcctggcgaggaagtgatcaagatcgccccggtgctggtgggcgccaagagcggcgcgctgcagaccatcgtcggcggcgtgctgtggggcgtggccaccttcatgagcattggcgctaccggcttcgcgctggcagcgtggtcggcagcagcaaacgtcggcatggccctgacgctgggcggcgtgtcgcagatgttggcgccgcctccgaagacgctgggcagcaaggaaaagcccgagaacaccccgaactacagcatgaacggcaccgtgaacacccaggccgctggcggccccgtgccgctggcatacggcggccacgacaccaaaggaatgctggtcggctcggcaatcatcagtggcggcatctacgcagaggatcagctgtga

SEQ ID NO: 511737 - DNA, 3630 bp, Stenotrophomonas maltophilia
atgacccaacccagcgcggcagtcatgcgccagctgccgattgtcggcgcaatccgcaacgagctcaccacggccaagccgagccacctgcagctggttggcgccaagaagggccagagcaagtcgcgcgagccggtcgaaggtcctgacaccctgcgatcgcgttcgttcgcgcgcgtgctcgacctgatcagcgagggcgagatccgtggcctggtcgcgggcaaccagtcgatctacctggatcaggtgccgatccagaacgccgacggcaccctgaacttccagggtgtcagtgtcgagacccgctcagggacgcaggaccagcctcatatcgccggcttcccctcggtggagaacgaggtgggcgtgggcgtagagctgcgcagcaatgcaccggtgacgcgtgccgtttcgggatccagcttgtcggcgattcgcgtgcgcttggctgtgccgcagttccagaaggtcaacacggacaacggcgacaccgagggctacgccgtcgactatgccatcgatctgtcgacggacaacgggccattcaacacggtgctgacggcggcgttctcgggcaagaccacgactgagtatcagcgcagccatcgcatcgaacttccggccgggaaccagtggcaggtgcgcacccgccgcctgaccccgaacgccaacagcgcgaccatcgcagacaccacgaacgtcgtgtccatcacggaggtgatcgacgcaaagctgcgctacccgaactgcgcgctcgcagcgatccaggtggacggcagccagttccagggcaagccgagcaccgcttatcggatctggggccgcatcatccgggtgccgtccaactatgacccgctgaaccacacctattcgggcgtttgggatggcacgttcaagtcggcatggaccaacaatccggcgtgggtgttctacgacatcgtgaccaacgaccggttcggccttggccaccggatcccgcaggcctacgtcgacaagtggaacctgtacgcgatcgcgcgctactgcgaccagctggtgagcgatggcgtgggtggcatggagccgcggttcacctgcagcctgtacctgcagaccgaggccgacgcgttccgggtcctgcaggacatggcgtccatcttccggggcatcagcttctacgccgccggccaggtgatcgcctcggcggacatgcccaaggatccgacgttcacctacaaccaggcgaacgtggtggagggccgcttcacctacgagggcaccgggcgcaaggcgcgccacaccgtcgcccaggtgtcgtggaccgatcccgacgacttcggccggcagaagcctgagacggtgcagttgcgcagaggcatcgcccgttacggcatcaacagcaccagcgtgaccgcgttcggctgcgaccgtcgcagccaggcccagcgcatgggcaaccacatcctctacagcgagaacctggagacggagacgatcgcgttcgcggttggcctggattccctgcgggtcacggtgggcgacatcatccgtgtggcagacccggatcgggcagggcgccgcatgggcggccgtatccgcagtaccacggccagtgcgctggtactggaccgggtgccggaggccaccgcggccggccagacgatccacgccacgctgcccagcggcgtcaccgagacccggacgattcagtcggtgagcggcaacgaggtgcgcgtcaccgtgccgtggtcgaccgtaccggtggcgcagtcggtgtgggccatcgaatcgcccgaactggcgctgcagctgttccgggtgatgtcgatcaccgagcgcccgatcaccggtgaggatggcatcacctacgacgtggtcggcctgaagcacgtgcccggcaagttcgcggcgatcgatgacggaacccggatcgagcagccgcccatcagtatcatcccgcccagcgtgcagccgccgccggccaacgtgcacctgtcgtcgcattcagtgatcgaccagggcatcgccacccatgtactgacgatcgcgtgggaccaggccgagaaggccatcgcctatgacgtggagtggaagcgcggcgatcttgactgggtgcgggccgggcgcgtgtccacgcagagcatcgacatccccggcgtctacaccggccagtacttggcgcgcgtgcgggcgatcaatgccgtgggggcggtgtcacagcctgcgctgagcccgctgaccaacatcgagggcaagaccacaccgccgccggcgctgacatcgctgaccgcaaccccgttgccgttcgcgatcgcgctgaaatgggggttcccgcagggcgccaccgatacccagcggaccgagatctggcgcagtaccggccccaaccaggaaagcgcggtgaagctgggcgactacgcctatccgcaggatcgcctgcagctggacggcttggccgccggcgcccgcttctacttctggggccgactggtggaccgcagcggcaacatcggtccgtggtatccggtcggcgccggtgtcatgggcgagtccagcaccaaccagagtgactacgacgcctatctcgctggaagggtcagtgagagcgcattgggccagagcctgctgggcaaaatcaactcgatcaccagtctgcagcctttgctgccgctgctgtggagccccggcgctacctacagccagggtcagaccgtggtgcgtgacggaagaacctacagctggaccaacccgacgccgggaaaccagcagccaccggggtccaactggcaggacgtgggtgccggcatggccggctacggcgcgctggtgagccaggtcaacatcaacacgcagaacatcggcaccatcgatgggaaggtgacggcgcaggggcaggctatctccggcatcaccgcgcagatatctccgaaaggggcaggggacgcgagttggggcgctggtagcgttgacgtgtacgcgggcaccgtcacgatccagagtgtgttcgcgaatgctgatctagcgcaggccattcgtaccgatcaggtcgaggtcgggctgggccaggcgaatgcggcagtgcagtcggaggccactgcgcgggccacgggcgatgcagcgctgggaagtcgggtagacaccaccaatgcgagcctcgccgacacgaaagcgaccgtgcagcaagtcagccagtcggttgtcaccctgaacggcaaggtcactagcacctacacggtgcgtgcgcaggtgagcagcggcggcaaggtgtacatggccggcatgggtctcggtgtcgaacagcagccagacggcagctaccagagccaggtcctgatccaggctgaccgttttgctgtcatcaacctggccaacaacaacgtcaccacgccgttcgtgatccagggcgggcagacgttcatcagccaggcgctgatcggcaccggctggatccagaacgcgatgatcggtgacgtgatccaatcgacggcggtcggagctggtggtcagccgcggtggaagttggacaagaatggtagcttgacgatgaacggcccggttggcggaggggcgctttcgatcaacgatcagaacatcttcgttcgcagcccaagtggccagcctcttgtggcacttggagatgggatctga

SEQ ID NO: 511738 - DNA, 294 bp, Stenotrophomonas maltophilia
atggctaccgggctgaaggtgtggaacaacgacggcacggtgaagttcgatgtgaccacgcgcctaacccgattgattggggcagtgcagacgggcaaccaggccggctacatcgatatcgcctcacagggaaaccgagccttcttcttcatcgtgtcaaatgactcaaaccaaccgacgcggggcgttcccaacgtggtgctgaccgatatcagtgctacggtcattcgtatgtcctgggatttcaccaccaacgtcaggacgccctgcacgcttcattacggactctggtaa

SEQ ID NO: 511739 - DNA, 705 bp, Stenotrophomonas maltophilia
atggcaactggcctaaaggtgtggaccaacaacggaagcgtgctgacgatcgatcaaaactacgagaacctgtcgctctattcgcggggaagtggagagacatcttcggcgaacccggatctcgcatatggaacgtacacgctgacggtgacgctacctgcggcggtcatcccacagctggcactgcggactcatgacccttcgaagtacattggaattctgggattgtccatcagcggcaacacgtacaccttcctgatacgaacgcagggaggtccagtagcctttgactggtttgtcttcacgctgcccacatacattgccgcgagtacgcgcgggttgaaggtatggcggcagagcgacggtcgcctggtgttcgacagcggaatgaactggatgcgcgtggccggccaaatcgtcaatgggcaaggcggcgggcaactcgaccctagtcgaacctacgccatcgccttctgcggcgcggctatgaatcagtctcggcagtggatcaacaaccccgagacgcagcccgcgcaggtggaccagtacacctacattccgggcgcgcgcatcttgaacggggtgttttcttcagctgacatgaccgtgttcgttcagcagtcgtcgccaggaaccccgccggacattggttacatctcgaacggggtgtttgcggtactggcgctggatatcacgggctactga

SEQ ID NO: 511740 - DNA, 462 bp, Stenotrophomonas maltophilia
atgcgcgtactgctcacggccgctgtactgaccgcagcatccatgtccgcccccgcgctcgcaggcctcggcgcggtggacaatccaacgttcctttacgaagaggtctcgacgcccggcgaatccatggatgccttcgtggcgcggatcagccccaaggcgatcgaggtcactgaggcccgccgtgtatccatctgcggcgctataggacaggccgacgaccggttcagcatccggctcggaacgagcaacacctggaagagctgcgacattgacctttcggacaccgtcgccggctacgcctccaccggcgtcaccttccacacaaccaccagcgacgagggaagccagcggggcttctccgcagagaacttcaagcgcgctcgcggctacgtggcattcggaaagtacgttcggtatcaagaaggtcgaacgaaggaccggctgatcagtagcccgtga

SEQ ID NO: 511741 - DNA, 228 bp, Stenotrophomonas maltophilia
atggccagggtcgacaaaggcaccaccaagatcggcttcatcaaccggaacaaacaggagaacatccgcgccaccggcctccccggcacggaccacgggcaggccatctatgtcctgcactgcaagccctgcggggagacctatggcgcgaatggtagcgacatacacctgcgcaagtgcccggcctgccagggcgggcggccgggcctggacttcgaagcaccctag

SEQ ID NO: 511742 - DNA, 711 bp, Stenotrophomonas maltophilia
gtgctcgatctcgcgcttcatctgggtattggcgagcgatgcatagccctcgcgtccgccccagaacacgtaatgctcgccgcccagctcgaccgtcgcttccagtgcagccttgacctgcaccgcggcgcgcgcgaccacggcgaaatcgggattggtcgatgcaccgttcatgtagcgcgggtgcgagaacaggttggccgtgccccacagcagcttgacgccggtggcgtcctggcgcgccttggccaagcccaccatgtgcgtgaggttcttctggtactggccgatgtcatcggcatccggcgccaggtcgatgtcgtggaagcaccagtacggcacgcccagcttggtgaagaactcgaacgccgcgtccactttcgcttcggccgtggccagcggcgagccggtctcccacgggaactgccgggtacccgggccgaacgggtcgtgcccggcattgcagaaggtgtgccagtagcacacggcgaagcgcaggtgctcctgcatggtcttgccgccgatgacccggtgggcatcgtagaccttgaaggcaagcggattgtccgagcccttgccctcgaacggaatgcggccgacgccggggaagtattccttggcgccgatgaagggctgcgtgctcatggtgcgtgctcctgtcgttgtacggggtgtcgtggaggagccctcagccgcgctgcagcggcgtga

SEQ ID NO: 511743 - DNA, 552 bp, Stenotrophomonas maltophilia
atgcgctggatgctgtcactgccgatggtgctggcgctggccgcctgcgagcggccggtggataccggtgtgcaggcgttgccaccttcgccggttctcgaccacgctggcgccgcggatgcggcggagcaggagctggactggttgcagatgatgcccaaggacgaactggccgcgctggagcggggcgagggcccggaagtcgagcacagcggcaaccggcgcatgccgcagttcgggacgttccgtaccgtggctgctgtgctgcagcgaccggtacgcctgccgggctacgtggtaccgctggccaacgcgcaggacgggcggctgaccgaattcctgttcgtgccgtactacggcgcctgcatccacgtgccaccgccgccgccgaaccagatcgtgcacgtggtgctgccgcagccgatcgagatgccggacatgtactcgccgttcttcctggccggcaccctgcgtgccgaacggctggatgatgatctggccggttctgcttacaccatgcgcgatgcccagctgaggccctatgaaccgtag

SEQ ID NO: 511744 - DNA, 192 bp, Stenotrophomonas maltophilia; identical to SEQ ID NO: 508000

SEQ ID NO: 511745 - DNA, 543 bp, Stenotrophomonas maltophilia; identical to SEQ ID NO: 508092

SEQ ID NO: 511746 - DNA, 678 bp, Stenotrophomonas maltophilia
atgcgggaagcgcaggcgctcggcgtgcagcagcatgcgatgcacaccctgcatgcggaagatgcggttgtggcggccatcgccgtggctggtatcgccgatcatgtggtgcgacaggtgcttgagatgccggcggatctgccggaagcgcccggtctgcggctggcagcgcagcagcgcgtagcgcgagcgggtgaattcacccaccggcaccgacagctcgccggtggccaggcgctggaaatcggtgatcgccggcttcttcaccggcttgcccggcccgccatccaggtcatggtccacccgccaggacagctcggccggccagccccggcagaccgtcaggtagtccttggccacttcgccacccatcagcgccttgcccagcgcactggcggtctcgcggtcgaaggccagcagcaggcagccgctggtcgcccggtccaggcggtgcacgaggaagatcgggcggcccagctgctcgcgcaggcggtcggccaggaagtcgtcctcgccacgggccagcttgctgtcgtggaccatcagcccggcgggcttgttgaccacggccaggcgctcgtccaggtgcagcagctgcaggggcacggtttcagtctcgaccgcggcgagggtgtcaggttcggtactcaccgcaggattatcggggctgggcactga

SEQ ID NO: 511747 - DNA, 1611 bp, Stenotrophomonas maltophilia
atgtctgcaattaacgtatcaaataacgctggtgtgtcaacaccatcacccacggttgcgaaaaaaactaagccaaaagcaggtcagccgaagatcaaaaaaatcaacagcgcgaacattgtgacctcccacacacccgcatggaactgggtcaactacatcaacagtggagcgtgtggggactgggcaatggccaatggtattgcctataagtggaatggtgttttctgggacacggtgtcgctgtccgaaggcacggcaatggcatcacaattcctgttcaatcatatgccggacaaagccacaaatgctgcgtccatggattgtttcaaattctcagtgaactcccttgagccactacctgagcggaatggatccacgtttgttattgctacaaagaacgggtatctgcacgttgacagtgaaggtttggtcactgttcttccagccgacaagaagctcgggttgacgtttggggtcaacgccaccgtgagcactgcgtacaacaagcgccacacacctcaatcggttcccgccaactcgatgtttgggcgctttctcgccagcgcattgccggatttggaaattcgcgctctggtgcaagagcagtgtgcattgacgcttattccgggtccacatcaactggtgtggtggtgggtcggaacgggcggcaatggcaagggcgtgatgtcgtcaatcattcgtggcttccatcaccgcacggctcaaatctggctggataagtgcggtgaaccacagatgcttgcaaactgcgtgaactccagtttgatcttcaccccggaagtcaagaagggggcacgcggcattgatcaagaggcgttcaaagcgctcagcggtggagatttgctgaccgctaagtttttgtaccgcgatatggtggagtttgtaaacacatcgtgccacatcgtcagttccaacgacgaacctatgatcacagacgccaccgacggcatgtaccgccgcttgtgcgtggtcaagtggagccaacgccacggtacgtaccaggccattcaaaatcttgctgagcgcattctcaaggaagaagctcacatcgtcctggactggttgctggaaggcgtcagccgcattgtgaagcgcggcggtttcctccccgagagcgagtggccggaagcctccaagacgttcaaacaatcaattcgcaacaagaatgattgtgttggggcgtggcgagaagatgtcggaattgtgcccgacgccaacaccttgactcccaaatctgaggtgtacaactcgtacgtcaaattctgcgaaggtgatggccgttacgtgcttaacgcgccgcagttctggacgcgcttttgggcaatgccagggtttgaacggccgcagtctcctcgcggcgatacgcggcgtatcgagggggtccaggtcaattgcgttcgcgcacgcattcccgtgcagccaagctacgaattgcccactggcgaagttcttacgctgtccaccaccaacgattgtgtgcgaacaacgaaagacgttgtggagggtgagccatccaccgctgcacccgccgttattcaaatgagtgataaagattttatggacgacgaatggaggttcttgcaatga

SEQ ID NO: 511748 - DNA, 321 bp, Stenotrophomonas maltophilia
atgacaaatacaaacaaagacatcgaagaggcattctgtgctgcttttcaccaaatgtacgaagatcctcagcagttgcaggagagggcgcgttgggtggcgcaaggttttacacacgtggacaagataccctctcatatgttgcacgaatggaacgcgatgattggggccaagaatgaattgttgttaggtcatgggaaaattagtgaaggtcttgatgagcagttgcatgcgcacgtgcaatcaatggccctgcatggtcactgtctgcgtcttttggaggtcatgaccaacgtgcaccggagtaatgagaatgactga

SEQ ID NO: 511749 - DNA, 384 bp, Stenotrophomonas maltophilia
atgtttgggtggatggatctggtggtggtcaatgctttgtcgcttgcggcctttgcgttctacttcattgcagccattcgttacggtgtgaagcgcaattggaaatcgtctgtattgatggtggcgttcacaacggttccgtggctggttctgatctgtgtgacccgaatttgtttgtactactgcattgatatgtggggtgtgtggatcaccctgtgcgcgatgaaaatagcgttttgttggacgtgcggagcgtgcattgcttgccttcaattcctccccattcgcggcgccacgctgccatcactgtttgtcgggctcggtgttgcggccgtgggcacggcgttctcactcattgaattatttggtcggatggatctgtag

SEQ ID NO: 511750 - DNA, 234 bp, Stenotrophomonas maltophilia
atgaaaccactcattgcaatattcattttattggctccgctgttgtcggtcgccgaagaggcgcggggccgttttgtggtgtcaatgaccatcgttgagtcctgcgtgttaaccgatcacggcattcaaaaatgcacgacaggaatgcgcgaacccaccgtcgccaaggaaaaatttgcaatcaaaaccccggaaggatccgatgagcggatcgtcactgtagtcacttactaa

SEQ ID NO: 511751 - DNA, 741 bp, Stenotrophomonas maltophilia
atgaacgaggtaattaaatccatttcaatacaaaaagagttggcgcggcaccagcaggcgaaggagaagtttgaagcgctcatggcgacgattgaaagcgcgctgcgtgaagcggacgaaatgaatgtgggcggcgcgatgcgcaacgccctgggtcaactgaacttccgccacttcgactgcttgcaagatgcgcgaaaatcgcatgccaaagccctcactgaaaacggttggtcaacaatcatgcgcgagacgggcctgaaagacttcatgtgccataaaaaacgtgttgagtggggtagggcgttctatgagaacacagtgccagagttcaactacgacaatgttgttgccacgttcgcccaactgtacgacgcacgagcaagcatgtttgaagacggcattgtcggggtgtttgaagggctatcgtgggactacaaaagccacctgcccgtgcgctttggacagaaaatcatcttgcagtgcatagacagttggtcttacttcattgcaagagatgttgtgcaagacatgatccgtgcgtttcacatgttcgacggcaagccgcatcctgatttcagacgctcagcatcaagccccgaagtgttctcagagtacatggatgtcacgttctacaagaacagaaacgcccacgttgtattcaaacggcctgatcttgtggacaagctcaacgaagtgattgcccgacgctacccaggtgcattgccgccagcccgataa

SEQ ID NO: 511752 - DNA, 789 bp, Stenotrophomonas maltophilia
atgtatctgactaaggatttatcgaaagtgaaggcgcgccacatccagatggaatggctcagtgcatttctgttccacagccagtcctcagacggccgaccgttttttgatatacgggaaacgtacgatctgcgcttgaatgatgaacccagggaactgaccaacgaccctgatggagttttcgccagtgcctcaaatcattacgaaaacgcgtacacactggctttgggcgggcactacgaggcgatatccaaactcgcgaacccggcatcggacgccggcaacacagtcgcagcgttggtgttgctcaggctgattgcacgctttaactacgctctggcggttgtgggatcacgcgaggttcaagatttggctttttacgccaacatgaaggatccaacttatatgcaattgcgagtggacagccacgtggtcaatctgtaccacacgttggaagatggctccggcgagcatgtcatccctttcctagccttttcgatgaacccctcatcaatttttgaaagccatgttttgaggggcgacatcactcaacagaacattgagttcgtgatgtcggaagccggagtggatgcaactcttacgcgacttaaagatgtagtgggaacgatcatcaacaccatcaacgacgcacaccgcagggtgtgggatgagttcttttcgctgtacgacgaaaaatatggcaagtcactgttctttgaaagcatgagcagtcagctgggatttggaagatcgcttcttgagatatgctacaacgaaccacgcgaataa

SEQ ID NO: 511753 - DNA, 657 bp, Stenotrophomonas maltophilia
atgaaaaacatattggttatggcggcaagattgatgcgcggtatggcccactctgctggtacaagtggcgaacctgagttggattatttattgtctcctggaaatcgtctttctcatgccattagcagcggtgacgcagagactttcaagtctttggtaggggatgatccaagtcttgctaagcagcacacatttcacaggcgcccaacctcaattgctcgggggaacgtcatacatactctcagccacattgttgagtgcggacaacaagaagagcttctcaatgcgtgtaaggagatgatcctgttcgcgcttgaatgcggagccgatatcaacgcacggggcgattacggtttgaccccactggaactggccatctacagttacagctttagattgatcccatttctcattgaacacggagcgcgtcccgtcaaaggttggagggtggatacgatgaccgctgcaaacattgtttcggtttttcaaaggttcaacggtggtcccctaaaggttgaaggaacagaattgcagaacatcattgacggattgtcttcgttcgaggccatcgaggccaaaacgcagaaaaatactttgttgcgtgagcttggtatttcggcgggtgacgttgaaagcaggccgcgtcggcggatgtga

SEQ ID NO: 511754 - DNA, 1116 bp, Stenotrophomonas maltophilia
atgtatatcgggtcaactttagaaaatgttcaggctgttattgcttcggggcgcaacattcatgagcgcagtgggataactcaaagcactgctttgcaccgcgttgttgatgaaaagttttacgagcctggtgttgtcaccgcactggtcaacgccggattggatcccaacgcccgtgatgtcaaccagcgcacaccgttgcattacgcgcgtgaccccgaggccattgcggagcttatcgaaagcggcgccaaccccaacctgggcgacgtgaacggccagactccattgcacgtcaacttgtcgaaggaaaaatccatctgccgcatgccgcgtgttcaagctcttttagacggcggagccaatatcaaccacgccgatataaacggtgtcacaccacttctgttggctcttgaagcacgtcggcctacagagtttattgaagcgttgatagacgctggcgccgacctcaacgccgtgagcaacgatggccagggtgtgttgtgttggtctacggcggagggggacgttgaaaacacaacgctcctgatcgctatgggcgcggatatcaacgccgtttccaacaccggtatgagtgtcttgaactactgtgcacgcttccagcagttggagtgcgtgagagtgttattggacgctggcgccgatcccactattgccaacaccgacaatctcacaccgttgcactttttggcctacggaccaaccaatcagtgggatcgtgtgatgggcgagcgcgaagggcgcgcggagttggtgtcaaaaatgatcgaagccggcgccgacatcaacgccgtggacaagaacggcaacaccgcactccacttcgctgcgaaaggtgaacaagacagcgttgtaagaaccctgattgaccagggcgctagggtcgctatccagaacaaccaagggatgacagttctggatgtagcgaagcagcacagcaaacacacggttcaaggcaagtcggctgatgaaattgccaacggtgaagggatggtgtcgctgctccaaagccgcgctcagaaggaagccttgcaggaagccttgaatattcaacatgacgcgccgcaaaccgtatcgcggtcgcggcggatgtga

SEQ ID NO: 511755 - DNA, 660 bp, Stenotrophomonas maltophilia
atgtacgacgatgaaatcaattacgatgaaagtgaaggcgagttgttgagcgtgattgcgttcagcccggcgatgtcttttgatgaggatattgaggacgagttggtcattgagcagttgagtgtggtttgtagggttgaatacattgatgcagacggtgacgaatgcattgcgtggtttgatgccgtccttaacgatagtggattgcactttgacgagccggatgctcttcggtgtggaggagcgacaaccgacaatgtgtatgagtgtgtctccgacgcgttttcggaagccattgactcacgcgtctacgatttgggtgacacggttgaccataagcacattccggccacttcacgtgacgccgagttgatctttgaaatggtggacagccagttcgtccacgagattgatgatgcccactatgtgtgcagcgaccgatacttggacccggatgacctgggtgggcgtcacttggacacgccggccccgtactatgctatcgaacgaaatacggacatctttattcccctccattcacctgccgacttcttgagagtgcccgaagagttccagcgtgcacgcttacagaaccacatcaatccggggcaagaggagacagttgaggtgcagcgtgcggttcaagttcgccgcatgtag

SEQ ID NO: 511756 - DNA, 486 bp, Stenotrophomonas maltophilia
atgaaacacagattcacaaagatcatcgaaaataaaccgcgatcgaagcagcctgaactgcacgactacaggcctgtctacaccatccacattacgtacaaagacagcaacaccccgacgccagcatatttcgtcttagtgtgtttcttaaacgcctcaacgatgagcgacgccgcagcagaagcaagcgaacgcaacctatctgtactcaaagtattgctgcccgtgttcgatgcgatgtaccaagacaccacataccgcccggcaaccatggtcaaggccatcttgtacaacatggaaacggggatggatctgtatgaagactcaattgaatttgagactgtcccgagcgatgcgcgccgcactggcttcatgggcgcttgctatggccgcgagtacattcacatgatctacaaattgttgcacacagagatcgaacgcattccctccacagtcgtggtgagagagcttcaagggctaagttag

SEQ ID NO: 511757 - DNA, 495 bp, Stenotrophomonas maltophilia
atgagcatggaagacctgacggaccgacagttgctggaactccattgcacggtcatggaaacgctgcgggaacgaggggtggtgcgttcttccaacaacccggtggcggactacacagagtctctggtggcccgcgccctcaacgccactctggcggctggctcccaggcaggtttcgatgcggttggacaagacggcacgcgctatcaaatcaagggacgacggcttaccgcaaccaacaaaagcacgcagttgagcgcactgcggaacttggcgtccaacccttttgaccaacttgccgccgtcgtctacaacagcactctgaatgttgagtacgcggcgctcattccgctggacgtggtggtgcaatttggtcgctaccgctcccacacaaatgcgcacattctgaattttagacgcagcttattgggtgaggacggcgttaccgatataacgaagctcatcgctcaaacggcggccgagaaatcggaatga

SEQ ID NO: 511758 - DNA, 1356 bp, Stenotrophomonas maltophilia
atggacgacgagattgatcagctaatcgctcagttgcagcgggtgaactctaagaacttcgattggagcgccgagggtgagttccccaacttcgtgactgtagggggaggccagtgccatttttccagccaagcgctggtgagcatttccaggattggccggatgatccacagcaacaggcgcgcggtggatgtgcggatcgaagccaccgaattgatcaagatgcttcggccggttgtggcgcatgcttatgcggatggggtgttgcagcgtggggacaaagcggcaattcgcacaagcaagcgtgagttgcttgagcggctggaagcaaaaattaaggaggccgccgatcccatcacccacttcttcccggcgtggaccaccggacttgagcggaaagggcctgtcttccttgggccggtccgtgttgtatctgtatccgactggttgaagaccgttgaaatctattcgggtccggatgatgacccgatcgacccttcgtggaagctggccgtgcagggggatgcagcaaggccaactgatgcacgcacaagccttttgctcggtgccgtcgaagagtcgctaggtacatgcaacgccgttgttgcagtgacgatcgagggctttgagcaggagttctcaagaaagcttgcccacatcgcggcgaagaactgtcttgacatcctctcgctgcttcatgagaccccagatacgtttgtcacccaagggcttatggaagatcgcttgcaaccgcttgatacgcgcacgctcagcgagatggatggatttctcaatatatccgggaacaccaggctcaggccaaggcttggcggatctcgatttggcgctgttatggagcgcgtcagtgaactaagcgcgtccatctcccaagtcgtaggggccgtcttgactgcccctgatgtggctcacccccaactgtgcgcgcgttggtcgatggcgctgcactggtttgccgaaggttgccgcgagcctgacgacgcggttgccgtcgcaaagatcggcacatcattggacattctgtctgatggcgacaaagcggccggcatccggcggaccgtatgctgtctactgggtttggaaagcgaagcggttgtcacgaagtggcccgagccaaagacattgaaaaaatgggtcgatgacatctacgaaaagggccggtctcagatcctccacggcaaccacgtggaccggcttaagtcctttgcggaaatgcgccaagttgcgcagcagttgtgcgggatcacgcttcggatttcgctggaacgcttgggttcttacgacggtgcggatgattcaagagcgttccaaataatgacgggcgcaccggctgcttga

SEQ ID NO: 511759 - DNA, 774 bp, Stenotrophomonas maltophilia
gtgccgcacacacccgatatggatacgcatgtgtcgctgttcttgttgcggtcgcgcgcgcgaaccgccgaaatccagcgccgttccatgatgaaccaaacgctggacttggaacaggaacttctccaccaacaaggtgcgcagatgtggcggcgttgtttgttgcgtgagggtccacgccacgccgaggagatcatccagctttggtgtgtattgcaggccaagcggagtgcatttgacgagctttccggcaatctgactgtggtggaacaaaaagttcaggagatgcgcgcgaacgagaaactgatgactcggattgacgaatgggtctcgggtgctgcatttcacgacatgctgcgcacaacgcaatttgattctgccagtggtcgttacccgccgcttttgctgcaagtcactgatcaactcaatcaaggcaaaaagcgtgtcacgagcatcttgaacaacgagttgtcgtttgaaggcaccagcgactacatgagtgcgaactaccaactggaagcccaagctaaacgtaaccgtgaaatgctgttggtctacgccaaagcgctgtggttcgatcacacggtttattcgcgcgccatcaaggccgtggccgatggggatacggatctgctgttgaggtacgaccaagctgtctacgccgcgtacgagcaggcggtatcccagccctcgctgagcgacatcatggtcaaagtgtttgccgcactgtgtgcgcaaactccctacagtgcgcatctgtttgacacagagtga

SEQ ID NO: 511760 - DNA, 681 bp, Stenotrophomonas maltophilia
atgctgtcacagcaccctcaatgggcgaacacggttttggatattgccattaaaaatgatcgctggcccctgatatctatcgccaaaaaatctggtgtcgtaatcgactgtccatctgttttgtatcgcgtgatgcagcgcggtgatgtacatactgcaatttcattagtggaaaacggagcccccctcccgctcaataatattgaaagcgctattgcggatgcacatcgacatcgaagagcaggggccggccctttccgccaacttttaaagaccatatttgaccgccatggcgttaacagcgtggattacgtgcggcttgtcagtgagtggggcaatcaacgcgggttgcgcgatatgggcgctctgttgcacgagtttggatacgacttccacaaaacacgtagcatcaatgttgtcggattttttcaccgttccatcctgggttcttacgaaggggaactttgcgatcttctgacctggggccaaaagatcgactttgagcatccccacttcgatgatccgccggaagaccacaagttaaataagttggtaattatcaacgacaaggaaaaggccgagctcatgatcgccgaacagactgccgccagcatcaatcaagcacttgccgacgctggcctgactcaagatgacacccctaagccgaaaagaaagatgtga

SEQ ID NO: 511761 - DNA, 126 bp, Stenotrophomonas maltophilia
atgcgtccattgggctgcttgccagtgccgatagttttccaatcaaccaatgatttttccgatttctttgactatcttaagtatgattttgagattttcaacgggtccgtaaattgccattactga

SEQ ID NO: 511762 - DNA, 1314 bp, Stenotrophomonas maltophilia
atggaaaattggatagtgattgttgcattgatgattatcgtcggggcatgtatctgtgagggtgtttctcagataggttcctatatcgcccgaagaaaagcgaagcacatggagataacgactcctgacagtgttgaggaagaacagtctttagatttgaagaatagccttaagacaatggagcaatgctcgacggaaagtgagcggatatcgatgggtgtgtactgcgcgcgggaagcatatctgcgaaaaagccttgaggacttcacaaagatcgtttcagtctgcgtcaacatcaactatcacttggggggcagcgtcacagaccaggggcacaaaaacacaactttgttgcacgagtgcatcaaagatggcgcgtacgattttgcaaaagtgctgattgagcacggtgcggatcccagcattggggttagccgttcgtgggaactgacggaatacgaagccaagcatgcaagtccccttcattcggcagtgcaggatgaacgaattgaacttgtgcagttgctgcttgacgcaggagctgaccacagtgcagttgatggagacgggtacacgccgctgtgtgtggcagtgagaaacgacaaaattgctattgccaggactctattggcagggggagccaatcccagtcaagtgcatgacaccgtgaaatgtccgcttctgtgtgccaattcagcggctatggcgaagttgcttgtaagtaagggggcagatgtcaacatggtgatgggaaatggctatcctcttttgtccatgttgatctacgacggaaaagtagcaatcgcccgctatattctcaaagaataccaactcaggtttgatttacgagacagggatggacagtggttggatcgacatccgttgattgttgcatacagggccaatgagtttgatgtgttcaaagatttggttgaattctcatgcccaaaccagctaggagcatggggcagtattcaagagactgttgttgaattagactcgtacgattacgcgagagtgttgcttaaacgaatggtgcgactgggcttaactattgatagcaccttgctgtattgcgcaaagtcgcgccgaatgcaggaaatgcttgttcaatttggcgccgatccaaccattaaaagcccggaatacgggaaaaaaacgccagatgagtacatgatctaccgggatcgaaaattggtttggcgtgatctgattgagcgggctcccagcattgtttctgaacatcagcggaaattactggcggaagcagtggggctggaagctgagcctgcaccagtcaagcggcgcatgtaa

SEQ ID NO: 511763 - DNA, 1959 bp, Stenotrophomonas maltophilia
ttgctggtcgtgcagaagaccgggtggggtaagagctttgtctacttcatcgcgaccaagttgctgcgggaagctggagccggcccggcgttattgatctcgccgctgctggcgctgatgcgaaaccagatcgcagcggcagaacggatgggggttcgcgccgccaccatcaactccgacaacatggacgactggacggcagtcgagggcaagctggccaagggggagatcgacattctcttgatctcgccggagcgcttggcgaacgagcgctttcggacgcaggttctggccggcatcgctgcacaaatttcgatgctggtcatcgacgaggcacattgcatttccgactggggccacgacttccgccctcactatcggctgttggagcggatcgtcaaaacgctgccgccaaacctgcgattgctcgccaccacggcaacagcgaataaccgcgtgatggaggaccttgctgccgtgctcggtccgaagctggacgtctcgcgtggcgacttgaatcggacctcgctttccttgcaaacgatccgcctgcccagccaggccgagcgccttgcctggctggcagagcagctggccacgctgcagggcaacggcatcatctacacgttgacggttcgtgatgccaatcaagtggcgcaatggctgaagacccaaggcttcaacgtggaagcctacaccggtgaaaccggcgatcggcgagaacagcttgaacaggcgctgctcaacaaccaagtcaaagcgctggttgccacaacggctctaggcatgggttacgacaagccggatctggcgtttgtcatccactaccaaatgccgggatctgtcgtcgcctactaccagcaggttggtcgcgcgggacgcgcactggactccgcctatggagtactcctcagcggtcaggaagagtctgacatcactgactggtttatccggagtgccttcccgacccgacaagaagttgccgacgtcctgggagcgcttgaagacgagcccaacgggctgtctgtccccgagctgctgagccgagtcaatctgagcaaaggacgtgtcgacaagaccattgcactgctttccctcgaagcgccggcacccatcgccaaacaaggcagcaagtggcagctcacggcggcaacgctgagtgaagcgttctgggatcgagcggaacgcctcaccgcgctacggcgagacgagcaccagcagatgcaggactacgtcagcctgccgtttggtgaacacatgggctttttgattggcgcgctcgacggcgatccaagtgttgtcacagaacctgcattaccgccactgcctgcaaccgtggataccgagctggtcaaaaccgccgtcgaatttcttcgtcgaaccagcttgcccatcgagccccggaaaaaatggcccgatggtggaatgccccagtacggcgtgaagggattcatcgcccctgcccaccaggccgaatccggcaaggcgctatgcgtctggggcgatgccggttggggtggcttggttcgacagggcaaatatcacgacggccacttttccgatgacctcgttgccgcatgcgtgaagatgattcaagagtggaatccgcagccgagtccgacctgggtgacctgcgttccttcgcttcggcatcccgaattggtgccgaattttgcgcaacgcttggctgctgcgctgggtctgccgtttcatatggtcatcgcaaaaacagacgcaaggcccgaacagaaaacgatggcaaacagtacacaacaggcgcgcaacattgatggttcgctcgcactcaacggccagcccattcctcgcggaccagtcctcctggttgatgacatggtcgactcgcgctggaccctgacggtggctgcgtggctgctgcgcaaaagcggtagtggtgcagtttggccgatggccctttcacagacggggcacgacgaatga

SEQ ID NO: 511764 - DNA, 1905 bp, Stenotrophomonas maltophilia
atgaagcttcaaacgatccggctctcgaacttccaatcattcggcgcggtgcccaccgaaattcggctggaggagattacatacctcatcggccctaacggctctggcaagacagcagcactccaagccttgtgccgtttgtttgcctttgatccatcactgcgccgaatcttgcgctcggactttcatgtcccattcaacgaggcagagccgcctgctgagcgtcagctatggatcgaggccgacttcctgttccctgaacttgacgacgacgaagacaacagcacgatagctcctcatttcggccatatgcgccttgacgaaattggtggtataccccgcgtgcgttttcgcctgacagcgaccatgggtcaggatggggacatagaagaatgttttgagtatgtaactgatctcaatgctgacggaactcccttggtgaaggctacagttcctcggacggatagaaatcacgttcacgtccactacttgcccgctcgccgtgacccggctgatcacattgcctacggcgccaatgcattactggggcgcatgctgcgtgcggtgaattgggatgcagagcgaactgtcatcaagggcctgaccgaccaaatcagcggcagcctggcggccaactcatcaatcaatgcgttcagcacaagcttgaaaacagcatggagtgctttgcacaagggaagcttctttgccgaccccaagctcacatttgttgcgtctgaaattgaagccttgctgcggcacatgtcggtgtcattcacgccgggccatgatgagcagttggtcgacttctcgcgactgagcgatggtcagaagtcgatgctttatctctcaatcgtgctgtcctcgcaagccatcggtagctcggtcttagctgaagaagacgactctttcgacgtagacaagctgcgcccgcccgtgtttacggtggtggcggccgaagagccagaaaacagcctctcgccgcactaccttggacggatcgtcaatgcgctaaacgagatgaccagtgatggtgacgcgcaagcactgattgcgacccatgcgccgtcgatgctgcggcgcgtcgctcctgagcgtattcgctatctgcggctgaccctggagcgaacatcgcgcgtcatgcatatccagctgccagacgccgctgatgaagctcacaagtttgtgcgcgaggcagtgcaagcttttccggaagtctatttctcgcgactggtcgttctgggcgaaggtgatagcgaagaaatagtgttgccacgcctgctacaggccaaaagagccccggttgatgagtccgctgtcacgattgccccgcttggaggcaggcacgtcaatcacttctggcgtctgctttcagctttgcagatcccttatctgacgctgcttgatctagatgtggcgcgctatcaggcgggatggggtcgtatcaagaacgtcaacgaccagttagctgcgtacgagccgactaaggttctccccgcagaccatgtcattccccattggcaagatgcatctcataaagtccgggcttacggcaactaccttgaggcacttgaagaacgaagcgtgtacttctcgtatcccatggacctcgacttcgccatgctgctttcctttccagaagcctatggcgtcgaagaggaagaccccgatgagtcaacgatcaaagccgtgctcgggaaaagccaccacgacgctagccagtacagccaagacgaacagaagctcttcaatacctatcatcagcgtttcaagctgggaagtaagcctgcagcccatatcgatgcgctggctcagctgaccgatgaggaattgctggctgacatgccatcatcgctgagcagattggctgatgccgtgatcgccaaactcgcggagttgccggagtga

SEQ ID NO: 511765 - DNA, 1677 bp, Stenotrophomonas maltophilia
gtgatagcggtcgatgtctggcagccttcagatgggttgacactagagcccaacgccttgcttgcggctaaggagcgcggccgcagtctcgcactgacagcaggcccaggagcgggcaagacagaaatgcttgcgcagcgggcagacttcttgctgcgtacggggacttgtcggtaccctaaacggatactagccatttcgtttaaggttgatgccagtagtaacctgaaagagcgagtgaagcgacgctgtggctctgagcttgcctcgcggtttgacagctatacctttcacgcttttgccaagcgcatcattgaccgtttccgtccggtattgacgggcgagtatgcgctggatgttgggtacaaaatttcagatcgaaagcctggtccatcacggaccttgatcgagttttccgatctcgtgccgtttgcgatccagattctgcggcagtctgcagtcgcgcggaacgccgtccgtcaaacctacagcgacgtcttcctcgacgaatttcaggactgtaccaatctgcagtacgaactactcaagctcgcctttcaaggcacgagcattcgcctcacggccgtgggtgataccaagcagaaaataatgggatgggctggtgccttagatggcatatttcaggccttcgttgctgattttgccgctaccccgctcaacatgtaccgcaattttcgttcgaagccgcgcctcctgcgcctgcagaacgaaattatccgcaagcttgaccctgcgtctgttatgccagatgagcaacttgctggtgatgaaggcgaggtctttgcgtggcgcttcgaagatagtcgcaacgaagctgactacctcgcaggcttgattgaaggctggataaggaccgagcagcttccgcctgcggaaattgcagtcctgattcgtaatcagctcgatctgtacgccgatcatctgatgacggcattggaggcacgtggcatcccctttcgtaacgagcagcagatgcaggacatcacggtcgagcccgctgcacgcttgatcgtggactacctctcctgcctgtatggtcagcgcgagcccaaagcctggattcggctcatgaatcagctgatcccttttgctgatgaagacattcaatcgaacgcccgcaaagaccttgataagctgatcaaacaacagcgaaaagaaatagcgattgccgaggcggttggcgatcccgtttccggctggtgggattttgttcgagcatttctgaagcaaatcagtatcgaaacactggtgtcgctttccccagactacgagtcgcacgatcggcttaaagaagtggttcgtgacaccaaggctcgtatcgaggagttgctcagtctggagcccgacttgcccaaagctctcgagcggttctcagacgaccaagcagtgcggatactgaccattcataagagcaagggcctggagtttgattcggtcatcctcttggccgtcgaaaacgaaatcttctttggcgatcaggacgagaacaggtgcgcctatttcgtcggggtttctcgtgccaaaaagcgcttgatccttacgcatgccgaacaaagggagcgcccagcaggtcatacgaagcgctggagtgtgcaacgcacggctcaaaatgaatatttcggctatgccacacagtttgtgagacaagaagaatga

SEQ ID NO: 511766 - DNA, 915 bp, Stenotrophomonas maltophilia
atgtttgggagtgggatcgatgtcagtggtgagaatctggatgtggccgtccatgaacaggccttccgtcagttcaagaacaacaagcggggctggtccagcctgatcaaatggttgcagcagtggccagccaagcaggttgtgctggaggccagcggcggctacgaacagaaggcgctggatgcattgcacgaagccggcctgccgatggtgcgggacaaccccggccgcggccgcagctttgcctcggccatcggaaagcttgccaagaccgaccgcatggatgccatggttctggcacacatggccgacgctctcaagctgacccgttacgtgccacctgccgattggcagcgccgtctgggggagctctgccagcggcggcgccatttggtccagatgcgggtgagcgagcatcagcgcatgcgcgcgttcagcgaaccctgcctgatttccatgctgaatcagcacctgtgcgagatccacaaaagcatcaggcaactcgacgccaccatcgctgcactcctggccgaacagcagggatggcgtgactttgccaagctcaaaggcgccggcccggtactgatggcgaccttggcctgtgagctacccgagctgggcaagttgagcgggaaagccatctcggccttggtaggggtcgcccccatgaaccgcgaaagcggcacctggaaagggcgacggagcatcaccggtgggcgcgccgttgtacgtgaagcgctctacatggcggcgctgaccgccaaacgctatgagcccaggctcaaggaattctttgaatccctcgtcaagcaaggtaaaccgggcaaggtggctttggtcgcggtaatgcgcaagatgctggtgatcctcaacgcccgcaaacgggatgcggaggcccagatggcctccgcctga

SEQ ID NO: 511767 - DNA, 264 bp, Stenotrophomonas maltophilia; identical to SEQ ID NO: 508234

SEQ ID NO: 511768 - DNA, 204 bp, Stenotrophomonas maltophilia
atgaaagacgccatcgtcctaacgatctccaatcagaagttcaccctgagtccggcagaagccaagttcctggccgagcatctgcgcacggctgtggcacagccgaatctcgcgctgaacttctcccagagccggacccagcaaggcgggcgcatcgcactgtcgcgcagtgtcgcgggtagccgttccaccaccgactgctga

SEQ ID NO: 511769 - DNA, 210 bp, Stenotrophomonas maltophilia; identical to SEQ ID NO: 508232

SEQ ID NO: 511770 - DNA, 216 bp, Stenotrophomonas maltophilia
atgaacgtctctgccctgaatgccgccgtcgccaacgacgatgccgccacgcatgacctgttcagtgccgcgcgccagttgcagcgtatccacacgatgccgatggctgcgctgtcgcagctggtagccgccttggagtgccgccacggtgcactggaagcactctccgtaggtcagctgttggccatggtccgtgatgcggaggtggctgcatga

SEQ ID NO: 511771 - DNA, 852 bp, Stenotrophomonas maltophilia
atgacgcggtctgagggattcattgcgacactgcgtgcggcaggtctatgcgtgggtacgggcgatgctgtcctggccaatggccgtctgtgtcgcgtgcgcgccgacggtgatggcagcggccagcgcagcggctggtatgtcctgcacgcaggcccgccgttggccggtgcctatggcaactggaagaccgggctcaatgagtcctggtgcgagggtggcagcgaggcgctcagcgatgccgaccgcgcgatgctgcgcgaggctgtggtgcgcgcacagcgccagcagcaagccgagcgtgcccagcgccaggcggtggcccggcagcaggcgcgcgagcgctggcagcgcgccagcgccgctacacccgatcatccctacctggtggccaagggcgtgggagtgcacggcctgcgacagctggacggcgtgctgctggtgcccttgcgcgatgcgcaggggcggctgtggagcctgcaaaccatcgccgccgatggcagcaagcgcttcctggccggtggccgtaagcgtggcctgtactacgccgtgggacgcacggtcagcgacgtggtgtgcatcgccgaaggttacgccaccgccgccagcatccatgaggccactggccaccccaccgccgtggcctttgattctgggaacctggagccggtggcctgtgcgctgcgcgccaaattcccctcggcggtgatcgtggtgtgcgccgatgacgatgcggccaccgccgcgcggctgggcatcaatccgggcgtggccaacgcccaacgcgccgccgacgccgtgggcggggtggtggccatgccgccgcggccacgccatgaggctacctcctga

SEQ ID NO: 511772 - DNA, 1857 bp, Stenotrophomonas maltophilia
atgagcaacgttacgtctgtcgatttcaatgatgccgccaaggacgccggtaccggtgccgtgcgcggctcgattcagagcgccgtgcgcaagggtacaaagggcaagaccaaaggtggcaagaatgcctccggcaacgacagtggcggtgctgcacgagcgcactaccagctcaacgagaccggtgtgtactacgtgggcgtcaccgaggatggtgagcccgccgagccggtgttcgtctgctcgccgttgaaggtcgaagctaagacccgcaacagccaaagcgaggaatgggggcggttgctgacctggaccgatgccgatggccatccccaccagtgggccgcgcctgcggaaatgctggtgggcgatccgcgcgagttcgtgcgccagctggccgccggtggtgtggaaatgtcggcccaccgcaacaccatgcagcgcctgctggcctacatcatccaggagcgcatcgacacccgcgctcgcaacgtcgccgtgccgggttggcatgagggccgctatgtgctgcccaacggtgagagctacggcagcggcgaggaacggctggtgtaccagcacagcggtggattgcagcaccactatgcggtggtcggttcgctggacgattggcggcgcgacgtggccaagcgctgccaggacaactcgcgcctggtgctggcggtgtcggccatgttcgcagggccgctgctgcacttcactggcgctaccggcggtggcttccacctggtcggtggcagcagcagtggcaagagcacggcgctgcgtgtggcggccagcgtggtcggtcccccggactatgcccgtgagtggcgcagcacggccaacggcctggaaggcgtggcggtgctgcacaacgatgccacgctgattctggatgaactggcgcagatcgatcccaagcaggcaggtgacgcggcctacctgctggccaacggcaacggcaagagccgggccaaccgggccggtgaggcccgtgcggcggcacgctggcgggtgctgatcctgtcagcgggcgaggtcgggttggcccagcacatggccgaggtgggcaagcaggcacgggcgggccagtccgtgcgcctggcggacgtaccggctgaggccgagggcggacacggcgtgtttgagcgcctgcacgatgccagcgacggcgcagcgctgtcggccctgctcaaggacgccgccgcgcgcagctacggcgcgccgtggcctctgtggatgggctacctgacccagcaggacagccccacgttgaccgcccagctgcgcgaatcgaccgaccgattcctggccacctatgtgcctgaggacgcctccggcgaagtgcgccgcgtcgccgagcgctttgctgttgtcgcctttgctggggagttggccagcagctgccgccatcgcatcaccggctggcccaagggcgaggctacacggggcgtggcggcgtgctttcaggcatggctgcaacgccgaggcggctcaggcagtgccgacaccgatgcgctgctctcgcgcgtgcgtgcgttcttcgaggcgcacggcgaaagccgtctggagccgttgcgctacggccaggaagcgccaccggtccgcgatcgggcgggcttccggcgcttcgatgaggtgggcgtcaccgagtacatggtgttgcaggaagccttcaaccgcgaactgtgcggaggcttcgattcacgcttggccgcccgaacactgatggaggccggttggctcaagcccagtggcgatggccgaccttcgcaagtggtgcgcataccaggcttaggcacggtgcgtcttttcatctttgatccacgcagggtgcacgacagcgcccactga

SEQ ID NO: 511773 - DNA, 348 bp, Stenotrophomonas maltophilia
atgagcaagaacaagcacatcggatcaagctttgacgacttccttgagtcggaagggctgctggaagagtcggcatctgtcgccgtcaagcgcgtgatcgcctggcaggttgctgaggccatgaaggtggccaaggtcagcaagtctgacttggccaagcgcatgaacaccagccgttcgcagttggatcgcgtgctggatgaggccgacaccgggctcacgctcgatacgctcagccgtgctgctaccgccttgggctatcgaatccatgttgacctggtgccgccgaaacaacagggcggcaagcggcgaaagaacgcggtagagcccgccatctgcgcggcatga

SEQ ID NO: 511774 - DNA, 273 bp, Stenotrophomonas maltophilia
atgaaggaggtctccgccgaggcgcgcaaggccatcggtggcgacattaagacggtccagctgggttggcccatgggcatgccactggtgcgaaagatggatgaccggctgtgggaggtgcgtagttcgattcccgaaggaattgcccgcgtcatgttcaccaccgtcaagcaggacatggtgctgctgcacgggttcgtgaagaagtcaccgaccacgcccaagaccgacctggcactggcgaagaagcgtagagatgaggtgatcaaatga

SEQ ID NO: 511775 - DNA, 543 bp, Stenotrophomonas maltophilia; identical to SEQ ID NO: 508092

SEQ ID NO: 511776 - DNA, 2778 bp, Stenotrophomonas maltophilia
atgcgtttggcggtttcggaggcagagcaggctgggcgattgacgctgtccaatgcgactactgctcgcgtccgacagactctgctggatgatcttccagccatcggcaaggctcgagaaggaatctatgatcttgctgaggcatcgcccagccattacaagcccgtctcgcagcgcggctttgccaccacggaaatgctcctcggcgaagcctccaccagccaactgatccgatccggcggcctgctcgcctccggcgccgacgctgtcatgaccgcccgccgcacctcgcaactgctggaagaaggcaacggcaccgccgctcagtccgagctcacccacgccctggcgcgcaacggcggtggctggatcggtggcatggccaccgcgtcggtgatcggcacgtccagcttcatccctgcggccatcgtcgcgggcgatgcgctgctgatgagcaaggcgttcgacaagggtgccgatctgctcgacaaccgcgccgtctaccggcagaccgacaaggccgatgtcacgtggcagttcgatggcctcaactggcagcgccaggcggtcatggacagcgcgggcgacggcctgggcaatccggctgagcgcagtgtgggcgccagttacgagaaggcccgcgagctaggcgcatatgcccatgtaaaagcggtagagctggcgctgggcaaggcgccgccgccgcaggatcctttcagcatcccggcgaaggacggcgagggccgtctggacaatcccaactggcaccgcgatgcgcagaccgaacagtggacgcgacaggtcaagattggcgtgtccggcggcagcgatcggggtgtgtacgagacgcagaccgccagccccgaacgcgccaacgagttgaatcgtgaggcggtgcagcgcatcgagaacaacatcgccaatggcaaggccgccattgccgccagctacctggagacctacgccgctacccgcgccagcgacttcgtgccgctggtgccggaagcagtggagcaggcgcgtgccaggcccgacgccatccagggctcggacaaccagctctaccagcgcgatgaagaagggcaatggcaccacgctggccagatcgcgcaggggaacatggcgctggagctggagctgacccgcaccatccagcagccgtcgctcgatcagttcaaccagaccattgccgcattggaatcgcggccgctgccgtcggcggcggaagtgaaccagaacgagctgcgtcacagctactacgctgcaggcgttgcgctgaccccggcgtgggagcaggccattgcgctggccacggcacgcacgcgcgagcagcacggcataaccggggccacgctgcaggagctggggcctgtaatcgagggcagtgccggcgcctcccgacccatcacccattaccaggtaggccaggatggcgtggcgcgcgccgtcgcgaccaccagtacgcaggagctgcaggccgcatggaatgaggtgcgggcgcgtgccaatgagcaggcgccggtgccggactcacccgagctgcgcattgccgcgctatcggcgggtgagcaggaggcataccggcaggcaatgcaggaggcaaatcggctgggtgctgcgcaggtggatgcagaacaggctgcacgagcggccgcgcaggttgcgcatggcgacaagccatctgagcagggcgggaacgtggaagtgcgacctgaagagccggcgactgcgcagtccgtcgcgcctgcagcggcgccgcccgcgatagcggtcacgccaccgcctacgcccgcccatcaggacaagcccgcgcctcagcggcacgccgagcagcgcgatccgccgcggcgtgaggcggagcccgaacctcagccccatccaaacaacgaggcgcccaccgaaagccgtaccgcctcacatacgccggaacccgtggggcctatgcaggcgcccacggccgcacctgagcgcgcgacgccacatgccgccgcgcctctggcagcggcaacgcagacggtgcccacgcagcgcacagagcaggcatcggagccggaacggatggccccggtgcctccggttgctcccactccaaagcaggacatggcagttcaggaggtggaaccggtgcccttcaaggagccgttgcctgctgaacctgcgtgcgatccatggcctttggagcgggaagcggcacaacacgtgccagagcccgaaccggctccgttgggtgaccaccagcccgtcactgcggctgtcactgttcccgccgagcccacgacagcgccaggccctgaaccggccgcgcccgcaccggatgaggcatcgggcccgaaccgggcgctgcaggaccccacgcagcccggccaccccgatcacgcgctgtatcagcagatccgtgagggcgtggaagcgctggacgccaagcacggccgcagcttcgatgaagtcagcgaacgcatgacggccagccttctggtactggccaaggacaacgacctggaacgggtggaccatgtgctggtgagcaacgctacgtgcgaacaccccgctgggcacatgctgttcgtggtacagggtgagccaagcaatccggcacatcagcgcgctgcgattccgaccgagctggcggcgcagacatcagtggaagagtcactgcagcagttcgatgcagtcagccgcgaagcgcatcagcgtgcgcttgccaatcagatggatcagcagctggaggatcggcgcgtacaacatgagatccagattcgtgcggccagcggaggatga

SEQ ID NO: 511777 - DNA, 303 bp, Stenotrophomonas maltophilia
atgagcgtcaaggtcactgtcctgaagaacgaaatcgatgaacgcggcggcagcttcaagaacgatgccggtgagaacgtcgagtacaccacccgcaagcagaaagccaagctggaaaccggcggcttcgcatacccgttcgatgtgcgccttgacaagggccagccgggctaccccgaaggcgagtacgagctcgatatcgaatcaatgctccaggtgaacaagggcgttgcgtcgctcagcaagttcacggttctgcgcccggcatccaaagctgctgcgcgcccggtggcccaaggctga

SEQ ID NO: 511778 - DNA, 1107 bp, Stenotrophomonas maltophilia
atggccggtgaccgcgcggtgctggccgggtcgggactcccctcgtctaacaggggagtcagtgaattcaggaacgccgagggaaccctgacggtcggcattgactggttttccgcttccatcgatctgcgcgcagcgctggatgaactcgcgttccgtgatggcgacagcttcgaagaggtcaggcagtggatcgagttctccccggagaatgcgcgcatcgcggccctgcaagtgttctgctggttcttcgccgggcttggccttgaactggatgaaacagcgggcggcggtcgcttctacacgtggcgtatcaagatcatcgacgcagccaagaagttcgtcgggatgatcgaactcggcggcgaagagtgccgccgcgcagatggcacgtataccgcccgcattgagttaaccggtgatggatgcaaggcggtaggcgcagcgcgctgcggccatgcgcagcggtggctggagcttcgagcgaagctcgaaagctgcgccggaaggatcacccgtgtggatgtgtgcgccgatgacctggtgggcgaatacccattgcgcctggcgcagaagtggtacgccgctggcgagttcgatagccgtggtcagcgtccgaaggcgcagctggtggacgactacgacagcggcgacggcaagacgttctatgtgggcggcaagaagtcggaaaagcaactgcgcgtttacgagaagggcagggagcagggcgacaagagctcgccttgggtgcgctatgaggcgcagttccgtaactccaaccgcaaggaactgccgctcgacattctgcgtgatcccgcctcgtacctgcttggcgcctacccggtcctgtcctttctgcgctgtgttgctacgcgcatcgaaatcacgaaagccgccgttgaagcgacgtggaagagcgttcgtcgccacatccgccgccagtatggcgcggccctcaatttcatcgccaagaactgccccgacgatcaggcgttgcgggcggtaatcgaatcctgcacttcgccatcgctgccgaagtgggtcacaggtgaaacagcagcgcactggcccgaaatcgcggccgtacagcaaacctcaaaggggtaa

SEQ ID NO: 511779 - DNA, 543 bp, Stenotrophomonas maltophilia; identical to SEQ ID NO: 508092

SEQ ID NO: 511780 - DNA, 543 bp, Stenotrophomonas maltophilia; identical to SEQ ID NO: 508092

SEQ ID NO: 511781 - DNA, 1224 bp, Stenotrophomonas maltophilia
  misc_feature (1193)..(1202): n is a, c, g, or t
atgagtagcacactagaactcaacattgacgaactagaactcgacctcaagaacccacgattcgcggggcttagcagccagcgagaggcacttgagaagatagtagttaatcaggggatcaagctggttaatctagccgaggatatcgtccttaacggattgagcccggcacatcgcatgctcgtaatgaaggcccccggaaagaaaagctccacctacatcgccttggatgggaacaggcgtctagcagccctgagggtcctttccaatccttccgtgcttgatggcatggatggcgtgggtgacattaccgcccgccggttgcgaaatcttgcgaagtctttcactccatccgacgttcagcctattgacgtttctgtatgcagggacgaggaggaggcaaggcactggattgaagctattcatacaggcgcaaatgacggcagaggtgtagtggattgggacggcattgcgacagcccgctatcgaggccatacaaattccctcaaagttctggaatttgttcgcaccgcaggaaaactctcagatgaggaggatgctgctctcgagcgcttccccatcacaaacttggatcgcttgcttggaacacctgaagtccgcgaacgtctcggccttgtatttgagaatggcgaattcctttcggacctgccgcaatcagaactgataaagccgctcaagaaaataatatcggacatcgggctgaagaaggttcgtgtcagtaagatcaaggggaaggatgatcgaatcaaatacctagactcacttggatcagcgttgcccgacctcaacaagcgcacgggaacactagagccgctcgaccagctctcggcacaaagcaaaaaggcagcatcgaaatctggagcaggctccaagagtaagtctctgatcgacagaaaaactctcatcccacccaactctcagtgcccgctgaacatcaatgatcacaaacttcagcagatgtgcaaggaactgagaaagcttccgcttgataactacccagtggcaattgcggcatcgttcagagtattccttgaactatctctggaccattacggatctgaaaataaagtccccaaatacaacagcgatctgagcctaaaacagaaactagagagcgtggctgcagatctgcagcaaaatggcgcaacgaagcgcgacctcaaagaattccnnnnnnnnnncccttgcatcgaacccaaataa

SEQ ID NO: 511782 - DNA, 738 bp, Stenotrophomonas maltophilia
atggaactagtcctccaagaatacgccaaaaaagtttacataaacgatattagcgatggcgtctctgccttttggcgatccatcctggaaaataccgatagcatttgcgcgctcattcaaaacacgaacgtcacgattgaggagtggcatcgccagaagaatattcaaaacaacacttctgagcacggcgacttggaactcgggttttccacattctttttaaaccgcacaaatcgttctggaattctgggggccggggtgattggtggaaaatcacagtccggcaaatggaagcttgacgcccgattcaacaagccagaccttatccgtcgcattcacgcgatagcgcgtgtgcgagatcggattgaattccaccaactggatgccatcaagtttattgacctagtctccccaagactccccgcaaaaagcctaatttacttagaccctccttactacgtgaaaggcagtgacctctacctgcatcactacaagcatgaagatcatgtaaagatctccaagcgggtatcgagacttaaaagtaagaactggatagtttcctacgacaatgctgagcccatccatggaatgtataggaatttcagaagcatcgtttacggattgagctatagcgcacaggacagatataaaggcgcggaggcgatgttcttctctgacagcctcgccattcctgacgctgtccagcctatgcacctccttgagagcaccggaacttga

SEQ ID NO: 511783 - DNA, 543 bp, Stenotrophomonas maltophilia; identical to SEQ ID NO: 508092

SEQ ID NO: 511784 - DNA, 1419 bp, Stenotrophomonas maltophilia
atgaatcgcttgctgacgctgcgcttctcggatggccagggtgatcaggactggaactattggcctggcgggaaagtgaagcgtgtgcagacccgcaacaacggcgccatcaccaccaacgactacacctacaacctgcgtggactgcccacgtccgagagcgtggcctacgacggtggcgaggcctgggcgctgggctatggctacgatgcaaacggcgccttggcaacccatgtgcagccgtccggcctgacgatcgactacggcccgaatgcgctggggcagccgacgcgagccggagccttcgccaccaacgtgcgctattacgcgaacggcggcatgagcggcttcacctatggcaacggcgtcgtgcatcagatgacgcagaacgcgcgtggcctgcctgatcgcagcaccgacagtggtgcaggtggcaaggtcatcgatgacggctacgactacgatgccaatggcaatgtggcggccatcagtgacggcctgccggcagccgctggaaaccgcgacatgcgctacgacggcctggatcgtctgaccacggtgacagcggccagcttcggaaacgcaagctatgcgtacaacgttctggacaatatcgtcaccgccaacgtcggcgcgcggcgacagtcttttgaatacgacttcaacaaccggttgacgaacgtgcgggatgtcggcagtggcgcgaccgtgaccgggctcgggtatgacgcgcagggcaacctgaagatccgcaatggcgtcgtgttccggttcgactacggcaatcgcctgcgcgaggtcgatggcaaggaggcttatcagtacgatgcacatggccgtcgtaccttggccagcgcaaccaatggcaacattcgttccctctatgggcaggatggcgtgctgcgctatcagcacgaccagcgccaggccaagggctttgactacatccagctcaacggcagcctcgtcgccaagcgtgccgtggatatcgcgcctgcagcattggtcgtaacggttccgggttacagcgcggacggtgcgtttgcggtgcagtggacagccgttgccggtgcgcagcgttacgaggtgcaggagtcgagtggcggtgactggcaggctgtctatcaagggcctgcgctgaacgtttcgctggccgggcgaagctccggcgtctatcgctatcgtggccgtgcctgcaatggcactgtctgcggcgcttggggtgtggaagcctccatccaggtggagcttgctcccaccgctgcgccggtgatcactgcaccggcacaaggtatcaacgggaactattccctgagctggtcagcggtgcagggggccgcccgctttgtgcttgaggaggccgtgggggggggggttggaatgtggcctttgatggctcgggccgcacctatcaagtga

SEQ ID NO: 511785 - DNA, 543 bp, Stenotrophomonas maltophilia; identical to SEQ ID NO: 508092

SEQ ID NO: 511786 - DNA, 150 bp, Stenotrophomonas maltophilia; identical to SEQ ID NO: 505935

SEQ ID NO: 511787 - DNA, 543 bp, Stenotrophomonas maltophilia; identical to SEQ ID NO: 508092

SEQ ID NO: 511788 - DNA, 288 bp, Stenotrophomonas maltophilia
atgtcaaagcgtcgcaagttcagtgccgagttcaagcgtggcgcggtggagcaagccagtcggcccggtgtcagctgcgcccaggtggcccgtgagctgggcatccgcgacagtctgctgacccgctggaagcgggaggcggagacggtggggaaagccgcctttgcgggtaccgggagcccgcgtgacgaggaggttgcccggctcaagcgcgagttggccaggatcaccaaggagcgggattttttgcgcgaagcggcgacgttctttgccaagggatcatcctga

SEQ ID NO: 511789 - DNA, 1161 bp, Stenotrophomonas maltophilia
atgaagcgaagaacccggatccagtacaccgatgcccagaagggcctgatgtgggaccgctggcagaaaggcgagtcgctgcaccagatcgccaagctcttcgacaggcaccacacgtcggtgcgcgtgattcttgctgcgaccggcggtatccgccctgcggctagacggcgatcggtccgggcgctgaccctggccgagcgcgaagatgtctcgcgggcgttggttgccggccattcgatccgatcgatcgcagtggcgctggggcgggcaccgtcgacgatcagccgggagatccggcgcaatggcggcgccgagcggtaccgtgcaagccatgcggaccaggcggcgtgggaccgggcgcatcgcccgaagacttgtaagctggcactacatcctgcgctggcgaaacgggtggcggacaagctgcagcagcagtggtcgccgcagcagatcgccggctggctgatgcgtacctttccgagcgatgcgacctgtcaggtgtcccacgaaacgatctaccgcacgctcttcatccagtcgcgcggcgcgctgaagaaagagctgctggagcatctgcgacggacgcgggccatgcggcgatcgcgccaccacacacagaagacggcggaccatggccgcatctgcgacaccatatcgatccgtgaacgccccgccgatgtcgaggatcgggcggttccggggcactgggaaggcgacctgctgttcggcagcggcaacagccagatcgccacgctggtcgagcgcagcacacgctacgtgatgctggtgaaggtcgatcgcaaggacacgaagacagtcgtggatgcgctgattgagcatgcgcgccagttgccgaaccagctgtaccagtcgctgacctgggatcgtggcaaggagctggctgaccatcgccgcttcacgttggccaccgacatccaggtctatttctgcgatccgcagagcccttggcagcgcggttccaatgagaacaccaatggcctgctgcggcagtactttccgaagggcatcgatgtatcgggctttacgcaggcccagttggatgaggtggcaagacgactgaacgaacggccacgcaagacgctgaaattcgagacgccaatcgagcgttaccgacaggctgttgcgttgaccggttga

SEQ ID NO: 511790 - DNA, 543 bp, Stenotrophomonas maltophilia
gtgggcctggtgaccaatgtgctcaaccgggacttcgcgccgcccgctccgaacaaggtctgggtcacggacatcacctacatccgcacttacgagggctggctgttcctggcagcggtgatggatttgtactcgcgccagatcgtcggctgggccacggcgccgacgatgaccagtgacctggtgttgcaggcgttggtggcagcggcgtggcgccgcaagcctgggcctggggtgatggtccactccgaccagggctgccagttcacaagcagcgattggcagtcgttcctgaaggcacaccggatggtgccgagcatgagtcgtcgcgggaactgccatgacaacgccgtggccgagagcttcttcagcgtattgaagaaggagcggatcaagcgaaggatctatccgacacgggccactgccgcatcggatgtgttcgactacatcgagatgttctacaacccgatccgccggcatggttccgctggcggcgtgtcaccggtagagtttgaaaggcgctacgcgcagagcggcaactga

SEQ ID NO: 511791 - DNA, 543 bp, Stenotrophomonas maltophilia; identical to SEQ ID NO: 508092

SEQ ID NO: 511792 - DNA, 543 bp, Stenotrophomonas maltophilia
gtgggcctggtgaccaatgtgctcaaccgggacttcacgccagaggccccgaacaaggtctgggtcacggacatcacctacctccgcacttacgaaggttggctgttcctggcggcagtgatggacctgtattcgcgccagatcgtgggctgggcgacggcgccgacgatgaccagcgatctggtgctgcaggcgctggtggcggcggcttggcggcgcaagccgggcccaggcgtgctggtgcattcggatcagggctgtcagttcaccagcagcgattggcagtcgttcctgaaagcgcaccggatggtgccgagcatgagtcgtcgcgggaactgccacgacaatgccgttgcagagagtttcttcagcgtcttgaagaaggagcggatcaagcgacggatctacccgacacgcgccatggcagcatcggacgtgttcgactacatcgagatgttctacaacccgatccgccggcatggttccgctggcggcgtgtcaccggtagagtttgaaaggcgctacgcgcagagcggcaactga

SEQ ID NO: 511793 - DNA, 396 bp, Stenotrophomonas maltophilia
atgcctagacgctacgtccgcctgttctggctgctggtttcattgacctggctggcgctgatcacggccttggtcaacgccggtttcaccccggactactggctgctgcaccacctggaaggcgccgagtcgccctacccgaccagcaccgtcatcgtgttcgcgttgctgggcacggtcgaactggtggtggccgccttgatcgtgcggccatggagactgaaacgcctgtggctgcgcctgctgatcgccttcgccctgctggtgctgtggtcggtgccgtggatgctgtcggcgatgcaccagccgccggtacaaggcatgcacctgctgtggctgctgctgttggacgtgggcctgctgctggcgctgtgtggaccggccagagttctgtag

SEQ ID NO: 511794 - DNA, 852 bp, Stenotrophomonas maltophilia; identical to SEQ ID NO: 502615

SEQ ID NO: 511795 - DNA, 276 bp, Stenotrophomonas maltophilia
atggcaggcggtttcggcctgttcgttggggtggacgctgctgaaggcgacccgggagtgatcgtcgatggccacgtggacgtagccccagccaccgccagcggcgtttccccgacgtttggcatcggttctgtgccctggccgctggaagttgcccagcttcttgatgtccaggtgcagcagccctccgggctgatcgtattcgtatcggatgacctccttgggcggttcaagccgacacagccgattgaggccgtgggcacgcatcagccttga

SEQ ID NO: 511796 - DNA, 816 bp, Stenotrophomonas maltophilia
atgaagacgataaataaattgcttgacaaagcatcggaagcatgctcggtaacatcagaccggcagctggcaaagaagatcggggtatcgccaagcgccatttcgctctggcgcagcggcaaacagatcaaagacgaccacctgatgacggtcatcaagctggctcaggcagaccctgcccttgcagtcctggtacgaacggaaggcgcagaatcgccggctgaaaaagctggctggagcttggtgtgggacagactgtccccggtcactacggtgatcgggggactggtcctggcagtgtgcatgatgccagcgctggcccgcgcaaaacccgttgaaatcaaggggttggatgagggtaaaaccgcattctgtatattatgttctcaccagaccggccgaggcgaacgccgcccgggcccaacccacgctgcacggcccccgttcaaatggccgtcccaacatccgcagaaccgcgccctgcaggccgagccttctcacccggcatccaaacgccctcgtgtaggctcggcgcaccacttaaggatgggtttggcgatgcgcctggctgattttatcgaacagaatgcgcgggaaatcctcgaagacgcgttggcattcgccgaaacgcaggcgcccgataccgtcgagttcagcgcaaagcaacttcggaatcatcttccccagattcttcaggcggtcatagacgatctcagatcgccgcagacagacgcccagcggctcgcaaagtcccacgggcttgcaccgttgaaaccctggaccggccagcctttcgtagacactcggacgccataa

SEQ ID NO: 511797 - DNA, 423 bp, Stenotrophomonas maltophilia
gtggtcatcagcgtccagacccggcaggtgctgggctacagcgtttccaagcgtctgactgaagagctggtggtgaaagcatttgccaatgcttgggctctgcatccacaacgacccggcctgatcttccattcagatcgtggtgggcagtactggggaaacgagtttcgccagctgctgcagtcccatggcgtggtccaaagcatgagtcggcctggcaattgctgggacaacgcggtggccgagagcttctttgcgacgctcaagacagaagaggctgccgagccttacgccagtagggaacaagccagccagtccatcgctgcttacatccacggcttctacaatccagcccggctacactcggcgctgggctaccactcgcctaacaactatgcccggcagctccgggctgccgcctga

SEQ ID NO: 511798 - DNA, 543 bp, Stenotrophomonas maltophilia; identical to SEQ ID NO: 508092

SEQ ID NO: 511799 - DNA, 294 bp, Stenotrophomonas maltophilia; identical to SEQ ID NO: 502612

SEQ ID NO: 511800 - DNA, 252 bp, Stenotrophomonas maltophilia
gtgctgatctacctgctgctggccgaccacgcgatcgagatcgtcgccgatcgtggcctgcacggccgggtcagcccggcgcagtggcagcgggtctgcacccacctgcgcgagggcctgcgcggcgctcatccggtcgaagcattgcaggatgcgatcgacgaggtctccagcctgatcgaagggcactttcccgcttcgacgcggtcagacgatgacggcctgcccaacacgccccagctccttggttga

SEQ ID NO: 511801 - DNA, 294 bp, Stenotrophomonas maltophilia; identical to SEQ ID NO: 502612

SEQ ID NO: 511802 - DNA, 348 bp, Stenotrophomonas maltophilia
atgagcgctgaaggctatgcggtctccgaaatcgggtatcgggccatctccccgggcgctccactcgcacctggggaaaccctgatggaggcgttgccagcgccgctgttgacgcgaatcaaggccgagcagatgaagaccgagcgcagtcatcgtttgcgggccagcgactggacgcaaatggcggacgcgccgatcaccgcgcttgaaaaggtggcgtatcaggcctaccggcaggcgctgcgtgacctcccgagcctgccaggtttcccgaacgtggcatggccagttcctccagccctcagcgacggagccgccagcggcacggagatccccgtcacgccgtga

SEQ ID NO: 511803 - DNA, 828 bp, Stenotrophomonas maltophilia
atgctgaccatgctcaagcggctggcgtcgctggtgccaactcccgccaccaacaaggtgacgctgttcgtaagcgacaccggcatcccgtcgtacaaggatgacgccggcctggtcacgccgatgagcggccagccgatcccagccggctacatcgatggcctgaagatggagtgggtatcgggcacgcagatgcgtttcaccagcggctcggcatacatcccgtcgctggggcgagcgctggcactgacggcagcgttgacgaagtcgccgtcgttggcggccagtacctggtatcacgcctacctctacagcaacgccggaacgcctgatgtggaggtgacaaccacggcgccggataccccgtatagcggcgccgcgcgcgccaagaccggcgacacctcgcgacgctatatcggtagcttccgaacgatggcctccggggcaatcgccaagttcactcacgacctggcttcggcggcgatcaactatctggaagatctgaacgcgactccatttgcagtggttgcaggcggtacggcgacgacgcccacgaccgttgcctgcagtgccatcgtccctgtgacgtccaagcgcgtgaaatttctggcgaacaacaacgcaaccaaccagttcgtcttcatgtccaactcggaggccgtgaacacattgagcgcctctaactggatgtcgctgatcgcaatcggcagctcgttctatgcggagttcccattggattcaagtcagaatttcaactacatgtacgggggcgcccccacgggcggccaggtattcatccgcgctgtagggtacgtctatgagcgctga

SEQ ID NO: 511804 - DNA, 714 bp, Stenotrophomonas maltophilia
atgagctggtatgtaatccaaggttggtacacgaccgtaaagcagtggggctggagaattatcagctcgcatttattcttcgccgccgttctcctcgttgtcggcttcttcacatacgaggcgtacaagatggtgcctgaaggggacaatcaactcgcaactagggcatcagtaatccaagctggcggcgttgttattggtcttttttcaattgtccttgcagccattcaagtgcgggtaaacgcaaattggaacaaggtgctctcgtaccacaatcacttcggtcagctgattactaccgacgtgctggatagactggaaaaaaccgctgaagcaaaggaattcactaagaacctgaaggaccgcactcccatcagcaaggaagttgcgcaggccgtttatgacgacggaaagcacgacagagtcctcagctgctatctcgatgagttcgaagaattctgcggcgcagtgaatttgggtgcagtggatatggactacgcttaccgactggaaggcactcgcgtagttaaggtatgggaggtgttccagaactatgcattttactgccgtgaaaagatggattgccccaccatttacaagcagcttgaacacttggctgggaattggcacggtcgaatggagtttgaaaaagagcagcgggctaaagctgaacgtaagggcgcccggaatggggctatcagtcaatcgctctaa

SEQ ID NO: 511805 - DNA, 429 bp, Stenotrophomonas maltophilia
atgcttaacggatacaatttcgaagtcatcataggatccgacgctcaggcgggcagcctcgtgcagtcgaaaggaagttggtaccttgccgtcggtgacagcgcattcctgcttatctcggggaacaggcgcggcctgatcgtcaacatgcccgatcaatacctgctacgtatccggaaaatgggcagtgtcgaggtcaggttcctcgatgccatcaaagcgacgtcgccagtcccgaacatggctggcccgggaagcatcatcgtattcacggataacggtctaaggttcgctggcgcgtatgaaggcgagcctctccgccttttcacagaagatggcgatccggttcaggaagagccgcgcatatccgcgcatgacttcgccctctatgtgcagctgatgggtggcggagaggtaaaggtcatctga

SEQ ID NO: 511806 - DNA, 342 bp, Stenotrophomonas maltophilia
atgaaccgacaaagtgatctacctgccctgcccccgcctatgaccgttggacggtatgtgcgggagaacttcaaacgccgtgtgcaaccctatgtcgcgtgggcttcgctgagtgcaccgatctttgcaggcatgaggatcaaggagtctggattcgcgtggtggaagcttgcagcgataccggctgcctgggcgatcgcttgcatcattgcttgcgcggcggcggcaatcattctggccaccgcaggctggtggaagctgcacaccaagatctcgccgtatgttccggtgacgatcgctttcatcgccaccatggcagttctggtctacagggtctcctga

SEQ ID NO: 511807 - DNA, 531 bp, Stenotrophomonas maltophilia
atgagcaacagcatcatcgccaccgtccagctggtcgctgtaaggcgcggcatggaaaccaccatcgcggccgaagtgttcaagcacgaggtgccgattctcgaagccattcatggccgcgagaacgtgaaggtcgtggacgcggacttccacgcactggagcttccggacaacgctgaaggcgagttccagcgcctgcgcagcaagtacggcgagcggttccagccggccatcgacatggcattcccgcgcggcgccagcgacatcgcccgcgagctggacatggaattgggccgtgacacttacgttcgtccgtcggaggcggtcatcaacagccgtcgcccggaacgtccgggtcagaaggccgaggccggcgctggcggtgagcctgagctgactgcagccgagctgaaggctgagctgaccgaacgcggcatcccgttcaagggcaacgcctcgcgcgaaaccctgcagcagctgctggacgacgccaaaaaggccgaggccggcgctggcaccctgggcggctga

SEQ ID NO: 511808 - DNA, 243 bp, Stenotrophomonas maltophilia
atgaagtcccaagccatcacgaacaccgcattcaagatcggcaacagcccgttccttcgcggcggcagcgccgtgttcgccaacctgtccggtgctgacgccactctgcagggctcggacaccgccaccggcacgttcaccaccctggcgacgctgaccacgctgagcttcaccaacgtggccaacctgccgccgtacatcaagctttcggccgccggcaccgtctacgccctgggcgactga

SEQ ID NO: 511809 - DNA, 1086 bp, Stenotrophomonas maltophilia
atggaaagcgacaacccattccccttcgaggacatcaccatggcctttacccaggctcagctcctgatcggcaccaactacacgttggagacctacgccaagaacgagcccgttgaccagatcaacgtggcgcaccgcaccctggacctgctggtcaagggcaaggaagagtccgttttcggcaacggcatctacaacgagaagctgtacatctccaacgacagcaactaccagaactaccagggcgccgaccaggtcacctacaacgagcgtgacccgaaccgcttcgccaagttccagtactgctcgaaccacgagggcttctggttcgatgaggaccgcctgatcgccaacggcatccagatcgatgacgagggcgtggccgttccgacttcgagcgagaaggagcagctggtcaacctgatgaagaccagctactacgccgtgaagtcctcgatccaggaaggtctggcactcgaaaccctgcagaacggcacccagagctccaaggccgtcccgggtctggaccacatcatcaacaccgtgccgggcaccgccgacgttgtgggcggctgggatgcgtcgaccgcaacctggtggcggaacaacgccgacatggcgatcgcctctggttcgctggtggccgagatggagaagatgtgggaggcctgcatgcgctacggcggcggtctgccgaccgcgatccgctgcggccaggccttcatcgacgcctaccgcaaggaggccaagctggaggtcaaccgccaaatcatcatcgggccgaagggcggcactggcctggacgcgtccatcagcggcgtgttcttcaaaggcatcgagctggtctgggatccgaccttcgagctgctggacgccaagctcggcacgatcacctacccgtggaccaagcgctgctacttcatcaacgagaacttcctgaagttccgcccggtgaagggcaactggatgaagaagcgcaagccggaaaagctgccggaccgctacgtcacctactacgcgcagaccaacaagtatggcctgaccgtcagcaagcgcaacgcgcacgccgtcctgtccatcgcctga

SEQ ID NO: 511810 - DNA, 171 bp, Stenotrophomonas maltophilia
atgagcaatccttcggacgcaacgatccaagcggctgccacgattaccgccgcgctgatcgggatggtaaaggctgaacgcagcacgattggttctgtccacagctcgaacttcccagcagaggctgctgcgctgttccgtaccgtcctcagtgaaatccagaagcgctga

SEQ ID NO: 511811 - DNA, 507 bp, Stenotrophomonas maltophilia
atggccggtaagcagcccaaggccgacaaggccaatgagcaggcaaaggccactggccgcccaagtgcctacaaggctgagtacgccaagcaggccgaaaagctgtgcctgctgggtgcaaccgaccaggaaatcgccgacttcttcgaagtgaacgtccgaaccgtctaccgctggaaggggcagtacccggccttttgtcaggccctaaaggccgggaaggaccaagcagacgagcgggtggagcgatccctgtaccagcaggccatcggatatgagcaggacgaggtgaagatcttcatgcctgcgggggcagagtcgccggtttacgcggagtaccgtgccaaggtggcgccgaatgttacggcggcgatcttctggctgaagaaccgccgccgcaacgattggcgtgatcggatcgaccatgccaacgaccccacagatcctctgccggcgcctcagttcatcgtgacgccagttaagccagcgggcagggatgaaggttga

SEQ ID NO: 511812 - DNA, 297 bp, Stenotrophomonas maltophilia
atggacgccatcgagaagcgggcgcgggagctgctggctgcggagctggctaaggatggcaaccatccggcagcagaggcgatcaggggcggcgtgtccacctatggggtgaggctgcagctagccgccgttcgagccatcatcgctgccctcacgccgcccgagggctacgtgctggtgccggcggagccgacgcaggaaatgttgaacgcaggctatgggtttgaatccggatatccggttgatccgttcctgtatcgagccatgctagccgtgcgcccggaggtgaagccgtga

SEQ ID NO: 511813 - DNA, 195 bp, Stenotrophomonas maltophilia
atgggcagccgctggggaggggaagtgatgcgcaagtggatcagatttttgccgctcattgtcgtagagaagattgctaaatcgcgatgcgagcgtctcccgcttaacgactggaaggtagtgaatccattcgatggcgttttcttcgtcatcggcgatcagtacgcaaagacgaaaaatctggaggccaagtga

SEQ ID NO: 511814 - DNA, 138 bp, Stenotrophomonas maltophilia
atggaagggttcaactggcgggttttggtcaccatgccccttgtcgagattgtgggggttctgggtctggtgtgcactgccgcggtggcagtaaccgaggcagtcgttgcatgggcagccgctggggaggggaagtga

SEQ ID NO: 511815 - DNA, 303 bp, Stenotrophomonas maltophilia
atgagcgaaagaaagcgaatccagtcggagttgagcagtttcaccacggatcagctgctgtctgaggtcgtgcggcgacgcaatgagacaaccgcgaaggatgctgccgagatcaccttctgcgacgagtgcgtgcacgtccgctactggacgatcagctcggagccgcccaagaacttcagcgtttgtggcaagggccaccaggtcctattccggatgcccgaggactgggaagggccgcatggcccctctggtttctaccggcgcgtctgcgctgatcgcatccagaggacgccagcatga

SEQ ID NO: 511816 - DNA, 333 bp, Stenotrophomonas maltophilia
atgagccgggccaacgagcgcgaagcccgccgcctgtccttcgatgccatcggggagacctgcccgaagctggacaagttgagggacaaggctatcgaggccatcccatctgcgatcgaggatgtgctgaaggatctggttgagagcatcaaggacgaagcgaccatcccgctgcgcgaggcattggacaacgcctacctcgaactgatccaggcccagcagaccatcgccgagctggaagagcgcatcgcggagaagaaccagcacatcgaatcgctggaaacggaactggaagaagcaaccaaggcgctcgacgccatggaggccgcatga

SEQ ID NO: 511817 - DNA, 354 bp, Stenotrophomonas maltophilia
atgagtaagcacacgccggggccgtgggcctatcaagaggacagcgacgcctacacgcacatcgtgcgcgggcccggcaaccgcttcatctgccagctggctcaaaccacgtctgccgagatcgaagctaatgcccgcttgatcgccgccgcgccggagctgctggccatcgtcgcccgggcactgcgagacggcgaacagtcgcacttcgaagactggctggaacgcacttgcccgagcggcgacgttgagtcggtcaagcgtcaatggctggaaagctccgactacgtcctcttctccaatgtgtaccgcgaggagttggccgtcctcaacaagatcgaaggcaacacctga

SEQ ID NO: 511818 - DNA, 930 bp, Stenotrophomonas maltophilia
atgaaccagatcgtcaccatcgaggattcggtctacggcaccaagcattcctttgcctcggtgctgtctgatcggtccatcaacttcgaccgcgaggccgagttcgccctgcagacgctctacagcaacgactacgcgatgaagatcgcgatgcagaaccggtcgtcggtcatcgctgccgtggtcaacatcgcggccatcggcatcagcctgaaccctgcgaagaagcaggcctacctggtgccgcgcgacggcaagatctgcctcgacatcagctacatgggcctgatggatctggcgatcgactccgggtcgatccggtggggtcaggccgagctggtctacgagaacgacaacttcggcctcaacggcattgaccagcagccgacccacatccgcaacccgttctcgaaggaccgtggcgaggttgtcggcgtctacgtggtggtgaagaccgccgacggcgactacctgaccgacgcaatgtcagtggaggagatcaacgctatccgtgaccgctcgtcggcatggaaggcatggatctcgaagcagaagtcctgcccgtggctgaccgattggggcgagatggcgaagaagactgtcgtgaagcgcgcctacaagtactggccgaagaccgagcgcctggacaccgcgatccaccacctgaacaccgatgggggcgaaggcttggcagttctgtcgggccagcaggtccagcagcaggcgctgcccgcgccgctgtcggaggatcaggaggcagagcgcaccgcgctgtatgccagcctgcaggacattggcatggccggcctggacgctctggctgaggcgtggtcaaagctcactccacagcagcgcaagctgatcggcggcttggggctggagtcgttgaaggctgaggccgagcgcgccgcagcggaggtggtcgaatga

SEQ ID NO: 511819 - DNA, 243 bp, Stenotrophomonas maltophilia
atgaccaccgacaacaagaccctggctgtcgatgtgctggcggtgatggacgagctaattgacttcgaggagaggcatgcggagtacgagccacggcagaactatgaagcgcgagaagcccgcgccgcactcgccgagctgatcgaggcttttgatattgccgcgtacggcgagtacttgccggaatcggtagagcagcaaatccgaacttccctcgcccgagtcaaaggagaatcagcatga

SEQ ID NO: 511820 - DNA, 972 bp, Stenotrophomonas maltophilia
atggcaagcatccgaccaaccgcaaaaggcttccgagcccaggtgtacgtcaacggcgagcgtgactcgcagagtttccgcacccgcaaggaggcagcgcagtgggccttggagcgggaggccgagatgcgtggcagcaagctgccagaccgcaccctgctggaagcgttgcggaagttctcggaagaggtggctgagcatcgcgccggcaagaagtgggagcaggttaggctcaaggcatttgagcgcgaggcgctggcatcacggcgcgtcgcggccctcgatgcgtccgacttcgccgattggcgcgatcaccggctgacgcaggtcaagccaggcaccgtcgcacgtgagatgaacctcctgcgctcggtgttcgaggtagcccggcgcgactggcgctggatccgcgagaatccgatgaaggacgtgcgctggccgaagaccccgaaaggccgcaggcggcgcatcacgcccgaggaagaggcggacctgatggcagcgttcggcctcgacgagcagctgtcggcggacacggccaccaagcgggtggggctcgcgttcctgttcgcgctggagaccgccatgcgttccggcgagatcctggcgcttacctggccgaacatccacctcggcgacaggtatgtgcacctgccgaaaacgaagaacggcgactcgcgggatgtaccgctgagccgccgtgccgtcgcaattctggatgcgctaccgcgagggtttgggcctgctttccagctggaatcagacgatcgagacgcgctatggcgcaaggtgcgtgaccgcacaccacaccggtcgatccacttccacgacagccgcgcagaggcgatctggcggctgtcgaagaagctggacattctgcagttggccagggtgatcggtcaccgtgacctcaaatcgctcatgatttactacgacgagtctgctgcggagatggcgcgccggctcggctga

SEQ ID NO: 511821 - DNA, 291 bp, Stenotrophomonas maltophilia
atggccgagcatgactcaacactcgccacgctggccgccctaatcgagggagaccgctggctcaatgcagactcatgtgccgtgttcctgggcctggtgaccgatggcaagccgaatcggcgtggcttccttgagcgcgtggcgaagcggcccagctttcccgagccgcttctgatcgggaacgagatgaagtggcgaaagactgaggtggaccgctgggccttggacgagcggaagatcagccgagccggcgcgccatctccgcagcagactcgtcgtagtaaatcatga

SEQ ID NO: 511822 - DNA, 582 bp, Stenotrophomonas maltophilia
atgctgcggccgcactgggacgagatcggatcgattggtcggcagatcagggttctgcgcgcgcgtggcgatgccatgtcgaatcggcgggccgacgttctgcaggagcgcagggacggacaccaaaaagcgctgaaaccataccgtgagcagcttgtggacctgggcggcaggctcttctggtgcgctccatacatagataaggctgtgccgcaggaagtgctgcttgacctactgaacgtcaaccacgtcgaccgcagccaactgaagccgaccgatggaatagagatggtcgttttcggccatggcctcgaaaactcggcggagacgcgaggaagagactttctcgacagtccgctcttccaggcttgccactcgcactttgcacgcgaacttgccactaacaggaagctgaaggaagccacggactcgatgatgttcggcgccggcgggatttttgagtttcttcccacctacacccagcaggcggatggatccatgaggcgcaacccgccgcgattgcgcatcgccgattcaagcatcgacggcaggaaggaggacgccccccatggccgagcatga

SEQ ID NO: 511823 - DNA, 225 bp, Stenotrophomonas maltophilia
gtgaacgaggccacaaacgttctggcgttccccatgcacaggttgaagcggcgcgcggccgacgaattccctcccggctggcctactggccacgtcggagaggaaatggacaagcttgcgcgtttgactatggcccgggcgcagagcctgggaaccgagatcagtctgcccgactgccgagctgtgatctacaccgtcgtctgcgaggcccgccaatgtcattga

SEQ ID NO: 511824 - DNA, 585 bp, Stenotrophomonas maltophilia
atgagcggccatatcgaactgcttgccgagctgcgctcggctgccaagacgatgagcatcaaaggtgcaggaaataccctcacgcacaatctggctgcgcagttgatcgcacgagcggccgatgccctagccacgtcctacaccccggcgcagatggcggagtccttccgggccggcctcaacacagcgcacatgcacgatcacgacgtgaatccatccgcgccagactggcgcaacgcaccgcccgaggcgcagttctgtgccatggacagcgacggccaatggggttggtacacgtcccgcccctacaccgattcgttcaccggctatgaaggctgggatgccgacaccggagtgatcgagatccgcggcttggccttctaccccaaatggaaagacaccctgcaggagcggcccgggctgcatagcccttgcagcgacgacgcggcgagtccactggacaccgagcagcttctcataatggcctcgcaggcccagcgtgacgccgtcggcgaatcatctgtgatcgctacccgaatcgatcagatgttgagcgacgtccgagccgcaaaggaggccaagtga

SEQ ID NO: 511825 - DNA, 666 bp, Stenotrophomonas maltophilia
gtggctgatctgaaccgaatcgacgaactgcttgagcgtgggctttctgcacgcgatctcatctcctacatgctgcccggcatcgtctggctcgccgaacatcaggacgacactttcaagctctgctatcacgactccgatggccaggtcgttgtcgagaccgtgaaggggccggccttgatcgctcgtgcaaaggagcttggctggacccccgatgagccgaatccggatcatccgtacagcatgttcggcgaagccatctatcactgccggcgcggcgtgcactggtacgccacagcctgcgacgacacgaccgaaatgcttcctttgggattccccgccagcgcactcgcagctgccaagaaaagggacgaccggaagttcagcgaagcggcccaggcgcgaatcgccaaggcgcgcgaacgccaactgaagcggaagagagaatctgaggaacggaaggcggtcgctgagttgcacggcgctgtcgaactggccgcgaccgaattcatggatcaggcggctaaggccgggaaaaagatgaccaaggcgacggcgcggcgcaaggcgtggaaacacgtgcgcaagtgcgacgactggacctatcacctgctgctcaagaagcttcgggcaatgcagaacaacggcgtgaaggtgaaagtatga

SEQ ID NO: 511826 - DNA, 387 bp, Stenotrophomonas maltophilia
atggcgaagaagattgtaacccccgagcagcccggaccgaagactgacctggccaacgacacccactggatcgagatgagctggaacgacaaccccctccctccgttcataaaggggcagctgcatcgcattgatcgttgcatcgtcggcgcggcggcgatggccaatgttctgcatcggtttgagatggggctggacgatgttgcagacaccggtaatggcgacaagtttcgtgtcgtctatccccggtattccaagaacgatatggatcgcctgcgcattgggatgcaggagcttctggatctcgcggagaccacgatcgagaacgtgcgcgacgaccgcgacgggatgattgccgcatacgttaaggagcaagctcgtggctga

SEQ ID NO: 511827 - DNA, 198 bp, Stenotrophomonas maltophilia
atgagtagggattgtctgacagaacgagatttggccccgagccacacagctggagccaaggtcatcaatcagaaggagggcggactgatccgcatcggcgacagcatcgatgttgtcgttctcaaggcacgcgacggacacgcacgcgtcgtcatcagcgcgccgcgcaacctggaaatcaccgctccaaaacagtga

SEQ ID NO: 511828 - DNA, 216 bp, Stenotrophomonas maltophilia
atgtacctggaagtcagcagcgccggtggggtcaacccggcaactcagcaggagacctacacggtcatcctgagcagtggggacgagatgttcctcgtcccagcaacctcacccgaagaagcggcgcggagcgcggtggccagctgggccacccgatacggcgaggtcgttgaagccgtccacgtttgccggactggcgaaggcacgccgcaatga

SEQ ID NO: 511829 - DNA, 687 bp, Stenotrophomonas maltophilia
atggatacgaccctctccgaacgacttgttgccgcccgcgaaagggccggcatttcccagaccgcgcttgcccgcactgtgggtatctcccagcaggcgatcgcgcagctggaatctggcaaagccaagaaaacgggcgccttggccgagatcgcccgtgcgctcaacgttgacccaatctggctcgctctcggcgagggcgatatggatgggtcggcagaacaatcgaacagggtcgacgacagcgaatacacggatgtgatcggctattcgcaagccgttggcctcggatccggcgccgaggctcaggaatacgccgaaacccacagcctcaagttcaagaaaacgagcttgcgccgccgggggatcctgggacacccgctggccgtgtactacggcaagggcgacagcatggaacccacgatcaaggatggcgatgcgatcctgttcgacaccagcgacacacgcgtgaaggacggggagctgtacgtgattcgggtggacgggataggaaacccggagttcttcgtcaaacgggccttcgttatagacgccggcatctatttccagagcgacaatccgcaaggggaccatacctggcgcaagccgaagccgatggattcgcgccgggaaccgatcagcgtgatcggccgcgtccactggatcgggggttggtcgggcggctga

SEQ ID NO: 511830 - DNA, 309 bp, Stenotrophomonas maltophilia
atgagcgaacccatcgaacacctcaaggctgctgtggccgccgcaggcgggcagaaggcgctggccgaactggtcacgcgactcggtcacccgattcgacaggcgcatgtctggaactggatgaacgtccagaacggtctgacgccgccttacgtcgccccctttgtggaagccgcgactggcatcacctgcgagcagttgcgcccggacctgcgctgggagcgagatgaccaagggcgggtgacggcgtacaccgtccccatccgctctttccacgccgacggcgacgcgacgaaccaaagcccgtaa

SEQ ID NO: 511831 - DNA, 336 bp, Stenotrophomonas maltophilia
atgccacacgatcacaacggggaaaaccccagctccatgcgccacatcagcgcctgcatgcaggacgccatggcgcacctccaagagcgcagcgcgcgcccgctggtcaagctggccgaccgcctgccggatggccgcattgcggtcctggtgttcgaccgcacgcagcagcacgacgagccgctgtacgacttctactgcagcgggccggaatcggccctgatgtggattgctcagatggccgggaagtcgtggatcacgaaggagcacgtcgaggcgttctcgatgctgatcctcagtgctttcgatgaagtagaggaacagcatcgtggctaa

SEQ ID NO: 511832 - DNA, 216 bp, Stenotrophomonas maltophilia
atgactgatctgattccgaatggaccgcaggcgctgcggcaccacgccgacacgctggagcagcaggccgcgcgctatgaccgtgtgctgtggcgacggggcggcgagcgttccaccttcgcggaagcactgcgcctggctgcgtcactggcccggcagcaggcccacaagctcgagcggctgatgcagcagactgagggggcggggaatggctga

SEQ ID NO: 511833 - DNA, 219 bp, Stenotrophomonas maltophilia
atggctgacgacagagcgaggcttgatgcgcacacggtgcgggtcgacaccgtgctgaccgatgaccaccgggtggtgcagacgctggacaccttcggagaggtgagccgacgcgtggccaacgtagctgcaatgcagatggacagaggcatccgcgagcagctgatccgactggggtggacgccgccgcctgacgacggaggtggcaatggccggtga

SEQ ID NO: 511834 - DNA, 723 bp, Stenotrophomonas maltophilia
atggccggtgagcgcggggagatccacaccagggcggcgcgtaggcttcgcgcctgcagcgctgccgctcgcgggacgtggctggacgtgcaggaccacctgcaggcgcaggcccagcctggagcaacacgggagacgctggagcaaatcgcgactgccactggcgccgacatggcgatgctggtcgaactggtcgacgctggtgtgctgtgcggctcggacgtggagggagcatcgttcgcatgggcagccagccatgcgggcgctaccgccgctcctgtggcgctgttggaggtggacgggggtgcgtgctggtactgcccatcgctggtggtgggggaatacagccggcagcagcagacgcagatcgccctgaaccggatcaaggcaatgaagcagcacaaggggtttgcatcaccacggttggaccttggtgacgcgaaacccagcaacgccaatgctgcgccatccgcagacacctgtgcccgcgtgtgtctggagatgcgcaaggcaggtgttcgtggctcgatcccgcaacacccgtcgctgctggccgccatcgtggaagggggaacgccggaaatgttcgccgaggcagcccgggatgctgctcgcttgggaaagggattcatctgggccgtggccactgttcgggccaggttggagggcgccgagcggtccgcctcgcgcgcgcgcgcgtttggcggcgggcaggcgcggtga

SEQ ID NO: 511835 - DNA, 288 bp, Stenotrophomonas maltophilia
ttgaacacggacgctcagacctaccttgcccgcctcgtcggccgcgacattgcccaggagcgagcgctcctgacgttcatcggaagccctcgcaagaacgagcccgcagtgatgcaggacttgctgcgcaagaacttcgagatcggccgcgcgcagattcccgcccgcctggttgaggctggcctgcctgccgacatggcccgcatggtggaggacggtttcgccaggaccgcgactgcgatcctcaatggcgtggccaatggccagtaccacccggcggcgcgatga

SEQ ID NO: 511836 - DNA, 537 bp, Stenotrophomonas maltophilia
atgcccccgaagagtctgacgccgcgcgttcccggcgaagcgctgccgcccgccgagaccgatgcggccaccaccgccaacgccgctgaggctgtggatgccgccggcgtcgccactgaccatgccgaccagcttcgcgcggaactggaggccatcgcctcgctcaacgtgcccgaggtcctggaggctctgacgaccctcaaccgcgatgagctgatcctgctccacgccattgagacggacgggaagggccgcgtcaccgtgctgggcccgatcagcgaccagctggacgtgctggctgctgagcagggccagaccagcgccggcacggccgatggcacggccgctgcggccggccgcctgtccgatgccttggccactggcaatgcggatcgcgcggacaagggcctggccgagcatgccgctgctgcgaaggagcgccgtgccaacgacggcccggtcaccaaggccgagcagccagccgccgtgctgaccgccgacggctgggtggtgcccgaacccgagccgaaggcctga

SEQ ID NO: 511837 - DNA, 141 bp, Stenotrophomonas maltophilia
atgatgcgaattaccgggcgaatgtcgcgggagggtgcagagcgggcggccatggttcgcgcccgcgcatggactgtcgcctcctgggccgcgctgctgttcgccgtggcgatgctggtggatgccatccgctggtggtga

SEQ ID NO: 511838 - DNA, 519 bp, Stenotrophomonas maltophilia
atggcagtagtcaacaagggtagcgccgcgatcaccgcccgcgattccgcacccaccctcggcgcctcgcagctggcgtccaccaaggtcgccaccggccgcgtcaaggaatccatcggcgtgatcccggtggccaacggcgacagcatcggcagcgtgctgcgcttcttctccgtcatgtcgggctggcgtgttggctcggtgctggcgtcctgcagcgcgatcactggcgcggcggctgatgtcggcctctacgacattccgacccgcaacgccggcgctgtcgtcgatgccgacttcttcgcgtccgcgcaggatctgtcggccgccctggatggcaccaacgtcctgcgggagtcgggcctcatcaccgtggacaagctggaatggccgctgtggcgcctgctgggtctgtcgaccgacccgggcgtctggtacgacgtggccgccaccctcaccgccggcgcaacggccgcgggcaacgtcgcactgaagggtcacttcatcgacggcaactga

SEQ ID NO: 511839 - DNA, 2382 bp, Stenotrophomonas maltophilia
gtgagcgtattcgagatcgacgaacagggtgggaaggcgctgagccagcgcgtagccgataacccgctcgacctgtcgaaggtcacgcccggcatgttctccgggttcttctcggccgccggcggcgggatcatgcagggcgggtcgcgcacgttcaccacagccgcgctggccctttcgccagcggtgggcggccgcgacgactacctcaactcgttccgcagcccggacacgcagcagcttgtccggtccctcggcatgaagccggacaccagcgcgccgaccactgccgggcaggactggtacttcgagaacgtggtggaggacctgggccagcgcgcaaccgaatactgggcaccggacccggcgcagacgggaactgctggccgcatcgccggtggcctgatgcagatcgcggtgccactggccttggccgggggtaatccgtcgatcctggctgcgaatgaaggcatagaggcgccggccggactggtgaagcagggggcaggggccggcactgcaacgacgttcggtgcggtctcagccggtgcgaccatgcttggcttcaagatcccggcaagtttcggcagcactgcgctgcagcgcgtgggcagcggtgcaatcgcaaacctcgccgtaggcaccgccaccgcggctgcgcagcagggagtgctggtggctggcggcaacgacgagctggccaaggcctacgacccaatgaacctggaagcgcgcgcggtcgacgtcctgactggtgcagtgttcggcggcatcgcgcacctacaggccggtgaccgcgatgcggtcctgactgtgagcaacgcgaagcacatgcaggtcgacaccgctcctggcatcccggccgatgaggcttccagtggagcacaccagagcgccttggcatcggcaatcaactcggtgctgagaggcgagcaggtgagcgtcgccggcgcgatcgatgccgcagagttcctgccggtccgccgggccggtattcctgcagagagggctgccaactacgacatgggcccggcacgctacgaggcctaccgtcgcgtgctggagtcgggtggggatccaaatgccaaaaacggcgccagcactgccaccggcatcgaccagttcaccgccggcacgtggcggcgcatcgttgcgcaggccaagccggattgggcccaaggtctgaacgacaaccagctgctggccgcacgcagggatccggtcaagtcaggccagatggcccgagccctcgacgaacagaacaccgccgcgctggaggccggtggcgccgaggtgactgcgcacaacctgtatgcggcgcatcactttggggctgagcgaggcctggagtttgccagggccgctgatgacacgccaatggcgcgcatcctcaccaaggcgcagatggacgcgaacccctatctgaaggggaaaaccaagggcgatgcgatcgccaactgggacgagcgcgctcggcgagccggcatcgatgtgccggaaaccgtgcggatggtgcgcccggaggtgatcaccggcctggtcgcagagaatccgccgatggtgccgaccacgcctgcagaagcggcgaagatcgtcgaccagcggctcagcaccttggacgatcttgcccagcgggaccggctgagcccagaagaggtggccgcctaccgtgaggaggacgccgcgctggtggaggtcatccggcggcaggagcagctccagcgcgacaacgtgctgccggccgacccgcgcgagcgcatcaccgctgaagactttgatgcgttgaccgctcgccgcgttgagatccggcaggcaatcgagcgctcgaacaacgccaagggctacgagacggtggcccagcagctgcgcagtcggctcgagcgcatcgatgccgattccgacctggtggcctttgccgaccggatcagcggccgcgaccagctggtgcgcggcgcccggccggcgcttccggagaccggagccacaccgcccatggaaactgcccgtcggccgcgcgccggcggccaacgagttgcgccaggcccggactggatgacccccggcgcactcgatgtggaggccgcaggatctcgggcaggcctggcgcaggccgacgccccggccatgcccccgtcccgggatgcaccgacggcagcggcgcgccagcagcagccggccggaagtcaggattccgccgacgtggcgcagcaagctgccgtagaggcagtggcagccaatcccgacctgcagatcaccctggaggatggaaccgtcgtcactgccgccgacgcgctggcgagggcggaagcagatatcgcccaggcagagatcgattcccgcggcttcgcggccgctgttgcatgttcgctgaggtttgcctga

SEQ ID NO: 511840 - DNA, 2496 bp, Stenotrophomonas maltophilia
atgaggtctgagtgcattgacgcggtaagcctggccatcggccggcgtctgaacgcggcagaggtcaaggggattgaggatcggatcagccgccacatgcggcaggcagcggtgcgcgacccgcaggctgcgcttgcacggtccccggagcagcgccttaccgaggcggcaaggactgcggcccaggagctggtgcacgaggcgacgaagaagaagcagcgcgtcgccctgacgatcctggcgcatgaccgggtgcagaaccacctgaagcagttcgccaacaagttcgacgggctggaccgcatggtggcgttccacgcggacggtcgaggcaatgccatgtcggttgagacccgcgcccggtcaatcgagcgcgattcactgcgccagatgctggacacgctggaggcgaccaatcccaagttcttcggccttttggagaaccccgagggcgtcggcaacctcgtgcgcgagttgcatggccagaacacgggcgacgctgacgctgctgcaggcgcgaaagtgttccacgcgatcaccagcactctgcgcgagcgctttaaccgcgcaggcggtgacattggtcagctcgacgactggggcatgccacaccaccactcacagtcgcaggtggccaaggccggccgcgcgcagtggatccaagacgtcatgccgctgctggaccgaaagcggtacatgaacgaggacggatcccgcatgaccgacgtggaggtcgacgcattcctgagtcatgcctgggtgagcatcgccaccggcggcatcaacaagatcgagccaggccgtggcggcacagggggtggcatgcgcgccaatcgcggaaacgagtcccggcaggtccatttcaaggatggcgaggcgtacctcgcgtatcagcagcgatacggggagcgttcgctctacgaggtcctgacgggtcacatcgcgggcgtgtccaaagacattgctctggtcgagaccttcggacccaacccggacctcgccttccggttgttccgtgacaaagcgctccaagagcaggcgctgctgcagccgaacgacacaggccgcctggagaagcgggcaatcagttctgagaacctatacaaccaggtggcaggacgaacccagccggtggcctcgaagtggttggcggagaccttcgacacgctccgcagctggctcacggcttcgcggcttggttcagcggtcatcacctcgttctcggacgacgcgacgatgtacctgtccgcgcatgtgaacaagctgccggctatgcgccttttcgccaacgagctggccgctctgaatccggcaaaccagatggagaagcgcatggccttgcgtgccggcctggccatgaacacgctgctctcgtcgctgaaccggttcgggaatgacagcctcaccagctcgttctccaacaaactggccggggtcactttgcgcgccagcgggttgaatgctctgaccgaggcgcgcaagcgcgcttacggcgtgaccttcatgcacgccatgggtgctgtggtccgagaccactccagcctgaaggcgatcgatgcagcggaccaccggattctgctgtcgaaagggatcaccgacacggactacaacgtctggcgcttggctcaactggaggactggggcggcggtaacgacacgatgctgacgcctgacgcgatctatcggatcccagactcagcactggcaagcatgggcgacccggcgacgcttcggcaggacgccgcaactcgcctcctgggagtggtgctggaagagacggacatggcggtcattgagcccggtgcgcgggaacgcgccctgatgatgaccggcctccagcgtggcacgtggaagggggagctgacgcggtcgttcttcctgttcaaatcgttcccgattgccatgatgaccaggcacatccagcgcggctggtctatgcctaccggcaccggccgggcagcgtaccttgcaacgttgattgcctccacgactgtaatgggagcggtgtcgatgcagatcagcgacattcttgctggtcgtgacccgcgcgacgtgacggacccgaggttcggcgttgcagccatgttgaagggtgggtcactgggcctgtacggcgacttcctcttctctgagtcgtcccgctacgggcagtccccgttcgcggctgctcttgggcccgtcgccggcctggccgaggacgtcctgaagttgacgcaaggcaacatcatggaggccgcccagggcaaggagaccaacgccggcgccgagaccgtgagattcgccaagagcaacacgcctggggccaacctctggtatctgaaaggcgcgctggatcacctgatcttccaccagctgcaggagtatttctcgccgggctacctgcggaagatgaagcagcgcagcgaacgagaattcgggcagaaatactggtgggagcccggcgagccggtgcccgaccgcgcacctgacgtggcggccatggcgggagatgactga

SEQ ID NO: 511841 - DNA, 393 bp, Stenotrophomonas maltophilia
atgatcttgctcaccccgaaacagtccctgcagatcgcgatggtggtggttctggcatcgatcgggggctgcgtctggctgaaggggcgaacggacgccgccacctcggccgaaaacaaggcacttcaggcccaggtccgggccaccagcaccagcgtccagatcagccgcgacaccgccgtggccgtcgacctggaagcccacgaaacccgcgaacgcaccgccaaggcggtggaggccatccatgcgacttcttccgattctgaccctgccgctgctgctgacgtcctgcgcattgctcgggaggcgcacgaccgagccatacgtgccgcctgccgggtgcagcgaacgagcgattgcccagcggccgccgccgcctccgacgggccgtga

SEQ ID NO: 511842 - DNA, 1539 bp, Stenotrophomonas maltophilia
atgaccgtccccgcatacaccgggccaaacacgtcaaccgccaacggcgtgacgaccgtgttcccgtacagcttcccgatcctagacgccagccacgttctggtgaccgtcaatggcctgccccgaatcctgggtacgcactacgacgtgacaggggtgggcaacctcgctggcggcgatatcgtgttccatgaaccaccggttgcgacttcggtcgtagaacggcggcggaacatgccatacacgcgcgacaccaactacaccaatctgggcgatttgctggccagcaccctgaatgctgaccaggactccccggtgatgatgattcagcagctcgcggcaagcgtgatgcagatcatcttggaccccgaagggagtggcgagcttgtatgggacgcaaagggttcgcgcatcatccgtgtgggtgacgcgaccaatgacgcggacgcccttaacaagcgctcggcactggtcctcatcgaacagattcaaggcggcggcggcaccgtgggcgttacgccgaagttttgggcgttcgagggcgacggggttgtgaccgacttcccgctggccggtgccgacgtgctggatccgctgttctacgacacggcggtggagacagcggcagggtcgaacgtctaccccgtgtcgaagccgggcatcgatggagcgttcaccattgttccgggcgtcctgggcgccccgccggccatccgcttcaacccgccgctgggtgacggcgtgcgcggctttaccaccctgcgcggctacgcgcggccgtggatcggccagcccccggtttacaccgtcgcgccccgcatcgtgagcgtaagcgccagcaccaccgtagacggtggctcgcacaacaccctgatcctggccaactcggccagccccatcacgatcaccattcgcaagaacaccggcggcagcgtcgattggaaggaaggacagttcttctcggtcctgcagctgggcgacggcgccgtgactctggcgattcaggacggggcagggcaactgaatatcccggtgagcttccagtccaagtgccgcggaccccgcagcatcatcagcgccacctgcattgcgccggacgctgacgcttgggtggcggccggcgacctgctgcgcatcgcggcatcccccgatctgcagtccttcgacctgatcgaccgctcggcattgatcggaaccagcatcaccaccggcacaggcaaagacagcctggtcatgccctacggcatgttgttggatccggtggccagcgggggcatctacgccacgctgtcggtagctcaggcggcgggcgtggtgctgacggtggacgtgaaccgcaacggcaccagcatcctgtcgacgaagctgaccttcgacaacaacgagcgcagcaccaccacggccgccattcctgccgtctatgaggctggcggcaacatcctggccaagggcgacgaaatcaccatcgatgtggaccaggtcggcacctcgctggccaaggggctgcgggtgtacctggtcggccagagggcaaactga

SEQ ID NO: 511843 - DNA, 1800 bp, Stenotrophomonas maltophilia
atggccgcccgcatctacgaccgcccggacttggatcaggacgtctaccagccggcgctctacgtcaacggccggtttgcccgcgccaagccttcgctggcctacgagggccgcctgcagatccgcaacagcattggcggctgcagcgttctacagattggcggcgacaagcttcccgacggcacacagcttcgggtcgaccagaccaccaaagaggtggtggtggcctggccggcctatcagaccgcgcaggcgccgatcgccaatcccaacttcgaggaaggcaaaacgggatgggagctggggccgggctggaacatcaccaccgagaacccaccatccggccagtggtcggcgggctactggggcaattggggcacctcgcggatctcgaatgcggcgcgctacacggtccagcccggccagctcaccacggcgaagtgcgatgtgcggcagggtgcctcgtctgagggcaacgccggtgcttcggtcatgctcgagtaccgaaacgccgtcggcgaagtgatccacaccgtcgaaggcaaccaggtcatgtcggccagcaagaaccgcgtgtacccgtcgtcggtgttcggcgctgctccgcctggtgccgccacgatcaatgtggccgggaatggcatccgataccgcgagaacaagattctctttgtcgacaacttccaatgggatcacacggtcccatctgcgggcatcaacttcgaaacggtgtttaacgtcgttcttcgtgtgaacgactccatcggacgctcgtttgtgtggagcggccaaattaccgtcgcggctcgaccggctacctacaggttcttcggccagttgaatgcagatcccatggtatgccttggttacaggcatgcggccaatacgatcgacaggcttggctatcccatcaacgcgtcaacgagcaatcaaaggaagatcggagcaactgacgatggatctctgatcgccagtacctattcaactttcccacttttggctgtgtatccggttagccaggagggaattttcggcgcaccgttcgctcccatagatccgccgctgccaggtgagggcgaatgcgtggtgttctcccgatccggtgccgcaatgatcatcggccatggtggcgcgccattcatccgaattcacgcggtgagtcctgccggcatcggaccggcgtacccgccgcctgcgactccgcttaacagtcgggtaatcttcgcggctttcaatccaaccggcgacgtgctgtacctgtcgacgcagcttgcgccgtatctgttggcctatcgctgggacgatgtgaatggtatcggcccgttgttgaatggaccttctggttacccgggcgggagtgtccagtcactttcgatcaacgagtctggaacgcatatcgcagcgcttagtggtggaaatccgtcatgccacatctacaagattggaccgaacgggtatgaggatcgtttggtgagcttcggtaagtccggccaaggcatggtggcgctgtctgatgccgcaagggcggtggtgttcggcagttccttcatcaccaagatgcacctgtatcagtgggatccagtcaacggggtgggcgctccctatcctgtcccccctgggtttggcggctctgcattggcgcgcggtgtctcgttctcccgcgacggtctggtgctcaacgtcggcgtaacggacaacgatggcatcctggtctatgagtggactccgggcgtcggcaccacccggggcccggtcaagtggggtggctcaggatctgggcagaccatcccgatcgactga

SEQ ID NO: 511844 - DNA, 375 bp, Stenotrophomonas maltophilia
gtggcgcacggcaacgtaatggcggtgatctacggcttgggcacagtgtgcctgctggccttcctgcacctgcaggtttccgcctggctggtccccagctgggtccgcgctctgtacgtgccgggcggccgctggcgcgccgccggtatcgcccttcaggtgctggcgtgggttgccgctgtggctatcaccatggctggcgtaggcatgctgctgtcttggatgccagggaactggggatggactgacgaagtaggtgttttcacaccgcgcgcagatgatctatcgacttgggccggcatcttcatgggatcgggctggatttggtccttgctgcaggccggccgccgcaacgcaggtgagctgaatcgatag

SEQ ID NO: 511845 - DNA, 183 bp, Stenotrophomonas maltophilia
atgacgaactcccccacatcgaagaaggcgacgcaaccgcgagacgaagtgctgaaggcgcgggtgagtcgagcgttcaagcggcggcttcaagcggcggctgatgcccagggcaagacttcatcggaagccatgcgtcaagcgctggtggaatggatgagtcgcgtccagcaggccgcgtaa

SEQ ID NO: 511846 - DNA, 330 bp, Stenotrophomonas maltophilia
atggcgttcgtcttgttgacgggcataggcgacttgctcgggctccccaaacgcctcccggtgggcatcgagcatgcgatcaatggcgtccacgtcctcgcgggcatggagcgattcggtgtaaagcgcttgaagcaacgaatcacgctcttgatgagcttcctcgcccgtgccttcgccctgaaaaagcccatcgtggcgagggcgggcgtcgacggcgtctgggcggaaaccgcccgtggctggtcctcatgctcgcctccgggtcagcccgctgccctgaagcagcccacacgtgatcgaacagacgacaagcgccagcgtggatga

SEQ ID NO: 511847 - DNA, 807 bp, Stenotrophomonas maltophilia
atgaacgctactttcaaccaaattctcatcgtggactccctcccggaaggccaactcaacaccgcagcccgcctgttcgcggatgcccaagactgggcgcgggtgatcggcgacgttcctcacatcgccagcgttcgtgtttcttccagcggtgcttttctcgatctgctggcccagcttgctcagcaagcatccagggagccctacgtgccgttgcttcacatcgagtgccacggtggaaagggcgggctggagttcgctgacgggtcttggttgacgtgggatgacatgaagccggcgttcgtaaacctcaacgtggccacgcgcttgaacctcatcacggtggtggccgcatgccatgggggcgccatcgccagttttgttcgtgctgagcatcgggcgccgttctgggcattcctggcccccaaacggcagatattggccggggatctggagacagcgctgtctgcgttctatcaagccctgctgatgacccggtcgtcggagcgggccacgggtgcccttcgggcaacccaagctggcgatgagttctggcagttgagcgcgcagaccatctaccgcttaatcgttgaaggctacgcggaacaccacctgacggacgaggccgtgggacagcaggccgagcgtctccgggcccacgctgcggaacatggcgctgtttggacgcaggcgcaaatcgaggccatgatccgtgacccaggaatctttgaagggtttcgccgggagttcttcatgatcgacctgtatccggaacacgaagagcgtttcccgcccgtcgcgctctag

SEQ ID NO: 511848 - DNA, 240 bp, Stenotrophomonas maltophilia
atggttcagcaggtgaagcaggcacgcggccacgtccagtgcggcggtggcccactcgtcatcatcgcccaaatgcggctcttccttgcccccgtggaagaggttgttgcgcacccggcttgccgcttcgaccaaagcaccggcattggattactgaaggggcaggcgctggaagacagcgtggttgaggccgttgaccaccgccacctcctgacccatcgggcggtcacgcggaggtga

SEQ ID NO: 511849 - DNA, 261 bp, Stenotrophomonas maltophilia
atgagggagtttcgactctttaaggcgaatggcctgcgctctccgactttcttccgtcaacgattgggacagcagcacgcgaacgagttcactgacgtgcattccctcccgggctgccgcctgttccagccgatctttcagctgccgtggcacgcgaacggccaactgcacgtaaggtggccggctcacgaggacagccgcgccagggtgagcacccacgccaacgccaaaccggccaggatttgggcacgcaagcggtaa

SEQ ID NO: 511850 - DNA, 1251 bp, Stenotrophomonas maltophilia
atgaccccagaagaaaagaaccaaagaatccttcagcgcaagcgcaaggaactgcttgagcgtgccaaggcaaccccaaccgcttcgcccacgcaggaagagcggctggtttccgatggcgtgaaagaaaacctgaaagctgccggtcactgggccggggtgatcagcaagcgcactgccgagttgacccagaagggcgttgttgctgctgcagagaaggcgaagcaagccaaggcgcaactggacgcaaagcgcacccgagaagcccaggaacatagtgctgtcgaagagaagcctcaagacgctccgctcaccgtggagcaggaaatgttggtcaggcaactgacgtccgatgcagctgcaccggttctcgtaggagcgggtgataagggaatgtgcaccgtttgggaactggttgatgaatttggagagcctggcgcacaggttgcagatggactgggcggtgcgaacaatctcgtgccagaccctggagctgttacctcgttaacgaaattagagctcggcagtgagcagtttctgtttggtgagacaggggctggcatgaccagcaacgacctgctcgcttctggcggggtcgtatccgatggaatggatggacttcgtggggctgcgaaagaagcgctggatgcaaattcgaccattcatgtgccagcggcacttgctggtgaaggtgcggcacccttggccgacctgtctcagcaggacgtggtggataccctgtccgtttctgcggtgcctgaagggtccagccagccgccacatgccgcgtcagtagagcagccggtaactccaatccaacccagcccccgctctcgtttgccttgggtcttggccggtgtggtggcggtggcattggtcgcgggggcgatcttcttcttgcttgggaagaacaaccaggcgcttccaagcacaccggctcccgtggcaccggttgccactccagccgctcctgagcagttgcccgaggtggtggaagtccccgtggttgcgcccgctccagcagcgctttcagaacaggccaagccagaagccacgatcgagaaacccgcacctgtcgccgctcccccggtaacgacgacagcgccgattgcgtcccagcccaagccttcgccgaaacgtgcgaccgccccattgccgaggaaggcccccgccgccgagccaaggaatgactggcagcaaaaagccaacgcagacctggacgcttgggcgaagaagtcggggatcgactga

SEQ ID NO: 511851 - DNA, 633 bp, Stenotrophomonas maltophilia
atgcctatcgagattctcattgcgccagcggcgccagccgcgccaacggcagattcggtaagcgaccttgtgaagtacggcgtgccagtggggacgctgattctcggtatcgtcctgaaggctgcgatggatgagttttccgcttggcggaaagaaaagaaggcggctaaatcggaagctgaaaggcggaagtatgaacaggagcagagagttcgagatcgcgagcgtgaaaacttgctgcatctactgccccttctcaccgacgcgcgcgacgcgatccacgcaatgcatggagcctggccaggtcagcaggccggggatacaaacgcgatgatcgccatgaatgacgcgcttgcaaaacttggaacaactcagtcgaccatgatcgagatcagcgccaggctgcatacggagtcagtggcggatgatcttctggtcatgttcaaggctgcagccggcatagcgaaagcactcgatgggcaagatgcgaagcgcgccttccgcgacgcgacctccgcaaacacgtcagctgcgaagactgttggccaaagaattcgtgccttagagctaggaggtcccatctccgaccaggtgaaggcaaacgcctcaaaaaaaaagccggtgactaagtga

SEQ ID NO: 511852 - DNA, 1902 bp, Stenotrophomonas maltophilia
atgagcggcggacggcataccggctggacgccgatcgtggtggttggcgatcgggcggccgcttcgctgcatgtgccggcggggaggaagctactgggattcgttgttcaggaggccgctcgcaatggactggggactgccagtgcaaggcaggaagcggatgacggaacccttatcgtggccgagaagatcggtgaactgacgcggttgacgatcgtcacgccggagccgcaaccaccgatcgacccagtcgaccccatgggcggcttcatcctatggcctcgctggaacgtgcacacgggtgatccggccgaccggggctcacaagtggaccccgcaggtgagaacccgacggcctggctcgagttcagcggccgacacctgatcacgcgttactggaagcgctgggacgttgtcgacaacatcatcggggctcggtatgagagctacaaccagccagaccggtatcccgccggtctccacttcttcggcaacgtcgattggaaggacggtagggatgtggctctgtccttctatgggtatggcgtccggtacctccgcgacctgaccctgatcgacgacggcgcgcgctggatctttcagcagggccagatactgttcgatcgcattgcctatcgtgatgcgatggtcgatacacctccggactatctgtcctggcggctgacatccggttgcctgcgcagggcagctgatggacaccatgagctggtggtgacgttcacccactatgtgaccaaccaaccgaccactgctcagtcggcgttcgtggtgttcaggatcaatcggagcgagggaacccccgagaagggtgattgggaagtggtgcaaggcagccaccgcctcctaggaatgacaccgggcaggatcaatccacaggacgattcctccgcgaacggctttaacgacgcagcgctgccctggttcttcaatgccgatgggaccaaggcaatccgcacggtgagcagtgagccgaccacggtgttcggcctggtcaatacgatgacgcaggaggtggaaatctccggcgtcggtatcgaccataggctgagccgggccgactacctgatcggtgactacaccaacgcccttggggccttcgcgctggtcgcgccgactcgcggcctggtggcttccgactatgccggttctgagcgtagggatgcctaccttgagctgcggctgagccaggggcaggttgccaccgaggcgacagggtatcgcgggaccctgcgagtgctcgtcgtgctggagtttgatggcggggaactgccattgatcgacagggatttctccgtcggcagcgatcgccaggactatcacctcctggcgtacatggatcttcgccacaatctgttctgcggttggcggatccagggcgtgaatggtgtccacagcattcaaccattcgcgtacatgggcgggcgattggtgtacggcgagatcgaggccgtggactgggatccggccagtggcctgccagctcctttcctcggccttgacacccgggcccctggcgctgttgctgacggcctcgttttcgggaactactggaccggcgcgtcaggctctggatgggggccgcgcgacggtacccagcacggggtgatctggcgcaaacacccgcgcgagggcctggtcttcttctcgggcgctgcaagcctcagaaccgccatggtcgaacgtcaaggcgtgaccgatttcctcggcttcgattggagcggtggctggaactactgcaagggtcgctactgcgtgtcgatccccggcccgtacaccggcacgctcaactacctgacgggctacgagctcggcgcggtcactggcgtggttgccgatgaccgtcgcttctacccgctgacgtcgctgcccaaacccatatag

SEQ ID NO: 511853 - DNA, 975 bp, Stenotrophomonas maltophilia
atgacgattcaaacgccgctcattctcaaccaggctactggacggatcgaagagctgtcggtcggtgacacgttgtccgggctgctcacagagggctatgcaggcggcaaccggctgataaacggcgatttcgacgtttggcagaggggaacatccttcgcgaccacagcggtgtacggccctgatcgctggttcatgcagcaggggggtgtatcgggccagacccttgcaaagaacaccttgttgcctggcgacaccaactttccgggcagtgaaagcaacctcatcgtcactctcactgggaacagcagtgccagcagcgcacatcaagtgttcgaacaacgcgtggaagactgccgtacattcgcgggcgtgccatccacgctgagtttcagggtgttcaatcctggtgcagcagggcggaaaatcgccgtcgagtttgtgcagacgtttggagcaggtggctcgggatttttgctggggattgctccagaggttttcactctagccgccggcctgaacatcataaccaagaccgttacgcttccgtccgtcgccggaaagactgcaggggtgggcagtgcagccgtggttgccatctggacaaccgctggctcggatttcagtggacgtactgccggtctgggcttgcagactggttcgctctacttcgggcagatgaagtgggaagcgggtgcggtggcaacgcctttcaagaaacgggagccaggggtggagctgctgctgtgctatcgatatggtgagccagttgggttcatcgccaacgccgacgggccctactactcgacctactactacaaggtccccaaacgcgtcgttccaactctcactgtgctgggcaactcgatttctccggcgactttgaatccgcgcgggtccaccacttggttcagcatggacgggcgggctccttctgccgttgcaagctactgctttgcggatgcggagatctga

SEQ ID NO: 511854 - DNA, 492 bp, Stenotrophomonas maltophilia
atggttgagaccgtactgggcatgaccgatctgcagatcaaattgttcacggcgctcggccagattcttgtggccgtcgttgtcggcttcatcgcctatcgccagtggcgaaccgcaaggagcaagctgcagttcgatctctttgatcgccgcctcaaggtatacgacgcgataaagtcggtggttcttcgatcggttccatccgattggcgtgcgaatgtcgagctggagatgtccaccgcgctggcagaactgcgctggctcttcggaaagccggtctacgatttcgtttggaaggagatctatgtgccgctggtggacctttctgaagcaaaggccacgatcgccgaacccggaccgctcagccaaccaggggtgagagaagcgcgggacgctgcatctgcgagagcgcgggccctgcggcgacagttgagcgattcgatgaaggtgctcgaggagatgatgtccgagttccttaccctcacccattga

SEQ ID NO: 511855 - DNA, 345 bp, Stenotrophomonas maltophilia
atgggaatactcgactttcttggtaacgcagccggcatcaaggcgatgcagtcgggcgccgatgtgttcatacaccgccatacgcgcgtggttactttcggccttccgtccccttggcgtgaccacgccaacaagctcgtcaaggaacgcttccagcagcagtacattcagtccgaattcgatgcggcgcttctaaagctcgcagtgttctggacctgcgcgatgcagagcgacccggctcgcgccgagcacttcgcagaggccatgtatgacctccggactgcggccggtggccggctcacgcccgggttatccctggaagtcatgggactgacgggccactaa

SEQ ID NO: 511856 - DNA, 567 bp, Stenotrophomonas maltophilia
atggccacgccgttgatggacaggccgctggtgctgaagtcagcgttggtgcccgggtcggccagggccagtgcgttggtgtcgaacttggcaccacccagggcattggccttggcgtcgatggtcttgtcgatggcgatggcctggccggcattggcgccgacctggaacagctggctggagaaggtgccgtccagcagcttggtgccgttgaagtccgactgcttggcgacgcggtcgatttcgctgaccagctgggtcacttcggcctgcagggccttgcggtcgctggccgagttggtggcgttggaggcctgcaccgacagctcgcggacgcgctgcaggttgttgccgatttcggtcagcgaaccttcggcgacctgggccagcgagatgccgtcgttggcattgcggatggcgacgtcggtgccgcggatctgcgtgccgaagcgctcggagatcgccagaccggcggcgtcgtccttggcgctgttgatgcgcgaaccggaggacaggcgctggatggtggtggccagcgagctgccgctggtgctcaggttacgctga

SEQ ID NO: 511857 - DNA, 444 bp, Stenotrophomonas maltophilia
atggtccgagtcctgatctgtgcactgacgctcgccttctctgcgcttgccaacgcagcacccggtgcgttggtgcagttgaatcatccggtgattgccctgggtgagaccgcggcgctggacctgcagttgccgccgcatcccggtgggctggtgacctattcgatccacaccaacgtctatgccagcgaggagaacagcggctatcgggtactggatgtgcgctgtccgccgggcttcctgtccaatgtctaccggggcaacaccggtgcggtgtgctatcgcgtagaggaaacgccgcatccggctgctgagatgtcggtgaccgtgttcaacgaggatgcgccggacgggcatctggagtggatggaaggcctatggtcgttggatgccagtggcccagcagtgaaaacgtcgtggcacctgtttggtgtgcggccctga

SEQ ID NO: 511858 - DNA, 192 bp, Stenotrophomonas maltophilia
atggctaaggacgcaggctttcacacggatccgaagggcaccacgctcacgtgcccagcttgcggcgccacaggactaatggatgaaatggagatctggcaccactggcttgaccagtgccgtcgcgaacgactgctggcacagttcgatcctacgcctgacgatccgctcgatattgaggaattgaaatga

SEQ ID NO: 511859 - DNA, 264 bp, Stenotrophomonas maltophilia
gtggaatccccggggtgtgtcttcggtgagatgctgtcgtcgccgcgcggcattcaggattcttcgtggactctactggttgtcgattctgatgcgacaaacttgatgaccaggcatgttccggtttcggatgatccgtatgttgtgaccattgacggtgtgaaactccccgacgatgaagaaggacgacgggagaagctgctggtttggctgcacatggctctcgtcgcccgtgagttcgcagagatcgagatgcttccctga

SEQ ID NO: 511860 - DNA, 405 bp, Stenotrophomonas maltophilia
atggcaaagcagaagaacacctccgcgcaggcggtcagcggtccggccggcgcgcgggaagcgcccgctgcggtagtggacccagcggctggccagggcaagcagacggacgccgaaagcctcgaggctgacgccgcagccgccgtcggcgagctggaagcggaggagggcggagagaaccagacgcccgaaaccgtggcgacggacaatgacgtgccgcccccggatgacgaactggatccgccggatggtgaaaccgtgccggcgctggtgctcagtgacaaccacctcgggaaggttggccaggtgatccaggtcaacgcggctcacgttgaggcgctgcgccttggcgggctgatcgacccccaccccaatgccatcaagtcggccgagcgggaggaatga

SEQ ID NO: 511861 - DNA, 1245 bp, Stenotrophomonas maltophilia
atgcccttcaacattcaggccgagcgggagcgccgcaccgcgctggcaaaggaaacccgcaacctgctggacaccagcaccggtgacggcaacaagtggacgccggagaaccaggccaagtacgacgacaacatcgccgagatcgagcgcatcgacgcggcgatcgagcgtcatcagaaggtcatggacctgacggccgacgaggcactgcgcgagcagggcgtgcgtgaacacgacacctccaaccgcggcggccgtgacctctccaacgaggagcgcctgttcgaccgctgggcgcgtggcggtgacagcgccctgagcgcagaggactggaagcaggtcaacgcggccatgtcgggcaatccggccgtcaacccggaacagggcggctacaccgtgccgaccacgctggccaagcagatcctggacgccctgaaggcgttcggcggtatgcgccaggtcgccgacgtgttcagcacggccggcggcgagccgatgcagtacccgaccagcgatggcacctcggaagagggtgagctggtcgccgagaaccagtcggcgaccgatcaggacgtggccttcggcaccaagggtctgcaggtctacaagttcagctccaaggtggtgaccgtgccgtgggagctgctgcaggacagcaccgccgatatcgccggcttcatcgaaaagcgtctgcagacccgcctgggccgtgtcaccaatcgcaactacaccgtcggcaccggcgtgggtcagccgatgggcgctttcaccgcagcggccgtgggcaagatcggtgcggtttcggcgctgccgatcatcacctacgacgacctggtcgatctggagcacagcgtcgatccggcgtatcgccagctggccaagtggatgttccacgacgacatgctgaagctgatccgcaaggtgaaggacgaccagggccggccgatcttcgtgccgggttacgagcagggcaatccgggcggtgcgccggatcgtctgctgaaccgcgatatccagatcaaccagcacgctccggctccggccgcgggcgccacctcgatcgcgttcggcgacttcagctactacaagatccgcgacgtgatggccatgaccctgttccgcttcaacgactcggcctacgtgaagaagggccaggtcggcttcatggcctggatgcgctctggcggcaacctggttgacgtgggcggcgcggtgaagaccttcaagcacggcgctgcggcttaa

SEQ ID NO: 511862 - DNA, 735 bp, Stenotrophomonas maltophilia
atgccgattcctaagctgctgcagctggccaagaacaacgccggccagtccaagcccatccgggcggagaccgaaggtaaggaggcgaccatctacctgcacggcgtcatcggcgggtggtggggcgatattgatgagacgatgtttgcccaggccatggccggaatcgacgcggacgtgatccatctgcgcatcgactcgcccggcggtgacgtgtttgcggcccgatcgatgatgaccgccatcgcccagcacaaggccactgtcatcgcccacatcgatggcttggctgcctcggctatgaccggggtctgcatggcgtgcgacaaggtcgagatcagccaaggtggtgcgttcatgatccacaacgcatggaccatcacggtcggcaacaaggccgacatgaccaagaccggtgaactgctggccaagatcgatgccggcctggccggcgattacacccgccgtactgggaaggatcaggcgcagatcgtccagtggatggacgaagagacctggttcacggccgacgaagccaaggaacacggcttcgcagacgaggtggtggagatcgtgggcaagaagaaggcatccaacacctgggacctgtccgcctacgacaacgcgcctgccgcactggccaaccgtactcccgatcccgacgacggcgccgccgccgcccacaaggccaacctgtcgcgccgtctggcgctgctggaacgctccgctgcgtaa

SEQ ID NO: 511863 - DNA, 1305 bp, Stenotrophomonas maltophilia
atgttcggactattcgagaagaaccggcgggccgatgcccgcgaccgtatcgagccgacgatcagcaacctggtcgacggcgaggtgatccagtcctccggcatgggcatgttcgaggtcttcgggaatccgacgacggcctccggagccgtggtgagcccggaatcagcgatgcgggtttcggcggtgtttgccgccgtctcgctgcttgctggtgcgatagcccagctgccgctgcccgtgtttgagcgggtggatggccatcgcaagcgggcggagcacgactactggtggctgctgaacgagcagttctcctccggctggtcgagcgccaccggctgggagttcatcgtcggccagatgctgctgcgcggtgatggtgtggtgtacgtgacgcgcaaccgtgccggggtggcgaccgggttgattccctggccacgcgacagggtgatgatcctcaagcaggagaagaccagtccgcgcgaaccgacgcgcctgcagtacacgttccatgacgcggacgggtacttcaccgttgaccaggacgatgtgctccacttccccggcttcggtttcaacggcgtgcacggcatgtcggtgatccagtggggcgcgcggaacggcatcggcatcgccatccaaggtgacgagcacgccggcaagttcttcagcgagggcggcaagcccgaagtggccatccgaacgcccaacaagatgaccaaggagcagcaggatgatttccgcgacgcctgggtcaagaagtacggcggggtgcagggcaaccgtcggatccccttggtcctgaccgaggggctggaggttcacgagctgactatgtcagcggtcgaccagcagctgctggagtcccgacagtggcaggtgatcgatgtggcccgcgccttcggtgtgccgccccacatgatcggtgaaaccaccaaggcgaccagctggggcagtggcatcgagagcatgggcatcggcttcgtgaagtacacgctgggcccgcacctgaagcggatcaaggacgagttgaaccgcaagctgttccgcacgccgcgctacttcgttgagcacaacgtggacatgttcatggccggcgactcgaagacgcaggccgagtacttcagcaaggcgttgggtggccctggcacccaaggctggatggtcgtcaacgaagtccgccgcctcaagaacctgcctcccatcgagggcggcgacaagctctaccaaccgaaagaacacgcgccaccggccaagccgggcggagatgaccctgaaaggaaccctgacgatgccgattcctaa

SEQ ID NO: 511864 - DNA, 540 bp, Stenotrophomonas maltophilia
atgaaccagtcaccggaagcacgctacgttgagcagcagacccagaagcggatgggcgccttggagaagggtctcggggatcttcaaaaacaccagcgcactgttgagtctgagaagcaggcagaagctctgcagaagctgatggacaaggagcgatccgcaaacgaggcgtacaccaaactgatcattgcggctggctacgccggcttcctgacgttctggagcaaatcggcgcaggcgatacctcagccataccactccatcattgggatcttgttcctgctttctttggtctgttacatcggctacgaggtctatgcatctatcagacgcggccttgcagttcagctcgcgaatcagcgtctaatgaaaaatcctacgcccgccggcgttgatgcattcaatgaggaaatcgcaaagttcaaccgacgaatacacagagtttggctcgttgtcctcgtgcctaccgttgctttgggcttcggcgccggtctgtggacgattggctggtatgcctacagcctctggaacacgctctaa

SEQ ID NO: 511865 - DNA, 216 bp, Stenotrophomonas maltophilia
atggccgccaccgatttcacttacttcgcttcgtcaaccgttcgtattgcccatatcagcgcaattagtgacgttatcgataatggtccagaggccggcagtcgccggtatcaggtgaacattatcgtttcgggaatcacactgtccgaagcctacgctttcgagcccggcgcttcacaggctcgttccgaaatcatgggcgcgatggaaggctag

SEQ ID NO: 511866 - DNA, 534 bp, Stenotrophomonas maltophilia
atgacctgccgtacatccgcactcaactggctcgacgttctctacacctccgtgcgcaagacgcccggtggtgtcgtggatgcagccgccttcctggccgaccgccgcggcaagtccatgcacccggagacgctgcgcgccaagttgcgcgggctggagggtgaatcggtgacgttggagatcgccgaactgttgaccgaatggatgcaggagaaggcgggcggcaatgactacgccctggactggatgcaggcgctggcaggccagttcggcatggccgtcgccacagttccgccgccgccggagggtggatgggcggacgagattggggccatccagacgaagctgctggagatcaccacgcgggtagggcgcctgtcgggcaccgcggtggatgcgatggccgatcgccagatcgacagcgatgaagcccgcctgatggtggaggaagcgaactcgctgatcacgatggcgcaccggctgatccgcaacgtgtcgcgcgctgcatcgaaggggagggcgcgaaatggctaa

SEQ ID NO: 511867 - DNA, 273 bp, Stenotrophomonas maltophilia
atggagtgggcttttacaggggttacgctctttttcggggttctgggcctagtactggctgtgctgtggatattcgttccattcgcgatcttcgggatgaagcccctgctgcagagcattctcaccgagcttcgcagggccaatgcgctcgcggaggcgcgcgctcctagtggtgtagcggtgccgcccaaagcaactaccgaggcggccccggagcccaagggcaccttggcgaccattcgcgccgccattcgacaagctgatcgcgcctga

SEQ ID NO: 511868 - DNA, 210 bp, Stenotrophomonas maltophilia
gtgcgtaaccagctcgacatttttgaccacgacccaacacgcctggcagcagccaatcgcgctgcagccgaccacgcgctgcaggacgtgcagttcaccaatgccgagcgggaaagccgagctgcctaccacctcagagaagtcaaacgctgggagatctttgccgcacaaagcatgcgcattgaggattgccgggagagcaaagcatga

SEQ ID NO: 511869 - DNA, 750 bp, Stenotrophomonas maltophilia
atgatccgcccaacatctagtatcactagacctaaggctacgcagaccagctgcctaaaaagggacagccaatcaccgcagccttttgagaatggacattctgttcatcgcatcactgcaagccgctgcagcgtggagggcaacatcgcgagcattatcccacgttcgactccaagtaacccagtatcctttccaagtctcttcgtccgacacgccaggggcaaagttcagcccttcgatgagcaagcgcatgtctcgtgcaaagtgactagcccgcgaaacatctgctgccaagagggcacccacctccgggaacttgctgaggtcaatatctatcgtggacagatccttcagtgccgcatcgagctgacgtgcggcacggatgaattcatcagtgggaactggtcgaagaagatgattaatcggaccgccggtccttgcatcaacacactcgcagatgcagaactcttcaaatccaatcttcgcccgatggaggggcgtgatgtaaaccgccgcaaagatcgaatttacccttcgactggcaaagtgccgcctgattgctggaacggaaagcgcggtgagaacaccaagcatcgtcccaatactcgaccatgcatcccagtcaattgcgcaggtgctaccgaggtgccagcactcgctgacgccatccagaatgctcattctgtgatccccctgtggactcgccggcattctgccacgccatggcgcgtggagaactaccatggctga

SEQ ID NO: 511870 - DNA, 318 bp, Stenotrophomonas maltophilia
atgacccaggaacatatcagccacccggaagggttgccgaactgcgccgccggccaccgcgcgcgccacatctacgacaagcgctgcgcctccgccggcggtggccacctggtcgaatgcgcctgccggtcgaccagcaagcatgccgatcctgatgcagccattgcagcgtggcgccggctcaaccgacccgcgcgcagcgcgcgcctggcagccgagcctacggcagccgacaacgtcctgcagttcaacctcggcctcgctgagcggacgccggccaggaggaaggccgcgggaggcgccaatgggcgccgctga

SEQ ID NO: 511871 - DNA, 882 bp, Stenotrophomonas maltophilia
gtggcaattcgggtgttcatcagtcataccgcaaaggacgaaaagctcgccggcgctgttgtcgagtttttacagggcaacttggtcttggcagatgaagaagttcgctgtacgtccgttgcgggtcataagctccctgtgggaagcgactcatcctccacgctacgcgatgacttgggcgacagcgctgtaatagttggccttatcaccagtaatgctctcagctcaggctgggtgctatttgagctcggtgccgcctggggttcaaagaagcacttgaagccgttgcttacggatgaggtgaatttcagtgatttgccgggccctttgagtgggcagcacgcggctaggatttcaagcaaagcagatctgagtcagctgatagaagagattgcgggcatcctgcaagccaaacgcagggcggccgcaaaggcagtagcagtgatggatcacatgatcgatgcccatgcccagcacatgcgcacccctgtctcagccccggcaaaggtgcgcgtagcaactcggcctaaagaaccagagttctctggaatccctttttcagaacttgtcaagatacttgatgatgaaaaggtcaaaattccgaaggaagtctcgggtattgataaagatgcggaagtttctttgctcactctctatgtgggaaattcccgattcttcacgtcaggaattcagagcaatagtgaacagggttctcccgctgcatttctcttcaacgaggtgggtttgaggcttatgccttatggccttctgcaatttgaaaagctgccggcggcgcaggctaggtggttcaaacgtctggtggtgagcgctgacggcaataagttccttgcccattacaatcgcgtgactgctaagccctag

SEQ ID NO: 511872 - DNA, 1452 bp, Stenotrophomonas maltophilia
atggccattgcatggctgttgctgggtgcagtgctggctgcacctgccacgcaggacgcgccgatcgactggccgagtacgctgcagaaggatctggaggctgccgatgcggcgatgcgcggcagccatcccggggccgttgatcggcagaaccccggattcggcgcccagctggacgctgccctggcactggcacgctcccgcgttggaaaggcgaagagtttcgcgggctactggtgggccatgaagggctatgcagcctctttcaacgatggtcatgtcagcctcaatgcgcttgccggggctcccgagctgccaacgcggtggcccggcttcctgaccggcttcgatggcgacacgcaggtggtcgtgaccgtggacggtggcccaggccatccgccacttggagcacgattgctgtcctgtgatggcatcgatgcacagacgctggctgcgcgcaggatcggggacttcagcgggcgctggaacctgcaggcgagccgcatccacggcggcggtgaggtattgctggagcagggcaatccttacgtgccggcactgcgcacctgcgttttcctggtggacggacgcgagaaatcctatgcactgcagtggcagccgctgcaggccgcacagcgcaaggagcggctggccgacacccggcgcagcttccgaccggccaatggctggcacacgatgcccaatggcggctactggatcaccacaagcagcttcaatgccgatcccactgcggccaatttcaaggagctgacccggatgctgcagcaactcaccccggtggctgatgcgttgcggcaggcgccatgggttgtgctcgatgtgcgcggcaacagcggtggtgcgtcgcactggagcatcgagctggcgcggttgatctgggggcgtgaggccgtggacgcagtgcgtgacgacagctgggtggagtggcgggcgtccgagcccaacatcgcacagctgcgtggctttctggagaaactgaagcaggcacctgacgcatcaccggcgttgctacacatgctgcagtccgtgaccgaagggatggcgcaggcaagagagcaaggccagccattgtggcgggaaccggccaatgatccggccgccgcggtatcgcaggtagagcaggccggatccggacacacgggcagggtggtgatcgtggccgatgcttcctgcggctcggcctgcctcgatgcgctggatctgtggaaacggctgggcgcaatgcaggtcggcgtcgaaacttcggccgacagcctctacatggatgtcaggccggagcggctgccgagcggcctggccaggatttccgtaccgatgaaggttttccgaggccgggtgcgcggttccaatgaaccgcatgttccggatcgtcgctatgacggcgacatgcgggacacacgcgcactggaagcgtggctgctggcgctgtga

SEQ ID NO: 511873 - DNA, 5526 bp, Stenotrophomonas maltophilia
atgaaccggatctaccgactcgtcttcaatccttcgctgggccaggtgcaggttgctgcggagttcgcgcgtggagcacgccgctttgccccgcaacggatacgcagcgccctgtggctggcgccactcgctgcagcgatgctgttgaccggcagcctgcaggcaacggcgcagtcgctgccgcagaacggcaacatcgtggccggttctgcgtcgatcaacatcaacggcaacgtgatgacgatcgaccagaccagcgcggccgcgctcatccaatggaggagcttcgacatcggcgcggccagcaaggtccagttcaaccaggccggtgggacgcaggcaacgtcaatcaacctggtcacaggaagctcgggcagcctcatcagcggtgaactgtcgtccatcgggcaggtgttcctgatcaacccggccggcatcaccttcacttccggcgccagcgtgaacgtcggcggcctgctggccagcacgctgtcacccggcactcccgggctgctggatgccaatggcgtttcgcccaccttccagctggcgggcggcggcaccggtgccgtgatcagcaacaacggcgggaccctgagtgctgcttccggcggcatcagtctgatcggcggcgcggtctccaacaccggcatcatctcggcggccaatggcaacatcaacctggtcgctgcaggtgccgccatggtcgtgaacggggtgtcatcttcgggactgccgcagctgacgttcctgccgacgtcggccggcacgttcgccggcaccggcgtcaacaacaccggcgtcctcagtgcgcgcagcatcagcatgaacgccttgatggggcctggtctttcaagcaccggtatcaacgccggcggcacgatcatcgccaacgccatcgacgccggagatggcagcctcaccatccgcagttccgcgccggtggcgctcagcaatccgaccatcaccgctggatcggtggcggtggccggtgcgggcgccggtggtccggttgcgatccagatgaccaacggcagcatccgggccagcactgtcgcgttcgatggcgggtcttccggaaacgtgatgctgggcggcggcgtcaacgccgatacgatcagcattgcagcgaacaatgtcgtgcagaccagcggcgcgctggagggagcactgaccctggccctccagggcggcgcaaccctggggcagagcagcaaccgcatcggaagcatcggcggcagcgtgggctccgacctgacgctggccacgtccatcggtctgtccaacggcgatgccttgtcggtcggcggcttcaccgcgcttgacgccggtaccggcaacatcaccctgacccattccggaaacagattcggcaaccggctcagtgccaatggtggtggtatcgcgctggccagcagcggcacgctcgggttgggcaacatcaacgcccgcagcctggccgcgcagggcagcaccatcgacctgagcggcacgatcatcaccaccggtgaccagacctatcagtcaccggtgatactgcggggcaactcgacgctgcagggcagtacggtccagttcgatggcagtgtcgatggcagctaccatctggcggttgaatccagcgggctgacgaccttctcccatgccatcggtggcaacaccgcgctgcagagcctgtccgtcaccaccggtaccggtgctcgactgttcggcgatgccagtgccaccggcacgctcgctttcgatggtccggtgcaggtgttcggttcgcgcaacctttcatccgtgggtggcagcctgcgcttcggtggcacgctcgatggcgatggcggttcgctgaacctgagcgctcgccagctcacgctgggtggcgcagtggggacccgcggcgcattcgatcgcatctacggcggtgccgacaccctcacactgggcagccgcatcgtcgccaatggtgaaatcctgctgcaaggtgacgtgcgcctggccggcgctacccagctggtcagcaccggtggcggcaccatcaccaccgacggcatctccagcaatgtcagcggcggctacaacctggcgctgagcagctccggccgggtccaggtcaacggcaacatcagtgccgccgatgtcagcatcaccggacagctcttcaacggtcgcggcatcatcagcaagggcaatctcgacatcgattcggtggcgagcctggtccagctgggcagctaccaggtcgatggccgcgcgcggttcaaaagcatgggcgacatcaacctggttgacgcaggaaaccgcttcagcggcgaggtcagcctgctgggcaggaacgccgaactgcgtgcgggcaatctgcagctgggcaacaccatcctgtcggacaacctgcggctgaatctgggtggatcgctccagcagaccgccggtagtgcgttgaatatcggtgggacgacccatatcgacgccagtggttcggtcattttgaaccaggtggacagcatgggcaggccggtcaaccagtttgccggcgcggtgtcgctgaagggcggtaccagctacctctatgccaaaggcacgctggcattttccggtttcgacgtggccagcctgtggacgatcgccgatgtcgtgcagcttcccgccaatggcaggagcatcggcctgcagtacttccagagcgatgccgtgctcaccggcgacagcatgctggacagccagctcggccagatcaacttccgcggccgtatcgacggggcgcatgcgttgacgctcacgagcggactcgacgtggtgttcgccggcgacgtcggcagtcgccaggcgcttgccagcctgggcatcagcagtgccggtccgctccagctcggcggcagcatcacgaccgacggcgcgatccaactgggcaacgtcaacctggccgcgagcacgccgcgctggttcagcatccgcagcaacaatggcaatgtggtggttggtcgcgtcgacggcagcagtgatgggctgagcagcctggcgctcaacgcgcacggcacgcttgaactgcaatcgggagcagggactaccgccggcgccgggttgaccgatctggagctgaagggatcgagcgtgaccaccaaggcgatccggacgaccggtcggctcgacgtcaccagcagctccggattcacccagggcggcgccttcaccattggtggcgacgccagcttcagcgcaggacccaccggcaatctggtactcgatgcctatccgaacaccttcggcggcaaggttgccctgaagggcaaccaggcgcgcatccaggcgctgtcgggcctggcgttggacggcatcgataccaccacgctggacgcctacagtggcggtgcgatgtcgctggccaatgccaatgtcgctgcagctgccagtctcaacggtacatcgctgctgttcgacggcgcatccatgggggggctgctgcaggccaccgcgcgcactggcgacatccgccagggcagcggtatcctgaccttcggcaacaacagcgatctgcgggccagcaccgatatcttgctgggcaataccggcaaccggctgggcagtgcactgcaggtacagggccgtaacatcacactgaccagcagtacggcgctggacctgcagaacctgcaggccatgcgtgacgcgcagctcgctggcaacggcgtgcggttgggtgccacctcggtgctgggcgcactgcaggtgaacagcagcggtgcgatcacccagtccgatgcgctgcaggtcgcaggcaacagccgcttccaggcaggttcggccatcaccctggaccagtccgacaaccgcttcgacggcgcgctcgacctggctggcggcgatatcgacgtggtggctgcttcgctgttgctgggcagcgtgagtgcagggggcagactggcgctggccagcgcaggaggcatccgccagaagggcggcgtgcaggtggcaggcaccactcgcctgaacgctggcggtgccattgatctgcaggcaggtggcaaccgtttcggcgacgctgtcacggtgcaggggcggcaggtggcactggccgccgatggcagcctgcagcttcaacgcgtgacagcggacagcctggttgcgcgaagtggtgggcgtttggccctgggcacggtggacatcgttggcaacgtggtgctggacggacagcagctgcatctgggtacgacccacgtcggtggcaacctgcaggccgagggccgcgacggcatcgatcagagtggcgcactgcgtgtggatggaagcgctgacctgcgcagcgacgcgggcatcgcattggcacgttcggacaatgacctgcgtggcgcggttgcactgaccggcgtcggcatcgacctggccgccgcgggtgacctgcgcgtggcctcactcgacaaccgcagtgcggcggtacgcctgcaggcgggtggagcactgcagctgcccggcacccggatcgataccggcagcggtgacctgcaattgctcgcggtcggtgccctgcagcttccggcggcactgcgcggcaacaacatcacgctgcacagcggccaggacctgcagctcgcccacgatgtgctggcgacaggcgtactgcagcttggcagcgcgggtgcgctgacccagagcggtggcgtgctggccgcacaacgcctgcagggcagtgcgggtggcaacgcccgcctgcgtggtgacaaccgcattgcgacgctcggcgatttcagcagccagggcctggaactgcagacccagcaggggctgcaggtgaccggcactgttcaggccggcgcacagggcctgctcgacgtgcgtggcggggatctgcagatcgatggcagcttgcaggcgggcagactccggctgcagtcggccggtgcgatccgttccagcgccagtggccgcctgttcgccgaccagctcagcggtcgcgcggttggtccaaccacgctgggcaatgcgtcgttgttcgtggccaatgccatcggcaacctgggcgatttccagtcgcctgcgggcttcagcctgaccagcaccggcaacctgaccctggccaccgtcaacggcagcgcattcagcgtcgacgccggcagcagtgcgttctacctgaaggtccaggagggtgacatccgccagctgggcaccacgccggtgctggccggcagcagtcgttggtggtccagcggcggtatcggcacccagcctgcgccgatccatctgaccagcacgagcagtacctacgaggtcgatttcgtcggccggccgccggcctatttccatgccgtgggcgcagatggccgccctctgacaatgggcggtggacctgatcctggccctgatcctgctgcgatgggccccggcgtgcgtgcgcagggcgcggtgctgccgcgggcggtctacgtcgatgcggctgcggccaccatcgagccgcgtgcgatcggcatcacgcaccccgggatccggttgccggcggggctggcgcgagcctgtgacggtgacgcggcgggttgcgtgcaatga

SEQ ID NO: 511874 - DNA, 426 bp, Stenotrophomonas maltophilia
atgtcgcccatcaaatccatcagtaatcttcacatcaaccctcaagggatcgcagggcgaaatcaccgcgatccggccaattatttaccaagccatccgatcgagctgatcgcccgcataaccagcaccagcaatagcaacaccagcgacaaaacctttaccaaacgcagttccaatcccaacgacgaccggcacagctgcaccgtcgacgctctcaacttcaagaatggtcaattagcgacagtcagcaccgagagtgcggcaaacagagggaacgcccaaagcctctgggattgggagagcataatgccccccaaccagctgcttcgctttgcatccaagactgggtgtctaagcaacgaatccgacatcccgtctccgagcgctgttggcgggcgcatcaccctagcgcgtactaaaccgtag

SEQ ID NO: 511875 - DNA, 990 bp, Stenotrophomonas maltophilia
atgatccgtcgtaaacagatgaccgagattgctgtttccctcccatcgcagggtacattgcttgtacatccaaaagatttggtgatgatcgacggactgcccgatgatctccgggagttggcggaggagtgccatgtctacattattgggaagcgacctcggctgcgcttcgttcctggttcaatcagggttggagaagggcgtactgaaggcgttatggagtatagcgaaggaggtttctggctcccaataaagttcgccatggagggcgagttgtcgctggagcttgcctactcaccatttccgcatcgtacgattgatttgattcgagacgaaaaggtggtgcataccctcccggcatatctcatgccaagtctcttcgcgtggactgatacgcctgcggttaggaatttggaagtcgtatatgttggaatggcgtatggagatggcagtcgctctgcgaaggatcgtctcaagggacatgctactttgcagcaggtcctggcggacatcagtgctgatgatccagagtcggaagccatgatcgttatggttcaatatgatgatccgattgctatttttcagttcgatagcgatggcggcagcttggatgatgctccagatcgagaccctgtggctgatttggaagcgattgggtcaggtttgggtcggcgggtagagatctgcttggctgaggctgggttgatccgatattttcagccaaagtacaatgaaaaatataagaaccactttccgagttctgctcattcaatcactaagcggctttatgatatagatatagctgggttatccgtggaaataaatacagaggatctggatatcaggctctatagccacgtccgtcctcatggctaccatcacatagccacttatgatctgcatgatcctagtgagaggcgtagcttctacgcctttttagaatcatcttccagttatagggcagagaatttttcaggccctgtgttctaa

SEQ ID NO: 511876 - DNA, 1365 bp, Stenotrophomonas maltophilia
atgatcgagatatcgccatcagcgcagacctccgtccagaaaggaaatgcactggaggatgcggtttaccgtcaactgacccaagatattgccactggtaaatttggaatcgaccaatcctgctgccgagtcttccagaagaagggctattactcaaaggatcgcggatcggatattatctttgatgtttcattagaattctggatgccaggagcatcggaatggtcaattcttttagtttatgaatgcaagaattactcacacaaggttccggtcagcgacctagaagagttttttcaaaaggttgaacaagttggagctgcaggcacaaaggctgtcattgtaagttcaaactctttccaagaaggcgcgctcacctttgctcggtcaaagcgaatgggagtggcgagatattttccggacagagatctagaatggatactccgcagggcgccttcagagcttcgggctcaaaagtctttcttccattcaaccgtcgactgggaagcactcacctccgacacatatgtgagccgctactttgattatcattgcgcattcagagaagatcgaacaaattcattgttcgatctaacttatgaaatgattcttgactccccggaattggtagcggaactaaatatagacccaggctcataccaacaggaaagaagcagggagtggattccattcttgtcatccgaattaatcgaggccactgcccgatcttgcatattgaaggcggcgcgcagccaccctgcttcccttctagaggatctttgcctcagtcttcaggacgaacgaggactcatcttacactccaccacccttcctcaaggcgtcttggcagaactttcgtttgacccgttgaagattgaaattgatgacttccaatctggaaccgacgaaaggaggcggtttacgctcgcccatgaacttggtcacatttacttagaccatgggagatttatgaagcgcgagaagctaagagcctcagatactgccatcgaccagcccagcgacattaccatctccgccatagcccgtcttgagtggcaagcaaactacttcgccacttgcctacttttacctaagcgcgcatttatcgcagaggtaaggaaacaaacgagcaagcgtcaaataaaagatagaggattcggccttctctatctcgatgaccagaaatgcaacatagactcattcctagtcatttgctccgccatatcgcatcacttcaaagtttcgaaagcggcggttcgactccggctcactgagctaggattgcttcgagaggcatccactgtaaaacaggcaggcattctgagcgagagcatttttcgaaactgccaacgcactgacccatag

SEQ ID NO: 511877 - DNA, 1662 bp, Stenotrophomonas maltophilia
atgtatgaatctgatccacacggggagcaggctgagcacttacatttgctcatggcggtggttcctggcacggacgagggggccatcgaggttgtttctgaagccggcaatggcgttgttgagtattccgtacctgcgggtgacgagcgcggctgcgccgccaatttttctccatcaatatcggggtacgactatattgttgcggtatggggtaacggctctttctacaccttcaatctagctgagaaagtctggatgacgcttgggctgacgccccgttgtgtagggaacgatcagcagcgtttggtctacgacgacttgggtctccctgagattggtgtggcagagggggaggtttccagtgactatcactggaacttgaagagatcggttagttggcgcatgtcgaatgagtacctccgccgctacctttggttgcgcggagcccgaggcgtgcgcgtcttctattactccgtcttgctaccagatggcccggaagtccgcgcaatcatgggaggagagtcccatgtggtccgtaagcctgctgcgggggttgcctggtatgagttggacattcgtgagcataggggcggacttctgctccagctatgggcttcagtcgaagcggtgatgcccgatctctgccctgagcaagccgccgaaggcatccagtggcccggtgacgccgaacctatgactcacgcacgtgcgaacgccttgctgggacatgatccggtctatctggacgatcggttcttggagaagtacgaacagagcgttttctacgattcgacgccagttcatgtctggggtaaatggtcctgtagcccatcgtaccgggggcagtggagttttactgagtgtcagcgagtcggtagaaatctgatcaaggtgccgatgcgtgagttgtataagccaaagccggatcgcgaaattgtgcacgccagatcatttgcgattgatccggccgtcctggcacacgtggacctagaagaagagaatgtggtcgccaaggtacagcggttgctggaggtgcttctacgattgggtgatgggctagctgcactgggtataaccgtaggattgaacaagtcggctgtcgaactaaccggcttcgatcgtgcagaggtggcagccaatggttggctggcctatccggcgctcggtcggttggctcaggttgcaccgttgaatatgactcagcagatgttcctcgctcgctgcaaagggttgcacgaggtgtggcagcgcattccaaacggatacctcaagttattgttggagcgggctggctgtccgaagggggccgtcagggacctaggaagccttcggttattgcaagcacttttgaacgtcctcgaagggctgaatgcccaggaggaggcaagcgatgccttcgcctctgccagggagccagagggttggagcgatcgtaatgaatccatggcccccttgttcttgaataacgatctcagaatcgccgatgcgcacgaggccgttgatcgctgcttgacgaccctgcagcagctcggcttcgacacagcaaacgtcaacgcaggctacggacgggcactcgatttcgtcttggatggcgttatcaatgctctgggggtagtggtcgcagctatcgagaagctattaaggacaacggaggcggtctga

SEQ ID NO: 511878 - DNA, 378 bp, Stenotrophomonas maltophilia
atgaagttcaaggcagatccgcaaaaattcaatgccgagaatgcgttagctgacatcatggcgatatcaagatttgcgagcctcaagttggaggtcgaacacattgggcgccaaggtggcggctacatgcggtcggaattcctcaccgacgacgatggactcgtcggtgtgttcaagtgctttgaagcaaaggccgtgaggcatgaacaaaagggagatacctatgagagtcggattgaggttagcgtcaagctggaagagcttttgcccgacctcgcggccaagcgtcggattgcgcgggctagtgcggagggagcaccggagcaagaacccgatgagtatgagcagattcttaacctattggtccaagcgccttaa

SEQ ID NO: 511879 - DNA, 918 bp, Stenotrophomonas maltophilia
atgagcgatctattcgatgttgacggcgccaatctcgatttggggttcgagaacctgaaggccgcggaaagcccggttgagcagcagctgcgcatcacactgcaggagatgtggactgactacgagccctatgccgatccagacttccgccagggattcgcgcgtgacgtggacggacgcttctgggaaatgtatctgggttgcacgcttcttgacgcgggacgcacgttgttgcccgtcgccgaccgtcagcgcgaaggcggtcagcccgacatatgcgtgctcgacgagaatcgccgcatctggattgaggctatcgctccagacggaggcgctccgggaccagaccagatcatgcgccctgtgcctattaacgagggcggcggacttatcgccgcgccgatccgtcaagctcaacttcggacctccggagcattctggaccaaggcgcggaagatcagccgctatatcgaacagggcgtgatcgcgccggaagacgtccgcattatcgcgatcagcgccagccgcttcggcctatatgtgcccgaacgccccttacctctcatcatgacgacgctgttccccatcggcgatgctttcctcaccatcaatcgcgatacaggcgatgtcatcgaagaaggctttcatgccgctccttttattcagcgagatcgcaatccgattccgcgcacggcatttcttgacgagcgcttcgctgacgtctcgggcgtgatctggtcacggatttgtccgggcaacctctcacgccaggttcgaccgatcacgtatgttcacaatcccctagcacagaccccattacccatgaattggggcgtctgggaccgtgagttcgtgacaacccgccaaggcgatggatgggaatccaatgatatcctcgccacagaggagttgttgtga

SEQ ID NO: 511880 - DNA, 1434 bp, Stenotrophomonas maltophilia
atgcccccaatcgatgagactcaacttctcaccccgatcagccagcgccaattcgagctctatgccctgtcgctcgaacgcggtcccaatttcgaccctgcgcatattttcagcgcctaccaggccggaaatggtggcgtaactggctgcgttcttcttgatccaacgaaaggggctttcaccactctggccatgcgccgacgcatcgaccattgttggatcaaagtcgatgaaagcggcccctactctacgcccgagaccgcgctagatcggctcaacattactatgtgtgccgacggttcagcggaaccgttgccgccgggaactaagcgccgcccactattgctgaaaccagggccgcgtggaacgtctccagagttcgatctgctgacaaccacgatcagccatctgccggcgctcatggcgatcggcgaatgctacctcgcacttcccaaccccgacgccaatttcgtctcggattttcaaaccaacaacttcgcgtcccgactgttcgaggtctaccttttcaactgctttcgtgagcagggtctgaacgtccgacaagaccatgcctctcctgacttcttgatcgagaaggagggtaacgcatgctggattgaggcagttacagcaaactccgagcttccacgcgccggcggcatagggaaatgggtccatgccccaaaggatcgaattgaacggctgacaggcaacccggcggaacgattcgcaaagacgctgcgcggcaagctccagcgcaattatcatgaactggaccatgtaaagggacagccgttcgccttagcgatcgccgacttccatgatttcggctccatggtttggagccgcgaggctcttcccacctatctttacggcttacgcgcggacgtcactggagatggcgctgatcgtcgcgcgattggagtgccgatcgcaaatctgacgggccaacacagcatccctgcagggctcttccgcaacccagatttcgcacacctctcggccgtcatcttcagcaattcagcaacgctcgccaaattcaaccgcatgggtttccttgcaggatggcgaccgcccgggctgacgatgatccggcgcggcattctcttcgaccgaactccaggcgcattagagcctatcgatttcaaccttgccgtcgacagtgccgaataccaagcgctctggccgtggggcgaagcttggtgtcaggagctggaagtgtttcataacccattggcaacacatcccatcccctttgatctcatccccggcgcgacccactggtttgaacgcgatggcgacatcgaatgcagcacgatttgggcgaactcagtcatctcatcggtcacccatctacagatggacggcgaacccgctgtgacgagcgaggcgcgtgaccgtcgccaaccacctgcccccacgagcacagaatag

SEQ ID NO: 511881 - DNA, 783 bp, Stenotrophomonas maltophilia
atgaatgccaacgagaaacgtatccagttcgacactaagacgatcgacttgttctggctgcttggcttcagctcgtggcgggccatcgaagtgtacgcaccagccttagttgtcgcgacatccaacgggttaccgctcgaccaagctctcagtgtcgatgaagaacgcggccaatatgaattcgactacaagcagcgcatcgccgccgcccagtcgctcatcacagccgaacagacctccgacatatcctggccggtggacatccccctgccgagtgccgaccgtgatggcctgggcaacattcagcatatggcggcattcgaccttgttgcgctcgccttggccttcgccctgctacacgaattccagcacgtcatgttctgcgccgataaacgcgcgccctctacgcgacctgaagaggaaatcgcctgcgacacctatgcccgaactttcatgacaagcgagctcgccgcctatgcgaaggcacacggacacgatttcgcccaggtccagaacaagcgtgcgatgggcatcacgctcgccgccgtcatcgttcatgcgatgacgccgccccatgcacgttggggcaatagcgaatacccaccgatcaccgaacggctgacagcaatgatccgtggctacactttatcagccgattcatcattctgggccttcacggcctgtgtcctaatcgcgcttatgcggcaggaaaaccgtccgctcgacattatcgcctactcgaacaaagaaatggtcgaaatgctgctcgaccggctctgttga

SEQ ID NO: 511882 - DNA, 504 bp, Stenotrophomonas maltophilia
ttgccggtctatttcattggcgaagatgaaaacggatgctctcctatcaagatcggggtagcgaagaacatcgaggagcgtaagcgcaatctccagaccggcaaccctcttgatctgaaactgctcggatggatcgaggtagccaatgcctttcagcttgaacgcctacttcaccagcatttcgaatcggcccatgtgcgcggcgagtggttcgcaatcgagcctgcagagatcttgcccattctcatgcgcgctggccgagacggctttgtcgccaaaaacgctgacgctttccaaatcgttggctatgaccgtaatgcagtgccggagtatcttggggtatgggaatggggcgaccttgaaatcgaagaatgctgccccttctgcgggtgcctatgcggcatgcactttcaaaatacgtcacagatgtattactgcctgaactgcgacacgctaaccgacttctcggaagtggacccacgcaacgaagacctggacgactga

SEQ ID NO: 511883 - DNA, 519 bp, Stenotrophomonas maltophilia
atgaatacaaaggaacttagtgcaagcgaacaatggctcgaagcgcgggcacccggcttcctgaacctgccagatcctgatcgccgcgccatatttgacttcgcctttctctggagtcttttcgaggcacagatcatggcgaacttcgcccgtgctgaccacatccgggaacgaatcgatgcctgggctttggacggtacgcttgaagctgagatctacgacgcagagcttgcctattttcgaaatcgctacttcgccgacggtgcattgacctatcacttccatcacctgaaccttcggccctcagaccaccccgatctcgttcaggcggttgtcgagggcacgaacgagaacccccgcgaccggattttggctcttctgatgatcgtctggcgcctacgcaacaatcttttccacggcgcaaaatgggcctacgagcttcgcgaccagcgcgaaaatttcacgcatgcgaacggcgtcttgatgcgaatactcgaacgccatgggcaactcggctaa

SEQ ID NO: 511884 - DNA, 222 bp, Stenotrophomonas maltophilia
atgagcacatcgcgcaagctgcggctggggccgttgcccaagatcgagagcatcaagctgactttcacgtgcccggccaatttgaaagccgacctggaccgctatgcggcattgcacgcccaaacgtatggtgagaccgtcgaagcggcaacgctgattccatacatgctcgaagcctttatggcaggggacaggggattcaggaagtgcaaccgagcatag

SEQ ID NO: 511885 - DNA, 990 bp, Stenotrophomonas maltophilia
atgaaccagtctttccgcttttacgctttcgtgctgaccttggcggccctgtcgggctgcgcctcgcagggcaagccaccaccgcgcatttctctcgacgagccggtgcaggcacaaccgctgcccgaaccgccgaagcctgttgaagtggtggcggtgccgaaggtgttgccgatgccggcgcagatgaagccgctgccggaagtggatgaggccaagccagcgccggaacctgccgacgaaaccttgcgcgtatcgcgtgcgaacgccgaagcgcgcatggcacccacgcgcgagggctatgtcaatgcgatccaagtctggcccttcaccgatggcgcgctgtaccaggtctatgcggcgccggggcgcgtcacggtgatttcgctccaacccagcgaggagttggtgacggtcgccgccggcgatacggtacgctggattgtcggcgacacgtccagcggcgccggcaactcgctgcgtgtcagcgtgttggtcaagccgatccgctcgggcctcaagacgaatctggtcatcaccaccagccggcgcacttacctgatcgagctgacatcgactgacaaggcgtggatggcgtcagtgtcatgggagtatccgaaagaccagatgcttgccttgcagcgtcaggatcaggccgcgcaagcggcagcgccggtcgatactggcctatcgctggagaagatccgctttcgctacgcggtcagcggcagcaatccgccttggaagccgctgcgcgctttcgatgacggcgagaaggtctatatccagttccctcctggcatcgcgcaaggcgagctgcctccgctgttcgtcatcggcgcgcagggtgatgggcaactggtgaactaccgcttccgcgccccgtactacatcgtggaccggctgttcggcgcagccgaactgcgcctgggcggcgacaagggcgacgtggtgcgcatcgagcgcacggacggtacgaaggggaaatga

SEQ ID NO: 511886 - DNA, 249 bp, Stenotrophomonas maltophilia
atgaacaagagcatgctgcttctgcttgttgcgatattaaccgcatgcggcaagcccgaaaccaccgagaccgtcgagtctctcgtctctaatcccgagcggctgaaggtgctgcgcgaacaatgcaaaacggatcgcgcaaagttgggggacgaactatgcaaccgagtggctgaagcaacgaatcgacgcttccttggcgatggcaagaccccctataaccgaccgaaggaagcgccgaagttctga

SEQ ID NO: 511887 - DNA, 945 bp, Stenotrophomonas maltophilia
atggaattacgtcacttacgctgtttcattgcggtggccgaggaattgcattttgcccgcgccgccgaacggctgcacatcgagcagtcgccgctgtcgcgggcgatcaaggaactggaagaggaccttggcgcccagctctttgtgcgaaccacgcgcagcacccgcctaactcgcgcaggccagctatttctggaacacgctccgcgcgtattcaccgccttggagcaagcacgcgacagcgtcaaggccgtcgctaacggcttccatagccagttgcgtgttgcgctttcggacagcatcgtgccctcgcatttctcaacattcctagcgttatgtcgccaagaagaaccggagattgagatacgtctatcagaggttccgttagcgcagcagatcaaagggctacacgatgacttgtacgacataggattcgctcgatcggatgaagtcggcgatggaatcatcacccaacctgtgtggagcgatcccttgatggtcgcggtgcccgcccgccatcctctgcttacgtacaagcgaatcccgctggaggaagtgctgcgctatccgttggtactcggagatccccatgcgtgcgagggctattcaaggcagatcgaacgggtgcttcggcgtgtcgatcaagaaccgctgattgccgagcgggtggcatcaattgacctgatgatggcactggtcgcggcgggcttcgccttgggccttgctggcgcctcacagattgccaatagccgtgagttgggagtggtcgcgcggcccctggtaggccgcacgccgccgctcaccacgtatctgctacgcctagacatagatccttcggagatgttgtcccgttttattgagaggataagcgccctggagtcgctccccaccaggaagcccaccgtattgcccgacctcaatgccacggaggaaatccagccatga

SEQ ID NO: 511888 - DNA, 339 bp, Stenotrophomonas maltophilia
atgaaaattcacgccataaccatcgacaccgcaaatccgcaaaagctggccgcatggtggtccgaagcccttgggatcgcggtggctaacgactacggacaaatcgtccagttggccgcatcttcagctgtcccgccgttccagttccagaaaatcgaggccgttccgacgcaacggaatcgggtgcatttcgaccttaagaccgccgatctcgacggagaaacccagcgcctggtcgcgttgggcgcgtcggtcgtgcagaaattcgagatgccccaaatccgctacacgaccctgaccgatctggacggcaacaaattcgatctcattcaggaatag

SEQ ID NO: 511889 - DNA, 744 bp, Stenotrophomonas maltophilia
atgtcccgactcaacggaaaagtagccatcgtcaccggctccgggcgcggcattggccgcgccatcgcgaagctgtttgcagcggagggcgcgaagatcgccgtggtgtcactgacgcccgcgaacgtggatgctgtcgtagcggatattcaggcggccggcggcacggccatcggcataccgacggacatcagcaatgcggagcaggtcaaggcggcggtggacaagaccgtcgaagcgtttggccgcctcgacatacttgtcaacaacgccttcgattcatccgcgccgttctcaaccgttctcgacctttctgcagagcagttgcagcgcaatttcgacaccggcccgattgcctacctgcggttcatgcaggccgcccatccccacctcaaggggagtggtgaaggccgcatcatcaacttcggttcggcggccggcgtgattggcctgcttggatacactccctacaacatggcgaaagaagcggtgcgcgccctgacccgcacggctgccagagagtggggcgcagacaagatcaccgtgaacaacgtgcttcccatagcagaaacctggggaccggaacacaacgtgccggccccgaccaacgcgcttggtcgctttggagagccggaagccgacgttgcgccggttgtcctgtttctcgccagcaaggattcgcagttcatcactgggtcgagtctgacgcccgatggtggtttcatcatcgacagcgcccgctga

SEQ ID NO: 511890 - DNA, 408 bp, Stenotrophomonas maltophilia
atggctgcgaactacgcatactggatcagcacgacactactggcactgctttacctgacatccgcggtgctctacatcgcaaaaagggattgggtgcgccagacgcttgccgagcttaactatccggctccctaccttgtgcctctcatggtcgtggtgaaggtgctcgggccactcgccatcctgtcgcgcgtcagcgtgccactgagcgatcttgcctacgccggcatcttcttccacttgctgctctccggcgccgcacacctgggcgtgcgcaaaccaaagggtgcacttccggcagtcattggtctggtgctcttggctgtctcgttcaccacccaaaacgccgcccgcgacgttccttcgccctatggcgtcgtcgtgacggcacaacaaatccatccctaa

SEQ ID NO: 511891 - DNA, 381 bp, Stenotrophomonas maltophilia
atgaaaaaccataccaaagaccctgacgagatcaacatgcatgacgaaatgcgccgtgcatttgcgttgctttcaggcaaatggaagctggagatcatgtggctgctcaatcagcggatctatcgctttggagagctgcgaaaagcgattcccggcatcacccaacacatgctgacagctcagcttcgtgagcttgaggcggacggcctgatatcccgtaccgttttcgcggaagtacctccgcgggtggaatacgagatcactcaaaaggcccgtggactcggacctacgatggaagcgctcacggtttggtggaaccagtacggtcgaagcctgccgggcaagccaacttcacgcggccggaaggccaaaggtagctaa

SEQ ID NO: 511892 - DNA, 402 bp, Stenotrophomonas maltophilia
atggcccgcaaatacacgtactggatcagcaccgctttagtgtgcttgctctatctggcttccgcgacgttctatgcaacccaaggggagaaagttcgtcaagcattctacgcgcttggctatcccggttatctcgtgccgatcctcatgaccgtaaagattctggctgtcgcagccgtcttgtcgcgcatcaggatagggctgagtgacctcgcgtatgccggcatgttctatcacctgttgctggcgttatctgcacacgtccatgcgggcgactacgccggtgcaccgccggccgccgtaggctttgtgctgctgatcgtttcgttcctgacacaaaacgccgccagagctaagaagtcaccctatgcgccaggaaatgccctatcagtcgctggttga

SEQ ID NO: 511893 - DNA, 855 bp, Stenotrophomonas maltophilia
atgttgatcggaatcagtggtgcaagtggcaagcttggacaggcgaccctatcggaactcaagattcgcggagccggtgaacgcgccgtggggatcacgcgctcgccgcaggctgtggaagggatcgcccagtcgcgcttgggtgactacgatcggccggagtcgcttctgcacgcctatgctggtctggagcggctgttgctcattccaagcgccgacctccgtccgggcgttcgcggcatccaactcaaggctgctatcgacgctgccgtgcaagccggagtggcccacatatttcttatctcgggcagtggcacgcgcgcggtggccgacaacgctctcaatgcggggttctggaatggcgaacaacacctgatgaagacggcacccaaatggaccatcctgcggatgaactactacgccgagtcgatggccgaggaaatcatgatgtccctcgaccaaggcgtactgccaagaataggcgatgagcacgttgcctatgtctcacgagacgatcttgcggccgccgccgccgccgccggtgcgttgctcggcgagggacgtgcgggtgccatctacaacatcaccgggccagccatcgtgactggcccggaaaaagctgcaattgcctccgctgcctttggcaagccgcttcagtacgcggcaatttcagcggaccaactcggtgccggtcttaagcaagcgggattgccggccgaggtggtcgaagcggtgatcgaaatcaagcacacgttcatcgagggcaacttcgacatcctcaccaatgacgtccaacgcctgtcgggccgtgtgcccaagtctctgcgcgacgttctggtttcgtcgaaggcataa

SEQ ID NO: 511894 - DNA, 417 bp, Stenotrophomonas maltophilia
atgaaggcgtccgcgactgaaattgaccccacgcaggaacacgaccgtgagcactgtcgagcgctcggaaaaatccttgaccatgtcggcgacaagtggacagtgatggttgttggcgtgctgtcgaaaggcccgactcgcttcaactcgatcatgcgggagataggcggtgtttcgcatcgcatgctcacgttgaccctgcgcaatctggagcgtgatgggctggtgacgcgtaaggcatacgcaacaattcctccgaaggttgagtacgagcttacaaatgtggggcggtcgctgattgcgccgctcggggtactcagcacgtgggtggttgagcatcgcttgcatatagaagctgcacgggagaagttcgacaaaaggaaacggcagcgaaacgctacgcacgccgacgaatga

SEQ ID NO: 511895 - DNA, 1962 bp, Stenotrophomonas maltophilia
atgagcagccgcgtcgatgaccgattccgcgtccggcctggtgcgccgaaacagcgtggcgacgcctacatcaacaaggttttgcggcaggccaacaaggcgggcgccaagctcggtaaggcggccggcaaggtcggccagcggcccggttctcggttggggcgtggccacgtggcggcgcgcttcgccggtcgcgggctgggcgcaaatgcccggcgtgtcacgatcaagatgaggctggtcaatctggcgcaggctgggccgcgttcgaccgctgcacacctgcgctacatcgagcgcgaaggcgtcgatcggcaaggcggggcagggcgtgcctacgggccggcgaccgatgccgcagacctcgaagcgttcaaggagcgaggcacagatgaccggcaccagttccggtttatcgtctcgccggaagacgccgaacagctcgacgacctgcgcacctacacccggcacttgatggcgcgtatggaggccgacctgggctcgcggctggaatggatcgccgtcgatcactggaacaccgataacccgcacacgcatgtcgtcctgcgcggcaaggacgataccggcaaagacctcatcatttcccgcgactacatcgccgaggggatgcgccggcgggcgtcggaactggcgacggaatggctagggccgcgcaccgaactggagatgcagcgtgccgtgctgcgcgaggtggaacaggaacggtggacagggctggatcgcagcttgcagcgtgaggccggcgacgacggactggtgcgcgtggagcgctttgccgaaccccgactgcaacggcagcggcaagcgctgatcggccgcctgcaatgcttgcagcgcatgggcctggcagccgagcagcagctaggcacatgggccgtccatgccgaggccgagtcaacgctgcgagcgatgggcgagcgcggcgacatcatccgcaccatgcagcgggcgatgagcggcaagtcccgcgagctggcagtgttcgagcagggcagtgacggccgctcgcttgtcggccgcgttgccggcaaagggctggccgacgagctgtacgacaagggctacctgatcgtagatggcatcgatggcaaggcgcactatgtcgcgctgccgtctcgtgtcgaattggagcagtacccggccgacgccgtggtggaggtgaaagtcgcggcggacatgcgcacggccgaccgcaacatcgcggcgttggcagtcgatggcgtgtaccgcaccgatcatcacttggccgtcgcccaaggccaggccacgcccgaccgcgatccgcgcgaagtggtcgccgcgcatattcggcgactcgaagccttgcgccgtgccggcgtcgtggggcgcgaggccgagggtgtctggcgcatccccggcgacctggccgagcgtggccgccagtacgacgcccagcggctcggcggcggcctggcggtggaactgaaatcgcacctgcccatcgagcggcaggcccgcgtgatcggcgccacctggctcgaccagcagttggtcggcggcggcaaggagttgggcgacctaggctttggggctgaggtgaaggacgcgctgcgccagcgcgccgactttctggttgaacagggcctggccgagtatcgcgggcagcgcgtcgtgctcacacgcaacctgctggcgacgctgcgtgggcgcgagttgatgaaggtcgcgcaggacatagcaaccgaaaccgggctggagcatcgaccggtggccgatgggcagcgcgtggccggcatctatcgccgcagcgtcatgcttgccagcggacgctacgcgatgctcgatgatggcttggggttttcgttggtgccgtggaggccagtggtcgagcagcgattaggacggcagcttacggcgacggtacgcggcggcgctgtatcttgggagatcgggcggcagagaggaacgtcgatcacctga

SEQ ID NO: 511896 - DNA, 588 bp, Stenotrophomonas maltophilia
atgaagaccaatttgccatccagcaccacgccgcatcctcgctcgcgccgacgcgctcgcttcgtgctggtgggcctgtccgcctgcggcttcgctgcgctggcctggacgtctttcgtgtcgccgctgccgcgcctgacctacaacccgtccgacagcgtagcggtcggctggtatcgcatcgaaccattcgagccgcgcgccgtctcgctgcgacgtccgttgtccgtggacaacatcgtgctggtgccgttgccggacgccgtcgctgcgttggcagcgcaacgcggctacctgccgacgcacattccgctgctcaaacgtatcggtgcggtcgcaccgcagcaggtgtgcatcgtcggtcgcagcgtgcgcatcgacggcgtgccggtagcaaccgctctgcctgccgaccgcatgggccggccgctgccatcctggcagcagtgccgtcgtctcgaaccgggcgagctgttcctgttaagcgtgaccaatccggcgtcgttcgatagccgctatttcggaccgattgctgcatccgccgtgatcggtgttgctcatccggtctggctggagacacaccgatga

SEQ ID NO: 511897 - DNA, 534 bp, Stenotrophomonas maltophilia
atgaacgcatctgctctggcggccacggccgcgccgccaccgtcgctcgccgtgcttgccggccaggccggcgacgggccgctgacccgcgtatcgctcgcctacgttgaacaacgcatcaacctctatctgcgcttcggcgagccggcccgcattgtccggcgcgatcgctggcggcgtgtcgcggtattcctgccgggcgcgctgttctgccgcatccgctggcaagcgaatgactacggcacgattcgctggcagctcatggtgatgcaggcttgcacgccgctggacgcggcgcagcgcatgcccggcgtgttgcccggcgcgcgcctgttgctgcacgccgagggcgaacccgccgtgcgcgccgtgctgacgcagttcgacgccatcgaggcgctgggcatcgtgctcgccgacgtgtcgcccgcgtactggcacacgctcggcaacaggctcgctgcacgcttgccactaccggcgtacaccgccgagcggcacgccgcttggctggctgggaggtcgctgccatga

SEQ ID NO: 511898 - DNA, 759 bp, Stenotrophomonas maltophilia
atggctgatcgaagcgccgatgcttggtaccccaccgccgcgtacctgtacgtgctgcagctcgacggccctgcgctggcttgggaatacctgcgccgcaatcccgactaccggcgcgactggctgggccgtcgccgccagccggaggcggcacgagcttggggactgcgcctgctggaagacccagcactggatgcgcgcgacgcatatccggcctggttccctgactatggcagcgtgctccagctctacccggatgccgacccgccaccagaggcccacaccttcgagttctggcacgtccccggcaacaagcaattgatccacgacggcaagcgtctagtgctaacggcacgctggcccggctgctgcgtgcggcttgcacttgcgccgggcttggccgacggcatggcctacctctacgccatccgcgcgtgcgccgcgccttgcgcgagctaccgcacgatcacggccgaactggacaagctgtcgacagtgaacgcggcggccgtgcctgcggcagcggcccgctcgcggcccacgtcagccgcgctgctggaattgcacaccttgcaggcgctcgacgcgaccctcgcgggcgcgtccttgcgcgagattgccgaaggactgttcggtgccgaagccgtagccgccggctggtacgccgacggcggcctgcgctcgcgcgtgcgccgcctggtgcgccgcggccaatcgctgatgcgcggcggctaccgccgccttgcacagaccgattga

SEQ ID NO: 511899 - DNA, 2046 bp, Stenotrophomonas maltophilia
atgaacgccgttactaaaaccgaagccattgcactcgaaaccgccgcgccgctggaagtggccgacccgaccaagaacctgattctgattacgctgtcgcagttgttgccgcgccgttccaagcgcaacgtccgcacgaccccgcgccagtccatccccgaactggccgcgagcatcgcccgcgtcggcctgctgcaaaacctcatcgtcattctgtccgccgatggcgagcaatacgaagtcgtcgcaggcgaccgccgcctgaccgcgttgaagctgttggcgaagaagaagcgcatcgctgccgactgcgaagtgccgtgcctgctggtggccgacgcttcggcgcgtaccgtcagcctcgccgagaacgtgcagcgcgagaacatgcaccccgctgaccagttcgcggccttcgccgcgctggtcaaggaaggccgtcccatcgaagacattgccgccgacttcggcgtgtccccgctggtggtgcagcgccgtctcaagctcgccaacgtctcgccgcgcctgctggccgactaccgcgccggagccgccacgctggaacagttgatggccttgactgttaccgacgaccacgccgcacaggaggccgcgtactacggtgcgcccgaatggcagcgcggcgcatccgcgctgcgcgatcgcctgaccgagcgcgaaatcaccgcgacgcatccgctggtgcgtttcgtcgggctggacgcctacacgcaggcaggcggcggcatccgccgcgacctgttcgcggaaggcgatgccggaacctacctgaccgacgccgcgctgctggaaacactgctgcgtggcaggctggatgcgcaggccgaggacgtgcgcgccgagggctgggcgtgggtggaagccgtgccgaacatgagccacgccgaacgccagatgttccagaacgctccgcgccatcgccgcgagccgacgtcccgcgaagcccgccgcatcgcttcgctgcaaaaccgcctcgacaagctcgacgccgaactcgaagaagcttacgacgccgaggacgagggcaagaccgaggcgctggaaccgcgccgcgagcaggtggccgaggaactgcaagccatcgaggagggattgcgcgactatgccccggacgtgcgcgccgtggccggtgccatcgtcacgctcgaccgcgaaggtgaggccgtgattcatcgcggcctgttgcgcgaggccgaagcgaaggcgctgcggacactggaaaagctgcggcagggtttcagcgcggacgacggtgcgaacgacgaggaaggccacgacgacgaagcgccgaaggccgcgagcttgtccgaccggttggtgcagcggttgagcgcgcaccgcacggtggcgctgcaaatcgaagtcgcccggcatccgcgcgtcgcgctggccgcgctggtgcatggcatggtgcggacggtcttgcaggacggataccaccgcgagggcttgccgctcggcgtgagcctgaaagtgcaggatcggctggaaggcatggccccggacgtgtcggaatcggccgccgccttagcgctgcgcacgttgcaggaagtcgcgggcgaaaccttgccgcaggacagcgccgaactgttcaccgcgttgcaggcgaagtcgcaagacgagctggtgcgcctgctggccgtgtgcgtggcgtccacggtggacgtggtgatgcctcgcgcttcgcagcagcatcccggcgcggaactggcgcaggccgtggggctggacatggccgcatggtggaagccgaccgccgaaggctatttccgccatatcgccaagcccgcgatcctggccgccgtgaaccagtacgccccggcgcacgtcacccgcctgtcgaagttgaagaagggcgacattgccagcgaagccgaacggctggcggagggcaccggctggatgcccgtcgtgttccagatcgaccaccacaccgagccggaaagtgcgcccgaggcggaggacgaggcggatgcgccggacgatgccgccgaggtgaaagaagcgcacgtgctggccgcgtga

SEQ ID NO: 511900 - DNA, 837 bp, Stenotrophomonas maltophilia
gtgagcttcatccatcaaagtttgacgctgctggaagatgctggcatgtctatcggttatccaaatattcactggatcgcgcaggatggaaggcagtcgtcttttttttctgccatacaaggaaatcgaggcagcatcgagcaaaaccagcacttgaagctcgtgatgattttttcccttctcgatttccatgtggacaccatgcaccccggcatggaaggcaagtcctatcggcagaaatatgcggatcttccggtcagcggggattacgaccggatgctgcgtgagttgttcagagtggcgaaggtgatgcggaatgcgctcgtccacaatccatcgtctttcagcattgccaacaaacacgtcaacatcgactacacgcacggaaaaaccaacttccgtttggagatgtcattggaagcccttgcaggcttctatacctccatcgtcatgtatctcaagggggacatgggccgaggaaattacttccttggcatcatgcgttcgatctactcaaacatgcttcttggcatcaagttcttcaatgatgatttcggcaatacgctggaggcgccgtcttccggcatcaaaataaagtggcacacaaggttgattcactccaatccccaacaccaaatcagcgacgggcgcatccatatccttgctcccaacagagagttgcagccgtgggaaggattggatttccacattgcgcgaaatggcgatgacttcctgatcccgctagaagcactaggcgaagacctgtcgataagtgaactcgatctcattaataactggaagcgcgaaggccactttccgcggttaaagcacccttga

SEQ ID NO: 511901 - DNA, 3021 bp, Stenotrophomonas maltophilia
atggcgatcaaagcaatcttcgtaggcatcaacaagcatctcgatagctccatacccgaattgagcggagcgcgccgtgacgcgacagcgttgtgggcgttgttcaccgatacgatcgaaggcctgagtgcacgtctgctggtagacgaagccgcgacgcacacggaagtttcaagcgccatgctcggcaccttggctgcagcgagcaccgacgacgtggtggtcatcgcgttcgctgggcatggctctccagacggcaacttggtgctgttcgacacgaacgcgagtgacctcgcaggaacggccctctcgatggccggtttggcggatgccttcaaggcaacgaaggcccgtgccgtcctgtgtatccttgactgctgcttcagcggtcaagcgccggcgcgcgtgctggagacggcagctcgcccgcgcagtgcgttcgcgctcactggcatttacggtgagggacgcatcctcttagccgcctgcgcaaccaacgaatccgcatgggagcaaccgggcactgggcacgggctactcacgcatgcggtgatcgaggccctgaccggtgacgccggcgaatctgtcagcttccccgagatcgcgggcgagatcatccgactggcacgggtggaggccgagcgcatcagcgtcacgcaaacgcctgtgttcctgggcaatgttcagggcggtctgacgttcccggttctcaagcgcggcgacaactacgccgcggcctttcccgccagagccgtgcagcagatgtccggatcgttcgcggagttttccgcgcacggctttccgcccgagatcgtcgagcgatggtcatcagactttccgcaaggcctcaacacactgcagctcaaggcagtcaacgagttcggcgtactcagcggcaattccttgttggtcgttgcgccgacgagttcaggcaagacgatggtcggcgaggtggcggcgattcaagcagtcaccaccggcaagaaggcggcgttcctcttgccctatcgcgcgctggtcaacgaaaaattcgaggagttcaccgagcgctatgcggcggcaggactgcgcgtagcccgctgcagtggcgatgccactgacggcattgggcccgtgctggctgggcgctatgacctgggctttttcacctacgagacctttcttaacctcgccctcggctcaccacggcttctgacccagctcggtctggttgtgctagacgaggggcagttcatcaccgacccgcagcgcggcatcacggtcgaactgatcttctcgctgctcttgcgggcacgccagcggggtatcgagccacagctcgtgatcctgtcggcggtcatcggcaatctgaacagcttcgaccgctggctcggcgttccgctcctactgtcgcgcgagcggcccgtaccgttggtcgaaggcgtgctcgaccgccgcggaacattccagtacgtcgatgccgatggaagcacgaagaccgaggccttgctgccttcgcatcgcatcgtgcagcgccgggacaaacccagttcccaagacgtgatcgtgcctcttgcacagcaactggtgggacagggcgagaaactgctgatctttcgcaacatgcgtggcccagcccaaggttgcgcgaagtatctcgccaaagaactgggtctgccaccagcaaccgctgtcctcgacgttctgccgacccaggatctgaccggcgcctcacaggacttgcgggagtgcctaagcgggggcaccgcgtttcacaacaccaacttgctgcgggcggagcgtgaggccgttgagagagggtatcgcagcgccacgggtggcattcacgcgctggttgccacaacgactctggcggccggcatcaacacgccagcatcgacggtcgtgctcgcggagaacgagttcgtcggtgaagacggccggcaatttaccgtggccgagtacaagaatatggcgggtcgtgccggacggctgggcttcaacgagattggcaaggcaatcatcttggcggaaacgccaatggaacgtgcgcagctttttcagcgctacgtgctgggcgtgcctgaggacgtgaagtcctcctttcagcaacgcgacctgccgacatggacgttgcgcttgcttagccaggtgcgcggcgttcgcgccaatgagattccggggttgctggtcaacacgttcggaggatattcggcgtcgcgcgcgaatccgcaatgggtcgcgatggtggagcgggacgtaaccacgctggttgatcgcctcctgcaggcgggactggccgagcgcgaaggcgatctcattcacttgacgctgctcgggcgcgcctgcggctcctcgtccttgtcgttcgagtcgagcttgcgcctggtcgagttgatgggacacctgaacgtagcgctgacgccgcccggccacatcctcgcgatggtgcaggtgttggatgaattggacgccatctacacgccagtcatgaagaaaggccaatcggagagcgtgcgcgctggcgaggcatcgcagcgcttcgggcatcagatgcctcaaatgctgcagcggtattgccgcgaccagatcgagttctgggctcgctgcaagcgcgcggcgctgcttcatgactggatcgagggaacgcccgttgacgtgctggagaagcgctactccaccacgccatttggcggggccatcggctacggaaacatcatcggcattgccgatgcgacgcgctttcacttgcgctccgcgcatcagattctcgcaacgctcttccctgatcaacctgatttcctcaaggacttggacgagattcttcagcggctcgaattcgggctgccctccgcggccctgcccctcatgaaggtttcggtgcggctgacacgcggccaatgcctggaattgctgtccatcggtgttcgcaacgaagatgacctgaaaaatctggacgaagaccggcttcgccgctgcgtgggggcaggcacagccacactattgcgcccgaggagtgatgcggctggcgttgctggatga

SEQ ID NO: 511902 - DNA, 372 bp, Stenotrophomonas maltophilia
gtgaaacagctaccgcaagcatttaacacggatggcatcgacgccgatcagtccctcccgttgccgggaacagaagcctacgagtcgctgccgcagttccccaaacgcagcgctcttcccttccgccgcaccatccgccgaaaggagctgcgtcagatcgtccccttggcagaaacgacgatctacgaaatggagcgccgcggcgagttcccacgtcgcttcaacctgaccccgcgctgcgtcgtgtgggacctggccgaagtggaagcgtggatcgagcagcgcaagcaaacccctcgcgccggcaccccgaagccggatgtccacctgcgaaaaactcgccctgtccggacggattcgggcgaggaatga

SEQ ID NO: 511903 - DNA, 162 bp, Stenotrophomonas maltophilia
atgccgggaaagccgcataaaacaagctttcccgaggagacctttaccgtcaaagacgggtttggtctggatagtgaacgggacggtcttaatctggccctcagttcttaccgccagatccaccgccaacctgttctgctggccggcgatagctaccgatag

SEQ ID NO: 511904 - DNA, 366 bp, Stenotrophomonas maltophilia
atgaacgagcccatcctgctcccccgcgacatcgcccacgacgcccgcgactggtctgacctgcagcgggcggtggccctgctggaagcgccgaccctcaccgcgcgcatggccaatctggtcggcacgccgctggagttcgcggtgaaggcgctgcccaaggcggtctccggccgcatacacggtgcggtgcaggcggcgctgtccaagtccgctcaggcggcgctgtggagcatggacaactcgccgggcaagggagcgtcgacccgttggcacaagctggcggcagccacctcggggcggtcggcggggcctttggtttcgcggccttgttcatcgaactgccggtgtcgaccaccatcatga

SEQ ID NO: 511905 - DNA, 237 bp, Stenotrophomonas maltophilia
atgcccatggagggcgaccaacggagttatggcatgaagattggattcaagctttctgttgctgttgcggcctgtgcgttgacctttggaatcggcaacgccacggcgaaagcccccggcccttgttccgtctgcgaggtccaatacattgcatgcgaggcgtcaggtacagacttgagtatctgtacccggaactatatgcaatgcttccgtctgaacggctgcattatcccgtag

SEQ ID NO: 511906 - DNA, 165 bp, Stenotrophomonas maltophilia
atgaggttgccggccagcggccggcactacctgtcggagggcgtgcggatgctggcgctggagatctgggccgcgcagctgtttgggtggatgcggcaggcggtgccccgcgtggtagtgccggccgctggccggcagctgcaggttcctgcagaaggttcatga

SEQ ID NO: 511907 - DNA, 1164 bp, Stenotrophomonas maltophilia
atggaagtaattgccagtagttttgatcggttggtggagcggggctggcacccacgggatcagcttacggttgtggctggcgagaatggttgcgggaagagtcagcttcttcgcagtatcgctctagattaccttcggcaaggcagcaaggtagtagcgctagctggttcagtgcacgacaaattcaaaggcctagatataggagggcgtcactttgctccgaatcgggcggaatctgagccggaaacggtagttaagaatgcaatcgtcgagttccagcgtcgagacaagatccagcttcggacgctgtctcggctccttcagtattgccggttcgacccggtcgtgggtgttcgtgtcaatctggatcgggatgcactctacaaaatggatgtgcgtcgactcgtcgacagcttgcaattggattggccggaaagtgaggacctgcacgcactagtcaatgtcctccattccggacggttcgggcaagaaacatactgggtggactttgacgcccgcgggtatgaattctcgagcgatcggttgcttgcaagcctggttgcaatggaacgacatctcgtcaagctcggtttgataagagggatatctctatcactccggaggcaacggaatgaaattccgctaaaggatgcaagctctggtgaactatccctgattgcatccttggtatttatatcgtccatgatccggggtgcagatctagtactgatcgatgagccagaaaacagcctgcacccgcgctggcaacgtgactacctcgacttggtctcagccgccatgggctacaacgaggcgcgtgtcattattgcaactcactcgccaatacttgtgcttgccacccttggccgaacggtatcgacgaaagttctcgtgctttcagataccttcgaagagaaggtcgaactcgaagcgtccagcctggagcaggtcttggcggaggtgtttcacgcctatacgcctaggaatagctacctaagtgctacattggtcgagttgatgaacaaatacgaggaaggaaggatttctttggaagacgttgcgcgaaggctgcaggcaatcaaggaatccggtattgatgatcgccagctggacgccctacaggctgtatggacggttgtggagcaaggcagggaacgcttgtga

SEQ ID NO: 511908 - DNA, 648 bp, Stenotrophomonas maltophilia
atggacggttgtggagcaaggcagggaacgcttgtgaactggtacgaactcgaattcaccatctctgagacgatgctgattgaatctgcatggagcgacgggacgcttgattggaactcgaaggcgctcctccctgttagatcaaggatcaggggattccatcgcgtaatccaaaatgaaaagtgctgctactgcagaaaatggtttgcggatgatcacgccttggcagtggatatagagcatgtgctcccaaaatcaaggtacaggtctcttgcgattaagcctataaatttaagcgttgcctgcaagagatgtaatatgcacatcaagaaggatagggttgacttcattgtgggtgcattaaatttttcatcggatgaggacatcgcaacctcttccaggtattcgatcgtccatccaaatatcgatgtttaccgggaccacattgatccgatctttgtcatatctgaaagtgggacgtttgtgcgctatacgattcaaaataactcccgcaaaggagctggaaccgtggagtactttgagcttagggcgctagagcgcgacacgctgaatcaaattcaaggtctttcagacgttactgctgacgacaaagcaatcgagttgcgccgaattctgggcgttgcttag

SEQ ID NO: 511909 - DNA, 2019 bp, Stenotrophomonas maltophilia
atgacagaggaagttgaagtcagagtccgatccaatggacgagttatcgcaactataactaggtctcagcagatcgttgatgggcgtatcgcagtgtcctacagggggcacctttggcctgtggaatcgggttctattgaggttggtgtcagcagtgaaggccgcctcgacgaatgcagaggtggcaaccaagcagaaggcatgcgtctcgccaataccctcgatgccctgacccaggagtcgagcgagctgccctctagccccacgacttgggagtttgatcccatcccccacgcggcggatgcacgcgtcatagtcgatgccggtcctgggacggggaagacccacgccgcttgtgctcgtgtggcaaaactcgtcgctggcggcataccggctacgcggatcatgttagtgagctttacccgaactgccgtagtggagattagaaataggattggacttgcgctagcgagtgtcggaggcgctgctggtgtccgaatcatcacgctcgactcatacgcttgggctgttcagtctgggtactctggcaatgcaaagctcactagcggattcgatcacaatatcgagtgcgcaagggacctgatcgccaatgacgatgacgtggtggatgatctccagaagctcgcgcatctcatcattgatgaggcgcaggacattgtcgggccgcgcgcggatcttctagttgaacttgttaatgccatttcaccggattgcggtgtaactgtgtttgccgatcgggcgcaagcgatctacgagttcgcagaaagcaaaggtagggagcatcctggaggtctgctcgacagacttcagggctttgggtttcaagttgaaaagctgacaaaagtccatagaaccactcaagctaatctcattaaaatatttacggatgtgcgtgaggacctgctgagtgggactattcggtcaagcgaggtacatattcgaggagagatagttcgcctcgcccatggggacgtgggtgcttccaaggatctggatctctccaaggtccgcagtgatgctctcgttctgatgcggagcaggtatgaggtactggaagcgtcgagtcgcagtgggaatcttgcgcatcgcctccggacaaccgggttgccaatctgtgtacggccgtgggtaggacagctgttctgggactatagccagcgccggattactcgacctgagttcgagaagcgttggttagatcgaggagttcaatccgctgtcagttgcgacgaggcttgggcccattgcgtgagtgttgcgggcgattccgaggccgtcgtggacttgcacgcacttaggactgccttagcgaggcgaaacccgcctatgatcttctgtacgccagagtttggctcagccgggcccgttattggaactattcatgcgagtaaggggcgagagtcgccaaccgtccagttgtatcttcagagcgctacgagcgaagttgcttccagcgaggaggcgagggtgatgttcgtgggggcaacgcgcgcccgtgagcaacttctagttggaagttcaggagagagctttgctcaatccaccaacaacagggtgtggagacggacgggaaaattgatccatcttgaaataggcaggccgggtgatcttgatccatctgggctcgttgggaggcccttcttcaataagcaggaagaagcctatgaatctcagtgcacatggatagcgcagccctacatgcaagatcttacctttgggttgagctgcgaacttggatggagatttgtgattggtctaaacggccgacgtatgggcggaatgagcgaggctttcaagagtgatgtgtattgcattgagaggtttaccaaaaagcgaattacagggctatcgcgcggtagatcactcggcgctcgcacaatggcagtggcaccagatagcccgttgctagagtcaatgctggaaccatggaggtccagtggatttctcttcgcgccattgctctcctctctttcagtcgcaactttgagggaccgctga

SEQ ID NO: 511910 - DNA, 3087 bp, Stenotrophomonas maltophilia
atgagcgcgcgcgaaaagatcacctcgcgtctgtacgaagatctcgttggtcctatggacgtagccgagatactggatgcccggccttccgacgtgtacctgacgggaattctttggccgcagaatacatcccttcctccggaccaagatgagcgcctcgccctagctgggggaagtgaggaggtagagcagatctcggaagaattggtccagattcaagcatcaaacatgcgtaggccgtcgtcagcgggcctttcctttgcatgttgcactgagcaaacatctccttccgtagtcgttgaagttcgctgtgcaaggtatgagcccaaggatgatgaggaaggacggtggattcgcattaatctccagcctataggggttcctgttgagctgtctggcggacattttgatgtgaagctccctctgccgggcactgaaggggttaggttgaacgttaagtccgtcagcttcccaggcggaatgctcgcaacggtgactcttgtgaacggctcaacgccagagccaggcaggcaagccgctgagcgcgccacactgttccagaccgggctatcagtccggccgtccccgggtactcatctgatttcacgccctagtcgcaagtccatagtggacatggatgatgagtcaaatgccctgctgtttcgccacgctcgcgagttcgcgaccggacacacgtgctcagctgagtgggacgtctcggaagatggggacgctgatgagatcagtgaagtaaggactgcttggattccaagggcaactacgccagctactagtgccggaggatcttgtcatttctaccgtttgggagcgcgcggatcactcgatgcagctactttggccagtagctcaacatcagaattggcggctcacttaggtgagctctgcgactcctatgccgcttggttggagagccagaaggcgcttatggtaagcattcctgacctgctgaatgacgtagcgcgcaggcacttggtggaagtcgagtcagtactgggacgaatgaggtccggcatcgaaagaatcatttcggacgagaaagttgcggatgcttttcgtctggccaaccttgctatggacacgcaacggcgttggaatgatgggccgctgagatggaggccatttcagcttggtttcctgttgctcgcgatggagtcaactatcgatcccttgcatccagatcgtgatgtcatggatctactatggttcccaaccggcggtggcaaaacggaggcgtatcttggtcttgtgtccatgactgccttttatcggcggatggtgggtgaagatcctgatgacggtgatggtgttgcctgcctcatgcgctatacgctgcgcctactcactacgcagcagttctcgcgggcggcaagtactatctgtgcgtgcgaggccatccgacgagggctggtgccatcctctttcagtggtcgattgggtcaggttccattttcacttgggttgtgggttggtggtgatgcaacacctaacacccgcgctgctgctttcgacaacggatccgatccattcaagccaacggcgaatcagttgactcactgcccgtgctgccaagctgggctgcattactcgcaaaggagtgaaagggatgaggtttctgtatggtgccgtaacgccgattgtctgctctccggctcgccaattccggtctacactgtagacgaggacatatacgcccggcggcccaccatgctcctagggaccgtagataagtttgcgcagatcgtaaggaaggcggaatccggtgtgctcctcggtgccggggcaaaaatgcggccgcagctggtcctccaagacgaactccatcttattgcgggtccactcggaacgctgaccggtctttacgaaacggcaattgatctgattctgtcatcctgtggcaatcggccaaagattgtcggctcgactgcgacgattcggagggctcaggagcaggtccaagctcttttcgatcggaaaacctgtcagtttccccctcctgggctgagtgcgcaagattctggattcgccgtagtggatatggacggcgcgggacgacgctacgtaggagtgactactgccggaagatcggcgaaattcacattgcaggcggtggctgcatcattgctcaatggagcttacagcgcgatcacgagcgaggaaggtgatccctactggacgctacttgcctacttcaactcccttcgtgagcttggcggcgcattggttctaatgcaggacgacgtctctgatactttggcactactagcgagtagaagggcaagctcggcgagaaagctttctgaaattgaggagcttacctctcgacgctctcaggcagacattcgagacatgttaagtaagttgtcggtgtcgatggatgagcctggctccgtggatgtggtccttgcgacgaacatggttagtgtcggcgtcgatataccaaggcttggcttgatgcttgtgaacggtcaacccaagaccatggccgagtacattcaggccacgagtagagtcggtcgtggcaaggtcgctgggttggttgtagtacttcttaacaatgcaaagcccagagaccggtctcacttcgagacgttcactacttggcactcaagtctctatcgattcgttgaggctacaagtgctacgccctacgcctctcgtgctagggaccgcgcgctacatgctgtgctagttgcggtcgtccgccaccttgtacccgggatgctagatagcccaagttggaacgatgatcgggtagcaatggctaggcagctggtggaagcaatcgtcatgcgtgcaagtagggttgacccagacgaggtggacgtccgagccgaactcaatagaaagctcgacagttggatccggagggctccagatagctactgggcgaaagctggcgtcagaaggatggcgctcatgcaaggggccgaggaggcggccgcgaagcgcgctgctgggaagtcaatcggacagtcttggccaacacccaactctatgcggggcgtggagccagcgactccattcaggcttgtcaataggttgaagaatcgaaatgtccaggaatga

SEQ ID NO: 511911 - DNA, 1824 bp, Stenotrophomonas maltophilia
atgtccaggaatgaattaggaaaggtgcgaaggagcgcagttgcgtctctttttgggccaggggcggttgttgacttccgcgcgggtgacgctcccatctccgctgtgacggccggtcttgaagagtgggatggtaactttccaccagctggaatgcgcaacgagcagacggtacttgaggctaggctccaaaagaagctgggtgtaaagggatttcggctgccaccagtctccgttgacgacttcaataggggagaaggaagggcgttagtcgcagtgcgcttcccggtctggctgcagtgtcctcaatgtagtcgccttgctgaaagcaagcactggggggatgaggaaggtcggccaggtgctttctgcccccaatgtactcaacgcatgccaagacagagaaaggtgtatgtagttccagttcgatttgtcatggcgtgcgaagccgggcaccttgatgagtttccatggcacagctgggtccggcacgcggatggatgtcaaaaacgggactttctgagtctggtgtctgagcgcgcaggcctcgcagggctcattctgagttgcacaggatgcaactcgcgtcgctctatggatagagtgttctctgaggagacatgggcatccttcccgaactgtagggggcgccgaccttggctaacgggcgccgatgagagatgtgagcacaaggcgagggcggtgcagcgcggtgcctcaaatctgtacttccccgtcgtcgtgtccgcgctcagcatcccaccttggtcagaccagttacaggaatccctaggtgtgcattgggatcagttcgtcaatgtcgaagccgaggatcgcgcaactcttgttcgcatactcgcgcgaaccgaactgaagcctgtgttagacgacttgggactgaccccagaagagtttcttgctcagctcaatcgtcgacttggagcgcacgaagatattgactgcgatgaccttagagctgaggagtatcggcaatttacgagcgggatcgctgatcatggtcaaggtcgtgagtttgagatgcgtcctcaaggagtgcctagttccgtactgccatggttctctcacgtggttaaagtcgtacgcctacgtgaagttagcgcacttacgggattcaccagaatacacgccccgggcgatccggattcccccaatgtggctcccatatccgcgaggcgattggattggttgcctgcaattgaagttaggggggaaggcatcttcttggatcttgacactcctctacttcgggattgggaggcattgcctagtgtcgtcgagcgagctcgcctgattgacactaggaaccgacaagactggatatcccgttacggggcggattcagtgccacgagaagcgacgcctcgtcttgtattggtacatacgttcgcacatgctctcatgcgtcaacttactttagattgcggatactcttcaaccgcgctcaaggaacgtctctacgttgacgcgggcgagtccccaatggcaggaatccttatatacacggctaccgctgatgacgatggaagtcttggtgggttgcagcgtgagggggctacaaggcgaatcgaaaggacgataatttcggccataaaggctcaagcgtggtgctcttcagatcctttgtgtatcgaggatctccttgctgacccagccggtgcttctcttgcggcttgccatgcctgtgtaatagcaccagagacctcttgcgaggagttcaatagatacttagacagggcgcttttagtgggaactccaagtcaaccttctctcggctactttgcaaaagttctggagttccaatga

SEQ ID NO: 511912 - DNA, 1629 bp, Stenotrophomonas maltophilia
atgaaatcagggacgatgtggccgcgacagcttcctgctgcaatccgatctgagtctcgtcgcgcagcagaagttaaggtctacgatgccctctctgagcaactgcctccgggttgggccgcctactactctaggccttggcatggagagacttcgactggggcggaaattgacggagagtgtgatttcatcgtggcgcatgcaagccacggtgtcttgttcattgaagtgaaaggtgggtctatcagctacgatccggaactggatcaatggcatagcgtagatcggtacaagataaagcatcggatcaagaatcctcttaagcaggcgatagatagcaagtaccagttactcgcgaaggcgaaggctcagcgtggctggcccaaaggacacatcagattcaggcacgctgtgatcttccccgatgttggcacagtccctgcgcatctaggggcagacaagccgcgggagctcattgcgacaagatctgatatgcagaagcttggcgaatgggttgtacagcggctctctggtggcgatgaagaccccctcggtcggcacggactgaaagtgatagatgacttggtcgcccatccgatccaactccgcgtcccttttggtcacattgcggcagatgatgatgaggccatcgataatctcacacctcaacagttccacatcctgacagcgatacaagatctcaatagagtggcgatctctggcggtgcgggcacgggtaaaaccgttctcgcgtgcgaggatgccagacgtcacgccgaacagggagtgcgtacgctactgacatgcggatcgggcgcgctcgcggaacacctgagggtaaagctcgaaggtacatacgtggaggtggcaacattctccaacgtatgccggaaaatggctgtccaggccggactcatcacaagtgagggagattcatcgaagtcggatttgcctgagctgcttttctatgcgctaacgaaatgccctgaactcgcgtatgatgtagtaatcgtggacgaggcccaagattttccgagtgtgacatgggactcaatcgccgcgcttgttagctcgtctgatacaagctccctccatgtctactttgacagcaatcaaaagatatatggagatcttcgagggcattttgattcctacacacttctgccgattcggcttagtcgaaacttgcggaacacgcagaatgttcacgatgccgcacaactcttctacagggggccacacttaactgcagatgggccggagggttcgcaagtacgatggattgaggtggaggacagcattgcgcaggaaaggctagtagatgaagtacggaagcttgtttacacagatgaggtctctcccgcggacattgcggtgttgactgtaaacagggattctttgctagcgatcgcgacatctcttagggacttcgcccgcacgggattatccatttccacaatttctgattttaaggggttggagagcagattcgtcatccttatcgcctccagagtactatccgatgcgccagagcttgcatatgtagccctgtcacgagccagggtgcatctttcagtactcggctcggctgagattttgcactggctgaggatggagggaatcgactga

SEQ ID NO: 511913 - DNA, 1971 bp, Stenotrophomonas maltophilia
atgacgtttgcgcctttcgatccccttgaattcaagaatacacgagtgaatgacgctgctcttggtgcgctgaagcgggagatcggcaatattctgagctcgtacgttgggtggtatgatccgttctgcgagctaatccagaactcgcttgatgcagtggaggcacggcaagcaattgagagatcgtcgggcacggaagaacagtacgcttcaaggatcttcgtctcgatcgatttggatgagaattctctctcggtcacggacaatggaaccggactcgataaggataagttcgagcagttccttgcgccaaatttctcgtttaagtcagggaatacccggggacataagggagtcggtgcgacttacgttgcctatggattcaactacatgcgcgtgaccacgaagtctcccggattctccgcttctgggcgaattaccggggcgcgcagatggctcgctgaggggcagtcgggagcgaatccaaaggtcgagccagatgactcgccgctcggcgaacttgatatggctgaaattgaccgcggtgttagcattacggttcgttttgatgacagcacacatcccaagaagttggcctggctcggtgcgagcactgcggatgtatggctaaagattctttccgtcaagactggcatcggttcagttaaggccgatccgtctatccagatagtcgtaaaagtgaaaagcggtggggagtggacgcgagccgtgggagtgggcaccggctatctttggttgcatccccctgctgcgaagaaggcgagactccgagacattaatgaagaagcgacgaagagctttgcaaggtacgggaattcaaagcgccctcccgatcgctacaacagcctagacttcatatatgagaactggtcctcggacgaacttcgcgagcttctgaatgaccatttggatgatgaagagcggtctgtgctggataaacacaatccaaccatttctgtcgagtttggctacacagccaagctgtggaaccagtttaacgagaagttgggaattcgtgcacggcacaccattctgggcgcggggatacagcttgcggcgaacaacatgcctcagggtgaagttatccagatcccgctcaatcgctacattgggcggcagaaccagatccactttctgattcatttcgataactatactccggacctgggaagaaagggatttcacagggagctcgtagattttgctaagaccgccgctaggctcatcactgaacgtgagttgtccaagtatcgcgatcgcctgcgggcaaatacgggcgtggcaccgaatatgctccgtgagatgctgatcgacgattggaagaaggacatgcttgctcatgaggaggcagcgcctatagtgctaaatagcaagcacttcttccacccaactgagaaggtgtctatcacctcgtctcctacgcgtgagcaggacgtcatcgcactctttcaccaacttcttgcgggcggggtgattcgtggcatgtatgcaatgtcaacgaatgagcggttcacatatgacggattgttcaagattgcttttgatctggatccatcgatctacatctttgacgccgagaacaacccactgggcgtttcggagggagttgccaaggccttccatgggcgggtcacgcctcctcgcatacttgagtataaattcagtctcaatggactaattgaggactttgatagccaggataagaacataagggatgtagatctgtgcatagcatggtgcacgggggaccagtaccgtgatcggtatggaataacctcgctgctaattcctgaaaatgcagatcagcgcgagtaccacggcgtcactcatgttcttacggacgttgagacgggctccaagtactgcggcctcataatcatcgaagagctgatcgaatacttgaacgaacccgaggaatctgcgagaaggcaacgcgtcaagtacgactga

SEQ ID NO: 511914 - DNA, 495 bp, Stenotrophomonas maltophilia
atgaccgatcgcagcactccggcacaacgtagtttcaacatgagtcggattcggagaggcgacaccgagcccgagatgctgctgagaagagccctccattcacttggatttagatatgcactgcacaagagagacctcccagggtcgccggacattgccctagcaaagtaccgaactgtaatcttcgttcatggctgcttctggcacgggcacaagtgctaccgagccaagattccctcgacgagaacagatttctggactaagaagatcgagggcaaccgtgcccgagatgaacgggtcgaagggatgctcactgcgctggggtggcgagtcatcgtcgtatgggaatgcgccctccgaggcagtagaaagatcggacctcgcgaggccgccgagcgatgtgcaacattcctccgctccgccgaagtcaccaaggtcgagatttcgatgcactcagtcgagccttcggcgagcctgatggggaaagaagcatga

SEQ ID NO: 511915 - DNA, 1500 bp, Stenotrophomonas maltophilia
atgaacactgacgtcatccttcgtaagctagagcgcatcgccgcgggcggtaagcctcgtgtgcttgatctgttcgctggctgcgggggcatttctctgggctttgagtcagccggcttcgagctccgcgccgcggttgagttcgacgccgatgctgctagatcgcatggcttgaacttccatggtggtgcagaggctcacagcaagccaattgatatcaccaagaccacaccagccgagctctgcatgcagctcgggcttgggagcatcgctgacgcgtttgacatcgtcgtcgggggcccgccatgccaagcgttcgctcgcgtcggccgctcaaagctgcgcgagatcgaagagcaccctgaggccttcattcacgatccgcgagctcaactctataagaagtaccttgagtacgtagatgcgttccagcccgtcgcggttctgatggagaatgtgcccgacatgctgaaccatggcgggcagaacatcgctgaagaaacctgtgaggtgctggagtcgaagggctatacctgcgggtacacacttctcaatgcggcgttctatggcgttccgcagatgcgtgagcgtatgttcctgatggcatacaggcgcgaactcaatgcgaccgtgtccttccccaagccgacccactatcttgtcttgccgccaggctatgagggttcgcgctctgtcgcactgaagacgttgcgcaatctctttgacggggctcattcatacattgctcctccggcggcctcacctgaccttccacctgccgtcaccgcggcagacgccttggcagatatgccaagtatcaatgcacgtgagcttcttgcgcagggaaagattgtgcgtggcgcgcgtcgctttgacactccgattccctatggcaagaggaagcccactgcttacggtgcactgatgcgctcttgggaggggcatgaagccccaaagcaaggcatctccgaccacgtgattcggtacctaccgagggactacgagctgtttgcgagaatgaatcctggggatcagtatcctgaggcttacgcgcacgcgctcgagatgttccaggagaagttggaggcagcccgtgctcgaggcgaaaggctgggagagaagtcagcggcctacaaggctctctgggattctgtggttccgccttacgacgctaccaagttcccgaacaagtggcgcaagatgtgggcggatcagcctgcgcgcacgttgatggcgcacttggggaaggacagctatagccacatccactacgatagcagtcaggctcgcaccatatcggttcgcgaggcagctcgactgcagtccttcccagatggcttcagattcagcggcactatgaatcctgcgttcaagcaaatcggcaatgctgtccctcctctactagcaaaggcaattgcgtctgagatgattggtactctcatgagttccgtctccgcgaattgcggcctgcccgctcaggctgagcgggtcggcacttag

SEQ ID NO: 511916 - DNA, 1134 bp, Stenotrophomonas maltophilia
atggcccgcaagctagccctcaagcgtctcaccgcttcagatttgactgttttccgctggcatttcaccaatcgacccgccggcaatcaaaaggcgatcaacctggacagaagcgtcttggtggacagcctgttccccgagctggccaaaccgggggcggtgcccaaccctcggtacaacctcgagctcaagatctctggccctggggcctgcgcgcctcacaccttggtccgcaagatccttaagcagcagaagaactggaggctcaacggcgagttcatcgatggaccgatcgatgatccgcataggtacaactaccttgcagctgacgactttgccttctttgagttccgcggcgatcaagtgccagaggctatccatatgctgctggtttcggcagccgatccacaggacgcgcagctccatcaagccctcagtcagatctttgtgaccggctctatgcgcgtcatagatgagcacttcattcatgatgtattggagcggagtggagctgctggccgacatgcgctgtctgactgggcagagggcgcattgcttgaagagatcgggctcgggagcgcggctgccaccctcaagctctacaagcgtggtaataggcgtggactcactccggaggagtttcttgagattcgaggccgtgcgcagtcaacggggatctctggagaacggtacctcaacgactggctgctggaccggcagcgaaagggagagtgctatgacgttgagtggacatcaagcacaaatgcgattgcgccattcgacttccgactcaaagtgcccccgtatggtgtcgaacgcaggatggacgcgaagtcgaccactggcgaatttgaaaccccgctgcatatgtcgcgcgcggagatcactgaggcagtgcgaggtggtgtgtactacgacatatatcgtctctatcggctgtcagaggatggggcggagatgcgggctgcatacgatgttgggcctgccttggcccctatactggaagcgctcgaagaccttccgcttggcatctcggtagattcggtttctatcagtccgcgaattcttcagttcacctcagacgtccactatccgcggaactcggagctggacgacgatgaagtaagtctctga

SEQ ID NO: 511917 - DNA, 1302 bp, Stenotrophomonas maltophilia
atggcctatgacgtcgaaatatgcaccgcacgtgcaatcgcttcagaagcgacagtgaccgcgcgtgcgcgaggcgtacccttacccgagggcttctgctttctggtcagcaggtacgatggaacaatcgttcagcccgcctttgaattctttgcagactcccatctaaccatcggcccaaagccaaagcttacctgcagcaaaaacacgacagcagcaatcgcggctgatctcaccgacttccaccactttctggacgcaagaaaaaagcgcgtctcggacgtagatgaggatctcctcaaatcctacgcggacaccttgactgagctggactcagtggtgaccttagataagcttgcggccgcgaccatccatcgaagatggtcgaccgtgaccaagctagtcgccttctgcgtcaaacggggctacctcaaaaagccgccagcgctactgagcaagcagacaaggcgaggaactattcaagttctagacgttgacgtcgatctgcccgggctgaaagacgtcgacgaactcattactgcgctccaccccgagaccgtggtcggcattcttgacgaactaggtcccaaccctctgctcgaacgaagtggcctagttgaattggcgcccgcgaccacggcgcagcgattgatggctgagctgtgctaccacgccggattgaggcggacagaagtgtgcgatctgcaagttcacaccatccttgcgacccttacggaaggtcgcgatccacttactgctgtggctatccccgtcatcgggaaaggcaacaagaagcgccatgttccggttccagtttggctactcgaggcgctgaagcgctacgccaaatctgttcggcagcgtctggttgatctacgacaggcgtattacaagcaaaaggaccacggcggcctcttcgtcctagacgcaaacaaccgcaagcatgtgggcaatccgataacgccgcagatcttcgaccgccacttcgccctcgccagggacaggctgctcaaacggctttccaaccagcccgacctagctcgctatgaatcagcccagcgcgagcgcatcaccatccacgcccttcgacacaccttcgccttgtacacgtacatggagaagcgcgcaaacggtgacatggatgcgatcaagtatgttcagtcagtgctgggacacagcctcagggatacgaccgagtccatctacctgagaagcgcaaacgctttcgagagcgaaaccagggagtcgatcaggctgcaccttgaaggtctaccgtttatgcgaatcggcgtaggggcctga

SEQ ID NO: 511918 - DNA, 288 bp, Stenotrophomonas maltophilia
atgtcaaagcgtaggaagttcagtgccgagttcaagcgcggtgcggttgagcaggcgagccagcccggcatcagctgcgcccaggtggcccgggagctgggaattcgcgacagtctgctgacccgctggaagcgcgaggtgcagaatccggaagctgccgctttcggcggcaccggaacgccacgggacgaagagctggctcgactcaagcgtgagttggcgcgagtgaagaaggaacgggattttttgcgagaagcggcgacgttctttgcaaagggatcatcctga

SEQ ID NO: 511919 - DNA, 861 bp, Stenotrophomonas maltophilia
gtgatcgaacgttgccgcgatgagtttccgatccggctgatgtgccgttgcctgaaggtatcggccagcggctactacgagtggagcaagcgccctgcgagcgcccggcaggtcgacaatgagcgcctggtggtaaggatgcgcgaactgcatgaagacagccgcggtacgttgggggctggtcgcatgcgcgaagacctggctgatgagggcgaaagcgccagcttgaaccgggtcgcgcgcctgatggcggccgatggcctgcagggctggccccggcggaagcatcgcgggaagcgtggcaggccggccgtaacgccgcccggcgtggtcaacctgcttgaacgcgattttctcgcgctggagccggaaaccaagtgggtcacggacatcaccgagatcaagacccagcagggcaagctgtatctgtgcatcttgctggatctgtacgaccagcgcattgtgggctggtcaatgcacgctcggcaggaccgtcagatggtgatccgggctgtgcagatggcggtctggcagcggcaaggacgcgatgaggtgatcctgcattcggatcgtggcagtcagttccgcagcggtgactaccaagggtatctcgcggccaacgggctgatctgctcaatgagcgctgttgggcattgcggcgataacgcggcctgcgaaggcttttttggactgctgaagcgcgagcgtgtctatcgaacgagctaccccacactggatgcagcaagagcggatgtgtttgactacatcgagcgacgccacaacccaaggatgcggcgaagggtcgccaggcaggatcagaaggttgcggctcttttagaaccgtccgtgatatcggggtag

SEQ ID NO: 511920 - DNA, 789 bp, Stenotrophomonas maltophilia
atggccgtccagaacaatgcaatgcaaaagatcctcaacaaagcgcttggtgatccgcgcacctccgatctgctggaccacatccgacggcagatcccaatcaattacgagtggaacgatgacgctttctggggcgcgcacttcgagaatgggggtgctgtcatcactgtggcgcaaacgggataccccagcgcggcgcttgttcacgaactgctgcacattgatttgcagctcaagggctaccgacgccccagcggctttctttccgacattgtcgacctagccactttcaaacgcttgatgacctgcctcgacaacgagctgcaacatcagcgcatgttcgcccctttttgttccatgaattttcgcagcaatcaattttatgcggatagcgacgtaggtacgcacaggttcctcttgaacgagctcgcgaaggcgcaaggtcgcatcgaacgtgctattcatttcttcaccctcattgcgccgggcggcgccatgagtgaaagcggccgcaaccagttgcgccagaaattccggactgtcgacggcggcctacacgaaccagtgtggatcgcaattgaggccatagtggagcgctggaagaatgataccagcttcgatgtcactccctatttgaaagaaattttgctgaccctcgcaccgaccacaatcaccaaacctcatagatcttggatcaccttcgatccggcgacggatggaaaactcgcatttcctggcgcgggagagtttgtggaaggagacttcacgcttgaagatttgaaagtgtag

SEQ ID NO: 511921 - DNA, 624 bp, Stenotrophomonas maltophilia
atgagcgattctctacagccaaacccagatggattcgcagccgaccccttcggatacagcgtactcgcttggcacaaatggggcttgctcgcgacagcaaatggatttcctgtggacatttccaagccgccaaccattgctgatctaaagaaccccgtcctttggcttagccatgcaaatgcactatctgaggcagcggttcaattggttaggaatccgccgagctttgacagcttcccgaaagaactcagaacaatctgtcacagccagtatcacgcggtggcattgatgatcgttggctacagccttgaagtttgcctcaaagcaatgattctgctcagaatcggggctgaagaatttataaggcaagagaaggagcatttccatcacaagctggaagagcttgccaacttcattcctgatcttggcgagaaggacaaagcaattctgaagggtctctcgcactttgtggtctgggctggtcgctaccccgaccctgggtcaaggcgcttaagcaatgccgttgacgtctttgacctctccgagaggtaccagataagtgcaaaggatctcttcgccctttccacgcgggtgatgaagcacgttcaaaaggtggtcaactag

SEQ ID NO: 511922 - DNA, 2229 bp, Stenotrophomonas maltophilia
atgacgagccatgtttttaggggaagcatgtttcggcggattgaatccatttctcaggctgcagtttgggacggttatgatggacgaacgagcccagcgcctgattttgctcgatacaacctcatttatggctggaacgcttccggcaagacaaccctttcccgtgtctttgcgctattaaacggtgcgatcgtaagccggttgcccgccggcgcacatgtacgtgttagcgcgggtcacgaagtgctggatagccggaaagaacaggatcgggggcggattcccgtgtgcatcttcaatcgggacttcatcgactcaaacctgcagcaggccgattacgcgcaagcgcctgccttgttcatcgtgggtgaagacaagattcggctgagtaaccgcatcgcgtcgttggcccgacggcagaggcgtgtggcggcaatgtatcgctcggtccagacaaggcagagtgagaccagtaccgccagggagaaagcggccaccgacctggccagagattgcgggacgatgttgggtgtccgcgattttagggcgcccaatctgaaaggtatccagcaacggctgaccgagtcggctggccatcttctcgacgctgccactctgcaagcaatggtcaatcaggcgcgagaccagagtgagttcacccacattagcaacttgccagtggtgatgcctccgctcccgcctgggatagatgacatcgctgggttgttgacggagacgcctaggcagaacacgatcaagcgcttggctgaagaccctgcgctgagcgattgggtacgcactggtctgcgatttcatgagcacagtacgacctgtgccttctgcgggaacgctgcagcgcaagcgctggaggcctacgcgaaccacttctccgacgagtatcgccggcagcacgccgccgtcacgtcggcaatcgaacgactggaacaacctaggcagacgcataccttcccacatgagaaagagtgggttcctgatgttcgggtcaaggtccaggctgcactgagtcgactcgcggcttgggaagctcgggaaagcgagatccgtacggcttgggtttgcttgctgagagagaagcttgccaacatggagacggcattcaccgtagaggtagttgaggatcgagctcccgagttggcggttatcgttgatgaacttcgtcaggcaaaggacgatcacaaccgcgcgtgtgatgaacttgccgccagacgtcggggcgcagctgagaaagtgaaggagcactttgcagcccggtttgtactcgaccccggagcgccagaggcgatcgcgttcttgagccaagttgaagcggagctggagcgaatagagactgtccggcagaagatcgcagagcaagcgaccgtggcgaatgccgagctacagcgtagctcagcggcggcaagccaaatcaatgggctattgaagcgcttgcttgggccacgcatttccgtcgagcaagctcaggacaatcgcatccagttcatccgcgaaggtcaaccagccaccaatatgagcgacggtgagcggacggcgatctcgctagcgtacttcctagtcagcttgggtcagaatggtcagcggcttgaggatctagttgttttcgtggatgacccgatctgtagcctggacgccaaccacatctatgacgttgcccacctccttatcacgagcctaaagccgtgtcggcagctgttcatttcgacacataactcggagttctttaacacgatcaagcaggactggagtgatcgtggaaagttcaagaaagagcacgctgcgtacctcgtccaccgagagcgtgacggcgctagccaactgatagagcttcctggacacctggcaaagttccgttccgactatcaccacgtcttctactgcttgcgccgctttcaggcgagcgccagccaggaggttgatgcctatctgagctgtccgaacttgctcaggcggttcctagagatgtatctcggcttccggcgccctacaccgaagggttacctgactaagcttgacgtgttgttcgatgacgaagttgagcgaggcgccgtcgcaagatacgtcgacgaggggtcgcacagcgcatcaacgctccgcctgctggagttttccgacttccccgcgatgtcgcgggggatggtagagcgcgtaatgcgggcattggagcgcgtggatcctgatcactattcggtattgatggcggaaaccaactag

SEQ ID NO: 511923 - DNA, 240 bp, Stenotrophomonas maltophilia
atgaaagctcatagcgcagtaattgctggcctgcttctcagcatgtcgcttttcaccacggcatccgcccatgatcctgcccttcatgccgatccaactcccccggctgctcccaaggccaagccaacgacctgcgaacaggttgcggaccgttcgaagttcaaggtggacctcaatgatgcccagaccaaagcgctgaaggagcgttgcgacgcgcaaagagcgccgagaaagaagtaa

SEQ ID NO: 511924 - DNA, 1509 bp, Stenotrophomonas maltophilia
atgagcgctcgccacagcatcatgcccggctctggagtcgaccatgaattccgcaccagcctgcggacgcacttgacggacattctgggcaccgaactgtccatccaggaagtggacaagatcatcctcgactcgcccggagaggccgaagcgctgaacgcggcgttcaagcggatgagcagtaagcgggctgttgagtccggggcttggaaggggagcaaccagtggaagcgggcaactcagtcctcccggccggaaattactaccgcatatgacgaccacggctacctgaccaccgaagtccaaggaaagtactcgcacgggttcctgtccgaggaaaaaacggaactgggaatgcgcgcccttgagggccggcgtctgctctgcagtgggctgagagacagcgtgaatgaactgtgttaccggtcccttctggaatgggttgaacacccgtgcgaagcggaggctgccaaggctgatgatggaactgcggatggcccgcacttcgttcaggagatgactggggactctgtactgggtcaatcgatctacaagattgataaaatttttcaggctacttacgactcaggcgagagagcgtggaggaaggcgcacaaagtggcggacttcctggcgacacctccggaggttgtgcatgagttggtggctgctgctgcagagaagacaaaggccgatatcgacgaagccgctcggcagggaaaggaatgctcagctggagccagcctggcgatccaggttgctgcggccgtatccgccaatagggccatggaagaggtttggagttggtgcgagttggaggtgacggcagaagatgatgcgtcaactcttttggcgttgctgatcgacgccagcgtcaccaaaattcccgataacttcggtgaccaccgtactgcgggatctgtggaataccggctcgaaaagtggctttcgaagtacatggggtcaggtggttacctgccagaaatgaactctggcgtccgcccgatggggcgcaccgatatcgacgcttgcgtaaagcaaagcggcatcttgcaggacggctacatcaggcggcaaattcaacgccaaagggaagctaagaaggcttttcaacagtatggcggagagtgtgtccggttcatttttctgctctgcctggccgcggcatacagtaccagtcgcagagtggccaatgagtttcccggtcgcaagaaccccacgtacgccgtctttacgcctcgcaatgaactcgtaaacgggatccctgatagcctcagcgcacacgctaccacctacctcgaaagaatggccgcgctcattcatcgctccgtgggtgatgactgggcattcgatctggaagcgctgcgcagtcagcggggggcaaaggtattgcggttcagccgccaggtcgaactctaccagcacatggtggatggtcgctccgcagcagagttgtcggggatctaccagttcctgaccaagtggaagtcgggggatgatccgctctaa

SEQ ID NO: 511925 - DNA, 333 bp, Stenotrophomonas maltophilia
atggaaccgaaagaccctaacgcccacgacgtcatctatcccgcgggcaacgacacctatcatgctgtgcgctccatcgatgagtttggtgaactggcacacgcagctgcctacgccctccaactgatgcgtgatgggaaggtccatcatgcggatgaagcgctctcgcaggcaactgcagagctccgccgcgttcgttttgccaaagaggggtacaaccctcacctgaaggcacgccgtgtgcttcagagccatactaacgccattgaggtggtcactaagcgtcatgaagtcgctattgacgaggaaacgtacgaggagacgctgcaatga

SEQ ID NO: 511926 - DNA, 348 bp, Stenotrophomonas maltophilia
atgggatcgttgttggacgcaatcaaagatgctatcgaagtggaagtccgcgctgggaaatggaacggggtcgcgattgaaggtggtgaaggcacgctgatcaatattgacatcattgagtctgagttcgacctagaagactcggatccagagaatgatcgttatgtcgtaaaggcgaagggtgatggcaccgttttcagcatcgatggcaatagcggtgaggaggaggaggaaattgcggacgtattggtcaccgctactgtccatgtgtctgtcggaccggtgaagggcggcgtacgcgagattgagatgaccgttcagtctataggtgttgctctcgaggattga

SEQ ID NO: 511927 - DNA, 1692 bp, Stenotrophomonas maltophilia
gtgagcttacaactcgttctccagaactatatcggaagtctaaaagagcgaaacgagcttgatgccttgttgccggagctgctaatcgcgatgggacactccgttctcagtcgtccgcagaccggcgttccgcaggcgggcgttgatatcctgtcgagctacaccgattccgacggaaatgagcagctctatctcttcattatcaagttcggtgatatccgtcgagaggatctcttcacagggcagcaggcaattcagccttccgcgcgcgaggcgtgtactgatttcgcgcgtaaccgcctgaccgaggcgcagcggtcactgctcaagaacgtcgtggtggtatccagtggcgttgtaaaacaggaggcagccaccggttttgcgggtctggccgacgaggtcaatgcgcgatcgggattcacgttcgacttttggggcatcgaccagctcacccccctgatcgagaaacatattttcgacgagaccttgctcttgggtcatggcaaatccgagcttcgcgcggcgttggctgggctaggggactcgcaggcgtcagttcgacgcttcgagcacttcgtggagaaggtgttgaccatgcctggaagcgagcacggcgatagcccggcgacgaagcggcgcaagttcttgcgtcggtgtgcagcggcggcgatgggtcacggggtgctggtggtctggggtggaaccgaaaacaatcttaagcctgcggttgtggggggcgagtacttggcgcttcgcatgtggtctggtgcagtccacttgggactgatagaagacgctgagttccagcgacgtctcaatgcgacgttgatgcttcatgttcatactctaatggactacttccataagagcgccccggtgctgaaaagcccacgggcgctcgtacgccataggccaaatccggtcttctatgcggacgtggtgttcgaagaactggggcgactcgcgacgcttcttcttcttctccagcggatggagggagtggaagagcaacgccgtgtggcgcttcaggacatcgttgctatcgtcaacgccaattccatcgtcgttaggccgttgctggacgggcagggcatcgatctgagtcttatattcgttgcgttgctaagggaaggcgccgagggcgcagcaggggcaatcctgcaaggggtgatccagcagttgcgccttgcagtgataagtaatgaacgccttcccgtcgacacggacctgcttgaggatgcaatcgcggtgcatttcaccggcgaggcgtccgaccgtgattttttcaaaacaacgacgcttgttccgatgttggcgaccgtcgcttcggtgattcagaacgaaacaggcttggccgtcttgcgcgatcttgtccctcgtctatcgggggtgacgctcgagcgctggtattccacccagggcatcgagacgttgaccggatctgatcatgggctggatgcgatcagcgtctcgcgagttctagcgggcttcgaaggtaacaccgctgcggagcttgaggcatctctacgccttccaaacggtgccgctgacccgtcgcgactgagctggcatgctgagccttggtcggtcctcgcagcgctgtcggctcgcctgcatcgccacccactaccaacgtggtacatcgcccattgtcgtgaaagcgatcatgtggacgaagttggtcgctag

SEQ ID NO: 511928 - DNA, 906 bp, Stenotrophomonas maltophilia
atgcgagatgccgtaggattggatatatacctgcagctagcaggtcacgaacgtgtcccggaccgcgatgaccagttgctcgcgcgcctagcccaactagcccgtcaaatagcgcctgatgaccaagtcgatcagtttggcagtggtgatatcgaaaattccctgcatgcaatcgtgcaatcgccagctctgttcccggtcgccatagcgcgttggctgacgaatgatggcgatattccgttgggcaaggcgctcttgcataaggctaatgtctctcacctcgcccagcgtttcccgcaatcttatgacttagctagagtgccggagtcggacgcgatcacgacggcccgacgcttgtgcgctctggccgcgacccctgccatctcccttggttgggtgttgagcatggcgcgcgaattttcaggctcatatgaagtgcgcacccagacatcggagttgctcggttaccacatcgatcagttgttagtcagcacagtcgagcttctagcctcgccggagtcgagcttccaggggctggatgcctccatagaagcgcttcggcgggcacgtgaggcgagacagacgctcgatggcctgccgcagctccgggaattggacatgacggctgatatgcgcctcctgtactcttcactgaagcgcagcgagcaccgtgagatccaccgtcgagcggaagaggcatccgtgtttcatggcctgcttcatcaagtaaggctcaagtacgcgatccgccccgtgatcgaagtccgaagtgaggcgggtacgcaggagatggttgttccgatgtcctcgcacgagctctcggtcgagctgccgctttcggagcacaccgacccggtactcggacgcatgcgccgtaatggtctctgggggagcagtcggacgtga

SEQ ID NO: 511929 - DNA, 1155 bp, Stenotrophomonas maltophilia
atgactatcaagcaatatgcgtttcgcgcccatgcgtaccttcggacgcagggcttcgcgtcacttacccggagccaagtccatgaactgctggctgcggccgccggattctccgcccatgccgcattccttcaccaggccgtgtggtgcgatgtggcttggggcgataccggcgtaaagccggataagcgcaggctcatccagcgatgtctgcgctttgggatgtcgcctgcggaaggggagcgcgcggcccagggcgtggccaccttcctgagctcatttggctacgcgccggcgcgctttgaagagctgattgcggcactgaccgacgaagaagacccgtggatggacactgatgaggcaggatcggatagtgtcgccgggtggctttcaactgagctgatcggcagcgctgagcgagggattgatgcgctgcttgagaggttccccgtgctgctcgagggcttggaggcagcggctgcaagaggcatagcggccgcgcacctagcggcagcgcacttgctcgaaccgtatgcaagcctgtcagatgacgacgaccaccgctttggtcgggaactacaccagcgtggtcagtggtcgaccgagcctgtgggcttcgcggagatcgccgggggcgcagatagcttcattcgggtagtcgctaaacatcggtaccacctccttgaggcggcacggggcaaagatagacgtgcgctgctgctcacggccgagcgctacggagatcccggggcgctcgagcttgacccgtcgaatgaagtggacccgtaccacatggccaacttggccgatgcgaatggtcgatccgagctgggcaatcaatggctagcggtgctggcgcgcgagggagatatgcttgccatgcgtacgcttatcgaagaccgcagcgagccgctgtcccgtgcttgggtctggatgtatctctcgcgcctgctgggtcgagacctaagccagcatcgatatgaagcgatctgtgagaatggtgcaccgtacgacgacgatatcggtgggcctgcgtttgttggaggcgacaacggaatcgaattgatcccacttgcagctgaggacagaaggcgcgccgaagaggaggccgctcagctattcgcggaaatcgaaatgcgccgcagtcagacctaa

SEQ ID NO: 511930 - DNA, 3495 bp, Stenotrophomonas maltophilia
ttgacagagactggcgggccaactacacaggcgggtattcgctaccaagatcgggtcgccgctctttacttgggccggatgctggatccgcgaaagcgtcccagccgggatagaccggtggaggtgtgcgtagagaccaccgaggcggtagatgaccttttcgttcgctttgacgacggctcgcggaacttcttccagatcaagctagccctgcaacaacgcggtgaggcttgggaagcgctgtggcgagcgctacatcggcaattgattacggctctgctccaggatgaccggcttgcgatcgtcataggtgatccttcggccctcgcatcccaattgagggaaatcgttgcacggaccgatggcgctaccccagagcaatggcttaagcgattgaccgcacgacagcgatctatcgcgtcgtctatagctcgagtgctttcctcacctatggccgaggtctatcgactgttcagtttcctagacgtgtatgtgtggcctgcggtggagcttgaacgagactacgcgcccctatggatgccacctgggagtgtgtcagctgcgcaattgctggatgtgctcgcaggcatggcttgggctggcgcggagacgcgtcatcgattcgacggtgcatcactacgcgatcggctgcggattgagtggggagtttccatttcggacacgcccacgtgggggctggcgcgatatcgcgctgcgatggcggcactggctgctatcgaagtgcctggaacggactttcgtcagggttctatgccggagtttctgtggccgcgctgccaaaggtacgaccgtgatcggcagccggactttgatgatgatctgcctggttggcgcgagctgagtgcaagtgaggaatttgacctgagagacttcccaagtgcgggcttttccgctgccgtgcttgtggccgggccgggctatggaaagtcgacagtggtcaacgcgatcgcccgcaagtctgcgctgacaggcctagtccccgcggtgatctcggtgacaaaactatccgatgtagactgttctattggtgagttccttgagcgggtaatcaaccctgcgttcgatgttcagatcgactggagagcggcagcggccaccggtgcgctggtgctactggtcgatggcttggacgagatatctagtgacagacgcgccgtggttctagagcgtttcaagatctaccgtgccgcacacccgagcgtgcaatggcttatgactgtacgtgatgccggggcgttggcaccaccagaaggtgcattaatgctggagcttgcgccgctgcgtgacgtggacgttcagtcttatgtggacttctacaggccgggagagcccgggctaggcgctgctctcttggcacgcattgctgctcgacctgatttggcgcagttggcgaggattccgatcttcttgtcgctcatgctcgtcttgcgactagaaggtgtcgaccttcggcgaagtgagttgctagagacatatatagagacactatttcgtcccgctgtcttcaagagcgttgagcgagaatcgatcgacgtccctacgcttaggcgcgtcgcggagatggccgcgtttgaagctctggagggcgatgctatcggagttgcgaattcggtgttcgagcggagcgtgattagggtcgctccatctacgtccattgacgaggtgcgtgaagcactcattcgtcgcggcgtactgaggaggacaggcatggtgcggctgtcatttccgtttccaatcgtgcaggagtacctagcctcggccgagctgctcaagcaatctgctagtgggatcgtccagcgattggtactgatctgcaagcgcccttgggcacaagctatccaattcgtgctcgagcggcatccgaacgccgaaccgcttgtcgctcagctgctaaccgctgccgatgatgcgtttcacaccagcctacgcctcctcggtcggtgcctggcaaatggcatgcgcgttccccagttccaacgtgaggagattggaaatcggttgtcagctatctggggcacagcgtcttggcgttccaataggctgatcaacagcatcatcattgatgccttttccaagccgttgcatgcggcggtccgagccagactgggcgagcgccagttgatccatgacggggccggcacaattgttgccttgaatcgcgacacagacctgacactgtcggtgctacgggaactgctcgcgggcgatctggaccatttcttcagcacagccgatatgcaaggcgagatcgatcgtttgggaactcaagcttttgagctgtatttagctcgatgcaggagggacggtctgggtaagcacgacgcggacgcgatcagctgcctgatcggacacatgaatggcgattgcatagatagcgaggtggcgcatactgcggcgaatgacgcggaattgcccactcaagtcaggcttgtggcctggagcaagtccaagcgaaagctgagcgcagcgatggagcatttgatcatcgatgctgcacgggcggacgattattgcctcaattcagccgctgctcatgcgttgtcatcgccggctgtggctgcttcggacgttgtccgcctgctcgtgcccggggtcatcggtgcatccaagatcgcgacaatcctcagttatgtcattggcaattggcgcaaagatcaccgtctggagcgaaccctagagctcctcggagagcccgagttgcgcggtcttccgcgcgatgtcgcgttgctttactcaatagaggggggagagccagctatcttcgatgatctcattagccggatgggagagctgagcgcggaactggtgggggcagcagtaatgcagcttggccacaggccagagaggacggttgtagaacgtgttctcgctgctatctcggcacgtacctggtcagcgactgagcgcgtagccttggccggtgcgttcgcgactggacttaattatcgtatgaagatgattggcttgcgctccggaagtctagagcccattcccttccatccgggccgtaacgctcctcatagactgctgaggacatggctggagcttaacgattacggcgccgtggatcgcctgtgcatgattcttgacggagtgcgtctcgggatgaccggcgtgcactctgaacttcgttccgcattggaggccgcactggccgttggtattggtgacaacctcaatggctcgtccatcgcaggtcaggcgatcagaatcctccgcgcgcatggggatgggtttgggggcgatgaactggagcaactggcgaagaagagcgcgtacaacctggcaatcgccgctgtggcattgatcgccgagcgtggcacccatgaggacgcgaataggctagccaggatgcactcggaggttgatgcggacctgcaattggagatcctaagccatctagagccactggccagccgactggcccttcgtatcacgagaaagggaagccatctcttggttgaactagcgtga

SEQ ID NO: 511931 - DNA, 1197 bp, Stenotrophomonas maltophilia
atggccgcgaagaacaataaacgcgtccttgatgaacaatttgagcacgtgctagatgtctgccgagctgccgtccagacaggggaagagataccgaagcaccaggtccgccgcctcctcgacttcttcacgcaagccggcgagacagacaaggcgggcgatctgcagaagctctttgaccatgctgcaaaaggcgtctcgttcagtccgcgccgcttggtccgctcccgcgctaatctccagggcgaaatcctcggaaaggcagtaagacctccgctggacaaggaaacctccgcgcccttggcagacatcatatggccagaggacctacccacctctgggccggtgcttaccaaagagcttcagcttctagcggataactttgtaaaagaatggcagttgtccgacgccctgttggaggtgggtgtttcgccgactcgaagtgcgctgatttacggggagcccggcacgggcaagacccatctggcactgtggattgcacagcaactgggaatgcccgtcgtgcttgcccgactcgatgggatgatctcctcgttcctaggaactacctctcgcaacatcggcaatctctttgattttgcagaacgctaccagtgcgttcttctccttgacgagttcgatgccgttgccaagctgcgcgatgatccacatgaaatgggtgaaatcaaacgcgtagtcaatactattctccagcggctcgatctgaggcgggagatcggcgtgaccattggcatcaccaaccatgaacaactcctcgatccggcggtatggcgcaggttccagatccagatccggatgcctaaaccgtctctggaaggtcgaactgcgatcctgaagcgttacctgccccccttcgatctgcctgtcccagaagaacgctttttggcgtgggtaactgccgatatgtccggagcagacattcagtctttcgtcgattcgtacaaacgactaaaggttgtcattgccgaacatttgaccttagttgaactttgcagaatcgctgccgatatgcacaatgaccgaatcggcatggaacagaagcggattttgtccatgacggacgctcaggcggccagagcactggttgcagcccctgatgcggatggagacatacagtccctctctgtgatcttcggcaagtcccgaagcaccatgaagaggtggttggacggctga

SEQ ID NO: 511932 - DNA, 2469 bp, Stenotrophomonas maltophilia
atggctgcgccagtacaggtagttttggacgcgggtagttatgtaaaggaattcagaaagcccgcgggagggtccaagaaggacatctttgcgggtaaggacgatgacttccaggaacacagagatcgcctcgttcgccaggtgcgaagcttggccgcctctaagggcgcctttgagcgttcttcaattgcagtcgctgctgtcgaactgaagcccgttgctctagccaagagcaacaggccaaaacagctttttgatcctggccagctcccctctatgggtacagccagacaggcagaggtactgattcaagtcacacccacaaccctgcgctcactggcatcacgcatcggcgaagctgatgacactgtgccaatgaagcaaacactcgaccgaaagacgaatcgcacaatcgaagttcccaacccgagccagctacgctgcgatgtcggcgttgttgagaacgttgtgctctgggattcagagcgacggctttcgctcccgctgaaagaaatgtctcgctggttccgtggcgacggaacccccttgagcttggtcgtgcggctgttccgcttccaaggccgagagggcgaccatctccagcacacagagttggagcacctccaaggcgagctgcaggccctgggttgcactaccgagctcgattcagatcgacgcggcaacccgttccagcaagatgtcctgcttgtgaagtggggcaagaggtcaagccgtgtatcggttgaaaactggatcgaggctcttcctaaggttattgacctgctatctcactgcccgattgtccgctcgattcatgtgccagcacgcatcaccaatagcatcggggccgggagcccaccattgccgcctccatcgcccgtccagactgcgatccctacgcccactcctggcgtcagttatcccgtagtcggagtcatcgacggtggcgtctgcgccagcctgaacagctgggtcgagccaggtgatcccttcttggtgccgtccgacattgatcgtcgacatggcactgagattgcaggcctgttggtgatgggccagcagctcaacgggacagatgtgtgtcccgagccggatggctgctcaatcgtcgacatcggcctcatcccccgcgaacaagggggcaagttcagcgtgtactacgagaacagcgcaaccttcttccgaaaggtggaaggcgcagtcatggctgcgaagaaggcacacaatgcgcgcgtgttcaacttcagcttgaatctctctgttccctcaagcaccgagtccgactactgctacgagacggaatggctggatcgcattgcgtggaagcacgatgtggtattcatcatctctgcgggcaatcttcctgccggcggcggtcgtgctgagtggcccgctgacagtgtcagagcgctcagcattctggctcagcgcctgacaattgatgaagcgatccgcgctccggccgattccttggccaacatatccgtctcggccatcaatccgccacgggtgtttggcaaagtgccggcagcactagcatcgtactcccgccgtgggccatcccggtttggcggcctcaagcctgacttggcccatttcggaggatgctctgggtctcctagcggcctgcagtctgttgcagagggcggtagcctcaaggatgttagcggcaccagctttgccgcaccactggttgccaagactatggcgcgatactgtcagttgattgagggcaccatctctcgggagttgatgattggcctggtaattcatcactctaagattccagacctgtactcgaagtcgccactctcagatcaggccaaggacctcattggatttggcgttccactcgcggctgagccctccatcaccggaaaggactcaagcattacgctgatctttgagacatccatcctcaaaggccagcgcatggaattcaaattcgcatggcctaagtcgcttgtgaaacaaggaaagtgtcgcggtcgtggtcgcctgacgcttgtctcccggccggcggtcgatggccgtgacggagaggagtttgcacgcactcagctcgatgcccaccttaaccagcttgacctcaacggcaagaccaaaggcggaaagttcaccatcgcactgcctgacgctctcaggggccagaacggcaaggcgtttgagtccgtccagcggcgacatcagatgaagtgggggccggtcaaggtctacgaattcgatagcccctccggcgtcggagaatcctctgagtggcgactgcagatcgaatcactggaacgcgccgcaggtgaaacaccagagtacggcatccagttcgcggcgattctgaccatcgaggatatcaagggcgaggcacgcgtctttgatgatcttcgtcaggatttggtgagccgatcagtccagctgtctgatcttcgggttgctggccgcacacgcgcacggcgtacaggtcgatcgccgtaa

SEQ ID NO: 511933 - DNA, 2523 bp, Stenotrophomonas maltophilia
atggcacgctcacaagtccacctactggatgtcggtaggtcgcagtatggcgactgcatcctgtgtgagatcggtgacagatggattcttattgatggcggacatcgagcggacatccgcggctccatctcgcacaagtcgatccctgaccagatcagagagatcatggggttggttcctgatggcgaaatacacttagatttgctggtggtttcgcatacgcacgctgaccacatcgggtgtcttcccgagctggtagagcaatcactcaaggctgattgggcgttactcacttcgccggaccttgcttggcccgacatagagcctgccgattcccacatcagtccagagggatcacacgtatacgcgatcctgcgagaggagtactgtcagtatgtagacagcgcgacctttgaggaggcgctagtcgatgccagcagcctgcagcgccgttatcgggggatgatcgagaagctgcgcggtgacggaattcgcgtcgtgcttcacggcgaggacaatcttgacgcacttgaagccgctttcagcgacatcggcatgagcgttatcgggcccagctcggctggcatggccgcgtgcgcccatttccttgaggccgccggccgtgatttcctggctgaagccgatgctgtcctggcggacggcaccaagccacaatggctctaccagaagatgatggacgcttggagagagaatctccaacccgacggacttttcggtcctgttgtgaatatgcagagctcagtcatcgccttcgatgacggcgatcattcattcttgttcatgggcgactcccagttggagcgcccagatgtgcctggcgaagcaatcaaggaagaagttgctgcaatcagggccgaactcattaggcgcagcagcacaaagcccttcaacttcgtcaaggcaggacaccatggcagccataactccatcggcccgggtgtacttagcgatctaggcaagggaacactgaacttcggactctgcaccggctcagacagccgccatcaccccagtgcaaagttcctggacgcccttactgatcactctcaggacgtggtcctaggtcgcacggacactaatggccgagtttcgttcttcttcgacgcgggcgacaccgatgtcagagtggaacggggcgaactgaacgaccgctcgtcgccagaggcacaagccgctggatcctctgcgcccgctatcaaccccgcttcctcatctttgcctacttctccgatgcccccgccacaatcggcccccaccccagccatcgttccggtgccctggaccacgggcgcgcctggcccggttgagatccggataccttacaaccctgctgccggtctgaacatctcgatccaaatcaagattgagccgtccccccctgcactgcaggtcgatggctcgacggtcccgtttcagctcgccgggggcagaacgctgccctcgctcctttttctgacgcactctgcagcgctcagccgtaatgttggcaagtcatgtgttgaccaagtcctcgcagatatagcccgcagaggacatacggttctggacgtcagcggatcctctctgtcgaacccggatgccgccgcagcccgggccagagaagcctttaacgccgacccagagctacaaggagtggtgatcctgggcggctatgatgtcattcccgcgataccagtcgatgtttaccctacaggttatccggaagaagagaagcgcaaagaccccgatcacttcattgtctggaccgacaatttctatggtgacgttgatgatgatggtatcccggaaaagccagtaagtcgtatccctgacgggaggtcggcctcgctactcatggctgccctggctgcatcccctgcgtctaggtccgatcggggccggcggcatggcgtctacaacctcaagcgccctttcgccaaggaggtcttcaaactgatcccgggccagggggcctctcatgcctcctctccatactcagttgcagatcgctccccctccacgggtgactacctgtacttcatgctccacggccatcacgacgacgccagccggttctggggagagacccaccacagtaggccaatcgaggcccttcagatcagtgacctccagctgaaccctggggcggtggtcttcacagggtgttgctggggggccttaccggtccaagagaccgcaagaggctatttggggggccaaatcacccctagaacggctaatgattccattgccctggcgtgcctgaaccagggggcacttgcgtacgttggctgtacaggtgttcactattcacccacactaccgccctatgatgtaggcggcggcacaattcacagaaatttctgggacagtgtcagcgacggctcgccgccctccagagcgctctttgaagcaaaaaaggcaatgaccactcagatgctgactcacgcaggtgagatgcggctgcaaatcctggacatgaagcacttccaccaattttgcttgctcggcctaggatggtag

SEQ ID NO: 511934 - DNA, 327 bp, Stenotrophomonas maltophilia
atgagcgatatcgatcccgttgtgcaagacatcattagaagcaagatcccaaatgcacacatcgttgatcccgatgtcatttcgagttcccagtctgccggggctcggaaggctgctaaagccgaagccatgattgcgaagtggagctcgcgtcagttcatccaacaggccttcgctgaacctgatggcctttcgcagagtacgtcgggtcatgtcatagactttgcggtgattgaggtagaggacgactttgatgccggctccaagcgccgccagacagtaatcgtcgacaagactgctggcgaaatcattgctgtatcgggctga

SEQ ID NO: 511935 - DNA, 1152 bp, Stenotrophomonas maltophilia
atggctgcactgctgagagggcgtttcatctatatcgacgaaagcggtcataccggagatctgatcacctctaacaaggagttcaatttcaacggccagccgcatttcaccctcgcagcagttgggcccattttgccggagttggccgaggaactgttaggcgacgtggtgcggaagcatcgccttcaccagcaatcggagatcaaatcggatgcgctgggtaagaggccgggtgtcgccagggatctcgcgatggcgctgcgtgagagaggaatccccgtctttgtcgaggcggtggacaaggtgtactacctcatcatctcaatcatcaactaccacatcttgccggtgacggcgaagactcgattggacgagacagatcgatttctgaggaatcaccttgcggactacctctaccaggccatgcctgattcggtactgggcgcgttcatcgacgcctgtaagagggacacttctgaggcagtgcgcgtctccttggaggccttgctttgctgggctcaggagccacgaggcgacagtaatgagtgtcggacgctcgatctaattgcaagaagtgtgagcgaaacgatcaatgaccttgaaatggccatgaccagaagccctgctggtcaccggcagttccttcctcttccagacgcaggtaagcgtagttccttgtactgggtcctgccaaactactcatcgctgacaagtctttacgctcgcatcaatcggaatcttcgtggccggctaagcggcgtcactttggttcatgacgatcaggcgcagtatgacgaggtcctgcgattagctaaggcggccattgagaccatcaaggatcctagcgagtacatccgcttgggggcggattactcatttgctgagagggcagatttatcgtttgcgcggtcctgtgaatcgcccggattgatgatcgctgacgtcctggccgggcacgttcgtcgagtccttcgtgaccatatggatgagagaaatatccacgacatggccatggacgcgttcatcgagatatgggatggagaggacgtagatcatgggacgggcatacaattcgttctgccaactgcagcggttcagcggctgcaattgcgagcgttagcgtataggcgcagccgaggtcaactggattga

SEQ ID NO: 511936 - DNA, 663 bp, Stenotrophomonas maltophilia
atgacctgggcttgcaggcatcgcaatgaaaggagtcagaaattgttacaagaatccgagatgactgacgagtgtctcaattcagcacttcggcaacgtggggctgtcgtagttcatttttctcacatcgcaaacatgggtcggaacgtcgtttttcccagcgatctgcaggaggcgatcaagaataaggacgcgtggagcctttcatgctcagccctgtggccggggcacgctatgcagctctgtggaagcgtgggcgtaatattcaagccaactgtcgaatctgtcctatcggtctatgacgatgatgccggctcctcttcaggaggggatggtagcgataggtctagcggctggcgcctaagtaaagaggccttggaacgttctttctgcgtcgttggtgcctacaacgaatggcgcgttaggggcgcggaggtcgtggggatctttgtacatgacatccgcgatatctgggttaagaagatgaccgatatcgcgggggtggccggcgcacctcgcgttcaagcaataggtgaagtgagcgttactctgagcgatgtattcgatgcttttggagacatgcctgtctacacgatggactcgtctggcttgattcgtttggatcgccctcctcaagctgcctcacgagagttgaaggcttaa

SEQ ID NO: 511937 - DNA, 240 bp, Stenotrophomonas maltophilia
atgcttgataggttgaagcttgaacagggacagaccgtgaggctggtgagttcccgggagatcggctttatgggcgaaaccgacgtaactgactatgagatcctggacgccgatggcaaggtggtcgggaccgtggagcttcgcgagcacatcgcggtaaggggtttccagaagaccaatacggttgtgcagagggacgcggatggcagaacggtggtatccgagagctggaatccttag

SEQ ID NO: 511938 - DNA, 876 bp, Stenotrophomonas maltophilia
atgtccacggcagaaatccgatccaagcgattcgctcgcgctctcgtcacgctacaaattggatcccagatcctgagcgctgtccgacgatcaacgagctgcatgaagattgcttatagctggctcttccgacaagcacggagaattgaaggcctgctcaagttcaatccagtcactgtgctactcctgttcccgttggtagcgacaccggcacgcttcgcaaagtcccagcgcaagggcttagtagcatccttggtggctaccggcgtactgctatggacagcggcaggcttctggacctctgcactgcaggaacttaccgcgaagtctctgcggatgatggagaaaattcagccatctcaaatgaatgagatttccaagcaacagttcgaacttatgcttagcacgatcatgggcaaacccatgggcttggtgatagctacgctagttttcttgatggcatgctgtcgcgcagcttggtacaagggcttcatcggcctgtattaccggtctcgacgtcatcgtcctatcgtcggactccactacttcctcgtccaatccgcctccaatgcgctctacctaggggtactggtgtatgccgcatgcttcgctatcaacaactgggcatggctagaggaaccagtctatcgaatggtacgttcgggctattttctgataccggtgcttatccttgggctcatccagaaccgctattttcgccataaggccaaggtagacaaacaactctacggctcttggctggcagagctgatatcgacacttgctgccctggtcgcactggtgctgggtggttgcggcctgatctggttgttgggcctaggaatgaggtacttcggcacagccagtacaggataa

SEQ ID NO: 511939 - DNA, 1191 bp, Stenotrophomonas maltophilia
atggttgagcgacagaagcgttcgcagcgcctgcggcgtgagcttgcggatccactgctggcgtccacccatcccgtgtaccggccgctgttgtgggtgttgctggcaacggtggccatcgccgtgggctgggccgcgcttgcgcagctggaccaggtgacccgtggcgagggcagggtggtgccgtacagccgcatgcagaagatccagagcctggaaggcggcatcctcgatcgcctgctggtgaaggagggggatctggtcgaagtgggccagccgctggtgcggctggaggaaacccacttccgtaccaactacgaagaatcggccaaccagtcgcaggtgctgcgggccgcaatcgcgcggctggatgccgaggtgctgggcaaaggtgccatcgagttcccggacgacattccggccgggagcgcgctggcacgttcggagcgggagctgtaccagtcgcgccgtgcgacattgcagcagagttcggcagccatcggccagcagctgtcgatcgcacgcgaccagctgcgcatcgtgcggccgctggtcgcgcgcaacgccgtcagccagatggaagagttgaagctgacccaggaaatcgccacgttgaccggcaagctcagcgagctgcgcaacacctatttccaggaagcctataccgaacgctccaagctgaaggcggagctgtccgcactggagccgatcgtgcaccagcggcaggaccagctgcggcgcaccgaaatcctgtcgcccgtgcgtgggcgggtcaacacggtgctgatcaatacccgcggtggcgtgattcctcccggcgagccgatcatggaggtgattccggtggaggaacggctgctggtggaagcccgcgtcaagccgcgcgacgtcgcgttcctggtgccgggcatgccggccaaggtcaagatcaccgcctatgactacaccatctacggcgaactcagcggcactgtcgagcagatcagcgccgataccatcgaggaggatacgccgcggggcaaggaatcgttctaccaggtgctgatccgtaccgatggtagccagctgcggcggcacggggaggccctaccgatcattcccggcatggtggcggacgtggacatcctgaccggcaaacgcagcgtcctgaactacctgctgcgaccgttgatcaaggcgcggctgaactga

SEQ ID NO: 511940 - DNA, 342 bp, Stenotrophomonas maltophilia
atgggcaatggcagcctgtccggtggccagcgccaggccatcggcctagcccgggtgatcctgcaggatcggcctgtcgtgctgctggatgagcccaccgccgccttcgaccagcagagcgagacccatgtcatccagttcctgcagcgttggctcggccagcgcacgctggtactgaccacccacaagcgcagcatgctggccctcgtcgagcgtgccgtggtgatgcgcaacggcaggatcatcatggacggtccattggagcaggtggtgcagggcaaccaggtgcagggcaaccaggtgcagccgatcgccgcggtcgcaggtgggcatcatggttga

SEQ ID NO: 511941 - DNA, 1290 bp, Stenotrophomonas maltophilia
gtgcgtgttctgggccaggtgactatcctcgatcagtacattgatgccgccacccgcgagaacactgtgcgcagctacgcttcggcgttacggcactttgaggtcgagtggcaaggacaccttccggccaccccagacagtgtggcgcggtacttggccacctacgcgcagaccctggccaccagcacgctgcggcatcgcctggcggcgatcgctttttggcatcgggatcacggatttgtggatcccacccgctcgccactggtgcgcaaggtacttaaagggattcagaccctccacccgacccgggtcaagcaggctgcgccactgcagatccggcggctggtcgagctcgatgactggctggccgcagcgattgctgcggcccatgcccggggcgacggggcggcggcgcttcgccatcagcgggatcgcgcgttggtgctgctcggattctggcgtggcttccgtggcgatgaactgctgcgtctggaagtggcccatctcacgctggtgccgggacaggggatgacctgcttcctgccgcgcagcaagggcgatcgccaagcggccggcgttacccataaggtgccggcgttgtcgcggctgtgtccggtagaggcgacccaagtgtggctgcaggcggcaaacgtgcaagacgggccggtgtttcgggcaatcaaccagtggggccacgtaagtgccgaagggctccatcccaacagtttggtgcgcctgctgcgcgagttgctggccagtgccggctttgccgatgcggggctccacagcagccattcgctgcgccgcggctttgctagttgggccaacgatcagggctgggacatgaaggcgttgatggagtacgtgggctggcgcgatgttcagtcggccatgcgttacctggacgggcgtgacccgttcgcccgggatcgcattgaagcgagcctgcccagcccaaccgcgccagctccggcgatggcgctgccggcgcccgaggtcaaatctgccctgcagctgctcctacgcatggtgctgaccccgtttgcccgcgccggccgcggcgcggccaaggcccggggcagaatcgaagagatctgcttggccccgttccaagcggtgcggctgaacaccgccagcagcgagtaccggttgactgttcccaccgatcccgaccgggatctggatgaaatcctggccacgttgctcgatgacatgcaccgcatggccgatacgcaccagtgtttcctggaagcgtctctcagtacagacgacggccgccactgggattga

SEQ ID NO: 511942 - DNA, 390 bp, Stenotrophomonas maltophilia
atgtccgtacacgttcaaagtctggacgaattcttcagcatgctcgtagaggagcagcgggacattcgcatcaccctcgccggtttggaagacgcgggccaacccgtcgccctcgatcagaccacgcaaggccgcgtcagcaggatcgacgccatctcccagcagcacatggccaaggcgggcagcagtcgcctgatgatccagttggatcggatcaaggcggcgctggatcgctacgaatcggggcgctacggcatttgctgccgatgtgaactcgaaatcgggcatggccgtttgatggccgatcccgccgcgcctttttgcctggagtgcaccgaggaactggccgaggcgaaacagcacaacatgcgccgaaacgccggtcgctga

SEQ ID NO: 511943 - DNA, 2205 bp, Stenotrophomonas maltophilia
atgaatctgatgacgaatgcaccggctaaattaccggtcgtgaagcgctgcgccttcggggcgcatgaactcaccctcgaaaccggcgagatcgccaagcaggcgtccggcgcggtcatagtccgcatgggcgatacggtggtgctggtaaccgcggtcggcagcaagcgcgcgaaagatggactcgacttcttcccgctcaccgtcgagtaccgggagcgcttctacgcaggcggtcgtatccccggtggtttcttcaagcgcgagggtcgcccgaccgaaaaggaaatcctgacctcgcgcctgatcgaccggccggtaagaccactgtttcccgatcagttccgccacgaggtccaggtcattgcgaccgtgctgtccgtcgatccgttgatcgatcccgatattccagccatggtcggcgcctccgccgcgctgcgcttgtcggggttgccgttcaaggggccgattggagcggtccgcatcggccgccacggcgacagttttctggtcaacccgaccaccgaagagctcaaggcctccgacctcaatctggtcgtcgccggcacccggcacggcgtgttgatggtcgagtccgaagccaacgtgctctcggaggagatcatgctggcggcggtgtcgcttggccaccacgccatgcagcccgtgatcgaagcgatcgaggaactcgcccaagaagcgaaggtgaccaagtgggagtggagccatccaccacgcgacctggccctggccgatacggtgcgcacacagattggaaacaacctcaacagcgccttgctgatcaccgaccggatcgcacgcaagaaacgagtgcaggcgatcagaaatgaagtgttgattgcgctagctgcaccgacgacctcggcaacgggttgggaggtcgcccaagtccgcgcggagctggacgacctcgagtacaccgctgtgcgccgcatggtgctgcaggatcggcgtcggctggacggtcgcggtctcgaagacgtacgtccgatctcgatccaactcggcgtgctgccgcgcactcatggctcggcggtgttcacacgcggcgaaacccaagccatcgtgaccaccacgctcggcactacgcgtgacggccaggtcatcgatgccgtcaccggcgagtacaaggaacacttccttttccactacaacttcccgccttactgcgtcggcgagacgggtccgatgatcggcccaaagcgacgcgaaatcggccacggccgtctggccaagcgtggcgtcgccgcgatcatgccgtcgatggaagcattcccttacaccattcgaatagtgtcggagatcaccgagtccaatggttcttcctcgatggcttcagtgtgcggcagctcgctggccctgatggctgcgggcgttccggtcaaggggcctgtgacaggcatcgccatgggcctggtcaaggaaggcgatcggttcgcggtgctgtccgacatcctgggtgacgaggaccacctgggcgatatggatttcaaggtcgccggcactatcgacggtatctcggccctgcagatggacatcaagatcgacggcgtgaccgccgagatcatggaggtggcattggcgcaggcgcgagaagggcgactgcacatccttcgggagatggccaaggccatccaggccccgcgcgagcagatgtcggagttcgcaccgcgcctgctgacgatcaagatccatccggacaagatccgcgaggtgatcggcaagggcggggccaccatccaggcgctcaccaaggaaactggcacgcagatcgatatccgggacgacggcacgatcgtgatcgcttcgaccagcggcggagccgccgacacggcgcgcaggcgtatcgaacagatcacggccgaaatcgaaccgggtcgggtctacgaaggtaaggtggcaaaggtgcttgacttcggcgcgttcgtcaccatcgcgccgggcaaggtcggactggtgcacgtctcgcagatttctgacgagcgagtggaaaacccgaattccgttctgtcggaaggggatgtggtgaaggtcaaggtcctggaagtggacatgcagggtcgggttcggctttcgatgaaggcggtggacggaacgaaagtgttgctgccggagtcggcgtatgccgggggttctggcggctcccctccggcatgcgtttttattgcggaggaacggtcatga

SEQ ID NO: 511944 - DNA, 1608 bp, Stenotrophomonas maltophilia
atgacgcacagagagatccttttcgataatgatgcgcggctgcgcctgctgcgcggcgtcaacattctcgccaatgccgtcaaggccaccctgggcccaaagggccgcaacgtcgtgctcgaaaagagcttcggcgccccgaccatcaccaaggacggcgtgtctgtcgccaaggaaatcgaactggctgacaagttcgagaacatgggcgcgcagatggtgaaggaagttgcttcccgcaccaacgatgacgccggcgacggcaccaccaccgccaccgtgctggcccaggccctgatccgcgaaggcgccaaggccgttgctgccggcatgaacccgatggacctcaagcgcggtatcgacaaggccgtgatcgccgccgtcgccgagctgaagaacatctccaagccgaccaccgacgacaaggcgatcgcccaggtcggtacgatctcggccaactccgacgaatcgatcggcaacatcatcgccgaagcgatgcgccgcgtgaccaaggaaggcgtgatcaccgttgaagaaggctcgggcctggaaaacgagctggacgtcgtcgaaggcatgcagttcgaccgcggctacctgtccccgtacttcatcaacaaccagcagtcgcagaccgctgacctggacgatccgtacgtgctgctgcacgacaagaagatctccaacgtgcgcgacctgctgcccgtgctggaaggcgtggccaagtccggcaagccgctgctgatcatcgccgaagacatcgaaggcgaagcgctggcgactctggtggtcaacaccatccgtggcatcgtcaaggtcgtggccgtcaaggcaccgggcttcggcgaccgtcgcaaggcgatgctggaagacatggccgtgctgaccggcggcaccgtgatctccgaggaaatcggtctgtcgctcgaaaaggcgacgatcaaggacctgggccgcgccaagaaggtgcaggtctccaaggaaaacaccacgatcatcgatggcgccggcgagaaggccaacatcgaatcgcgtgtcacccagatcaagacccagatcgaagacacctcgtcggattacgaccgcgagaagctgcaggagcgcgttgccaagctggccggcggcgtggcggtgatcaaggtcggtgcgtcgaccgagatcgagatgaaggcaaagaaggcccgcgtcgaagacgccctgcacgccacgcgtgcggcggtggaagaaggcatcgtcccgggcggcggcgtcgcgctgctgcgcgccaaggccgcgattgcaggcctgaagggcgccaacgaagaccagaaccacggcatccagatcgccctgcgcgcgatggaagcaccgctgcgcgagatcgtcgccaacgccggtgaagagccatcggtcgtggtcaacaaagtcaaggaaggcagcggcaatttcggctacaacgcccagaccggcgaatacggcgacatggtcgcgttcggcatcctcgatccgaccaaggtcacccgcttggccttggagaatgcggccgctgctgcccgcatgttcctcagcagcggcgtcgcgattgccgaagcagaaccgccgggcgcggtgcaatcggaagacggctga

SEQ ID NO: 511945 - DNA, 567 bp, Stenotrophomonas maltophilia
atgtcccgcctcaacacgatcctgcgcctaccggtcatccatcgggctgatgcgaccgagctcggcccgtattgcctggaacaggtgcatctcgaattcgcgaacggggagcgacggctctacgagcggctccacacccgctcacctggaagcgtcatcatcgccgcgatgcccgatccgcacacggtacttttgattcgcgagtacgcggtgggcacccatcgatacgaacttggcctgcccaagggacgtatggaccccggcgagtcgattctcgaggccgccaatcgcgagctgaaggaagaggtcggaatgggcgccaaggttatgcgctatctgcggccactgaccttggcccccacctacatgagcaacgccatccatctggtactggcggaggacctgtacccggagcgcttgccgggggacgaacccgaagagctcgaggtggtcccttggcagctcgatcgcctccacgaattggccctgcgcgaggactgctctgaagcgtgctcgatcgcgtcgctgttcatcgtgcgcgaggtgatgcgggagcgtgggggttag

SEQ ID NO: 511946 - DNA, 258 bp, Stenotrophomonas maltophilia
atgctggaccggaagacgatcgaaaagctggatggccgggaaggctatcgggtagagcgcgtggcgtggcctgaggatgacagccggaccgtcacgatctacctcaagccatcggcgcggacgatgtactgcgagcactgcgacactcccaagccgtgggtcgcgtgcagcgcaggggaaaccatcacgttcatgaacccctcacctccggtcgaatcggcaattgatcggcgcggacgtcgaccgcgtgctcgatag

SEQ ID NO: 511947 - DNA, 1608 bp, Stenotrophomonas maltophilia
atgccgacccataccgcggaggccgcgcgccgccgcacgtttgccatcatttcgcacccggatgccgggaaaaccaccctgaccgagaagtttctgttgtttggcggcgccattcgccaggccggtagcgtcaagtcccggaagtcagccaagcacgccacgtccgactggatgacgctggagaaggaacgcggcatttcggtcacctcgtcggtgatgcagttcccctacgatggccgcatcgtcaacctgctcgatacgccggggcatgccgacttctccgaggacacctaccgtgtgctgaccgcggtcgattcggcgctgatggtcatcgactgcgccaagggcgtggaagagcgcacgatcaagctgatggaggtctgtcggctgcgggacacgccgatcatgaccttcatcaacaagctcgaccgcgaaggcaagtcgccggtcgaactgctggacgaggtcgagcgcgtcctcgacatcccctgcgcaccgatcacctggccgatcggcatgggatcgaggctcaagggcgtgatccatctgatgaccggcgaggtccacctgttcgaaactggcaagaacttcacgcgacaggattcgacgatcttcccatccatagaggatcctgcactggtcaagcgcgtcggagcgcagctcctcgatgaggtccgggaggagctggccctggttcagggcgcgtctcatcccttcgatcgcgaactgtatttggcaggtctgcagactccggtattcttcggctcggcggtgaacaactttggtgtccagttgctgctcgacttcttcgtcacgcatgcgccggcacccaagccacgcgacgcatccctgaggaaggtttcgccagaggagccggctttcagtggcttcgtgttcaagatccaggccaatatggatccattgcatcgcgaccgcgtcgccttcctgcgcgtgtgctccggcagctatcagcacggcatcaaggcactccatgtccgcacgggcaaggagatgcggcttggcgatgccttgacgttcatggcgtccgagcgtgagttggccgagcacgcctacccgggcgacgtcattggcattcataaccacggcacgatcgccatcgccgacacgttcaccgtcggcgatccgttgcagttcaccggcataccgagctttgcccccgagctgttccggcgcatccgcctgcgggacccgttgcgtctcaagcatttgcaaaagggtctgacccagttgtctgaagagggagccacgcagtttttccggccactgttgtccaacgacctgatcctcggggcaatcggaaccctgcagttcgaggtggtggcctatcggttaaaggacgagtacggcgtggaagcgagtttcgaaccggtccagatccacactgcgcgctggatccaggctgagagcgattccgatctcgaagagttccgtgagaaggcggcaacccatcttgcgctcgatgcttccggagccctggtctacctggcacccagtcgcgtcaacctgcagatggcgcaggaacgtgcaccgaagatttgcttcacagccacacgcgagcactcccaagccgtgggtcgcgcggactag

SEQ ID NO: 511948 - DNA, 543 bp, Stenotrophomonas maltophilia
atgcccattgagtacccccaacgccaggatcgtgcctcggcagcggcgaaaggcagattggggagcacgcagtcggactcctggcgcttcgcgctgttctgccttggaatctacatagggtgctggctgcttgccgcagtcgaaccctaccaccggcgcgactggttgctggagaatctgctggtattcatcgccattccctacgttgtcttccagcagtggaagcgcccgttccggcccgcaaccaatgtctcgcttctgctttttctgtgcctgcatgccgtgggcgctcattttacgtactcggaagtcccttacgacgcttgggcgcagaaacttgcgggctacaggatcaccgacctgttcggctgggatcgcaaccatttcgacagactcgttcacctcgcctacggcgtattggtctttcccgcggcgagagagctctacgcaaggcgtgctgtggccagcgagctgacgctgaccctgattgaaggtcggcagggattcgtgagaaaaacagccgaatcgtctctaacaccatga

SEQ ID NO: 511949 - DNA, 840 bp, Stenotrophomonas maltophilia
atgttgaaggatattcttgtgcctttgtcagactcatcagcagatgacgcggccatccgcttcgccgtcgagatcggcaggtcgcaggacgcgcgggtgcgcatcatcgaaacggtcgacctgcctccgccggcgatcgggactgctgatccgacgccccgcgcatcgttcctggctgcccaggacgcatgtcggcgggaggcctcggaaagagcctcaaggatcagggccagaatcgcagagcaccctggtgtttccgtagaagttcacgaagcgggcattgaatctcctgcagagctcgccgctcgactggccttctctgcggatctggccattgtcgggggctggtcaggattcgccaaggccgacccagcgggcgtggccctgttcaatgcgctgctttttgacgcgggaaggcccgttgtggtggtgccgccgcattggcgggcaagcgaccactcgtgtgcgattgtgggttggaaagacaccccaaacgcatgccgcgccctgcacagcgcgatcccattgctacagcaggtgcagactgtccttctggtggagatatgcagccattcggacgagatggagggtgctgctggcactgtcacagcttccctcattgaacacctccggagctggggcatcgccgcatcggccacccggctgcttgccagacaccgccgttccagcgaggtcctgctcgatcacgcccgcgcgaccaaggcgacgttgatcgtggttggcggatacggacactcccgcctgcgcgagcggaccatcggagggatgacgatggagctattgcagggggcgaccattccggtcctttatgcccattga

SEQ ID NO: 511950 - DNA, 723 bp, Stenotrophomonas maltophilia
atgcagctggcagcagcgcttgtcggcgcccgtggcgggcacatcacgctggtgcagccagtggaatctcccttgcccgacgttgcacgcgccgaagtcccgcccagagtcgccacgctcttgcgccgggttgcgcagtggagcgttccgcatgacatccagatcgaggacgggcgcgcggaacgtcctgtggacgcgattgccctgcgcgcacagggtttcgaccaggtgataatggcgtgcgccggacatgaccacgccgagcgcaggctgcaacatgctcagttctcttcactggttagccgatccggacgccccatcctggcattgccagggagaacccgtttcgacggaatcttcaagcgggccgtcatcggctggagtgcaacccccgaatccgctcgcgcggcacatgatttcctgagattggatttcgcgtgtgcccttgtggttaccaccgtggacggaagtgaccgggtcaatgaacatgctcaggcgttcatcaacagtctgatgcggcaggggcgagaagcgatatttactcccgtgtcgtcagatggggggagcgtggctgaagcgctactgggccacgcatttgatagccaggcggatctactcgtctgcggcgcctatggccattcgcgcgcgcgcgaatggctgctggggggaacgacgagggagctcttcgagcgcaccctcacgcccctgttcctgtcacgttga

SEQ ID NO: 511951 - DNA, 1149 bp, Stenotrophomonas maltophilia
atggcggcggcccacacgcgctttgggggcagtgttgtgcttgcgctggtcgcgatctcaggcgggttgggagcgctgctgggaggcgcggcgctggtagctggcgcagtgctgctgggcctggcagtctgccctcgcccacgacactcccaggcagccgcggccagtctgattgtgctgcctgccctgtatctggtaggcgccattgcggtaagcgcacctgcaacggcgatcctcgccggcagtgccatcctggtgatactggttgggggccctgccctgatacggaaggtgaatgcgaaggtttccagccgtgagcttcgggacgtcgcaacggtgctggttgctggctttctgattcttcccttgcttccagaccgcaccgtcgacccttgggaagtcatcaacccgagtcggctcggcacactcatcgtggcgctgatggcagtcagcgtcggagcgcacctggcgctacgccatctggggccccggtcggccttggccttgaccggcttcgccggtgggtttgtctccagtaccgccaccatcgcggcaatggcggacggggcgcggtcgtcgccccggctggcgcctgcattcgcaggagcagccttgctttccaacgtggccatgattctgcagttgggcctggtaatgggcacgctggcacctgcattactcgcctacagcatggtcccgctggtctgctcggcaatcgtggccatggggatagcattggcattcggatggcggtccttgctcagtacctcagcggtgtccgggctggccatcgtgcggccattcaaaccgttggcgatcgtggtttttgttgggctgatcgtcattctgcttctggcagcaagtctgctgcgagactggctgggtgacgagagcctgccctggactctgggcatctccggcattgccgacgtacatgctgccaccgcctctgccgcccagatggttggtgcggagcggatcagcaacggtatcgcgatacaggcgatcaccatcgcactcgcgaccaactcattgctgaaatgcttgatcgccgcggcaaggggcggatggcgcttctctgctccgttgttgatcgggaccagcctgatcgtcggaacgttcgctgtggccgccgggcgtagcgggtga

SEQ ID NO: 511952 - DNA, 828 bp, Stenotrophomonas maltophilia
atgtactgcgacattctgctgcccttcgtcttggggcgcctgcacgagcaggcgttgggtctggccacggcgctttcgcgtgagcaggggagccgtctggtagctctggctggggccagtgtagttgtgccggtagcgacgggttggatgtactaccctgccgtctacaccgctctgcacgagccggccaaggaaacggtcaggatgcttgccacgtcgctggaggagcggctggcgggcgcaggggtagattggctcgtgtccgcgaacgagagggtgtgggaggggcctgtggatcaggtgatgcctcagtcacgatgcgttgacctgaccatcttggggttgcatcgcgatgaccccggcattgaggacacgcttgtctcctcgttgctggtggaatcgggcgtgccgctgctgctcgtgccaccggaagcacgcgatgcggtgccgcgtgacgttgtaattgcatggaaaagcacgagggaatccattcgcgcggtccatgatgccttgccgttgcttgtcgctgcacagcgtgtacacctgttgtctatcgatgccggtcccggcgaacccagcagggagaaagacgcgactctgcgcctggtgactcatctacagcgccacggcgtctcagcctcgcctgtgcaccgcggctatgaggaaggtggagcaggaccggccatactgaacttcgtgaaggagagcggcgccgattgcattgtcgccggcggctacggcagatcccgtgcctcggaattcctgtttggcggcgttacccgcacactgatccggcacagtccgataccagtatttctcgcccactga

SEQ ID NO: 511953 - DNA, 1401 bp, Stenotrophomonas maltophilia
atgtacgtgaacaatccgcctcacgatgcaacccgcctcagtgtctcgttcctgggcggcacggatactgtcaccggctcacgctacctgatagaggccggtggcgcccgcgtcatggtggattgcgggctcttccagggatacaaaccgctgcgattgcggaactggctaccgtttccggtggatcccgcatccattgatgcggtggtgctcacccacgcgcacctggatcacagcggatatctgccacgactgatgaagcagggattccatggatccgtgtggtgcacaccggccacccgggatctatgcaggatacttctccccgacgccgcgcgcctgctggaggaggaggcgcgccacgccaatcagcgtggcagctcgaaacaccatccggccgagccgctctacaccgaggaggatgcgcaacggtgcctggatctaatgcgcgtcgtctacttttccgatccctttgaaccggtgcctggcgtaacggctacgtttcgcaaacagggacacatccttggcgccgcatcggtatcgctgatccatcggggcaggcgcatcacgttcagtggtgatgtcggtcgttcgaacgatccggtgatgcgccctccctgggcgctgccggcatcggattgggtcgtggtcgaatcgacatacggcaatcggcgccatccgacgacgtctttgacggacctgcttatcgagccgatccggcgcaccctcgggcggggtggagtggtgatgataccggcgttcgcggtggggcgcgcccagctcttgttgcacgtgatcgccaccctgcaggcggaagggcggattccgcgcgccccgatctacttgaacagccccatggcaaaggacgtcaccttgctctatgggaaatacagaaacgaacatctgctggatgacgccgcactggagcggttgcacgcggcaacccggctcgtcaatagcatcgaggaatccaaggctctcaaccttcggcaaggccctatgatcatcgtcgcgggtagtggaatgctgaccgggggacgcattcttcatcatctcatcgcctttggcccggattgtcgcaacatgatccttttgccaggcttccaggcagggggaacgcgcggggcggcattggtgcgcggtgacaagttactgcgaatctatggtcaggacgtgccgatacgtgccgaggtggtacaggtggaagcagcttctgcccacgccgacgccgatgaacttctaagctggctgcgcacggcacagacgactccgcggcgggttttcatcacacacggagagccagacgctgccgacgctcagaggttagccattgagcggcagctgcattggtctgcatgcatccccgagtacttacagcacattgatctcgacccgggctga

SEQ ID NO: 511954 - DNA, 432 bp, Stenotrophomonas maltophilia
atgaacgctgcagcttccccctctatcgcatcaaagcttgccgccgtcgcgggcttggcggtaggccttggtctctattttgcaattgggcagtgggttctcggggaggccgcgtcaacgctctcttggcgcgtgatgagcaaggtccaagtgcttattgtgttaggcgtagggttgctcgccgtactgcaggctctgcctgtcagcgaaaccctgggattggacgctacccgccgctggttcttgattgtgccgaacttcgttttcgcaggcgctgcgctgatagctggtcaatatctggcagccgagaccctcgacgaaagggttacggcggagcaggcaaagatggacaaacagcgctcagcagaactgagcgatttgcgacggctagagtccgctctgaagcgggttgaactcgcgtgcgctcgttga

SEQ ID NO: 511955 - DNA, 423 bp, Stenotrophomonas maltophilia
atgaagaaccagaagggcttcacccttatcgaactgatgatcgtcgtcgcgatcatcgccatcctggccgccatcgcactgcccgcctaccaggactacacctcgaagtcgaaggtcaccgctgcgctggccgacctggcctcgcacaagacccagttcgagatggtcgtcagcgacggtggcaccccgtccgtggcgaattcgggcttccaggccgacaacactggcgcatgctcaaagatcgctgttgccgcgaccggcatgacctgcacgatccgcgagccgggccgtatcggtgatgcttccaccattgcgctgaactacgcagaagcctctggctcgggcgcaaccgctactgcaggtggctttacttgcgtcaccaccgacgtcaaggagaagttcaagccgaagggctgcagctga

SEQ ID NO: 511956 - DNA, 2103 bp, Stenotrophomonas maltophilia
atggccaccgccggcagcatcgtcatcgacctgttgatgaagacgggctccttcgagaccgacagcaagcgcgcagagcagcggatgaagcagctcagcaaggaagccgtggctgctggcacggccattggcactgcgttcgccggcgctgcaaccgcgctgacggcgatggtggccagctcgatcaacagcatggacgagctgtccaaggccgcactgcgctccggggcgagcacggaagagttctccaagatggcctatgcggcggggctggccgacgtgtccatggagggcctgcagggcagtttgggacggctcgccaaggcccagggtgatgccctgaagaccggcagcgaccaagccaggatattcgacgcgctgggcatcagcgtgcaggacgcgaccggcaggttgcgccctgctaccgacgtgctgaaggacttcgccgacgtcttcaagcggcagcaggcatcaccggagatcgtggcagccggcatgaaggtattcggcgagagcttccagacgctcatcccgctgttgaaggacggggctcaggggttgaagtccgcaggcgacgaggcccaggcattcggccaagtgatctccaccgaggccggcctgcaggcggaagcattcaacgacaacctgtcgcgcatgaagatgttcatcaccggcgtcggcaatgccgtagcggccgacctgctgcccgacctggagcgcctgacgaaccagtttgtggacagtgcgcgcagcggccaggcggtcgaagacaccgcgcagggcatcagcgacgtgatccgggtgatgggcagcgccatggaagtggcgatgaagccgattcaggcactggatgacctcatccaaggcctgaccatcggcatggtcgggttggcagaagcgggcaagggcgtcatcggcctggactgggaccggatcaagatcggctgggatgtcgccaacaacggtgctgacctcgcctattacggccgcgaccgggtgggcagagacggccgtggagcgacgccggccgtgccgaaggtcaactttatcgaccccgccgacctgctggctcaggacaagcaggctgtagagcagctgaggcaggcacgcgccgaggcagagcgcctgcgcaagctcgctttcggtgatgcgccaaagggcggcaagggcaccaagagccgcgctggcaccgtccgcgaagagcaggacgcggtgaccaagctgatggccgactatgacgccctgtacggcacgggcaacgagaaggccgccggtttcattgcgcagctcgagcgcgagattgccctgcacggcgatgtgagcgaggcggccagggtcagctacgacatccagaccggcgccttcgggcagctgagtgaggctcaggcggagctgctgcgcaacctggccgcggtgaaggacgcccaggacgactacgcagccctgtacggcgacggcatgcagaagatggcggacgatacccgctctgccaccgacggcatgcgcacggtcaccgaccaggcggtgcggaacatgcaggacgctttcgccgacttcctgttcgaccccttcgcggatggcctgggcggcatggtggagggcttcgcgaagactctccagaggatggctgcgcaggctgctgcgtcgcagatcttccagatgatcggcagctgggcgagcggctacagcggtgccggtgccagctggatcaatgcgatcggcggcgccatcagcggctccgctggcggccgcgcaggaggcggtcctgtggcagcgggcagcatgtaccgggtcggcgaaggcggccgccctgagctgttcgaccagggcggcaagacctacctgatccctggtgatgccggttcggttcgtccgatcactgccggcctgccagcatcctcgatgggttcgggcggtggcatcaccaaccagttcaacaccaccctcaacgtgaccagcgacggcagcagcagcacccagcagggcgacggcagcgaagacgcgcgacggatccagcagttcttcacccagatgatcaatcagtgggctgtgcagcagtcgcggcctggcggcatgttccaccagatgcgcaccggcagctga

SEQ ID NO: 511957 - DNA, 1368 bp, Stenotrophomonas maltophilia
gtggacgaagagcacaagaacattaagagtttcgcggcgcgccatggcattcccctggcatgcgtcgatggcctgctcgcgtaccgcgcccgtgccagcgcagcactgtcctcaagcccaagcctgcaggaatccgcccggtacctgctgaacgagaaattcggctcaaaggagagcgagatggacaacgacggttacagcatggtccatgctgcagtgaaggaagtgggcagcgacgtgaaggcctaccgagagaagacggcccaggaagttcaaaccctgcgtgacgacgtacagggaatgcgtgctgacctgcagagtactcagcaggtgttggccaagatcgacgccaatggtggtggcttcagcgcacaagctcccgatgtgggaagcgtcgccgcttcgaagctgcgagaggatgcgtccttcgctgccgcggcagagaccgcagagcgtggcatgaagcccagccagttttcggcccgcgtcaacgtggacagctccattcgtgcggcgctgaccaatgtgggcgtcggccaaaccggcgatacctcgatcccgaccaaccccgaccggcgtggcgtcgtgggtccggtgctggctccgctcagcctgctgagcgtgctgcccagccgcccgaccgatagcagctccgtggagttcgtccagctcaacgccaccggtgatgccgaagagcagatcaaggaaggcgacgagaaggcggagctggagttcagcggcgcgctgaggaaggcgaacatcgtcacgatcgcgggccacaccaccgcatccaagcaggtgcttgccgacgagccggccctgtcccagcagatcgaccgggtgattgcacacaaggtgttctcccgcctggagaaccagatcatcaatggccctggcggtgatggccgcatcaacggcctgctgaaccaggccacggcatttgcacccgccatcggcgagacaccagccgaccgcatcggcgaggctctggtcaccatggccaacgagggctacctgcccaacttggtggtgatgaatccgatggactggttccgcatccagctgacccgcaagaacgatcaggacgatgagtacgtgttcggctccccgaccatgccggtgccgccgtcactgtggaacagccgcatcgtgaccaaccccaatctggccgccggcactgccctggtgatcgataccagcttcgtcactgtgctggaccgcgagcagatgagcatcagcgctaccaacacgcacgctgactacttcatccgcaacctggtcaagatcctgggcgagctgcgcgccggcctggaagtgctggacgtgaaggccgtccgcaagttcacgctggcaccgacgggcccgtaa

SEQ ID NO: 511958 - DNA, 225 bp, Stenotrophomonas maltophilia
atgggcgccaggcagctcactgaagcgtgccatgcctgcgcaacatgcggctgtccggtggccatcgcagccaccggtcggcccaggcgctattgcagtaaccgctgcaagcagaaggcagtacgcaatcgccgcatcctgctggacgtgttgaccgagatcgaagcgatccgccttggcgtcgccatgatcgactggaccgacgaagatcaccgcgtcgcgtag

SEQ ID NO: 511959 - DNA, 237 bp, Stenotrophomonas maltophilia
gtgacgcgcttcgaactgcagacagcatggcagccgccggaccactggagcgccagcaccgcaatcaccgaatgtcaggtgcaccacgacgccggcaacgacgttcgcccgatctaccggcagtacgtgcaggctcggcgctggctagagcagcagcagaaccgcagcgcagccgatgatgcactgctggctgacgtgcgccgggttgtcgatgccatcggtaagctgctgtactga

SEQ ID NO: 511960 - DNA, 270 bp, Stenotrophomonas maltophilia
atgagcaacatcaacgaccgaatcgatcgcgcggcacgcgcattcaatgccgcagcttccgagcttgcagacgctctcctggccaaacttgccgaagatgcacccgaggccactgccaaggttgctgcagccctcgaaagcggcgagcgcatggtgctggccctggagatcaacccggcagcgccttgcatatggtggtcgaccatcgatgactaccagcacatgaagcgcatcatgaccatccccgccaccgggggtacgctgcagtga

SEQ ID NO: 511961 - DNA, 198 bp, Stenotrophomonas maltophilia
atgaccaacagatccttgctcgtcgcgctgacgaagcgcgcgctggccaagcagctgatgcgtgccggctccccgaagaaggaggctgaggctgctgcctcccgcttaccccaccgcctgcaatgggcaaagctcccacagcatgtgcaatccgaaattgcctggaaggccgccaccagcaggaaaacccaaagatga

SEQ ID NO: 511962 - DNA, 537 bp, Stenotrophomonas maltophilia
atgactgagcgagaggcccgcaaggacgagaggcggcgccagcggcttaccggtcgcggcagtcgcacctacgtccccgtggacccgcacgttcgcctgtacgcctgggaaatggaatgcccggcgtaccggacgttggacctgtgcgggcgtcagctgctgatcgagctgcgggccctctacaagccgagcaatggaaacgaggtgttcctcagtgtgcgggaagcgatgcgccggcttggtgtgacacagaggccggtgcagaacgccttcgccgctttgatcgaacgcggttggatcgaggaagtgaaggggggcaccttcgaccagaagaccggcgccggccgcgctcgatctttcctgttgacgaacaacgggccgggtggcgacgaggcaggcgccaagaagacgtacatgaggtggaggccatcccaagctccgtacggaaccgaatgccaaaaaaacgcggtagcgccagacgctacaccccgtagcgctgggcgctacacaaccaccgctgccgtaacgccaaattaa

SEQ ID NO: 511963 - DNA, 213 bp, Stenotrophomonas maltophilia
atgtcgagcaaacaccacgacacgaacgatctcttccccacacgtcaggccgtttctgaggccagagcggtcgcgcgcgcgtccagtgcggttccgatgatcgatgtgatgtaccgctccgcagtaggtgcgtgcatccccttcaccgtcctgccagcgcactacgtgggaaagaaggtgcgaatcgtgatcgcagatggcgcggatgactga

SEQ ID NO: 511964 - DNA, 258 bp, Stenotrophomonas maltophilia
gtgaagcgttcccagaagaagaagctgttccgatcgccgcctggcacgccgccaatcaagaccatgcgcgacacgctggcgatgatccaggccaccgacctggcggtgctggcctcgcatcctgtgggccggacgaacctggagcggatccacacgatggccgaggccaagattgccgagctgcgcgaaatgctgggcgttgccgagcagatcgaacgcgcgtacgccaaggcgctggcctcgaatctggaggcctga

SEQ ID NO: 511965 - DNA, 183 bp, Stenotrophomonas maltophilia
atgaacgccctcctgcgcgacgagctcgcccacctgctgcgtgagcacaccgagcccgactctaccctccgtgacgccgccagaggcgccctgcgcgccctggagtgggcctgtgccctgcggcccgacttcgcccccaaccgcgacgccctgcgcgctgcactgcatgaggtgaccccgtga

SEQ ID NO: 511966 - DNA, 201 bp, Stenotrophomonas maltophilia
atgagcaccgcggccaagtatcagcgccctgccggcgccaccaccgcgatcgagttcgccttcgttttcgttcgctgggcgcgtggtcgccagcgcccgttgcgcccgcgcgacctcgaagaccggttcggcatgagcagagccaccgcgtggcgctacctgcgtgcgtaccgcgatgcccagctggaggaccgcgcatga

SEQ ID NO: 511967 - DNA, 333 bp, Stenotrophomonas maltophilia
atgcgaaatactctacaccaatccgtcgtcggatccatcgggtattcccccgatgcctgttcagatgactctggcccgggcaagttctgggatggcgagggcgactatctgatcgctccgagcaccacctgccgcgctgccctcggcgacctgcgctggatcctggccggcacagagcaggttctcctgctgatgctggaagacgcgcgcgacggcgacatgcacctctacagcctgctcctgcagcaggtgcagatgggacgcaacctggtgcgcgaagccgaacggcttcaggacctgcaggaatgcactcttcagcaggtggcggcatga

SEQ ID NO: 511968 - DNA, 207 bp, Stenotrophomonas maltophilia
atgaaaccctcaccggaacgtctcagctacaacgttgaagaggccctcgcagccaccgggctcaatcgaaatgcgttctatcgggcgatcaacaccgccgagatcaagaccttcaaggtcggtcgccgacgcatggtctctgcctctgcgctgcgggatttcatcgccgccaaggaacgtgaagccaccagcgacgccgccgcgtaa

SEQ ID NO: 511969 - DNA, 621 bp, Stenotrophomonas maltophilia
atggcaacgaccaagaaacccgcaaagaaggcgcctggcaggccgcgtaaagcgcctgaggacaagctcgaacagttcagcgtgcgattgccgccaaagctgaaattcgggctggaattgctggcgcgcgctcagcaccgatcactcagtcaagcagtggagtgggcggtccaggtcggtctgaactcattcgacgtcgacaacgagaagacgccgctcggaacgctgttgagtgaggtgtggggggaggattcgccggagcagaggctactggcgatttaccatcgtgcccctacgctgctcacgttcgaagagcgctcggtttgcgagcttctatgcaatagcaatgatctgcaggagctccacagggaagcgaatagcaagtaccaagcgagtgatcgttcggttccaggtgccttcgaggagcaagccgaggaatggtactggcgggtagtgatgccgcattgggcgagaatccaagaggttgccacgaactgggcaaactcaggaaaggccctgcagggcgtttcgattgcggcgatcttgggattctttaagcggccggagtaccggggtttgccgttgatggaaatctacgagcgcgaggccggtgtcgcctga

SEQ ID NO: 511970 - DNA, 1227 bp, Stenotrophomonas maltophilia
atgaagtcgaagatcacccaggccctcgtcgagagggcttccgtccccgataagggcaagtccactctatacgccgacaccgagatgcgcgggttctacctgatcgtcaccccgacgaagcgcagcttctacgttcagtccctcgtcaacggcaagcaggtccgcacgaagctcggagaccacccggcgctcgacgccaagcaggcccgcgacctcgcccgctccgtcctcgtcgggatgcgcggcggcaccaacccgaacgaggagcggcgcaaggccagggcccggggcatcaccctgcggcaggcccttgacctgcacctcgccgccaagccgctgtccgcgcgcacgaaggacgactaccgctacaactgcgagcagtacctcgccgactggctcgaccggacgctcgacgagctcggctcggaccgttcggccgtgcgcgagcgccaccgcaagatcaccgagaagcacggagccccgtcggcagacaacgtcttccgcatcttccgcgccgtctacaaccgcggcctgcgggagcaccccgacctgccgccgaacccctgcgcgaacgtggactaccacgggctccggcgccgcaaggtcgatgtgggcggcgagcggctgcgcgagtggggcgaggcggtgctcagcttgcatcccgtccgccgcgacctgcacctgttcatgatcctgacgggcatgcggcgcacctccgcctgcgaggcccgcatcgccgacctgagcctcgacgacctgcggttgcacgtccccaagcccaagggcggttcagcccgcgccttcgacctcccgctgtccgggccgctcgccgacctgctcggccaccgcctgcgcgaggcgccccgccttcagcgcaagacgcagtggctgttccccgccgacagcgagagcgggcacgtggccgaggtggctcagcacgagctggacgggctcacggggcacgccctgcggcacacctacgccacgctggcattgcaggcgggcgtgcccatcgccgagctgaagttcctgctgaaccacgcggcgggcaacgtgacgatgggctacttgaaccccacgctcaatcacctgcgcggataccaggacaaggccagcgcctatgtactcgatgccttggggctcgaatggacggagggcgagtggcctccgcgcctcgtaaccatgcaggaggaggccgagtcaatcaacgaatgcgagacagcgtag

SEQ ID NO: 511971 - DNA, 459 bp, Stenotrophomonas maltophilia
atgaacgcaaccaacacccccgccatcgagacgctggctacttccatgtctgaagtctgcattggacttgaacgcatggtctgctacaacgaagacgcttccatcattctgatccgcgcacttcaacgcgatacccttcccacggctgaagagcttgcggaagaatgggccatcgaactcgacaccgagcccaatcgcgaaatgattgagctgttcctgcgcctgcatcgccagttcggtgacgagtggtacatcacctgcgcgcactaccggatgcgggaggtgaatgcagactgccgtggcgacgagaccgctgaagagtgcccgctgtatggcgatgacatcgaggaggttcgtgagatgtgggcggatcgcttcagtgcatttgatgacaagcgcgaagacgaagaagacgcagcaaaggcttggctcaagcgccagcagaagaaggctgcctga

SEQ ID NO: 511972 - DNA, 513 bp, Stenotrophomonas maltophilia
atgaagctggaagagatgagcatgaaggacctgctggccctgcacaacaggatcgccgacaagcaggcgggaccaaagacgttcgcgacccgaggcaagctggtcgcgcggatcgaggcgatcgcggccgacaagaacatcgacctcgccccgttcgggcgaccgcagcagcccgaggcggccgtgccgagcacacagccgcaggccgaggctaccgaagcgccgaaggccgccgaagcgaagcagcgcggcaaaggcatcggggcgctcgcccggcaaatcctgatggacccggcaggctatccgcacgggctcatcgcagcgatggtgaacgcgcaggttgagggcgcgcaggctaccgacaagtcggtccgctggtacgccaacgacatgcgcaagaagggcatcgaggtcccgacccggcagaagtctcaccccgccgacatggacgccgagcagtcggcggaggcgatggagaccgtgcgggtggtcgaacgtgccgccgaagactga

SEQ ID NO: 511973 - DNA, 282 bp, Stenotrophomonas maltophilia
atggcgacgactaagctccccgtctatccgccggaccacccggtagccctggcactgcacgcgatgttcagtgtcctagccaccggggacaacctgcttgagaccctggccgagactgcggagcgcgctggcgttcccttcggctcggagcgcttcgacgaggccgccgcgatggcgggcgtaccgtactgccgctccctcgacctctacctcgaccggcagacccagcgtgacgttgaagcgctgccgttccatcttgcccacatggcgctgatgccctga
